United States Patent Application Publication US 2019/0348154 A1 - sequence listing, part 59

SEQ ID NO: 219135 - DNA, 483 bp, Klebsiella pneumoniae
atgatggcactgaccccggaacaaattcactacctcaaccaatatgcaccaggcgaagctgtgtcacatgcattatccgagctactattcattgatcatgatcttctcggtatcgatgctaacgaacggtcgattacctttcgctttgcgatgtacctccaacaatgtttccccggttggactgtagattgcgaatacaaccgggacagcattgaccctaaacggctcagacatttggaactttatccagacagcgaagacgttgaggcaaagacagtatttcctgatgtgatcgtgcatcggcgaggtacacgacagaatcatttggtcttggagttcaaaaaatcaacgagtcgcgtagatagagagatcgatctactaaaacttcgaggttataagcagcagcttggttacgagcacgctctgtttgtggaggtcggcaccgaagggcaatcgatcatcacggcgctcgagtgggtctga

SEQ ID NO: 219136 - DNA, 675 bp, Klebsiella pneumoniae
atgacaaagtggaaacgtctgtttaatgcgctcgcaggtgcgcagaaccagtatcaggtcggcaaccatcttattatgttcattaaccgtgcgatgaacccggttaattatgcccgtgatccatcggtgtttgcctggcgacgtgatgaactcaatgttgtcctggctttttccggtttttatatccgtgaggatggtaaggtcgcgagcgccgctaaagtaacgactctggattctgctcgagcccgcgccgggcgacttaaggctgcactcgaaagccgtgctgtgcatgcggaagttttgaactattgccgtgccgaacttcttgacgaaaactattttcatgccgtcttcgaggcgacgaagggggttgcggaacgtattcgtcagttgtccgggttgagcggtgatggtgctgacttggtgaacaaggcatttaccggacaacaacctgttctgactttgggatcgcttaccaccgactcagaaaagagcgaacagaaaggttttgcgaatctactgattggtctattcggcgctgtgcgcaatccactagcccatgcgcctaagaagaattggcccatgtctgaactggatgcgctggacatccttacgttggtttcgcttattcatcgcaagctggatggcacacacaaaaaaatagcctccccatag

SEQ ID NO: 219137 - DNA, 180 bp, Klebsiella pneumoniae; identical to SEQ ID NO: 187079

SEQ ID NO: 219138 - DNA, 621 bp, Klebsiella pneumoniae
atgagctatgagactaatgtttttataaactgcccatttgacgatgcttacactgattttattgatgcagcattgtttgcagtttaccgttgtaattttaaacctcgatgcgcattggaaataaatgacgctggtgatcaacggctcgataaaataaatcgcataatcaaggattgtaaaattggaatccatgacatatctagaactgaattagatcacgtcaataatttgcctagatttaacatgccattggaactagggttatttcttggtgctaaaaaatttggctcgagtaaaaatcaaaaaagcaaactagcaattattgtcgacaatgaaaaatatcgatatcaaaaatatatttcagatatttcaggacaagacattatgtcacatgacaatagccctgaaaaattcataaaaatcataagggactgtttatcctcatacagaatcgttcagagaatcccatctgcagcaataattattgaagactaccgtagattcttaggaattaagccagcgctgtgtgctcaactacaactagttgagcatgagcttacttttaatgataaaaccagcattattgaatgttacatagagttttatgcagcagcagcataa

SEQ ID NO: 219139 - DNA, 360 bp, Klebsiella pneumoniae
atggacgcactggccacaggtcgcaggatcaagtgcctgacctgcgtggatgatttcacaaaggaatgcctgacggtcactgttgccttcgggatttcaggcgtgcaggtcacgcgtattctggacagcattgcgctgtttcgcggctatccggctacgataagaaccgatcagggcccggagtttacctgccgcgcactcgatcagtgggcttttgagcatggtgtggagctgcgacttatccagcccggcaagccaacgcagaacggatttattgagagttttaacggacgctttcgtgatgaatgcctgaggaaggtgcgaataagcaggtcatttcttcccaagctgactcgctga

SEQ ID NO: 219140 - DNA, 399 bp, Klebsiella pneumoniae
atgaagaagcgtttttccgacgaacagatcatatgtattctccgcgaggccgaagccggcgtttctgcccgtgagctctgccgtaagcacgccatttccgacgccaccttttacacatggcgtaagaagtatggcggtatggaggtgcctgaggttaagcgcctgaagtcgcttgaggaagagaacgccagactcaagaagctgcttgctgaagccgggcgtggtgaatactgtggcttttcagatttggctttcaggtggctgcggacagtattgcgtgaaatacccagttccctggcgatggcccggatactcattccccgcttgtgcaggactttaatttccatacgaatctcaaaagtgatcataagctcccctgtattcagaggagcagattaa

SEQ ID NO: 219141 - DNA, 1038 bp, Klebsiella pneumoniae
atgcccactatccaccagacaggcggctatcgtcctcccgtgcgaaaacggcaccgattagcgctttcgcttgatgaaagagaggagatatccagagggctggtagcaaaactcagtatcagggatatcgccgccaaattatcaagagcgccctcaacgattagccgcgaggtcaggaggcacggtggtgcaaaacaataccgtgcagcaaaagccgatgctactgcgtgggaaaatgcactgagaccaaaaccttgcaagctaattgaaagccccgcattgtgtaaaatcattgcagagaagatgcatcaggactggtcgccggaacagatcgccggttggctgaaacgctgttatccggataatcaggaaatgcatgtgtcacacgaaacgatttataaaacgctttttatacaaacccggggagcattaaaaaaagagctgcagcaatgcctcagaagcggaagagcagtgcgtagatccagaacgtcatcgcttaaagggaaaggattagggtcaatcccgaacacgatacctatcagcgaaaggccaccagaggcggctgacagagccatcccaggtcactgggaaggtgacttgattcagggctcgaaaaactcctatatcatcaccctcgtagaacgtcattctcgttttgttatgctggcgaagatcagagacaacaagaccataacggttatatctgcactcatcagacaagcccgggaattacctgctgagctttataaaacattaacttgggatcgtggcgctgaaatgaccagccacacacgatttactatagcgacagacattcagatttatttttgtgatcctcaatctccctggcaacgtggctcaaatgaaaatacgaacagattgctcagacaatattttccaaaaggaactgacttatcggttcacagccagcaaagacttaacagtgttgccagacagctcaacgaaaggccgagaaaaacgctagactatgaatcacccgcagaacggttcaatcaatgtgttgcatccatcggttga

SEQ ID NO: 219142 - DNA, 324 bp, Klebsiella pneumoniae; identical to SEQ ID NO: 127396

SEQ ID NO: 219143 - DNA, 777 bp, Klebsiella pneumoniae
atgataaaattctatcaatatagatcagcagaaataacaaagataattttaaaagatagtactttgaaattcacaaaccctatggatttcaatgacccatttgattttcaccccacagttcctgatgtaggctttaacaagttcattaaaagagttaatgggcaatattcaaataaaagaaaaaaatatcgtcttgggcataaagaactaataacccacagaacaaaactacgttccgaggattttagacgggtatatactgaaaacttttcaattgcatgttttagtaagtctccatttatattaccaatgtgggcacactacgcagatgatcatcaaggctgcgtgattgagtttaagtttgaagaaaccgaagggtttattgaggagtttataaacttaaagccagaagaagatactactacacttataccattagatgtaatttattcaaacaatagaccatctcttttttataatgatggactaactaactcagataccacagggactaatgcttgcttggttaaagcaaaggtttgggaatacgaacaagaggttagagttataaaaaagaaaaaatctggcatttacagtttcgatagaaaacaaatgactggcatctactttggtatgaaaataaacaagcaagataaaaaaatcatctctcagttggtagatgactcaaataaatatactaataccaaaattaaaaagcatgatgttcaaattgcgttcaatacgtttgagctttttaaaattccttttagcgtctaa

SEQ ID NO: 219144 - DNA, 846 bp, Klebsiella pneumoniae
atgacagacaatagtagaccccttctgtggcgtcagccgctacaggcaattcaggatggggtgctgaattctgttggatatccagcgaccttacgtcgtcggatcgacaatggtgctctggaaataaaaaaaccacagcggctggacactatctggttgcgttcaattgtcagctggcacagatggttcggccgtgataaaaacactattcgctccctgcgacccggccatgatggtaattatgaatacctgcaacgccatatcccgcagctggccgacctggtaatctgcgagattacagaaaattatcggtgcgatatctccagtatcggggggctgagctcgtcgggagatgatgatctgaaaatatctcacctggatgattttgcattacaacgatgttctgaaatgacaataccggtcagttccgaacagctggcgcgaaatctcagtcactacacagcacggctgtcgaagatggtgttcagccagttttcctgggcaccggaacggctttactggaacaatgtcgatactgttcataattttgtagcagcccgttatcaggctattcagctgggtcagccggtttctctgactggccagctgaattcctatactgtaaatccgcagaaaatacaacaactgacagcggagtgggatttatatctgctgcctgacgcagaaatttatggcctattcagggatgcgcttttgcgggtgaaatccccgttcggcatatcaaatccgccctgctgggaaaacgtcgaccagcattattttcaggccatctggctggagcggaaccatcctgtaccagctcgcgtatcgcgtatgctggtgtaa

SEQ ID NO: 219145 - DNA, 735 bp, Klebsiella pneumoniae
atgcgtatgattcataagtacaaccttgcttctacagagtcgccatccaatcggacacgagcggatgacgtttacgaaaagattaaaaacgaaatctccgagttcagactaatccctggcgatcattttactgaaagtgaaatcagcaagcgttttaacgtcagtcgaacacctgtgcgacaagcattgtttcgtttgcaatctgaaggttatgttcaggtgcaatttcgggctggctggcgagtacagccattcgattttgatatcttcgaacaactctacgatctacgtatggtccttgaggtggcagcagtacgccggttgtgtgatcaggatcggcgagtggatctggcacgcctatcctcacttcagcaaatatggctcgtgccagcctcggaacgatgtacggacgggttacaggttgccagctgggatgaacagtttcataccacacttgtcgaagcttcaggcaataatgaaatggctcgtatgcataaagatgtaacagcacgtatcaggatcatccgaagactcgacttcaccaaaacagatcgtatcaccacgacatacaccgaacattctgaaattttacgtgaaattctacgaggcaaaagcgaagaggctattttgctactatgtgctcatattgaagccagtcaaaaagaagtgcaaaaaattactttgcatcagattcaattagctcgcaaacaagggctgggtttggtcgaaacttga

SEQ ID NO: 219146 - DNA, 933 bp, Klebsiella pneumoniae
atgtttttacgcagactcatgattttctctttaactgcttcattattttgtacggtgatgcctgttcaggccgcagacactatcatcagagtagggaccctcaaacttattcacggcataactccatatttctacgataaattcacccccaaaggatataaggtcgaggttgtgccatttgaaacccctacagatggtaaaaacgccgtagtgacacattcagttgattttggtggctatggtctggctgctgccgttctggggggcgctgcaggtgagcctgtggttgttatttctccgatgagtaatggtggcatgggtctggtggtcagcaataagtccgggatcagtagtttcaaagatctcaaaaacaaacgtataggtatccttaccggttcaactcaggaaacggtgtttctcgaacgcctgaaatctgagggcatgaccattaaagatgtgaaaccgatccgtgtgtcattcagcgaaatggccggtgctcttgaacgtggtgatattgatgcctacgtaggagccgaacccggtccctccattagcgtatcacgtggtataggcaaagtactggaatacccctacagcacttctgtgggctccgtgaatatggtcatgaccacacatgctgacacccttaaaaacaaccctgaattcgtcaaagtatttttggaaatacatcgcaaggcatctgaatatgcaatggctaatcgtaaagagttgctggagatggctaatacaaaactgggcctaccagaggatgtggccagccttgcagcagacaatgtcaaatttgtctggagagccgatgatgaatggctacagcattgtaaaaactacggctccctgatgcttgaacgtaagcagatacgccgcctgcccgaaaatgatagtttcttagtcacaaacctggggccacattga

SEQ ID NO: 219147 - DNA, 954 bp, Klebsiella pneumoniae
atggccacaccaatactgaaaattcccggttcatctggcgatgacacagcctatgagaccagttcagcagcaactcctcctcattatcaggcagctttgacacacaaagctgaggagatgacgaaattagagcaggatcaggatctgatgccttcaccgcccagtcgggttaaagaatggcttgtgcgctgggtggcaccggtgctcctgccgttgattctactgtttttatgggattttgccgtgcgactaagtggcaccatgctcgttccatcccccgcaaatgtggctctaatgctcaaggattttgctgtaggtggtgtatacgacgatgcattcagtggcactctttatattcactggattaaatctatgtcgcgtgtatatggcgcttttgctttggcggtgttgttggccattccaactggtcttcttatcggaaagaatgcgctggttcgccggcttgttgatcctactttgcaattgttgcgtccggttccggtgacggcctggttaccgttgtccatgatcttttttggtgtggggccgaatgcagccatttttcttgtttgcctgggggcatttttccccattgctattaacacagctttcggagtgaagtccgtagagccacgcctgttcgaagcggcagcaatgttgggatgtaaaggaccatctatgttccgtcaggttgtattgcctgcagcaatgccatcaattttcaatggattacgcatggggcatgctatcgcctggttcttgattgttgttggagaaatgaccggagtacctgaaggactgggtgcggccattatggatggccggatgctttcacgcaccgatgtggttatcgcgggtatggtagtcatcggtctcacaggttttatcaccgatcgccttttggtaacactcaataatcgtttactcaaatggagtccacaacacaatgcctga

SEQ ID NO: 219148 - DNA, 813 bp, Klebsiella pneumoniae
atgcctgacactatcacagcctttgccaccccttctcaaaaagggatgcccatcctcgatatcgcaggtgtaagcaaagtcttcagcctgaatggtcgtcctattcatgctctgaaagacgtgaatctgcagatttggaagggagagttcatctgtttgattggcgcctcgggttgcggcaagtccacactgttacgcattatggggggattcgaatccgtatcctcaggtatggcgcgtatgtatcgcaccccgattaccgaacctgcatcagagcggggtatggttttccaggattatggattattcccctggttgacagtgcggcaaaacattgctttcggccctaagcagcgtggactatccaaagccatgctacgtgagattaccgatcgttatttgaatatggtcggtctcacaaaatttgcagatcactttccaggccaactctccggcggcatgaaacaacgagtttccattgcacgggcattagccaatgattgcgaggtcttgcttatggacgaaccctttggtgcccttgatgcgttaacccgggacgccctgcagcaggaactacttgaaatttgggaacggacccgacttaccgtggtatttgttactcatgctgtagaggaggctgtcttgctggctgatcgcgtggtggtaatgacggccggtcctggacgggtagaaacagatttttgtgtgccactcgacagacctcgttgcattactgcgccggagtttaacgacgtgcgtcagcagttaaccgagatgttaacaagccatgtggtacacaccaaagcagtgtga

SEQ ID NO: 219149 - DNA, 1815 bp, Klebsiella pneumoniae
atgaatttgacaattacacattctttaatgacatctaccgtactcgaacagcaggctccacttaatctggcatcattcaaacatgcatatgcatattgttctgatccaaaagatgttctgcgcgaaatttaccaccgcattgatatcgctggaacacatcctgtatggattagtctgcttccactaaatgtggccctcgacatgctagaacaagctatggcccgaaaagccagaggtgaggagcttccgttgtttggcatcccattcggagtgaaggataacattgacgtttttgggctgcctacaacggcgggttgccctgagttctcctatatgcctcagagccatgcctttgtcgtagaacagttgattgctgctggtgctattcctataggaaagactaatctggatcagtttgctactgggcttaatgggactcggtcgccttatgggatcccaacttgtgtgtttgatgagcgctacatatcgggtggctccagtagcgggtccgcggtagcagtgggcagtggttttgtaccattttcacttggcactgacacggcaggatctggccgggtaccggctgccttcaataatttggtaggtatcaaaccgacaaaaggtaccatatcaaccagaggactcgtccctgctgcgagaagtctggattgcatatccatatttgcgcacagtgtagatgatgcgctgactgttgcacgtatcgcttccgcctacgatgcggctgactcattctcacggcaggttcagtcatccacctggaccgaaaggaagtggccagcacgctttacctttggagtgccgtccgcatcacaactcaagttttttgatgacatgcaagctgaggggctcttcgaggaggctattcgtaagctggaaaagatgggggggcaatgtgtacgtttcgactatactccattccaggaaacggctgaactgctctatagcggcccttgggtggccgagcggcttgcggccatccaaagttttactgacgaacaccctggtgcgatccacccggtagtgcgggacataatcctgtcggcccaggacatgagcgcggctgacgcattccggggcagctaccgtctcagcgagctgaaccggcgcacacaggctctttggcagcagatcgatgtgatgttgctacccacagctccgacgatttataccgttgaagatatgttaaccgatcccgtgtgcttgaacagcaatctgggcttctacacgaatttcgtgaatttaatggatctctcagcaatagccgttccggctggctttcgtccagatgggctaccgttcggtattactttcatcggccaggcattcgaagatggtacgatcgcgagcctgggtaaagcatttatggccagggaccgggaggaatctccgtgggaggcattacaggaaagcgctatccgtatcgctgttgtgggagctcatttgtctggtcagccactgaatcaccagctgaccggccgcggtggaaccctgcatgcgacaacgaaaacatccgccggttatgcgctgtatgccattaatgattccaatcctccaaaacccggtttgctccgcgacaggaatgctgcagggtatatcgaagtcgagatctgggaactgtcagcaactgcatttggctattttgttgccgagatacctccccccctgggaataggcactctgacactggaagacggcagccaggccaaaggttttgtatgcgaaccttacgctattgaacatgcaaccgacattactcactacggaggctggagagcatatcttgccgatcaatag

SEQ ID NO: 219150 - DNA, 405 bp, Klebsiella pneumoniae
gtgcgactcttcgcagtgggtctcttcctggccttcgtcaatatgatcagcgatatcggcgccttccagttgattgccaaagcggcgctccaggttccaaaggagtttgttgtgtctgtcgcggcgctggtcggattcctcattgcgattccggcgggcgcatatgccgtcgccgtgatggggttgatcggcccagcgctgggcgcggcaggtttcaccccgctccagcttggctttgtgatgatggccatcggcatgggcacgcagatgagctggagccagctcaatgtggcctccctcagctatgggttcaaggtcagcatctcgcgcatcgtccgcatcaacgcgcctggcgtcatagccatggcgctattgcttgcaggccttgcatatatcttcggttaa

SEQ ID NO: 219151 - DNA, 1545 bp, Klebsiella pneumoniae
atgtcaatcgtcgtagaagttcgtcgtaacacttatcaggactcagtcaccctcatgcgcctgtccagcgatctcctcgctgaggacggtgtcaccaatgcgtcgatcatgatgggcaccgctggaaatatcgagatcatgcgcgagggcggacttgatgcccccgccctgaatgacgctagacctaccgatctggtcatcgccatcgtcgcagcctccgaggacgccgctcggacggcgatcgagaaggcaatcgccgcgctcaacaccgatgcatccactgccagcgatgggggtggcgcgcagaagcgggcaatctcatctgtaatgggggcggttgtcgaaggtgtgaacctgaccctcatctccgtgcctggcgagtacgccgccgccgaagccatgaaggcgctcaaggccggcatgcacgtccacctcttcagcgacaacgtttcggtggagaaggagatcgctctcaaggacgttgctataagcaaaggcttgcttatgatgggccctgattgtggtaccgccatcatcaatggcgttcccgtggggttcgccaatgcagtacgacgtggacgcatcggcgtgatcgccgcctcaggaacgggagctcaggaagtgacctcgctcatccatgaactcggctcgggcatctcgcaggccttcggtaccggtggtcgcgacctctcgagtgccgtcaaagggcgcatggcgcgcttcgcgttgaaagcgctgttggatgatgacatgaccgacgtgatcgtcttgatctccaaaccgcctgcccctgaggtagctgcctctattcttgatacagccaaggggacgtcgaagccaattgtcgtctgcttcctcggaggagactcgaagatggttcgcgaccacgggctgattccagcggaaacgctggaagacgctgcgcgtcaggcggtgcgcgccgaaacaggatccgatactggttcgcgctacgcgcctgcgccgaccctgccgaagctatcgaaagagcagaaatatgtccgaggactcttctccggaggaaccttctgctacgaagcgctcctcctccttcgtgaattcgtgggcgatgtctcgtccaatacacctatcaacaagcagatgaagctcaagaacaacaacatcagcaccgggcacgtctgcatcgacttcggtgaagatgagttcacggttggacggccccacccgatgctcgacttccggttccggaacgatcggatcgttcaggaagcgcgagatcccgagacagcagtcattttgctggatctggtactcggctacggcgcgaacgccaaccccgcaggtgctttgatgccagcaatccgaaaagcaatggaagtcgcccgtgctgaaggtcgcacgcttccaatcgtcgcatcggtctgtggaacgagtgacgatctccaggggctagaacaacaggaggccgcccttcgcgaggctggcgtcaccatcctctcaagcaatgcccaggcgagccgctttgccggaaaaatcgcccaagtcgcccagatcactcagaaataa

SEQ ID NO: 219152 - DNA, 1434 bp, Klebsiella pneumoniae
atgtcatcaatccgtgatctcatacagtccgatctaaaaatcgcgaacctcggactgccttcattccgtgacgatctcgaggccgcaggcgccagcgtcatatcgatcgactggtctccacccctctccggcgacgttgacgctggatggtcgctggcgaccatgatgtctggcgacgacatcggcgatgccatcgatgccgccaacaaggttgcacttgagcgtgtgctcggtgcggagcccatgtggcttgattgcctccccgccagagatgccctcgtgggcatgaccgaccgcaccattcttcactctggcccgccggtcgcatgggaagacatggcggggccgatgcagggagctatcatcggcgccatgctcttcgaggggcttgccccagacgacgtagccgcacgcaagatgtgcgagcaaggagccatcgagttctcgccgtgccatcacctcaacgcagtcggtcccatggccggtgtgatctctgcgtcgatgccggttctggttatcgaggatgccaacggcggcaatcgcgccttcagcaatctcaacgagggtctcggcaaggcgctgcggttcggagcgtacggagaggacgtgctctcccgtctcgcgtggatgcgggacgtgctgggtccggcgctctcggtcattgcccgcgcgcttggcggcgtcaacctcaagtccatcaccgcgcaagcgctgcagatgggcgatgagtgccacaaccggaatcaggcggccacatcacttctctttcgggagatcgtgcctgccctggtccgaagtgacttcccgaaggatcagatccccgatgtgctggattttatcgccggcaacaaccatttctacctgaacttctcgatggctgcggcaaaggtcgcactcatggcgggatccaacgtcccgaacagcagcctggtcactgtcatggccaggaatggcgtcgagttcggcatccagatgagcggtaccggcaaccagtggttcaccggtacggcccagatggtgaaggggctctacttccccggattcggcgaagacgatgccgcccccgatcttggcgacagcgccattacggaaaccatgggcatcggtggattcgccatggcggcagcgccgggcatcgtgcagtttgtcgggggaaccccagagacagccaagcaatacacccgggagatgtacgagatcacgctgggacgaaatcccacatactcactcccgccgcttggattcatcggcacaccaaccgggatcgatgttcggcttgtcgccgacaagaacatcctgccgctcatcaatacaggcatcgcccacaaggatgccggggttggccaaatcggtgccggccttgtctctccaccgatcgagtgctttgcgtccgctttggccgcactcgccgatcagtttgtttccgcgaaatag

SEQ ID NO: 219153 - DNA, 1113 bp, Klebsiella pneumoniae
atgcaagcgcaagtttttcgagttccaatgagtaatccagccgatgttagtggcgtagccaagctcatcgatgagggagtgatccgtgccgaagaggtcgtctgcgttctcggcaagaccgaaggcaacggctgtgtcaatgacttcacgcgtggctacaccaccctcgcgttcaaggtctacttctccgagaaactgggcgtgtcccggcaagaggtcggcgagcgcatcgctttcatcatgtccggcggtaccgaaggcgtcatggcgcctcactgcaccatcttcaccgtgcagaagacggacaacaagcagaagaccgccgctgaaggcaagcgacttgccgttcagcagatctttacccgcgagttcctgccggaggagatcggccgcatgccgcaggtcacggaaacagccgacgctgttcgccgcgccatgcgcgaagccggcatcgcggatgcatccgatgtccacttcgttcaggtcaagtgcccactgctcactgccggccgcatgcatgacgctgtcgagcgcgggcatacggttgccaccgaagatacctatgagtccatgggctactcccgcggcgcatccgcgcttggtatcgccctggccctcggggaagtcgagaaggccaacctcagtgatgaagttattaccgcagactacagtctctactcctcggttgcctcaacttcggcgggtatcgagttgatgaacaacgagatcatcgtcatgggcaacagccgcgcatggggtggtgacctcgtcatcggccacgccgagatgaaggacgccatcgacggtgcagcggtccggcaggccctgcgcgacgtcgggtgctgcgagaacgacctgccgaccgtcgacgagctcggccgcgtggtcaatgtatttgccaaggctgaagcctccccggacggtgaggttcgtaaccgccgccacacgatgctggacgattcggacattaacagcacgcgccatgcgcgagcggtcgtcaatgcagttatcgcttcgatcgtgggagatcccatggtttatgtctccggcggctccgagcatcagggccccgccggtggcggtcccgttgcagttatcgcgcgcacagcttaa

SEQ ID NO: 219154 - DNA, 945 bp, Klebsiella pneumoniae
atgtcaaaacttgccgtcgttgcaatcggtggaaatgcgcttctcattgagggccaaaagggcactattgcggagcaaatagagaacgcgctggacatggcccgtcagctagccaaaatgatcaagcttgggtggcgtgtcatcgtcacccacggaaacggaccacaggtcggtttcattgtgctccggtcggaccgcagcgccgatgttcttcccaggttgccgcttgatatctgtgtcgcagacagccagggcggtatcggctacatcgtcgtcgacgccctgcaaacggcgatgactgagcttgggttggacgccacggctactgcggtgctcacccgctgtgtcgtggatacggccgaccccgctttcgagaacccaaccaagcccatcggaccgtttatgtcacagcacgaagctgaacagcatcgcgacgaggatggctggcacatcgttgaggatgccggacgcggctaccgccgtgttgtcccctcgcccaagccaacgaaggtgctggagttgaatgcgatcaagaccctcgtttcggccgggcatctcgtcgtcgcagccggcggtggcggaatcccggtggccgagatcggggatggtttttacaagggtgttgaggccgtgatcgacaaggaccttacgtccgctctgttggcaagggagcttggcgccgatcttcttctgatctccaccggcgtgcatcagatcagcatcaacttcaagaagccggaccagcgcgcccttgagcaaatgacgctcgcagaggctcggaagtacatggcggagggacagtttcctcctggcagcatgggccccaaggtggaagctgcgatgcgcttcctcgagggtggatccaggggcaaggttcttatcaccagtccggagtcggtcatcgacgcgttggacggcaagaccggcacctggatgatggcctaa

SEQ ID NO: 219155 - DNA, 1233 bp, Klebsiella pneumoniae
atggaaacccatagttatgtagacgtcgcaattcgtaacgcgcgtcttgccgatacggagggaattgtcgatattcttattcacgatgggcgcattgcgtccatcgtgaagtcgacaaaaacaaaaggatcggtggagatcgatgctcatgagggtctggtcacttccggcctggtagagcctcacatccatctcgataaggccctgacggcagatcgggttcccgcaggaagcattggcgaccttcgaacgcgacgaggccttgagatggcaattcgggccacccgtgatatcaagcgtacgttcacggttgaagatgttcgagaacgggccatacgtgcggccctgatggcatcccgtgcgggaaccaccgcattgcggacacacgtcgatgtcgacccgattgtcggcctcgcaggtatccgtggtgtccttgaggcgcgtgaagtctgcgcgggattgatcgatatccagatcgtcgccttccctcaggagggactcttctgctctgcgggggccgtggacctcatgcgggaggcgatcaaactgggcgcggatgccgtcggcggcgcacccgcgctggatgatcgcccgcaggaccatgtccgagccgtttttgaccttgctgctgagttcggcctgcccgtagacatgcacgtcgatgagtccgaccggcgggaagactttacgcttccctttgtgattgaagctgcccgtgaacggcgtgtgcccaatgtgaccgtcgcgcacatcagctcgctgtccgtacagacggatgacgtagcacggtcgaccattgccgcccttgcggacgccgatgttaatgtcgtggttaatccgatcattgtcaaaattacgcggctgagtgaattactcgatgccggagtctccgtaatgtttggctcggacaacctgcgggatccgttctatccgctcggagcggcgaatccccttggatcagccatttttgcctgtcaaattgccgcgctgggaacaccgcaagatctcagacgggtattcgatgcggtcaccatcaacgctgcccgcatgctgggattcccctcacttttaggcgtcgtggaaggggcagtcgcggatctcgcagtattcccatcggcgacgcccgaggaggttgttctggatcaacagtctccgctcttcgtactcaagggcggacgtgtcgttgccatgcgattggccgctggatcaacgtcgttccgcgactactcatga

SEQ ID NO: 219156 - DNA, 1029 bp, Klebsiella pneumoniae
atgcgaacgataaacttaaggtgctttccgcatggcggtcttgcggcacttgttgtcttgatggggcttttgatgacctcgagtggcgctttcgcgcaaaaatcggctgcatttcttttgccgggaagcatcaacgatcagagttggaattcggaaggcttcaaaagcaccgaaaggttcaaggagttgggttggaacgttacttactccgaaaacgttcaagctgcagatatggttgaaagtatgcgtcaatatgcccggaagggagttgatgttgtggttggacattcgggtcgctttctctcagcggctcagcgggtcgggccggagttcccgaaaacgctattcctaatcggatcaggagccaccggttcggggaagaatgttgcatcaattgagtacgacaacgcacagttcggctacctaatgggcgttcttgctgctcgcatgtccaagacaaacaagatcggtgctattagcggccttgaagggttacctaccgtgacggcgcaagttggcgccttccgaaagggcgcaataagtgtacgaccgaatatcgaagtaaaggttatctatctgcaaagcatggaagacccgacagctgcgaaggaagcggcgctatcgctgatcacgcgcggtgctgacgtagtttctggaaaactgaatgctggtcaagccgggctcatcaaagcggcgaaggaaagaggtgtttttgttacagggcgttcgctggggcacacacagattgcgccggaggctgtgctcgcaaatgtcgtcgaagaatggccggagatgtatgccgcagccgttcagcaaaacaagacagaaagtgttggcggcaagtatctgatttatggcttgggaagcagcggaacaaccggtgcacgtttacgctattcgaaagaactcgaattcaacccggcggttcccgcctcagtggttggcgaactggaaaagatcaaaaagcagttggcgtcaggccagctgaagatcaacgtaacacgccaagatgcacgcggtggaatctga

SEQ ID NO: 219157 - DNA, 1527 bp, Klebsiella pneumoniae
atgttggaaatgcgtggtatctgcaaggactacggttcgctacgcgcagcgcgcggcattgatgtcaaagttggacgaggacagattttgggcctactcggcgaaaatggcgctggcaaaagcacgctgatgaagattcttttcggcatcgtgcgaccagatgcaggaaagatctttttcaaagggcgtgagctgaccggacacacgccgaaggacgcgattgccgtcggcatcggcatgatccatcagcactttatgctggtcgacgcgatgacggtaactgaaaacgtcatgctagggtggaatgaattgggtcatccagtgcgcgctcagcaatgcgccaaactaatcgtggacgcaagtagaacttacgggttggaggtcgatcctgacgcgaaggtcgggcaacttagttacggcagccgacagcgagtagagattgtgaagtcgattatccgtggcgccgatctccttgtgcttgatgagccgacatcgaacttgagtcccccggaagttaagcaacttctcgacgtcatgcgacagcttcgagaacagggaaagtcggttattttcatttcgcacaagcttggtgagattttggaggtctgcgacgacatcgtcgtgctgcgggacgggaaagtcatcggccaatgcgccgcaaaatccgcaaccaaaacgagtttggctcagatgatggtcggacgggaggtgccaccaccgataaggcgtgtagagcgcgcgctcggaccggaggttctgactgtgaaaggattgtcacaacgtggcgccagcggtgtcatgaaactcaccgatatcaacctgtctttgcatgctggagagatcgtcgctatcgcaggcattgacggtaatggtcaggctgatttcgtgaacgtactcgctggcttgaagagttcagatcagggcagcatattgttggatggtcgtgatatcacccgcgccaatgttcgatttcgactctcttctggcatttcttatatcccggtggatcggattcacacttccctggtgccaagcatgtcggtcgaagaaaaccttgcccttcgggatttttttaatccgccgttttcccgtcacggcttactcgacttttctgctatccgctcgtctgcagttcgaagaattggacagttcgggatcaacgtcgccagatcgaccacaccggtgcaaactttgtcgggcggcaatcaacaaaaaattgtccttgcgcgcgagattggacgcagcccaaaagtgctgatcgcacaccagcctacgtggggcttggatccgggtgccacacggtttgtcatcgaccaggtgctggcattgcgagatgcgggcgtggcgatactctatctatccaccgaattggatgaagttctgattttgggtgaccgaatagccgttatctgtgcaggacggctgtcggaggctgtgcctcgggaacaggtagatgtcaccgaaatcggcttggcgatggccggaaccacagcgctccggccggctcaagtagcggaattagtatga

SEQ ID NO: 219158 - DNA, 1113 bp, Klebsiella pneumoniae
atgactgcacctcgcaaagaaagccacaccaccagcacggatgttgcgcttccggtcgtcaaccgcgcgaccggcgtgttgagtgagatcttcggttcggacggtctgcgaaccatgttgcttgtactcattgcggtcttgcttgcttttgcaataaccgcagtgttgattgcgatttccggcaagaatccttcagccgcctattgggcgctgctgaatggcgctttcggctcgacggatcggattgcgtttggactcaacaggagcacgccttatattctcaccggggtcggagttgccctttgctttcgcgcaaaggtcatcaacataggctcagaaggacagattgccgttggaggactggcatcgacctcggtcgcgctctacttccccgatatgccgctcgtattaatacctgctgcggtcgtcgcgggagcagtcggcggcgctgcgtgggcagggatcgccgcggtcatcagcgtcaaacgcggcgttcacgtcgttttgacgactctgctgctcaattttgtcggtctgctgtttgttggtcatttgctgcacggcgtattgggcgacccgggggccggtttcccgcagtcacccattctcacggaaatggcttggcttcccaaattattgccagggacggacttgcatatcggcatcgtcgctgcagtccttgccgtggtcgttggacattttgtcttgtggcgaacaactttcgggtttcgcttacgcctgataggagaaagccatgctgctgcggattacgcaggcgtgtccaggtcgcaatgtacgttcaccatcatgatgattgcgggcgctttggcgggcgttgctggcagcattgaaattatggggattcattaccgtctgatcgagggtttctcgcttggattcggattcagcgccgttgccgtggctcttttggcggctacaaaccctattgccgtgctgccagcgggcctgttcctcggcttcctagaggccggcgctctgtctatgcagcgcgaggtgggtgtcccttcttcgttggtttttgtcatcgtggggttgaccatggtttttgtattgagttcaatcggcatgagtacgcgccttcgcagggtgtag

SEQ ID NO: 219159 - DNA, 921 bp, Klebsiella pneumoniae
atggatggcaatcttttaatagagtttctcggagcgtcaattcgcgtagcgaccccgcttctctttgtggcaattggcggactcatctctgagaaagccgggacttttgccgtgggcatcgagggaatgatgctggcaggggcgtttggtggcgcagtcgcgacgatgtcgctcggaagttctggcgcaggcctgattgtcagcgccgcaagtggcgctgcgcttgggctcattgttgctattgcaactgcaaagttccatgcagaccagattgtgaccgggttggccgtaaatatcctcgcactcggccttacaagttttctgctgcgtggcctattcggaggtactgcccccgtcgttcagttcgagaccttggcaattttgccaatcccatatctagcggatttgccgatcatcggcccgatcctgtttcgacagcctgcattggtctatgcggcccttggtctggcagtcgctgtacattttttcttgaagacaggtaacgggctcttgctgcgcgcgacaggggaaaatccagacgctgcgtttgcggtcggcgcagatccggtgcgaattcgtatcctggcgatagtcgtcggtggcgcttttgcaggtttagggggggccgtactcagcctgcaggaggttggaactttcaccgatggaatgaccaatgggcgtggattcatcgctctcgcggccattatcgttgggcgctggatgccgcttggcactgtaattagctgtttgatgtttggggcagtcgcggggcttgaattgctcgtgcaaggatgggggctgccggtcagttcctacgtcatccagatgacgccctatttcgttgcattggcgattctcgccgccattggccgcggtgcgcaagcgtccgcggcgattggcttacccttcgttcgtcattaa

SEQ ID NO: 219160 - DNA, 972 bp, Klebsiella pneumoniae
atgatgactttggtgcacacaggcagagaaccgcacaccggaacggttgcaggcaagccactgcatgtgatggccgccttgagcgccgacatggtgttcatgcgctcgcttagcagcgtaggcttcggcggccgagtgcatagcgtcttcaagcgagttatcaacatcgagctttcgggtggcggattgtttacgctggccagttgcgatcttgataacgcacccgacaccatcattgtcgacagcgcagacttcagtgagatccacgtcgctgcgcgccagcgggtgagtaccgtcggaaatctgatgcacgtcggccccttcttggacgtacgattcagagatgtcaagggctggagcggcgagttaccgcggtatcccgccgacgcttcgctgctccgacgcaatctccacgcactaactgtttatctcaaatgcgccgctgatgcgggcggcatgctgcgtcttctagccggtggcagcactttcgagcatgatgtatcggcggcgctggcggctcgttcgggtcgcctgtgcaatgcgctgctgcgccggaacatcgatgacgcccgtatacatgcgaagtcgatgatcggtctcgggcccggactgacgccgtcaggcgacgactacctagtcggccttttcgcggtcctgaatgtcttgcgcagcccaagtcagaccttgcgctgcgaatgtctggaaatgatcgtcggggccgagtttgccaccaacgcgattagctacgcggcgctgtcgaaggcggcaactggtcgcgtccgcgccatcatcagcgaactgattgaacgactgatgcacggtaccgaaaacgattttctcgcgcccttggcgcgcgtcttggctatcggctccacatccggaagcgatatcgtcgcgggcatcgtatccggtctgcgcctgcagctagagttcgagcagaccgtgcagccgaccgccgcagatccgaagtga

SEQ ID NO: 219161 - DNA, 174 bp, Klebsiella pneumoniae
atgaaggttcacgatttagatcgccacactaacaggcaacaccactggtttttggctgagagctacgaactttgggctgctgccggtttcaaagacactttgttaaggtggtcgatgaaacaggagatagcaaatggcaaagagaaggcaattcagccgggaattcaaggttga

SEQ ID NO: 219162 - DNA, 186 bp, Klebsiella pneumoniae
atgatatgcatcatgcaaaaatccaccaatcagcgaaccgccgccaaagaagcctcccacgagcgcattgtggatgtggcagcgcgcgccatccggcgcagcggctatgacggcaccggtgtggccgacatcatgaaagaggccggtttaacacatgggggtcggttccggctgagggcgaaatga

SEQ ID NO: 219163 - DNA, 717 bp, Klebsiella pneumoniae
gtgggcgcaaaaactcaaatattactggtaatcgcgctgctggccgggccagcacaggcagcggaacgcgtggatgccggtcaacattccgcgttctggctgtggtccggggtaaaagcgggtgacgaacttcagaatgcgcacaccgtgtacctgcatcagggcgaagtagtgacgcgcgcgggcgaggtggtatttcagcgcctcggcctgccggtcagccgtctgacgtttcccaccatctggctaaccgttcggtttaccactcttgatgtccccccggcgattgtgccgcggatcgtgcgcctgatgcagcgctggcaggcggcaggcaatcaggtggttggcctgcaggtggattttgacgccgccacttatcaactttccgattatgccaactttttgcaacagctacgccagcagctccccgctgagttcgctctgggggtaacgggcttgctggactgggccaaaaccggcgacattgccacactcaacacgcttgcggttgatgaactggtggtgcaaagctaccaggggcggcgaacggtggcgaattatcaggcctacctacccgccctcaaccgcttgcgtatcccgttcaagctcggactggtacaacacggcagccgcgatcgtctggcggaaagacagctggaaaactccccttactatcgcgggacagtggtttttatgctcaacccaacgcggcgctaa

SEQ ID NO: 219164 - DNA, 2172 bp, Klebsiella pneumoniae
atggtcaggaagacaacgtttacccttactctcttcgcgctgctggtgacagccccccaggcattcgcttcttttgatatcgaagattgcgcgtggggcgacccgctttgtctgttgaaaggcgccccgatcctcacgcctgataacgattcacgcgacaacctgctgcgactgctgagcgaagagaaagcgttcgccctgcccgttcaggacattcccgccgatgtcagccgctcacgtgaggtttacttcgcttatcaccctgcgtgggatagcgcaccggcgccagcatcccccctgccagcgcaacatgaagatgagacgtttacccggcaaatagcggcgctcaacatcgatcccgcacaggtgaggctagctcaggcagcagaacgaccaggagcttctgacaacgaactggaaaaccgctttgtcagcaatacccttgccgccgtcagccagtttaatgcggcactgctcgccgccgcttcccttaacccacagcagcgtcatgacctggcgctggcgcggttaaaactgttttatggcgccgatatcatcgcagtcgcggatattctcaatagtttcccggcagacaccgatgccgacttgtttgcttattatctgtcgggcatcgcccatttttatggcggcagttacgccgccgccaccgaggatttcacgcgacttttggggagcaagcagggctggctgacggaaaccgcgcaatatatgttgatgcgcacagcgcttaacaaaagtagccagaacagcgtcgggcagtatggcgattttgatattgcgcggatcaaccgcgaagatgccttattagcgcaaaaagaggcgctaacttatctacagcactggccagatggtctctatgctaattccgcccgcggcatgttgcgccgtattaactggtatctgcaggcgtggccgcagctcgccgggttatatgagcaggcttttcagcaggctaccgatgcccaggaactgcgtcagttggtgagtgaatatgacaatgtcttcggtatgccattctacaaccagcccgttcaggtagctttccccgacgcgccggagatcagctatgttgaacttctccgcgccctgcgcctggatattaaccacaagccggccttaacccaggcgcaactggacgccagtaaagcggtttttgagaagagcggaaaactatcgctatggcgcgatctacaattgcagctgtggaatgcgacggacaacgatgccgccatccttcaggctatcacgccggcgaacacgctaccggcgaacaacattctggcctttaatgagcaagttctgtatggcgaagcgttgatgggacagcagcggtggcccgccgcggctgatttctggcgccagctaataaaattgagccacaaccgcgaacagcagcagtatcttcaggcaaaactggcggcaactctggtttacagcggcgatgtagccgccatttttgccccagacagcgcggtaaccaatctgcgtttccgctcccgggtactgaaaacccaggcctcgcctgaacgcttacgtcagcaggcgactcagggccccaataatgaagagcgaaccattgctcttcataccctcctggtacgggatcttacggaacatcgctttagcgactggctgaaagacaaaaaacttgtcagcgcgataactcaaccggtgattgacgaagcctttgatgatgtcaatctgagtagtttcgactggaatggcgatgcggttgaagcgggctatgcctgccggagcctgaatgacacggtagccgtattaagccagaatgctaacgacgcccatgcgcttaactgcctgggcgagttcttccgcaccacccggacacatgttgatttatggaaagatgaagccggcaacgatgtgcttgaatcagccattcatcaccaaatacctcaggggcagtacgatcgacaacgctattaccagcaggttatcacttcaccaaaagcggagccggaggataaaagctatgccttgtatcgggccattctctgctacgccccttccggtaataacgaatgtggtggcgaagaagtggataaactgcagcgtaagggctggttcacgcttttaaaaacgcagtatccaggaagcccgtgggcgcaaaaactcaaatattactggtaa

SEQ ID NO: 219165 - DNA, 933 bp, Klebsiella pneumoniae
atggcgatgaaaaaacggatgacctcgacgccgcacgatgcggtatttaaacgatttcttcgccacccggagacagcgactgatttcctcactctttaccttcccgaagcgatccgtcagcggtgtgatttctctaccctgaagctgcaatcagcgagctttatcgatgaggatctgcgcgcctggtattccgacgttctctgggcggtacaaactacctgcggtgcgggatatgtttacgtggtgatagagcatcagagctcgccggatagccatatggcctttcgcctgatgcgctatgcgattgccgcgatgcagcgccaccttgatgccgggcacaaaacgctgccgctggtggtgccgatgcttttttatcacggtgtgaccagcccctatcctttctcgctgaactggctggatgaatttgccgacccgcaaatggcgaaaatgctgtatggctgccagtttccgttgatcgacgttacggtgatgccggacgatgaaatcgtgcagcatcggcgggtcgccctgctggaactgatgcaaaagcatattcgccagcgcgatctcagcggcataacggagtcgttggcggcggttgtgatgctgggatacactaaccgccggcagttgagaatgctgtttcactatatgctgcagtacggcaatacggccgagccgggcgtgtttctccgccggctggcccgccgtctgccacagtatgaggagacattgatgtctatcgcgcaaaagcttaagcaggaaggtcggcaagaaggccgggaagaagggcacctggagggcttgcaggaaggtagccggcgcgaggcgctgcgcattgccgacagtatgttacagaatggcctcgacaaagagatggtacagaagatcaccgggctttcggctgatgaactaaagccgctgtatggttaa

SEQ ID NO: 219166 - DNA, 492 bp, Klebsiella pneumoniae
atgaaatcgttaaaacatggctttattgccgcgcttgtcgccggggcctttaccgtcgccggcgcccacgccgcctcctggcaggattctcttaacagtgccgccagccagctcagcggtagtagcacccagaacagcggcggcatgtccgtctcctcgctaaccagcctgcttaacggcaacagccagtctctgaccgccagcagcatgaataacgccgccgggatcatgtcttattgcgcgaaacagaagctcgcctcggtgaccagcgccgataatgtcaaaaatcaggtactggataaactgggtctcagtacaccggaaaaacaaaaacaggacaccaactatctggatggtctgcagggtctgcttaacagcaaaaacggccagcagctggacctgaataccctcggcaacagctcgctggcgaaacaggtaaaaaccaaagcctgcgatctggtcctgaaacagggcgttaacttcctctcctga

SEQ ID NO: 219167 - DNA, 744 bp, Klebsiella pneumoniae
atgagcatgaaaaacgttggcgacttaatgaaacgcctgcagaaaatgatgccggctcatatcgagccggcgtttaaaaccggcgaagagctgctggcctggcaaaaagagcaaggccggctgcgttctgaagcgctggagcgggaaaatcgtgcgatgaaaatgcagcgtacctttaaccgctcggggatccgcccgctgcatcagaactgctcttttgataactatcgtgtcgagtgcgaggggcagatgaatgcccttgcccgggcgcgtcagtatgtggaagagttcgacggcaatatcgccagctttatcttctccggcaaaccgggtaccggcaaaaaccacctggcggcagccatctgcaacgagctgctgctgcgcgggaaatccgtcttaatcatcaccgtggccgatattatgtcggcgatgaaagatactttcggcaaccgggaaacgagcgaagagcagttgttgagcgacctcagcaaagtcgacctgctggtgattgatgaaattggtatgcagacggaatctcgttatgagaaggtcattattaatcagatagttgaccgccgctcctcatcgaaacggcctaccgggatgctgaccaacagcaatatggaagagatgaacaaactgcttggtgagcgggtaatggatcgtatgcgcctcggcaacagcctgtgggtgatcttcaactgggaaagttaccgccaccgcgtcaccggcaaagagtattaa

SEQ ID NO: 219168 - DNA, 540 bp, Klebsiella pneumoniae
atgtcttcgcgaattttaacctcccattttagcggcctggaagagttcctccagcagcacgcggcgctgctggcgaaatcgactgacggcaccgtcgccgtttttgccaataatgcgccggcgttctatgcgctgacgccggcccggctggcgcagttgctcgaactggaagccaggctgtcgcgccccggcagcgacatcgcgcttgacccgcagtttttcgaggagcccgccgcggcgccggttgcggtgccgatgggcaaatttgctatgtacgccgactggcagccggacgccgactttcagcgcctggccgcgctgtggggcattgccctgagccagccggtcaccccggaagagctggccgccttcgtcgcttactggcaggcggaaggtaaagtgtttcaccacgtgcagtggcagcagaaactggctcgcagcgtgcaaatcagccgcgccagcaatggcggacagccgaagcgcgatgtgaacagcgtcagcgaaccggacagccagattccgcgaggtttccgaggatga

SEQ ID NO: 219169 - DNA, 474 bp, Klebsiella pneumoniae
atgggcataatctcgtttatcttcgcgctggcggaagatatggtgctggcagccattccggccgtcggttttgcgatggtctttaatgtcccccagcgcgccctgcgctggtgtgcgctgctgggggcgattggtcacggctcgcgtatggtcatgatgagcgcgggctttaatattgagtgggccacctttctcgctgccctgctggtgggcagcatcggcatccagtggtcgcgctggtatctggcgcatcccaagatttttaccgtcgccgccgtgatcccgatgtttcccggcatctcggcctataccgcgatgatctccgcagtaaagatcagccattttggctattcggaagagatgatgattttgctgctgagcaattttttaaaggcgtcttctatcgtgggcgccctctccattggcctgtcgatacccggtctgtggctgtatcgtaagcgtcctcgcgtctaa

SEQ ID NO: 219170 - DNA, 777 bp, Klebsiella pneumoniae
atgcaggttgatcgggcacagcagcgggcaatcacacgtttatgtatccagtgtggtctttttttgttacagcacggcgccgaaagtgcgctggtggaagagctatccacccgcctcggacgggcgctgggaatggacagcgtggaaagcgccatctcctcgaatgccatcgtgctgaccaccattaaagatggcgaatgcctcacctcaacgcgtaaaaatgtcgaccgcggcatcaatatgcatgtggtgacggaagtgcagcatattgtgatcctcgccgagcataaactgctggactatcgcgacgttgagaaacgctttgcgcagatcgttcccctgcgctatccgcgctggttgctggtcctgatggtggggttctcctgcgcctgtttctgcaaactgaataacggcggctgggacggggcgctggtcagcttttgcgccagtaccgtcgccatgtacattcgccaggtgctgacccaccggtccatgcatccgcagatcaacttctgcattaccgcgtttgtcgccaccaccatctccgggctgctgttgcgcctgccggcctttgccagcaccccaaccattgccatggctgccagcgtcctgctgctggttccagggtttcctttaatcaacgccgtcgccgatatgtttaaaggacatatcaatacggggcttgcccgctgggcgatcgccagcctgttgaccctcgccacctgcattggcgtggtgatggcgatgacggtatgggggctgcgcggatgggcataa

SEQ ID NO: 219171 - DNA, 1185 bp, Klebsiella pneumoniae
atgaaaacacaggtcgcgattattggcgctggcccttccgggctactgctggggcagttgctgcataacgccgggatccataccgtgatccttgaacgccagacaccgcagtatgtgctggggcgtattcgcgccggaattctggaaagcggcaccgtcgatctgctacgcgaagcgggtgtggcacagcgaatggacgctgaaggcctggtgcatcatggggtggagtttctgtttgatggccagcgggtgcctgtcgccctgagcgagctgaccggcggcaaaagtgtgatggtttacggtcagaccgaagtgacccgcgatctcatggcggcccgggccgccagcggcgcaccgatcgtctacggcgtgagcgaggtggttattcatgacgccaaaagcgaccggccgacgatcacctacctcagcgaaggagaaacctgccgcctggagtgcgatttcatcgccggttgcgacgggttccacggcgtgtcgcggcaaagtattccccgcgacatcctcaaaacctacgaaagcatttggccgtttggctggttaggactgctggcggatacgccaccggtcaatcccgagctgatctatgcgcatcatcaacgggggtttgtattatgtagtcagcgctcactaacccgcagccgctactatctgcaggttccgctgagcgataaggtggaagcatggtcggacgaacgcttctggctggagctgaaacgcaggttaccggacgacctggcatcaaagttagtgactggtcactcacttgagaaaagcattgcccctctgcgtagcttcgtggtggagccgatgcagtatggacgattgttcctggtgggggatgccgcgcatatcgtgccgccaaccggagctaaagggttaaacctggcggcatcggatgttaactacctgtggcagatcctgcgcgagtactatcatcgtggccggagcgatctgctggcgagctactcgcgactggcgctggatcgggtctggaaaggggaacgctttagctggtttatgacccgcctgctgcacgatttcccggaccagaacgcgtttgatgccaaaatgcaggcggcggaccgtcgctactatcttggctcacgcgccggactgaccaccatcgcggaaaactacgtgggtttgcccatagaacgcgtcacctga

SEQ ID NO: 219172 - DNA, 879 bp, Klebsiella pneumoniae
atgccgcccatgcaagctgttcccgtatttaagctatatggcgaagaacgcggttggccgacaccggatctgctgcactgcgagtctattttgcagcgcagcagcctgtatgagtggcacatccgtgtccaccagcatgcggaaatggtccagcttctctatctgcatcagggccgggcggagatagaaattgaaggtagcaccgcggtggtgacggaatcctgcattcaggtggttcctgcgctgtgtattcatggatttcatttttcaccgggaacgcaaggatatgtactttctctggcgttgccgctgctgagccggttcgaaaatcagtttggacgaccgctggatgtacttagcgtaccgcagtgtgtgccggtgggacgatcccgggggcgtctgcatacgctattttcggcgcttcgcgaggagtattgcgaagaacacgatgcccgggagatgatgctttattcgctgctggggacattgttggtctggctgaaccggcagtgtcgccctgcgccgcccgcggaagataaagctgagcgaaagcgcagcatgatgcgccacttttcccgactgattgagagtcactaccggcagcatcttccgctggcggagtacgcgaagctgattggactgtcagtgacgcacctgaattatttatgccgtgagtttcatggctgtagcgcgctcggagtattgcatcaacgtttgatgcttgaagcgcggcgtaatctgcagtatacccgaatgacggtaacgcaactctctgattatttaggttttagcgatgcagcctacttctctcgttttttccggcgctatagcggtatgtctccaaaagcatttagagaaacaattaaagacaacgtttaa

SEQ ID NO: 219173 - DNA, 1305 bp, Klebsiella pneumoniae
atgaacgagaaaattcccagcacccgttggctgcgtatcattgtgccggtgttaattgcctgcattatgtcatttatggaccgggttaatattagctttgccctgccaggcggcatggaggccgatttaggcattaccagccaaatggccggcgtggccagcggtatcttttttattggttatttatttttgcaaattcccggtgggcgaattgcggttaacggcagcggtaaaaaatttattgcctggtcgctggtagcctgggctatcgtttccgtggcgacagggtttgtgactcatcaatatcaactgctggtgctgcgatttattctcggggtttctgaagggggaatgctgccggtagtgctgaccatggtcagtaactggtttccggaaaaagagctgggtcgcgcgaacgcgtttgttatgatgtttgccccgctcggcggcatgctcaccgcgccggtctccggcgccattattgcggcgcttgactggcgttggctgtttatcatcgaagggctgttgtcgctggtggtgctggtcgtgtggtggtttatgatcagcgaccgtccgcaagaggcccactggttgcccgcccgcgagcgtgactatctggtgaccaccctggccgccgagcgtgcggcgaagcaggcagaagcccctgtcagcaaggcgccggtgaaggatgtgtttggtaatgccggactgatgaagctggtgatcctcaattttttctaccagaccggggattatggctacacgctgtggctgccgaccattctgaaggggttaaccggcggcaacatggccagcgttggcttcctggcggtgctgccgtttgtcgccacgctggccgggatctatgtgatttcgttgttcagcgaccacagcggtaagcgtcgtctgtgggttcgcttctcgctctacagttttgcggcagcgctggtggcgtcggtagtgctccgcgaccagatggtggcggcctatatcgcactggtgatctgcggtttctttctcaaatcggctaccagtccgttctggtcgatgccggggcgtatcgcttcgccggaggtggcgggcagcgcacgcggagtgatcaatggcctgggcaatctcggcggattctgtggcccctatctggtgggcgtgatgatgtatctctacggccagaatgtggcggtctgcgccctggccggttcgttgattatcgccggcacaatgacctttctgctaccgaagcaatgcgatctggtcgacaacgattctgatgtggcgatcaagaatcaaccccgaaatgcgtaa

SEQ ID NO: 219174 - DNA, 951 bp, Klebsiella pneumoniae
atgaagagtgttattccccgcgctgtccttttagtggcccccgtaattgaaaccctgcagctgcagctggcggagcatttcccgctgctgcgtctctacgagcaggacgatccgatcgcctttctgcgtgaacaaggagagaacattgccgtcgtggtcactcgcggcgacgtcggcgtagcaaacagcgtccttgagttgctgcctcaggctgggctgattgccatcttcggcgtcggtaccgatgcggtggatctggcgtatgcccgctcgcggcaaattgccgtcaccatcacctccggggtgttgacgaatgatgtcgctgacctggcgatggggctgctgctggccggttcccgtcagctctgtcagggcgatcgctttgtccgcgagggacgctggctgagcggtggtatgccgttggcgactcaggtcagcgggaagcgtatcggcctgctgggtatggggaatattggccaggcgatcgcccgccgggcgcggggttttgatatgcaggtgctgtataccgaccgtaaaaagatagcgggcctcgattatcagtggtgtgccgacctgcataccctggcacatgagagcgattttctggtgattgccgcatccggcggcgaggcgaaccgcggcatcatcgacgcctcggtgtttaacgtgatgccggcgcatgcctggcttatcaatattgcccgcggttcgctggtggatgaaaaggcgttgatccacgcgttacaaaacggcgttatcgccggggccgggctcgatgttttcgaacaggaaccccaggtcccggcggcgctgatcgccctcgataacgtggtgctgcagccgcatgtcgccagcgccacgcaggaaacacgacagaaaatgagcgaagtggtttttgctaacgtcgccgcctggtttgccggcgcagcgctgccaaacgctatcgattaa

SEQ ID NO: 219175 - DNA, 993 bp, Klebsiella pneumoniae
atgaaagcacaacgcattactctccatgatattgccgagctggctggcgtaaccaagatgaccgttagccgctatttgcgcaccccggaaaaggtgaaaccggagacggcggagcgcattgccagcgtgatagcggagatcggctatcagcccgacccggataatccggcgatgaccagcgtcgccgtgccgcggattggcgtactcattccctcctttcataatcaaatttttgccgatctgctggccggcatcgaatctgtcgccgccgggcatggctaccagacgctggtggtgaattacgactacgatcgccagcgtgaagaggagcagattgccgccgtgctggcgtttaacgtgaaaggactgctgctgaccgagtcggtgcactccctgcgggcggacaagtatctgaatgccgcgaagatcccgatcgccgaagtgatggggctggcggagaatccaggacgcattaacgtcggattcgataacttccaggccggcttcgatatgaccaccatgctgctggccagcggtaaacgacggatcatctacttcggctcgatgtccgacgtccgcgacgagcagcgttatctgggctactgtcgggcgatggagaatgccgggctggcggtggggcgcattgcgccgaataaagtctcgtcggtttccattggcaccggcatgatgaccctggcgcggcaaatgtacgccgatatggacggtatcctgtgcactaatgacgacctggcggtgggcgtgttacaggagtgcctggcatccggtatcagcgtgccccaggagctggctatcgcgggctttcatggcctggagatcggccagatcgtctctccccggctggccagcgtcctgacgccgcgcttcgagatgggtaaggtggcgacagagattttaataaagaaaatcaaaggactgcccactattgaaaaggtggatctccactaccgcctgtcgatgggcgaaacgatttaa

SEQ ID NO: 219176 - DNA, 765 bp, Klebsiella pneumoniae
atgaacgatcttttcagcttacaaggtaaacgcattttaattacgggcgcaggacaggggatcggttttgtcatggcccagggtctggcgcaatatggcgcagaaatcattattaatgacctttctgccccgcgagcggacgatgcggtgatgaagctccgcgacgaaggcgccaccgcccatgctgcggtatttaacgtgaccgatgccgaggccgttgaagaagccattgccaatatcgaagcgcatcttggcccgattgacgtgttattcaataacgccgggatccagcgccgccacccgtttaccgaattcccggtgcaggaatggaatgacgtgatttcagttaaccagacggcggtatttctcgtctctcaggccgtcgcgaagcgcatggttgaccgccagcagggaaaaatcatcaatatctgctccatgcagagcgagctggggcgcgacaccatcaccccctacgccgccgccaaaggcgcggtgaagatgctaacccgcgggatgtgcgttgagctggcgcggcacaacattcaggtcaacggcattgccccgggctactttaatacggcgatgacccggacgctggttgaggataaggcgtttaccgactggttatgcaaacgcacccctgccgcccgctggggcgatccgcaggagctggtcggcgctgccgtctttttatcgtcaaacgcgtcgaatttcgtcaacggccatctgctgtttgttgatggcggcatgctggtcgcggtctga

SEQ ID NO: 219177 - DNA, 534 bp, Klebsiella pneumoniae
atgatggcaggacaatgcattattttgatgggcgtctccgggaccggcaaatccaccgtcggtcaggcattggcccacgcgctgggggcgaaatttatcgacggcgacgaccttcatccacgcaacaatatcgtcaaaatggccaccagccagccgctgaatgatgaggatcgtcaaccgtggctgacgcgtatcgccgacgttattttcagccttgagcagaaaaacgagtctggtgtattggtctgttccgcattgaaaaagcgctatcgcgaccgcctgcgtgaggggaacgcgaagctacgcttcctgtggttgaccggggattatgactgcattttgcagcgtatgcgccagcgtaaaggccactttatgccagaggcgctactgcgtagccagttcgccgccctggagacgccagacgccagtgaaagcgatgttctggccgtcgatattacccccgacgtcgccagtattgtcgcccactcattaacgttacttcatccgcaacaaccgcagaggatcccggcatga

SEQ ID NO: 219178 - DNA, 468 bp, Klebsiella pneumoniae
atgattatcgataccttaaccgccgccgccgaaaatgagctctatccgccggtgattcgccaggcgctgcaggccgtgttacagcaacaaccgcacgcgctgccgccggggaaatataccgtcgagagtgataatgtgttttttaccgtcgtcgaaggccatacccggccgctgggcgagcaacgtccggaatatcatcgtcaatatctcgatattcacattgtgctgaaaggcgaagagatcatcggtgccgggaataaagggctgccggtcgttgaagatggccccttcaacacggcgcaggatatcggtttctgccaggctatcgacagcgaaacgctgattcatctccacccggaagagctggcgatcctcttccccggtgaattacaccgcccgatggcctgcctcgaacaaggcgcagcgttgcgcaaaatcgtggtcaaaatcgatcgcgcgctgctgtaa

SEQ ID NO: 219179 - DNA, 234 bp, Klebsiella pneumoniae
atgcggaacaatattctggtggcatccgcactggcagcgacggcaatcatgttcgtggccggctgctcatcgaatcagtcgatcaaaaccaccgacggcaagaccattgtcaccagcggcaaaccgcaggtggatgatgataccggcctcgtttcttacaaaaatgccgaaaccggccgcgtggagcagattaaccgcgaccaggtaaaatccatggatgagctggataactaa

SEQ ID NO: 219180 - DNA, 3225 bp, Klebsiella pneumoniae
atgccaaaacgtacagacataaaaagtatcctgattctgggcgcgggcccgattgttatcggtcaggcgtgtgagtttgactactccggagcccaggcctgtaaagccctgcgtgaagaaggctaccgcgttatcctggtgaactctaacccggcgaccatcatgaccgacccggaaatggccgatgccacctatatcgagccgattcactgggaagtggtgcgtaaaatcatcgaaaaagagcgcccggacgcggtgctgccgaccatgggcggccagacggcgctgaactgcgcgcttgagctggagcgtcagggcgtactggctgaattcggtgtgactatgattggcgccaccgccgatgcgattgataaagccgaagaccgtcgccgtttcgatatcgcgatgaaaaaaatcggtctcgacaccgcgcgctctggtatcgcccacacgatggaagaagcgctggcggttgccgccgacgttggtttcccgtgcatcatccgtccgtcctttaccatgggcggcaccggcggcggtatcgcctataaccgcgaagagttcgaagaaatctgcgaacgcggcctggatctctctccgaccaacgaactgctgattgatgaatcgctgatcggctggaaagagtacgagatggaagtggtgcgcgataagaacgataactgcatcattgtctgctcgattgaaaactttgacgccatgggtatccacaccggtgactccatcaccgttgcgccggcgcagaccctgactgataaagagtaccagatcatgcgtaacgcctcgatggcggtgctgcgtgaaatcggtgtcgaaaccggcggctctaacgtacagttcgcggtcaacccgaaaaacggtcgcctgatcgttattgaaatgaacccgcgcgtctcccgctcctcggcgctggcctccaaagcgaccggcttcccgattgctaaagtggcagccaagctggcggtaggttatacccttgacgagctgatgaacgacatcaccggcggccgcacgccggcttcttttgagccgtccatcgactacgtggtcactaaaattccacgctttaacttcgaaaaattcgccggcgccaacgaccgtctgaccacccagatgaagtctgtcggcgaagtgatggcgattggtcgcacccagcaggaatccttgcagaaagcgctgcgcggtctggaagtgggcgccaccggcttcgacccgaaagtgagcctcgacgatccggaagcgctgaccaaaatccgccgcgagctgaaagacgccggcgctgagcgtatctggtatatcgctgacgcgttccgcgcgggcctctccgtcgacggcgtcttcaacctgaccaacatcgatcgctggttcctggtgcagattgaagagctggtacgtctggaagagaaagtggcggaagtgggtatcaacggcctcgacgttgacttcctgcgcaccctgaagcgtaaaggctttgccgatgcgcgtctggcgaagctggcgggtgtgcgtgaagcggaaatccgcaagctgcgcgaccagtatgacctgcatccggtctacaaacgcgtggatacctgcgcggcggaatttgctaccgatactgcctacatgtactccacttatgaagaagagtgtgagtccaacccgtccgttgaccgcgataagatcatggttctcggcggcggcccgaaccgtatcggtcagggtatcgaatttgactactgctgcgtacacgcctcgctggcgctacgcgaggacggttacgagaccatcatggtcaactgtaacccggaaaccgtctctaccgactacgacacctccgaccgtctgtacttcgagccggtgaccctggaggacgtgctggaaatcgtgcgcatcgagaagccgaagggcgttatcgtccagtacggcggccagaccccgctgaagctggcgcgcgctctggaagctgccggcgtgccggttatcggtaccagcccggacgccatcgaccgtgcggaagaccgtgagcgcttccagcatgcggttgaccgcctgaaactgaagcagccggccaacgccaccgtgactgcgattgagcaagcggttgagaaggcaaaagagatcggctatccgttggtggtgcgcccgtcttacgtgctcggcggtcgggcgatggagatcgtttacgacgagcaggatctgcgccgctacttccagactgcggtcagcgtctctaacgacgcgccggtactgctggatcgcttcctcgacgacgcgattgaagtggatgtcgatgctatctgcgatggcgaaatggtgttgattggcggcatcatggagcatatcgagcaggcaggcgttcactccggcgactccgcctgttccctgccagcctacaccctgagcaaagagattcaggatgtgatgcgcgagcaggtgcagaaactggccttcgagctgcaggttcgtggcctgatgaacgtccagttcgcggtgaaagataacgaagtttatctgattgaagtcaacccgcgtgctgcgcgtaccgtaccgtttgtctccaaagccaccggcgtaccgctggcgaaagtggcggcgcgcgtgatggcgggtaaaaccctggcgcagcagggcgtgaccaaagagatcatcccgccgtactactcggtgaaagaggttgtcctgccgttcaacaaattcccgggcgttgacccgctgctggggccggaaatgcgctctaccggggaagtgatgggcgtcggccgcaccttcgctgaagcgttcgccaaagcgcagctgggcagtaactcgaccatgaagaaacagggtcgcgcactgctctctgtccgcgaaggcgacaaggagcgcgtggtcgacctggcggcgaagctgctgaagttcggcttcgagctggatgcgactcacggcacggcgattgtgctgggcgaagcgggcattaacccgcgtctggtgaacaaggtgcatgaaggtcgtccgcacattcaggaccgcattaagaatggcgaatatacctacatcatcaacaccaccgcaggtcgccaggcgattgaagattccaagctgatccgccgcagcgcgctgcagtacaaggtgcactatgacaccaccctgaacggcggctttgccaccgcgatggccctgaacgccgacgccaccgataaggtgatttcggttcaggaaatgcacgcgcaaatcaccaaataa

SEQ ID NO: 219181 - DNA, 822 bp, Klebsiella pneumoniae
atgcatgatgcacaaatccgcgtggccatcgccggcgcgggcggccggatgggacgccagttaattcaggctgcgctgcagatggaaggcgtggcgctgggcgcggcgctggagcgcgaaggatccagtctggtgggcagcgatgccggcgagctggcgggcgcaggaaaagcgggcgttacggtgcaaagcagcctgtcggcggttaaagacgatttcgacgtcctgatcgattttacccgcccggaaggcacgctgaaccacctggccttctgccgtgaacatggtaaagggatggttattggcaccaccgggtttgacgacgcgggcaaacaggcgattcgcgatgctgccgaggagattgccattgtcttcgccgctaactttagcgtcggcgtcaacgtcctgttaaagctgctggagaaggcggcgaaggtgatgggcgactataccgacatcgaaattatcgaagcgcaccaccggcataaagtggatgcgccgtcagggactgcgctggcgatgggcgaagcgatcgccggcgcattgaacaaagatctgaaggactgcgccgtttacagtcgtgaaggtcataccggcgaacgtgtcccgggcactatcggctttgcgaccgtccgtgcaggcgacatcgtcggagagcataccgcgatgtttgctgatatcggcgagcgtattgaaatcacccataaagcgtccagccgaatgacgtttgctaatggcgccgttcgttcagctttatggctgaaagctaagaaaaatggcctatttgatatgcgtgatgtgctggatctgaatgctttataa

SEQ ID NO: 219182 - DNA, 594 bp, Klebsiella pneumoniae
atgactaccatcgcccttattgacgatcatttgattgtccgctccggctttgctcagctgctggggctggaagctgattttcaggttgtcgccgaattcggctgcggccgcgaggcgctggcggggctaccggggcgcggcgtgcaggtctgtatctgcgatatctcaatgccggatatttccgggctggagctgttaagccagttgcctaaggggatggcgaccatcatgctgtcggtacacgacagcccggcgctgatcgagcaggcgctgaacgccggcgcgcgcggcttcctgtcgaaacgctgcagtccggatgaactgattgccgcagtgcgcacggtggcggcgggcggttgttatctcacgccggatatcgccatgaagctggccgccgggcgccaggatccgctcaccaaacgcgaacgccaggtggcggaaaagctggcgcaggggatggcggtgaaagagatcgccgccgagctcggcctgtcgccgaaaaccgttcacgttcaccgcgccaacctgctggaaaaactgggcgtcagtaacgacgttgagctggcgcgccgcatgttcgatagctggcaatga

SEQ ID NO: 219183 - DNA, 1503 bp, Klebsiella pneumoniae
atgaacaccgtcgtttcgcgcttgctgtcggtgatcggctgcgcctttatcttctcagccgcctggttctgcctgtggagcatcagtctgcatctggtggaacgcgcggacctggcggtgctgctgtttccctttggcctgcgtttagggctgatgctgcagtgccagcgtggctactggccggtgctgctgggcgccgagtggctgcttatcttttggctggcgcaggaagtggcgctggcgcacccgataatattgatgaccggaagtctgctgaccctgctgccggtagcgttgatttcacgctatcgccatcagcgcgactggctgacattgttgcgccagggcggggcgctgatcgccgcctcgctgctgcaatcgctgccgtggttggcgcaagggagcgaaggattgaccgcgctgttgttgaccctgaccggcggcctgaccctggcgccgacctgcctggttatctggcactatcttaccagcaccgtctggcggccgctgggaccgtcgctggtgtcgcagccggttaactggcgcggccggcatctgatctggtacctgctgctctttaccgtcagcctgtggctacagctcgggttgcccgccgaactctcccgctttacccctttttgtctggcgctgccgattatcgctctcgcctggcactatggctggcagggggcgctgatcgccaccctgatgaacgccatcgcgctgattgccagccagacctggcacgatcacccggttgatttattgctttcactgctggcccagagcctgaccggactgctgctgggagcagggatccagcgattgcgcgagcttaacctgtcgctacagaacgagctggcgcgtaatcggcggctggcggaacgcctgctggaaacggaagagagcgtgcggcgcgacgtggcgcgcgagctgcacgatgatattggccagactatcacggcaattcgcacccaggcggggatcgtgcagcgtctggcgccacacaacggtagcgtacggcagagcggccagctgatagaacaactgtcgctgggggtttacgactccgtgcgaagactgctgggtcgtctgcgtccgcgccagcttgacgatctgccgcttgaacaggcgatacgttcgttgatgcgcgaaatggaactggaagaccgcggcatcgtcagccaccttgaatggcggattaacgaggcggggctgagcgaaaaccagcgcgtgacgctgtttcgcgtttgccaggaggggctgaataatatcgtcaagcacgccagcgccagcgccgtcaccctccagggctggcagcaggatgggcgattgatgctggtgctggaggatgacggctgcggcctgccgccgggctcgaatctgcaggggttcggcctgaccggcatgcgcgagcgtgtgaccgcgctgggcggtacgttaactatctcctgcacccacggtacccgggtgtgcgtcaatctaccgctgcgttacgtctga

SEQ ID NO: 219184 - DNA, 906 bp, Klebsiella pneumoniae
atgaaatctgatatcagaaacctcgatctcaacctgctgaaagccctggatgcgctgctcgatgagcgcagcgtcacccgggcggcagcgcggctggcgctcacccagccggcggtcagcggcatgctcacccgcctgcgcgacgcctttaatgacccgctgtttatccgcgccccacacggtatggtgccgacactgcgcgctcaggcgctggcggctccggtaaagcagctgctgatcgatgctgaaaccctgctgcaacccgccatcttcgagccgctggaagccaattttacctggaccatcgccgcgacggattatgcgttgaaagcagtgatcgtgccatttatcgccgcgctgaagccactggcgccgggtatccgcgtgcgcatcattcccgaatcaccggccacgctgctggcacagtccgaacgtggtgaagtggatattgcgctattgacgccccacgatacgccgccggcgctgcacagccgggcgctgtatcaggaagactatgtctgtctgatgcgcgaagaccatccgcaggccagccagccgctgacgctcgaccgcttctgtgcgctggaacatgtgctggtttcatggcagggcgatagctttcgcggcgtgaccgacgacgcgctggcggcgcttggtcgaacccggcgggtgggattgtcggtgagcagtttcctggtgttgccggaaatactggcggtgagcgacatgatcgccgtggtaccgcgccgactggcgaaaagagccagcggcatgaaaatagccccaccgccgctgacgatcccgggtttcaccaaaagcatggcctggcacgagcgtaaccatcatgacccggcgcagcagtggctgcgggagctactcctgcaatccagccagcaagaacaataa

SEQ ID NO: 219185 - DNA, 525 bp, Klebsiella pneumoniae
atgaaacagcccctgctgcaaagcgccatcgtctggccggaagagtatctgccaggtacgaccgacaattttgcctctaatgaaattatcgttagcggcctgacggcagctcagatatgggcgcagctcgatgacaccacgctgtggccgggctattacagcaacgttgccgatatccatttccatgacggcagcggcccgaccctcagcgccaacgcccgtttccgcttcagcaccttcggcttcccgattgaggcgcagattacagagtatgtacctcccgctgccgggcaggcggcgcgcgtagcctggcacggctgggcggaaggggatgcaacgacgcgtcttgatgtgatccacgcgtggctatttgaagatttgcccggcgggcgcgtacgtatcctcacccaggagtcgcaaaaaggcgttccggcgcaggagttggcgcgtaccttgcccaatccgatgattaacggtcaccaggagtggatctgcgggctggtgaaatcggctcgcggtgagtaa

SEQ ID NO: 219186 - DNA, 2028 bp, Klebsiella pneumoniae
atgaataaatttaaactcaaaacagttgatgtatgggatactatcctgcgccgtaactgccatccagatttcataaaacgttcaactgcatattattttttcctgaaatatcataaaaatcataatattgattctgttgatcaactgtttgctaagcgggtagaaatagagcatgccatcggtcaagaaaataaagcgcttggctatgatgatgaatatcttattcaggatgttatgcagcaatgggtagaaaactatatctctgctgagcagcatgatactgcggcgatctcgaatgagctgtatacctgggaaatggaacaagagaaaaaaacgatctatcttgacccaggtattaaagattttttagcgcagtatcctgctgatacaacgctttttctgtctgacttctacacatcagccgatgatttgaaaaaacttctgcatagcgcaggcatggatacttcgattattgctgacggcatttcatcggttgatgagcgtctgaacaagcgtagtgggcaactttttgattttgtacagaaaaaatatcaactttctcctgctgactgggtgcatattggcgataacgaatggtcagacgtaaaaatacccgcagcaaaaggcattaatagcattcgctatctcccgacggaacaacatcagctgcgtgagcaaaaagagtctctctggcataataatgaagcattaaccgagacgctcatcaataagataatccaggagcatgccaaatctgagaatctgcctgttgacttcttattaggcctgaaaaccacaccactgattgctggtttttgcctcaaaattttagagcaggctatttcttcaaacagtgaaaaaatattattcttcacccgtgaaggcgaatttttcattaaagcattcgatgtcttgagcaatcatctgaaaacaagcattagcgatacaaaactaccagaaattgatattctggaagtcagcagattagcgacttttgcgccatcgctgcaagagataagtctgaaagagatgatgcgcgtgtggaatctatatagcacgcaatccatcaatgctttatttaaaacgctgaatgttgatacgactgaattccagagtttcattgataaatatgagattcctgctgatgaacaaatccagtacccgtggcaggatagtcgcgtccaacagctatttgacgacgcctcgtttaaggaaaaactctggcagcacgtgctacagcagcgggctcttttaaagcgctactttgcgacaaaagggttacgtgatgatgttgatgctaaagtctgtgtggttgatgtcggctggcgtggcacgattcacgataacatcgccctgctatacccgaatatacacttcaccggcgtctaccttgggctgcaaaagtttctcaacgatcagccgtcaaatacatcaaaggttgcttttggcccggatctgaaccaccagctggagtacccgcattttcttgattcggtcgcccccattgagatgatcaccaactccccgtccggcagcgttacggggtatgaggaagaaaatggaaaactcgttgctatccgtaatgttaacagtgacgaaaacaatgcatggcataactttaccagaaccttccaggaagggattctggcgggtatggagtccttctctgctgccgttttaagtcacgggcttacgcatgttcaggtacgcagctacgccctgaaagtgtgggatgtgctgattagcggtaataacaaatcgctgacggatgcctttaacaatttaaaccataacgaaacatttggtttaggcgggtacattaaaaagagccatgtaccttcgacctgcgagatactcagtgctttatggaatagtgagcacaggaaaaacctgattagctttatcaaagcgaatcagtggagtgatggcatacgtaatcgggacaatctttcctggctaaataaaaatattttagcgttgacgattgaccttgccgttttttacaaaagaaaattccatcgcaaatag

SEQ ID NO: 219187 - DNA, 2169 bp, Klebsiella pneumoniae
atgaaagatatttcaatcactgattatctcggtcccggagtttatctactatatcattaccctcaggaatcaggcgctctgattgctgagaagggttataaggtatgttattgcaacgacttttcgcatttagcagatattattgacgataatcaggctgattttattctgattagcgacgccgagggtaaattcgatgaatataccgacattatcaggctatcggcacaatcttcgataaaaaaagtctccatcgatacattagtgaaaaaaaatcaacgcgatctttaccttaattttgttgaggcatcacgccgcttaggctatccgttggattctgctttttctttgctaaaccctggttatgatggctcgttccataatgatcaacatctcaggatggtgctgagctttagccatgaacagctcaatgattcagatgtagctccgagtgaaagcgcggaaagcgcgattaccggtaaaagcgtcaccagtgccctgccctatgtacgccctggggacagggtgctcgttatttccgaatcgggccactcagcaagggacattaaacgtattttgtcagaacagacaaaagcatctatggtccaaatctgttcattagacgatatcgaagaggccttacaaaaggatcgtggctatcatttcattctggttgataaatacacagatgatgatttaatcaaggcccttgatagcattaccaccagcttattacccgcgggccggtacgtattttttaaagcaagtcagacggtcattcatgcgctagacaacctgaacgttcagcctgaagtctatttcatttatgaacacggtaaactgaaggcaaaaacacaccagggagaagaaattacagtttctcctgaaatatgtgtattaatgaaaagtcctttagaaaatacaaaagtagtatacgaagagactatttatagttactcaaccccgccagaaaatcttttagcctttgccagagattatactcatccatggctaattcgtggcattgttgagtttccattcagaaaccgctcagcttatcatctgaagcaatatagtcgacaaattttgcagcgttttgacgctaaaagtcccgactatgcagctgcattagcaatattagggtatcagttacttagcaatggcgatgactctgatgaaattttagacaaacttatagcctattgctccggagtgttgaaactagagcatccaacaccacatcaatatcgctggtatatctcgctgtcgacactacttggtcttatttataataaaaataatgataaagttaaggccttaattcacttttctcacgcggcaaatacctgcgttggaaaattcagtccttccattggcacgaagacactacagagtctgtactcgcagactattatattaatttctttgaagaaaatatctagcgctgagataattgttgaaagaggaataaaaaggggtatacaactactttatcaaaaccccgaggaactggtaggtaaaatatcacaaccgttcaatttcgtcctgtttatttatcatgacattattgactggatcattaagttagtaaacattaagaatgcaatctcttgcaaaaagttcaatattgcaaataatgataacaacaatacctggtcgtccttgcttcatgaacgcatgaacgctatcaacaatatgtcacgaatgatagacgagcgcgacaacacaattcattcgcaaacaggtttaattgatgaacgtgacaataccattacggtccagaagagcttaattgatgagcgcgaccagactattcacgcccaaaaaaacttaattgatgaacgcgataacactatttattcacagcagagtttaattgatgagcgtgaccagactattcacgcccaaaagaacttaattgatgaacgcgacaagactattcatcagcaaaatcagttgattgatggtttacaggaggaagtcagcactaaggaacagcaaatcactgaattgcttaacaaaaacaatgaaattattgtgttaaatgatgaaaaagaacgacacctgacccaactctctgcggatctcgaacgggccagctcaactctgcgtaaaattaatagcacgccagtaattgggcgtttactgcgcatactaaacataaaataa

SEQ ID NO: 219188 - DNA, 1155 bp, Klebsiella pneumoniae
atgaggatagtatatttcgtcaatgccgcctggtattttgagctgcattggttggataggtcagaagcagccatcagcaaaggctatgaagttcatctcatcagctgcttctcagacgcgaccataaagaagagtcttgaagataaaggcattaaatgctgggatatcaaatttgatcgtttctctaaaaatatattaaaaaatatttcgatatcaatttattttcggaaattttgtaagcaaatacatcctgatattattcacctgattacaataaaaccgattatttttggcggattatacgctcgtttcgcaggtattccatttatcgttagttttgttggtctaggcaggcttttcagcgatcaggatggctggttaaatcgtgtgatttatcaatccgtgatatctgtttaccgctatctgttatcttcaaagagtcctgcaaacgttatttttgaacataatgccgacttcgctgaactcagtaagcatattacatttaacaaaaaaaatgttcatattatcgaaggtgcaggcgttgatcgatttcgcttcagctatcagccagagcccgatgagagccatttttcaattttattcgcaagccgcttgctatggtcaaagggcctgggggttgttgtcgaagcggttgaaaaattaaaacagaaaaagattgaaaatatcacactctatgttgccggcattcttgatgattatgatcctgacagaatagagttagagcaaattctggactgggaaaaagaagggaaaatcgtatggttaggaagaaggaatgatattcaggaattaataaaaaacagccatattgttgttttgccgacgatgtattctgaaggtgttccgagaataataatcgaagcttgcgctatgggtcgcagctgtattgttggtaatgttgccggatgcaaggctatcattgtcgacaattttaatggttgtgtcattcagaagtacagtgctgatgaaatcgcagataagatacagtatctgcaggaaaatagtcagataagaaaagaatttggactacgctctgctgaaattgttaaagaaagattcagtaaagaaatagtcattgataaaacattgcgtgtttatagcaaattactgagtacaacaaagcggtataaataa

SEQ ID NO: 219189 - DNA, 762 bp, Klebsiella pneumoniae
atgaatgtgttatctacattttcgctaaaaggaaaaagagccctggtaaccggtgcgaccagaggaattggttatgtcctcgccagagctctggcacaggcaggagccagcgtcattataactggcaggcatcaagccaccctcactaaagcggttgacgcacttaccctggaaggtgctgaaatcacaggattacttctggatgtgacacaaacatctcgcattactgaggtcatttctggcattggtagaatcaatattctgatcaataatgcaggcattgagcaggtttgtccgtcacttgaagtaaatgaagcgctttgggacaacattgtcgggaccaacctgaaaggggcttttttctgtgctcaagcagtagcgaaaaccatggctagtactggaaaaggtggagttattattaacctctgctcattaaccagttgcgttggcgtatctggcgcagcggcctacggtagctctaaatcgggattggtcgggctaacgaaagcgctcagtacggaatgggcggctcataacattcgggtgaacggtatcgggccgggatattttgaaacagagatgacgcaagtattttatcaagatgcacagtggcgtagtactatgcagcaaaagatcccccttgggagatttggtgagttagatgacctcgcgggaagcgtggtatttcttagctcagaggccgctaaatatattaccggacaaactttatatatagatggcggctatttgtcctctatttaa

SEQ ID NO: 219190 - DNA, 966 bp, Klebsiella pneumoniae
atgaaagcagtacgcttatatggtatcagggaagttaaaatagagcattcttctccaccgacgttaaaatcgggatgggctagagttcaagtacatgctgcgggaatatgcggttctgatttacacaatttcataaccggcaaatggtttagccggttgcctgttacgcccggtcacgagttgttcggagtgattgctgaaattaacgaaagcgaaagtctattcagagtcggtatgcgcgtcgtcgctgattctcgggtatggtgtggaagttgctttttttgccttgccggggaaaataacctctgtgaaaaactaggctttgtcggtgaagtattcgatggcggattcgctgaagaagtgatacttcccctacaaaacttactgattgtccctgatagtgttcctgatgatatcgccgtgctgagtgaacctctgggtgttgcactccgggtgattaatcaactgaacccatctgcaggtgacacggtttgtgtagctggtggggggacgataggcggcttaaccgcattactgcttagccggctaaaaaaatgccgggttcagctactggaacctaataaacagcgttatcaattactctcatcagttgttggcctttcaccgcccggcacattttcattagccgttgaagcttccggacacccggccgcgctcattgatctcctgagtagtatcaggtctggtggacgcattgccctcgtgggtatttttcatcattcgaaggggctggatcttaataaggtagttgaaaaagagattactcttattggctgtagtgtgttccaagatgaacagaatgaggcattgcaggtaatggcttcactggcggaggatttaagaaagctgattgcgcctcccattactcttgatgagctaccggatgcctatatgtctctcatctcaggagactctcactatctcaaaacggtgaccaatcaatga

SEQ ID NO: 219191 - DNA, 1296 bp, Klebsiella pneumoniae
atgactgaacttttacgcccaccctatgcagcggaagcgcgcaggttgacgcaggaaggcaagtgggagttggccagtgaaaagctcagccaactgatcaccgaagttactggcgaacaaacattaagcctgcagattaatcgtgaccaatatagtctgaattctttgaatgggcgtgtttcattggtaaatggccgttcctttttctttaagtatcatcatgaagagggagaagagcagactattcaagaatattaccgggcggcacttttgcgagatcacggttttgatgtagatatccccgtctacgcctgcggagaacctggacgccaaattctactgtataagcttcgcgatgataagcggctagcagatgtttgccgagagattgagaccaaatcggactgggagaaaataggaccggttatcgaagctcaacgttatgctgatcacaacattttatcccatacgttaccgaccttgcgcatggcgtcaactgagaaagtagcatctgaacccattcatcagttgttctggaatcggctagtttcgcctggccatgacatcggccttggtggtcgtgtagccagcttttatgtcaatcaggaatttattcttggtgacatgcagttggactggcagacactgagtagtctccactggcgtataaatggcgtgtcatatgacaaaagtctgcgagagctctttttagaggctggtcgtgagttagaccctcagaggttagcagatcatggagtcgttgttgctcacggcgatgcccataacgctaatgtatggtatgaaaaccatcacagcaaacccaggctggttagttttgatcctgcctttgccggaagttccattccagcgttgctggctgaaattaaggcaactttccataatatatttgctcatccttgctggctgtatgaagcggatgaagcggcagaacgttataacgtgagtgtagcgcgagatggcaatacccttactgtcaaccatgactggcaactgactcctttacgtaaagcattccttgaaagcaaaggggaattgtactggaaacctctgctgacagaaatgaaacgaaagggatgtctacctgataactggcatcaaattatgcgtcttgctcttttctgttgcccaacattagttatgaacttacggggtggttctgacagcgttcataatgcaacaagttcagccataggtttttccattgcagtcatgctgggttgcgatggggatgattattttagccgatggatgtccgctcttatgacggagaactaa

SEQ ID NO: 219192 - DNA, 1329 bp, Klebsiella pneumoniae
atgtctccgacatttcatgacctttcgaattccgaagtactgccaacccatttattcaaacgcacagaatctgatttgtcatttttcatcgaaaaggtcaagccgataattgaggccgttaggtcagaaggcgacctggctctaatccgtttcgctcgtgagtttgatggtgtgcgaccagagaccttttctataaaggcagaagagcaagagtttgaagacgcatttgcccgcgttgacccggaggtaatcgaatcaattcgtttctccgtcgaaaatgttcgtgcatttcatgaggcacagaaaccagaagaaatgtggtggaaggagatgagaccgggggcttttgccggtgatcgccatgttccgatagatgctgttgcctgctatgttcctcgtggtaaaggctcattcccgagcgtactgatcatgactgcagtcccagccatcgtggcgggagtcccgcttccggtcgtaatcacccctcccggccccgatgggaaggtcgatgatgcaacgttgattgctgcgcgtcttgttggtatcaagaatgtgtataaatgtggtggcgcacaaggtgtggctgcagtcgcgtttggaactcagtcagtaccaaaatgcctcaaaatcgtaggacctggcagcccatgggtagtggctgcgaaacgtcagttatcaagcctaattgatccaggtataccagcagggccgagtgagagcctgattctggctgatgactctatcgatggtgcgctggcagcgcttgatcttcttatagaatccgaacatggcccagattcatcagcttatttggtaacttctagccctcgtgtagctgaagaagctattgccgcattacccatgtactggaaacaaattggagaaaaacgtgcagagttctcccagaaagttttgtgcggctctcacggaggtgtggtgctgacaaaggatttctctacagctattgagttcgtaaatcagtacgcacctgaacacctggaggtacttgcacaggaacctatggatgtaatgacgaaaattcgtaatgccggtgaaatattacttggcgaacatactccaatcactctgggtaattttgtacttggccctaatgctgttctgccaacaaacagcgcagcgaaaacgtctggtcctctctccgtttttgattacctcaagagaatctccatcgcctatgtaacaaaaagtggctacaaagatctggcactgcaagctaaacgccttgcagagtatgaaggattccctgggcatgctttagccgtttcggacattcgccaggatttgctaaagggaagtaagaatgactga

SEQ ID NO: 219193 - DNA, 753 bp, Klebsiella pneumoniae
atggcaattttgacgcttaataaactggaaaaaagtttctcattgggcaagacccggcgtcaggttctgcatggcattgacctcacgctcaacgataacgagttcgtttctattgtcggctcatctggatgtggaaaaagtaccatgctgtcaatagctgcaggtctggaggatttcgataagggtgatgttcttgttgatggtgaatcaataacaggcccaggactggaccgtggagtggtatttcagtcatacacactgcttccctggctgacagctagaggcaatattgagtttgctttaaaagcagcaggaacaccagccagaagatgccgtgaaatcgctcaagaacatcttgaacttgtgaaactgggcaatgctgcagaccactggcccagcgaactttccggaggaatgaagcaacgtgttgccattgctcgagcactttcctaccgacctaagattcttctgatggatgaaccgtttggtgctcttgacgccatgactcgccatcaaatgcagcaactacttatcgaaatctgggagaaacaccgcctcacagtaatgtttgttactcatgatatcgaagaggcggtcaggctttccgatcggatagtggtaatgggtcaaggatatatagacaccactttccatgttgagttatctcgccctcgacaggagggtataaatcgtgaaccagaattcattgaacttcagcatgaagtactgaaccgtattcatcaacactcctaa

SEQ ID NO: 219194 - DNA, 843 bp, Klebsiella pneumoniae
atgagttctctcgaaactcagaaagtaaatgtccatgccaaaaaaaggcggtattcaaacttattaaccatagggaaagagcctacacgttctcagttcctcacaatctctgtagcagttttcgtgctgctccttcttatatggtggcttgcgacatccagcggcaccattaaacccattttcctgccaggaatcgagaatgtcctgcttcggatgataactcttgcgcaaaacggaacgttacagagtgatattgccagcagcctttatcgcatgatcattgctttcactatttcgtcattaatggcaattatcattggtgttttagctgggtgctatgggttattcaaggcgattgttgaaccgcttgttgactttatccgctatatgccagttgttgctttcgtcccccttaccatcttgtggacaggcactgatgatatacagaaatttctagtcatctggatcggtactttttttcaacaggtactgatgatgattgatgcgattaaacgtgttccatctgattttgtcggtttgggcaggacactcggcttgtcagaccgaaaaactctcctccagattgtcattccttccgcgttaccctcgatatgggatgcattacgcataagtcttggatgggcatggacatggcttgttcttgctgaacttgtagcatcaacttctgggcttggctatcggatcgtcgtttctcaacgctattttcagacagatacgatcatcggctacatactcctgcttggtttcctggggctcattactgatcaaattatgcgtgcagctgagcatgtacttttccgttacaaccggagacgttcctga

SEQ ID NO: 219195 - DNA, 987 bp, Klebsiella pneumoniae
atgtattctctccatacagtgaaaaaatcaattagtgcgtttttctgtgcaggaatgatgtcagttacaactctctctgttcatgcggaagaagccacgcatgtgaaaatggggattgaaccttggctgggttatggtcagtggcatattgcctcggctaaaaatctttttgaaaaggaaggtctaaaacaagtcgagatcattaatttcgctgaggataaagatattaatgccgcactggcgagtgggcagatagacgcagctaatatcgctacccataccgcgatgggaatgatttccgcaggtctcccagtgaagattgtgctattactcgaccagagcaatagcgcagatgcaattctggccactaaagatattttaagcattaaggatctcaaaggtaagcaggtcgcctacgaagaaggcacaaccagtgatattttactcagaagtgccatagcatctgaaggattatcctttaatgatataaaacctgttcccatgcctgccgcttcagcagggaatgctataatagcaggacgggttcctgttgctgtgacgtatgagccctatctgagcatggcccaaaaaagcgatacaaatcttaagattctatacagtggttcctctgatccaggattgatcagcgatgttctggtaatacgtgacgatttcatcaagactcaccctgatgccattaaggcacttattcagacctggggtaaagcgctagactattacaatgccaatacgacagaaggtcgcgctattatctctaaagcagtgggcacgactccagaagacttaaatacggcattcgatggcgtgaaatattttaccctaagcgataacaaagcacttctggctcacgacttcacaacgaaaacgttcccccatattcttaaagcagcaactgctgcgggcattatcacgcagcccattacaactgaacaaaccatcgatactcgtttcgcaaatgcgcaataa

SEQ ID NO: 219196 - DNA, 1143 bp, Klebsiella pneumoniae
atggttattaactgtgagaacttacgtcgggcagcgcaacgtgcgctaccgggctttgcattcgattatgtagatggtggcgctgacaacgagcagactctgagacataacagagaagtctttgaacgttggatgtttaaaccaacggtattaaaggatgcaagtgtacgcagtctgcatacaccacttggaaatgacctattagctgcaccgctgctgatagctccaactggttacaatggcatgctgcgtcatgaggccgatcagatgctagcgcgagccgccgcgcatagcggcataggttatattcagagcaccgtttcgacggcatcactggaagagactgcaactgttagcagcgggccgcgctggtttcaactgtatgttctgaaggaccgcgctgtcacagccaacttgattgagcgagcgcgccattcaggctgctcggcgttggtagtgtcggtagatgcagtgcatttcggcaaccgtgaacgcgataaatcgcactaccgacggccgatgaagctttcgttccgtgcgctggcagatgtagcacggcaccctggatgggtgtggcgtacactacgtcctgcggggatgccgggctttggtaacctcaaaccttaccttccctcagagtttcagcgcggtatgggcgcggccacctacttcgcccaacagatggatcctacattaacctggcaaacactggaatggatacgcgaattgtggccggggccgttgtatatcaaaggtataatgacgactgaagatgcattagccgcacaacaactaaaggccgaaggtattgtagtatctaaccacggcggtcgtcagttagatggaacatttagcccaatgctggttttgccagacatccgaaaggcggtgggccctaactttaacgtgttactcgatagcggcttcagacgcggtactgatgtggtaaaagctctggcgttaggcgcaaatgcagtattactgggacgtccactattatacgcagtggctgtaggaggcgaagcgctggtgtcagccaccctagagtcgttgatcgctgaaatcgatcgtacaatggcacagttgggctgtaccgatatcactgaacttcattctggactgctccatcatgcaaggaattaa

SEQ ID NO: 219197 - DNA, 957 bp, Klebsiella pneumoniae
atgagaaccacataccagcaaacgttgttaataaacttcgtaagtcgcgaagatatcgacgaatggcgaaatctttttttacctaatttccctgacttgcgtatcgcgagctgggatgacccttcagttgagcctgaaagtgttcactatgttttagtgtgggagcctgagagaggcaagcttgctcaattcccaaatttacgcgtgatattaagcgaggcagcaggagtggatcatattttgaatgattcgacagttcccgccaatattccaatcactcgcatggttacgccagaaactgagagcagaatggctgattatgtgactatggcatgttacctgcttgtacgccagattccgctggtgatgcaggcgcagaaaaggcagagctggaaaaataagctaacaggcagactagtgaacgaaacgtcagtaggtataatgggtatgggacgtctaggcactgctgtagctaaacgactgttggccaatggcttcactgtgcgaggctggtcgcgtaccgagaaaaatgcccacggtgtacaatgttacgctgaaaacgatcagttagcagcttttcttcgcgaaagtcacattttagttaatttacttcccgacactatagcaacacgtggcatcatcaatgcagaacttctagagcaattacctccgaatgcaggactgattaatgttggacgcggccaccaattggatcatgatgcgttattggtcgggctaaacaacggacatttaagcggcgctgtgttggatgtttttccagtggaacccctaccgcctgaagatcctttgtggacacatccccggataatcattaccagtcacgttgcatcgttgatttctaacaccgctaaagcaaaacaggctattgagattattcaggctgatcgttctggattgccattacctttggtatttaatcgtgagtacggttactaa

SEQ ID NO: 219198 - DNA, 2850 bp, Klebsiella pneumoniae
atggccagaaaacaatgccaggtctgcggccaacccgccaccgtgcgggtggaagccaatctcaacggtcgtaacagcaccatgctgttgtgcgacgaccattaccggcaattagtgcgccagcaaaagcgcaccgtttcgccgctggaagccttgttcggctcgcgcagcggcctgttcgaggacttcctcggcagtgacttcttccgcatcggcgaagacgcgacgccagttgccgccgataccgatgacgtggtcgatgcctcgtttggcgagcccgccaccgcaggttcgggtgcgccgcgccgtcgcggcagtgggttggccagccgcatcagcgaacagtcggaagccttgctgcaggaggccgccaaacacgctgccgaatttggccgctccgaggtggataccgaacatctgctgctggcgctggccgacagcgacgtggtcaagaccatcctgggtcagttcaagatcaaggtcgatgacctcaagcggcagatcgagtctgaggccaagcgcggggacaagcccttcgagggcgagatcggcgtgtcgccgcgcgtgaaggatgcgctcagccgcgccttcgtggcctccaatgaactcggccattcttatgtcggtccagagcatttcctgatcggtctggccgaggaaggcgaagggctggccgccaacctgctgcgccgctacggcctgacgccgcaggcgctgcgccaacaggtcagcaaggtggtcggcaagggcgccgaggatggccgcgctgagacgccgaccaacacgccagaactcgacaagtactcgcgcgacctgaccaagatggcgcgcgacggcaagctcgacccggtgatcggccgcgcgcaggagatcgaaaccaccatcgaggtgctggcccggcgcaagaagaacaacccggtgctgatcggcgagccgggtgtgggcaagaccgccatcgtcgaagggctggcgcagcgcatggtggcgggtgaagtgcccgagaccttgcgcgacaagcgcctggtggaactcaacatcaacgccatggtggccggcgccaaatatcgcggcgagttcgaggagcgcgtgcagaaggtgctgaaggaggtgaccgagcaccagggcgagctgattttgttcatcgacgaggtgcacaccatcgtcggtgccggccagggcggtggcgaaggcgggctggacgtggccaacgtgttcaaaccgatgatggcgcgcggtgaactcaacctgatcggcgccacgacgctgaacgagtaccagaaatacatcgagaaggatgccgcactggagcggcgcttccagccggtgacggtgcccgagccgacggtggcccaggccatcatgattctgcgcggcctgcgcgacaccttcgaggcgcaccacaaggtcagcatctccgaggacgcgatcatcgcggcggccgagttgtccgaccgctacatcacggcgcgcttcctgccggacaaggcgatcgacctgctcgaccaggcggccgcgcgcgtgaagctgtcggccacggcccggccggtggccgtgcaggagctggagtccgaactgcaccagctacggcgtgaacaggattacgtggccgcgcgcaagcagtacgaccaggcggccgagctcggcaagcgcatcgaagccaaggaggccgagctcaagaagctcgtcgaggactgggagcgggagcgggcctccggcagtgccgaggtcaaggcggaacacgtggcgcaggttgtctcgcgcctgaccggcatcccggtcaacgagttgacggtggaagagcgcgaaaagctgctgcacctggaacaacggctgcacgagcgcctggtgggacaagacgaggcggtccgtgccgtggccgatgccgtgcggctatcccgcgccggcctgcgcgaaggcagtaaaccggtggctaccttcctgtttctgggcccgaccggggtgggcaagaccgagctcgccaaggcattggccgaatcgatctacggcgatgagcacgccctgttgcgcatcgacatgtcggaatatggcgaacgccataccgtggcgcggctggtgggcgcgcctccgggctatgtcggttacgacgaaggcggtcagctcaccgagaaggtgcggcgcaagccctacagcgtgctgctgctcgacgagatcgagaaggcacaccctgacgtctacaacatcctgctgcaagtgttcgacgacggtcgcctcaccgacggcaagggccgggtggtggatttcaccaacaccatcatcatcgccacgtccaacctgggttcggacatcatccagcgacggctgaaggcgcgtgaggcggctggcgaggagtacgaaaagaccaaggccgaggtcatggacgtgctgcgcggccacttccggcccgagttcctcaaccgcatcgacgagatcatcgtcttccatgcgctgggcaaggaggagatccgccacatcgtcggcctgcagctcgatcgcgtggcgcgcagcgccgccagccagggcgtgacgctcactttcgatcagacgctgatcgaccatttcgcggaagaaggctacaagcccgagttcggtgcgcgtgaactcaagcgcctgatccgcagcgagctggaaactgcgctggcgcgcgagatgctcggtggcggcatcggcaagggcgatcacgccagcgcacgctgggacgtcaaggccgaacgcgtggtgttcgaacgcaaagagccaccgcagaccccggccgagccggagcagccggatgtcgcgaaggcgaccgagacgccgcacggcgacgctggcaaagactcgagcaagaagaagtcggcgagcgacgcatcttga

SEQ ID NO: 219199 - DNA, 171 bp, Klebsiella pneumoniae; identical to SEQ ID NO: 143813

SEQ ID NO: 219200 - DNA, 501 bp, Klebsiella pneumoniae
atggaaaaaaagaatcaatggaataccggctactggatcgttgccctcctgctgttgctgctgttgctgagtttgcagagctactggcagacggcgaaaaccgtcgagccggtgccctacagcgagttcgagaaggcgctggacgaggggcgcgtggccgaagtgctggtgtcggatcgtacggtgaccgggcgcctgaagtcgccggacagccggggcaagacgacgatcgtggcaacgagggtcgaacccgatcttgccgatcgcctgtcgaagtacgacgtaccctatgcccgcgtgttggagagcacctggctgagcgatgtgctgtcgtggatcctgccagcggtatccttctttggcgtctggttcttcctgttccgccgcttcgccgagaagcagggcatgggcgggtttctcaacatcggtaagagccgcgccaaggtgttcgtggaaaagaacaccggtgtgacgttcgccgatgtggcgggggggggatga

SEQ ID NO: 219201 - DNA, 192 bp, Klebsiella pneumoniae; identical to SEQ ID NO: 121260

SEQ ID NO: 219202 - DNA, 459 bp, Klebsiella pneumoniae
atgtctgcattgactccgtgggaccccttccgggaactggatgaattgcaaaaccgcctggcgacgatgtccggacgaataccccagcgacagggcgcccgtaccggcaacgaagccatgaccacggcggactgggctccaatggcggacatcagcgaggatgagaacgcattcctcctcaagctggatctgccggaggtccccaaggatgccgtgcgcgtcagcgcggaaaacggtgtgctcaccatcagcggcgagcgcaaactggaaaaagaggagcagggcaagaagttccaccgcatcgaacgtgcctatggccgctttgtgcgcagctttgtcttgcctgacaacgttgatccgaccaaggtgacggcttccatgaaagacggcgtgctggaagtgcggcttgtcaaggccgagcaagccaaaccgaaacagattgaaatctcagtcaactaa

SEQ ID NO: 219203 - DNA, 915 bp, Klebsiella pneumoniae
atgaatatcaaacagccacaatacaccttctccgcacttgccctggcggttgtcgtcggactgagcggaccggctctggcccaatcggcggcaggttctagcccaggtgcttcagcaccctctgccgcatccaaggcggcacagccacaggtagatgacaaggccgcccgggaagccgataaaaagcgtgccgagctcactcaagacgccatcacggcgctcaccaagacccaggaggctttgaccctccttgatgcaaacaagaccaaggaggcgcttgctgcgctggaactggccagcggaaagctggaactggtattggcacgcgacgccaaacttgctttggcgccggtcgatgtacgcgtcatcacccacgatatccacgccaacgtggaatcggtaaagaaagcggtcaagttgtctcgggagttgttgggtgatggcgaggtgcaaaaggcccggcccatcgttgccaatctggccagcgaaatcgtaatccaaaccgacaaccttccgatggcaacgtacccggcagcgatcaagtcggccgcacggctcatcgacagcgacaagatcgacaacgccaaagcggaactcgcccgagcactgaacacgctggtggtgacctcggtcgcctttcctctgcccgtgctacgggccgaagccgcgatggcaaaagctgaaaagctggccgagaccgacaggcgcgatgccaagcagaacgaggagctcagcaccttgctgtcgtccgtgcgcacggagatcgagatggcgcagatcctgggttatggcaagaaggcggacttcaaacccatcttcgatcaggtgaagtccattgagcaaaagtcggctggtggcaaaagcggcaagggatggttcgacgagttgaagacgcgcatccaaaagctgttttga

SEQ ID NO: 219204 - DNA, 888 bp, Klebsiella pneumoniae
atgaatgagcaaacaccgaatcccaatgcgacgaacgaaggaaaaaacgaacaggccgcggtaagcagccttcctgtcagtccagagtccaagcctgaagtcgtcacggaggtacagcctgaggttcagaaagaaacggactcgcaggcggcagacaaacgtaaacaagtcctcgatgaggcagtctcggccttgtcgctgaccaaatcagcgctggccgcacttgacggcaaggacactgcacgcgcattggcaacgctggccgaagtgacgggaaagctggagctgatcgtcgcgcgcgaacccacgctcgccctggccggcgttgatgtgcgcaccatcgtgcacgacttgttcgccaacacggaaaccattgaggcgatgaccgacgaggcgctggatgccctcaaacatggcgaggtgcaacaggctcgccacgtgctggctttgctggccagtgaaatcgtgatcacggtcaccagcatccctttggcgtcctttcccgcagccgtgaaggccgtcgtgccgctgatcgatcagggcaagatcgaagaagccaaagccgcgctgcagtcagcgctcagcacgctggtcgaggagagcagcgtgcttccgctgcccgtcctgcgtgcgaagctgctcctgaagcgcgccgagcccctggtagaagatggtcagcgcagcgaagcatccaatgagcgcctggagacattgttgaacgaagcccggcagcagttggaaatggcagaactgctgggctatggaaaaaggaaggactttgagcccctgtacgctgaactcaagaaaatcaaggaaaagacgggagggggaggctgcggaaaaggctggctcgatgaagtcaaggcaaaactgtccaggttgttctga

SEQ ID NO: 219205 - DNA, 612 bp, Klebsiella pneumoniae
atgaacacagacaccatcgccaattccaatgcggatgaccccaccaaagcactgtgttcgctgagccaaaattggtggctttttgtgctgcgcggtgtcttggcattgatttttgcagccctcgcgttctggatgccacaatcggctctgttggccatgaccatcatgttcggcgcattttcattggtcaatggcgcgttcaacttgtttgcagcggtgcgccatatccagaaaaaagagcgctggggctggctgctgttcagcggcattgtcggcatacttacgggcgtcgtcgtcctggttgctccctgggtcgccacgatagtcttggcttcttttttatgggctagcgtgggcttctgggcgattttcaccggtgtgctggagatatccgccgccgttcggctgcgtcgggaaatcaagggtgaaatctggcttgccctcagtggactgctctcgattatccttggcgctatcgtcttgtggatattttttacccgtccggtcgagtcattcgtggccgcaggctggctgttgggtttccatgcggcagtctatggcgtcacgcttttgttcttgagttggaatcttcgcaaaacgcgcctggggtaa

SEQ ID NO: 219206 - DNA, 1146 bp, Klebsiella pneumoniae
atgcagatgcaatatagctatcgagctatcgacaaagagttgcatgaaccttggcagagagctttgggaaatgtgatcgagcacgccctcaagccattgctcgacaaacacactaaagattcagcgcaacttcaaatcgtccttgatcgcgacaagatcaagcggcaatttttggccagtggctatatgcacctgcccggcaaaaagattgtcagcgttactgcatcacatgaggagctgacgcccctcgcgaagatgctcgcacagtcgttgttccgtcaggccaagaagcattttgaccgactgcatgctcaggatcaaatcaagcgcaaagcacgacgcgagcgcttgcgcgagctcaaggtgcggattgccgcaaaacccgcatcagccgcccatgaggccgaggtggcccgaatgcctctactgtcgaaacttgaggctgtcgcaaggcgtgagctggcttatctgcgggccgtcggcgatttaccgcgcgattatccgacgctgcgcgacgtggtggatgaagcgattgtccgagctgaggtggaatggcaatccgtgccgggggaaaaagaggcttacaccggtcttttgaagcatctgttcgccgtcctggataacgaagtggcaagcagccggcaatttggcgaattcgtttctctggacgcgccggtcgaaccggatgcccaagacgtggccgaggccatggtggaagaggaaatcttcgaattttatcagcccgatgacacactcaagctggccgatatcttcgctggcagtcagcatcccgatgtcgcaacgatcgcggaacaggaggagctgattgatcggtcgagcgagctcgcttttgcatttgacctgctgaaggacatgccgcgtttgtggcggcgcatttttctgcttatccgtgtggacgggctgaatgccagcagcgtctctgaaatcctgctgattcctggtaaggaagatgctgtccgaaggtggctcatgcaggccgaagcattcatcgctgctcatctggaagaggccggagtaagcaaaaacgggaacgattggctccaaggcgttgattggtcggcattgtctgtgacccgaagcgaggcagcctcactgtggtccaaggaggcgaaccatgaagaatga

SEQ ID NO: 219207 - DNA, 441 bp, Klebsiella pneumoniae
atgaagaatgatcttcacctcgtctgcccgcattgccagtccatcaaccgcgtaccgactgcgaagctatcggaacatcccaactgtggccgctgccagcagcccttgttcacgggcgagcccatcgagttgaccacggcgacgttctcgcgccacgtggagcgcagcgatctgccgctactggtcgatttctgggcgccatggtgcgggccgtgcaagatgatggcgccacagttccagcaagcggcgcaccagctcgaaccgaggatccggctggcgaaggtgaataccgaggctgagccccacctggccgcgcagttcggtatccgcagcatcccgacgctcgccctgttccagggtgggcgggagatcgcccgtcaggccggcgcgatgggcgcgcaggacatcgtgcgctggacgtcgacgcaagtgggacgctga

SEQ ID NO: 219208 - DNA, 1716 bp, Klebsiella pneumoniae
atgcaggccttactcggcactacactaatcctgctggcggcttgcagcctggcgtcgatggcgacggcggcgttcagagtgcccgccttgctggggtatctctctgtcggcgttgtactgggcccctcagtcatcggcgtgatcgcgccgggggagacgctgagctttctgtccgagctgggcgtggcgctgctgttgttcatggtcggactggaattctccctcggacacttctggctcgcccgcaggacggtgctgatggcgggcgctctgcagatgatcgccgtggccccgccgctgatcctgctattgatgtggctggggcagcccggccagagcgccgcgctgctcggcactgcggcggccatgtcgtccacggcgctggtcagccgacaactggccgaccaaggcgagctcaccacccgccacggccgcagtgccatcgccgtgctggtctttcaggacctggccagcgtgcccctgctggccttgctggcgatctgggcgcgcggcgagtcgccgaggatcgagcatgtgctgctcgaagtattcggtgtgctgctgctgttcgcggcagcggccctcgcctcgcgccgtctgttgcatggcctgctgggctgggtggcgcggcggggccacgaggaatcgttcgtgctcgtctccttgtgcgtggtggtggctgccgccgccgctgcgcacgcggtcggcgtatccgccgccctgggggccttcctcgccgggatggtcctgggcgagagcgacttccggcaccacatggaaagccacctcaggccctttcgcgatgtgttgtcgggcgtgttcttcgtgaccatcggcctgcaactggacgcagcacagattctttcggcaccgctggcggtgctggcgtggctggtggtgctggtaccagtcaagatcctgctcaatacgctggccttgcgggcgacgcgcctgtccgccctcgatgcctggcgcgcgggcatagcgttggggcacggcggcgagttcgccctgctgttgttgggcacggtcttgcagcagcatctgatccccgcgaccgtcgtccaacccatgctggtcgcgctggtgctcagcatggccctggcaccgctactgatccgccatcacgatgtacttgcccggttcttgagccgcaccggcggcgtcattcagccaccccaggctgaagaagtcgagatcgccgcgcagacgacgcgatatcgaaaccatgtcatcgtttgcggcgcgggcgagcttggccttacagtcagcgagattcttcgccacgccggcgtggtgcatctgctgctggaggcggacgcgcagaaggtcgaggccgcgcgtgccgccggcgcgccggtgttccatggcgatgccagtcggcccgataccttgctggctgccggcttgacgcatgcgcacttggtggtgctgacgttcgcccatgcccagcaagcgttgcgcatcgcccaggcgattgccgagcgccgtccggcgctgaccttgtgggtgtcatgcagaagtacgaccgcggccgatgcatttcgcgccatgcctaacgtgcgcgtttatcagcaatcctttgccgcagctattgggctggcggaacaggtgatgtcgacgcttggcatgtcgaccgagttgattgaaggacacatcagcgcaatgcgccgccgtctcgacagcagccgttttccagggagttcatcgtcatga

SEQ ID NO: 219209 - DNA, 498 bp, Klebsiella pneumoniae
atgaaatcaaaacgccttaacccatttcaggtcttgcgtgaccaattggccatcatgagtttttacgagcgcttcgagcaggtcgtcgcgctcgtgctgtcggcggtgatcgccgtcatcatcgtggtgtcgctgttccagctcatctccatcgtcttcacgctgctggttctcgatgccttcaatcccctggaccacaaggtattccagagcgtgttcggcatgatcatgacgctcttgatcgcgatggagttcaagcattccatcgtgcgcgtggcgctgcgtcgggacagcatcatccaggtcaagacggtggtcctgatcgcggtgatcgcactctcccgcaagttcgtgatcctcgactccgacgcgagccccgcaaagatagccgcgctggcagtcgccacgctggctctgggtgcgacctactggctgctgcgcaagcgcggcgaccgcgccgtcgagacctctgagcatgacccgtcatcatccgagtga

SEQ ID NO: 219210 - DNA, 1002 bp, Klebsiella pneumoniae
atgacccgtcatcatccgagtgatccgcgcactgcgctcttgcaacaccgctggctcaaccgcctgcagaccgggctgttggtcctgaccctggtcgggatcgcagccgcagcagggagactgccatttggggaaggctgcctgtggctcgcgctgtttgccgttgcaggtgcgttgctgctggaaccggtagccgcgtcggcgctgagcttgcgcctgtaccgcgtacgggccttgcacccgcaacaagcccacgagatgtgggccctgttgctcgagctgcccgccagtgccggtttgcccgccatgccggtgccgcactatgtgcccagtgccgtcgtcaacgccttcgccaccggatcgaagcaggaggcatcgatcgccctcaccgatggcctgctgcgcagcctgagcccacgcgagctggcgggtgtgttcgcgcacggggtcgcgcacatcgctaatgaggatctgcgtgtcatggggctggcggattccgtcagtcgcctcacgtgcctactggcccttatgggacagatcgcgatcctgctcagcctgcccgcgctgctggttggcgcggcggaggtctattggcctggtctattattattggccgcatcgccccaactggccctgctcgcacagctcggcttgtctcgcgtgcgtgagttcgacgctgaccgccttgcggcggaactgactggcgacccgcaggggctggcgtccgcgctggcgaaaatcgagcgggtcagccgctcctggcgtgcctggctatggccgggatggggcaatcccgagccctcctgcttgcgcacgcgtccggcaacgcaagagcgcatcgcacgcctgctgacgttggcgcctgggccagcatcagcgttgccactccgcgcgccccattttttccggaatccgctttggcgacgcgcccaccgcgctggcgcccgagcgggctgtggcgctgattgcccatcaacaggagacgtctcatggcctatctag

SEQ ID NO: 219211 - DNA, 1152 bp, Klebsiella pneumoniae
atggcctatctagacccgtacaaacgccccgcgccggaccgcttcgtccggcgctggctcttcatcaccgcctgtattgccgcgctcatgctgctgtggcagtttctgcacgccatcgaggcctggttcagtccgcgcgaggcagcagaacgcaccgtgatggcgcgtggcgatctggcggcggacgagaaaaccaccatcgaactgttcgaaaaatcgcgcgcctcggtggtctacatcaccaccgcgcaattagtacgcgatgtctggacgcgcaacgtgttctccgtgccgcgcggcactggctcgggcttcatctgggacgacgctggccacgtcgtcaccaacttccacgtcatccagggcgcgtccgaagccaccgtcaaactggccgacggccgcgactaccaggccgcgctggtggggacgagccccgcgcacgacatcgccgtgctcaagatcggcgtcggtttcaagcgcccgccggccgtgccggtcggcaccagtgccgacctcaaggtgggtcagaaggtgtttgctatcggcaaccccttcggcctggactggacgctcaccactggtatcgtctccgcgctcgaccgctcgttgccgggagaagcgggcggcccggccatcgatcacctgatccagaccgacgccgccatcaaccccggcaattccggtggcccgctgctcgattcggctgggcggctgatcggcatcaataccgccatctacagtccgtctggcgcctcggccggcataggctttgcggtgccggtcgataccgtcatgcgcgtggtgccgcaactcataaagaccggcaagtacatccgtccggcgctgggcatcgaggtggatgagcagctcaacacgcgtctgcaggcgctgaccggcagtaagggcgtattcgtattgcgcgtggcgccgggctcggcggcgcacagggccgggctcgtcggcgtcgaggtcaccgcaggcggcatcgtgcccggcgatcgcgttatcagcatcgacggtatcgccgttgacgacgtcaccacattacaggcccggctagacgacaagaacgttggagatgttgtggtcttgttagtggagcgggccggcaagactcgcgagatgcttgtggaactacaaccgggagtttga

SEQ ID NO: 219212 - DNA, 432 bp, Klebsiella pneumoniae
gtggtggtagctaatcaccacaaactgttagatacaagggaagggggggatgtcacccaggtcgacaaactgctgcacggcgacgagaacgtcgtctgcgccgatgacggctacacaggcgtcgaaaagcgctccgagcatgccgaccgagaagtgatctggcaggtcgcagcacgccgcagcacctacaagatgctcgataaacgcagcgccctgtacaaagccaagcgcaagatcgagaaggccaaggcgcaagtgcgagcgaaggtagagcccccgtttcgcgtgatcaagcggcagttcggctacaccaaggtacgtttccgagggctggtgaagaacactgcacaactggtgacgctgtttgccctgtcgaacctatggatggcccgccgacatttgctggcaagcgcaggagaggtgcgcctgtaa

SEQ ID NO: 219213 - DNA, 996 bp, Klebsiella pneumoniae
atgtttccagtcggcattgacgtaagtaaaaacaccctggatctttgcatgctttatgacggtatcaaaggacgcataaaaacccgtaacatccagaataacagacattcagttgaaaatattcttcgctggctcaggcttcaacattgcagtccggaagatgttcatgtggtaatggaagctaccggtgtttatcacgaacggctggccactgaattacatgatgccggtttccgggtttctctggccaaccctcaccgtagtcgggagtttgcgcgtggcatgggaatcatgacaaaaacggataaggtggatgcgtatatgctggcctgttacgcattccttaagaagccacactgctgggagccgccggcacccgaaatcagatatctcggtgcactcctgcgacgtcgggatgttctgctgggtgatgccctgcgtgaggagaacaggctggaaaaatacctgtcgacagacacacctgcagatattatcagttcctgcaggcgtatggcgcagcttctgcgcgaggaggtaagtaatatcgagcggcagataaaagcacatatcaaagccagccctgcactgaggcgtgattatacactgctgacctcaattaaatcggttggtccccagctggggatgcatatgctggtcgtgcttcgcagccataactttgtatcggctgagcaggctgccgcctttctgggcgtggtgccgatcgagaaacgctcaggcacatcggtccggcgccggccgcggatgtcgaaaatcggcccccctcagttgagagcgaagctttacatgtccgccctgtgcggaaaaatctacaataagcgaatgcgtaatatttacgatgagatgtgcctgcggggtaaacctaaaatggtggccattggcgcgctgatgcggaaactggtgcactggtgttatggcgtcctgaagaccggaaccgtttttaatgacgaagacctgaaaccggtactgtcaacctga

SEQ ID NO: 219214 - DNA, 405 bp, Klebsiella pneumoniae
atgagtaaatcgctgactattatctggcagtacctgcgggccttcgtcctgatttacgcctgcttatacgccggaatttttatcgccgggctgctgcccatcactatccccggcagcatcatcggcatgctgatcctcttcgtgctgctggcgctgcaaattatgccgccgcaatgggtcaatcctggctgcaatatcctcatccgctatatggcgctgctgttcgtccccatcggcgtcggcgtgatgcagtactgggatctgctgcgcgctcagctggggccggtcgttatctcctgcgccatcagcacccttgtggtgtttgtggtggtgagctggagctctcacctggtgcatggcgaacgtaaagtgattgggcaaaaggaaaagaaaaatgatgcatga

SEQ ID NO: 219215 - DNA, 906 bp, Klebsiella pneumoniae
atggcgaactggacgcaaaaactgaagctgcagcatctgaaaatgctggtggcgctgggtgagcaaggcaacctgacccaggtggcgaaaatgatgaatattacccagcccgcgctctccaaatggctgacgcagtttgaagatgaggtaggcatgccgctctttgagcgccacagtaagggactgcgcccttcggaaggggggaaactgctgatccagcacgcccagcggctgatcaacgacatgtcgcgatcgcagtatgagattgagcgctttaagcaaggcggtctggtcggcagcctgatgatcggctgctcaccggtggcgacagactgcgtggcgcaggcgatcctcgccctgctcaacgagatgccgaccctgcatctgaatattgaagagaaagtgatgaccccactgctgcacgatctgctctccggggtggtggatgtggtcgtgggccgggtcggtggacgcgcgctcgaactgccgctcaactatcgggtgctgtataccgaaccggtctgttttgtcgcccgtcccgaccatccgttagccagccgggcgcacctgagctgggcggatctcgccgcctggcgctggattgtctggcccaccggcacccccattcgccagagtattgataacgccctcgtggataacggcgtgatgctcccggagaacaccattgagtcggcctcgatgaacgtcaccagcaatttgctgcaaagcagcgatatgatctctattctttccttgcggctggcgcagcattacgccgaacatcgccagctggcgattcttaatttgccgcgtatagagcaaaaaggtagcgttggggtgttctggcgcaaaagcgaagtgccctcccaggccctcgcccgctttctgcactatctcgccgcctag

SEQ ID NO: 219216 - DNA, 1359 bp, Klebsiella pneumoniae
atggctcaacgacgtgaactacagaccttactcaacgcagcgccggttggcgccctgcagtggcgtgtgattatctgctgttttctggtggtgatgcttgatggtttcgacaccgccgccattggttttatcgcccccgatatccgcgttcactggcaactgagcgccagcgaactcgcgccgctgtttggcgccggactattgggattgaccgccggggcgctgctctgcggcccgctttccgaccgctttggccgaaaacgggtgattgagttctgcgtcgcgttgtttggcttatttagcctgctctccgcgttctcgacgaatcttgaaatgctggtgatcctgcgttttctcaccggtctgggattgggcggggcgatgcccaacaccattaccatgacctcggaatatctgcccgcccgccgccgcggggcgttagtgaccctgatgttctgcggtttcacgcttggctcggcgctgggcggcgtggtcagcgcgcagctggtggcgcatatcggctggcacggcattctggcgctgggcgggatcctgccgctgctgctggctgtcgcgctgctgtgggtgctgccggaatcgcctcgctggcaggtgcgccgcggactgccgcaggcgaccatcgccagaacggtcagcgctatcaccggcgagcgctaccccgatacccatttctggctggatgaaccggcggccgggccgaaaggcagcattggccagctgtttgtcggccgccagctggcgatcaccctgatgctctgggtggtgttctttatgagcctgctgattatctatttgctctccagctggatgccgacgctgcttaaccatcgcgggatagatctccagcatgcctcgtgggtcaccgccgcgtttcagatcggcggcacgatgggtgctttactgctcggcgtcctgatggaccgctttaatcccttccgtgtgctggcgctgagctactgtctgggcgcgctgagcatcgtgatgattggtttaagcgaaaacggactctggctgatggcgctggcgatcttcggtaccggcatcggcgtcagcggttcacaggtggggcttaatgcgctaaccgccacgctctatcccacccaaagtcgcgccaccggcgtcagctggtctaatgccgtcggccgctgcggcgccatcgtcggctcgctctccggcggcatgatgatggcgatgaatctctctttcagtacgttgttttacgttattgcggttccggctgcggtcagcgcggggatgcttatcctgctgacgctggcggtccgccactctggatcggtacccgacgcgctgccctccaccggcatcgtgaataagtaa

SEQ ID NO: 219217 - DNA, 1038 bp, Klebsiella pneumoniae
atgacatcattcaccaccgaggcgagccgcgatcgccagcagttctatcaccagatttccgggcagaatctgaccccgctgtgggaatcgctgcaccatctggtgccgcaaacgccgaatgccaactgcgccccggcgtactggaactaccaggaaattcgcccgttgctactggagagcgggcagctcatcggcgccaaagaagcggtgcgccgggtactggtgctggagaacccgcagctgcgcggccagtcgtctattacctcatcactgtatgccggcctgcagctgatcatgcccggtgaggtggcgccgagccaccgtcataaccagtcggcgctgcgctttgtcgtggaaggccatggcgcgtttactgccgtcgacggcgagcgcacggccatgagccctggcgattttattctcacgccgcagtggcgctggcatgaccacggcaatccgggggaggaaccggttatctggctggatggtctcgatttaccgctggtcaactatctcggctgcggttttgcggaggattatccgcaggagcagcagccggtcacccgtcaggagggcgattacctgccgcgctacgcggccaacatgctgccgctgcgccatcaggtgggaaattcctcgccgatttttaactaccgctacgaccgcagccgcgaggcgctgcacgacctgacccgcttcggcgaggccgacgagtgggacggctacaagatgcgctacgtcaacccggtcaccggcggctatccgatgccctcgatgggcgctttcctgcaactgttgccgaaagggttccactcgcgggtggcgaaaaccaccgacagcaccatctaccacgtggtggaaggctgcggtcaggtgacgattggcgaacaaaccttcatcttccaggcgaaagatatcttcgtggtgccgacctggcacggcgtgtcgttcaacgccagcgaagagtgcgtgttattcagcttctcggaccgtccggtacaggaggctttaggcctgttccgcgaagcgcgttattaa

SEQ ID NO: 219218 - DNA, 702 bp, Klebsiella pneumoniae
atgactcaatacgtttttgcaccccaggcgccgattagcatccccgttgttggcagcgatgagcagttcccggtacgccgcgtgtactgcgttggccgtaactatgccgctcacgcccgggaaatgggcttcgatcccgatcgcgagccgccgttcttcttttgcaaaccggccgatgcggtcgtaccggtggcggcaggcgaaacgctggatttaccgtatccggcgcagaccgacaactatcattacgaaattgagctggtggtggcgattggtaagcaggggcgcgatattccactggagcaggcgcaggagtatatctggggctacgccacgggtctcgatatgacccgtcgcgaccgccagatggagatgcgccagatggggcgcccgtgggaaattggcaaagccttcgatctttccgctcccatcgcgccgctgcataaagccgccgatgtccacaatgtcactcaggccgggatctggctgcaggtgaatggcgaggatcatcagcgcagcgatattcgccatctgatctggtcggtgaatgaaaccatcagctatctctcgggctttttcgaactgcagccaggggatctcattttcactggcaccccggaaggcgttggcgcggtagtgaagggcgatgtgatcaccggcaacgttgacggactgacgcctgttgccgttcgcgtggtgtga

SEQ ID NO: 219219 - DNA, 645 bp, Klebsiella pneumoniae
atgaagctgtacagtttttttaacagctcggcctcctaccgggtgcgcattgcgctggcgctgaagggaattgattatcaggccgttggggtcaatatccgcatcggggcgcagaatgcgctggagtaccggcggctcaatccggtggggctggtgccgacgcttatcaccgatgagggtgaatcgctgggccagtcgctggcgataatcgactggctcgaccgccactatccgcaaatgccgctactgccgcaggaggatccggcgcggatgcgggtgctggagatggtctacgccatcgcctgcgatattcatccgattaataacatgcgggttttgcgctacctgagcgacgagctgaaggtcagcgaagaggagaaacagcgctggtacgcccactggatccagcaggggttgagtgcgctggagcagttgctgcgccaggcgaaatctggcgattactgcgtcggtaatacgccgacgctcgccgactgctgcctggtgccgcagtgggctaacgcgcagcggatggggtgcgatctgagccattatccgcgctgccaggcggtttacgacgcctgtacccggctaccggcgtttatcgccgccgcgccggaaaatcaacaagacaaaattccggcctag

SEQ ID NO: 219220 - DNA, 1194 bp, Klebsiella pneumoniae
atggcgaaagtgacgcgagcaattatcgtcggcggcggcattggcggcgcggcgacggcgctctccctggcgcgccaggggatcaacgtgatgctgctggaaaaggcgcatgaaatcggtgaaatcggcgcgggtatccagctggggccgaatgcgttttcggcgctggatagcctgggcgtcggcgaagtggcgcgccagcgggcggtatttaccgaccatatcacgatgatggatgcggtgaatggggaagaggtggtgcgtatcgagaccggccaggccttccgcgaccatttcggcggcccgtatgcggtgatccatcgggtggacattcacgccaccgtgtgggaagccgcgctgacccatcccggtgtggactaccggacgtcgactcaggtggtggatatccgccagaccgccgatgacgtgacggtctttgatgacaaaggtaatagctggaccgccgatatcctgctgggctgcgacggcgtgaagtcagtggtgcgccagagtctgctcggcgatgcgccgcgggtcaccggccacgtggtgtaccgtgcggtggtggaagcggctgacatgcctgaagacctgcggattaacgcgccggtgctgtgggccgggccgcactgtcatctggtgcactatccgctgcgcggcggcaaacagtacaacctggtggttaccttccatagccgtgaaagcgaagagtggggcgtgcgcgacggcagcaaggaagaggtgctctcttactttaaagggattcatccgcggccgcggcagatgctcgacaagccaacgtcctggcggcgctggtctaccgccgaccgcgagccggttgcaaagtggggcaacgatcgcattaccctggttggggatgctgcccatccggtggcgcaatatatggcgcagggtgcctgcatggcgcttgaggatgcggtcacgatcggtaaagcgctgcagcagtgcgacggcgacgctgcccgcgccttcgcgctgtatgagtcggtacgtattccgcgtaccgcgcggattgtctggtcgacccgtgaaatggggcggatttatcacgccgcgggcgtcgagcggcaggtgcgtaatctgctgtggaagggcaagagccagcaggagttctatcgtggcatggaatggctgtacggctggaaagaagacaactgcctcgaaccgcgctga

SEQ ID NO: 219221 - DNA, 933 bp, Klebsiella pneumoniae
atgcgtgtattactggcgccgatggaaggcgtgctcgattcgctggtgcgcgagctgctgaccgaggttaacgattacgatctgtgcatcaccgaatttctgcgcgtggtggaccagctgctgccggtaaaatcgttctacaggctgtgcccggagctgcaccaccacagccgcaccccatccggcacccgcgtgcgcgtccagctgctgggacaatatcccgagtggctggcggaaaatgccgcccgcgcggtggagctgggttcgtggggcgtggatttaaactgcggctgtccgtcgaagctggtgaacggcagcggcggcggggcgacgttattgaaagatcccgagcttatttatcgcggggcgaaagccatgcgcgaagcggtgcccgatcatctgccggtgacggtgaaagttcgtctcggctgggacagcggcgaacggcgctttgaaatcgccgacgcggtacagcaggcgggcgccagcgagctggtggtgcatggccgcaccaaagaggatggctacaaagctgaacgcatcaactggcaggcgatcggcgagatccgccagcgcctgaccatcccggtggtcgccaacggtgaaatctgggactggcaaagcgcccaggagtgcatggccgccaccggctgcgattcggtgatgattggccgcggggcgcttaacgtgccgaatcttagccgggtgatcaaatacaacgaaccgcgcatgccgtggccgcaggtggttcagctgttgcaaaaatatacccgcctggaaaagcagggcgacaccggtctgtatcatgtggcgagaattaagcagtggttaggctatttacgcaaggaatataccgaggcgctgaccctgtttaatgaaattcgcgctctgcaaacctcagctgaaatagcggcggcgatcgcccgctattaa

SEQ ID NO: 219222 - DNA, 312 bp, Klebsiella pneumoniae
atgcgctaccgcgggctgtttgacgcccgtccggaggactggattggcttcggcctgacgtggatcgacatgagcagccactatgcgcggaatcagcgctatatgaaccagctcagcggcgccaccgactataacgatccggcttatcagccggtggccggccactcgctgaacggcgagctctattatcgcttccgtccggtctcctggctggagctgcagccgggcctgcagtactggcaccgtccgggcggcgttgcgcagacccaggacgcgtgggtggtggagtggaaaaccgtcgtgaccttctga

SEQ ID NO: 219223 - DNA, 834 bp, Klebsiella pneumoniae
atgcaaatcgccaaagtactcaataacaatgtggtggtggttcttgacgagcaccggcgcgaacaggtggtgatggggcgagggctggcctttcagaaacgcccgggcgacgtgctggatgacagtaaaattgaaaaagttttcgccttacaaagcgatgagctggttggtcgcttaggggagctgcttagtcagataccgttagaagtgatgaccacctgtgaccggatcattgagctggcccgcgggcggctgggtaagttacaggacagtgtgtacatcacgctaaccgaccactgtcactttgctatcgagaggcagaagaacggcgtcgcgctgcgtaatgtactgctgtgggagatcaagcggctgtatccgaaggagttcgcgctgggtcaggaggcaagggccattattgccaaaaggcttggcgtggagctggcggaggatgaagccggatttatcgccctgcatctggtgacggcgcagctcaacagcgaaatgccggaggtcatgcacgtgacccgggtgatgcaggagatcctgcagctggtgaagtatcagctgcagctgaattacgatgaagagtcgctaagctatcagcgtttcgttacccacctgaaatttttcgcccagcggatgctgacgcgcacggtggtggaagatgacgacctctcgttgcacagcgcggtgaaagataactacgccaaagcgtggaaatgtgcggaaacggtggcgacgcatctgcaaaagcagtatcagcgcgcgctgaccaccgaagaaattatgtttcttgccattcatatcgaacgggtaagaaaagaggggcgttaa

SEQ ID NO: 219224 - DNA, 1863 bp, Klebsiella pneumoniae
atggaatataaagcactcgcgcaggatattctcaaccgcgtcggcggcaaagagaacattgtgagtctggttcactgtgcgacacgtctgcgttttaaactaaaggataacggtaaagccgatgccgaagggctgaaggccaatccgggcgtcattatggtggtggagagcggcggccagtttcaggtggtgattggcaaccatgtccatgatgtctggcaggcggtgcgtcaggaggcgggattgagcgatgatagcgagccggttgccggggaaaaagcggcaaaagggtcggtgttaagccagcttatcgacatcatttccggcatttttacaccgtttatcggcgtgatggcggcgaccggtctgctgaaagggctgctggcgctggcggtgacctgcggctggctcatgccggagcagggaacctataaaatctggtttgccgccagcgacgcgctgttctttttcttcccgctgtttcttggctataccgccggtaaaaagtttggcggcaacccgtttatctcgatggtgattggcggggcgttaacccacccgctgatgatacaggcctttgaggccagccaggcgccgggggcggcggtggagcactttcttggcatcccggtgacctttatcaactacagctcatcggtgatcccgattattcttgcctcatgggtctgctgctggctggagcgcaagagcaacgcgctgctgccgtcatcgatgaaaaatttcttcaccccggcgatttgcttggcggtagtggtgccgctcaccttcctggtgattggcccggtcgccacctggctcagccatctgctggccaacggctaccagtttatctacgcgtttgcgccatggctggcgggcgcggtactgggcgcgatgtggcaggtgtgcgtgattttcggcctgcactgggggctggtgccgttgatgatcaataacatgacggtgctcggtcacgactccatgctgcccattatcctcccggcggtgattgcccaggtgggtgcggttctggggattttgctggccacccgcgatgcgcgccagcgggtgctggcggggtcggccttctctgccgggctgtttggcatcaccgagccggctatctatggcctgaccctgccgctgcgtcgtccgtttatcttcggctgtatcgccggcgccatcggcggggcgatcaccgccttcagtaatagccatgcttactcgttcggtgtgccgaatatctttttcccggcgcagatgatcccgcctggcgggattgacgccagcgtctggggtgggcttatcggcaccggcgtggctttcgtgctcgcctgcttgctgaccttcttcgccggtctgccgcgtgccagcgctgcacagggcgccgtagcggtagccccggcctcggcaaacgacattctggcgccgatgagcggtagcgttatcgccctcgatcaagtgccggacagcaccttcgccagcggcttactcggtaaagggattgccattatcccggcggtgggcaaagtgattgcgccattctcgggcgaagtggcctccctgtttcagactaaacatgccattggcctgcagagcgatagcggcattgagctgctgatccacgtcggcatcgacaccgttaagctcgatggcgcgccgtttaccgcgcatgttaaagagggcgacaaagttaaagcgggcgatctgctgattgagttcgatcgtcaggcgattctggacgccggttacgacctggcgaccccgattattatcagcaacagcgacgactaccgggaaattgatacggtggcgtccagcgccgtcgaagccggtcagccgctgttgtcagtcagccattaa

SEQ ID NO: 219225 - DNA, 1395 bp, Klebsiella pneumoniae
atgaaaacattcccggcggattttttatggggcggcgcgactgcggcgaatcaggtggaaggggcttacctggaagatggcaaaggcttatccacctccgatgtgcagccgcacggcgtgttcggcgaagtggtcgagcgcgtacccggcgacaacgggattaaggatgtggcgatcgatttttaccatcgctatccggaagatattgccctgttcgctgagatgggcttcaactgcctgcgggtgtccatcgcctggacccgcatctaccccaacggcgatgacgccgaaccaaacgaagccggcctcgcgttctacgacacgctgtttgacgagatggcgaagtacaacatcaccccgctggtgacgctgtcgcattacgaaatgccgtgggcgctggtgaaaaactacggcggctgggggagccgggaagtgattggcttctttgagcgctacgcccggacggtgttcagccgttataaaaataaggtcaaactgtggctgacctttaacgaaatcaatatgtcgctgcatgcccccatgaccggggtcggtctgccggccggcagcagcaaaggcgaggtgtatcaggcgattcaccaccagctggtggccagcgccctggcggtcaaagcctgtcacgagctggtgcctgagggcaaaatcggcaatatgctgctcggcgggctgatgtatcccctgagctgcaaaccggaggatgtgtttgaaacgctgcaggagaatcgcagctggcagttctttggcgacgtgcaggcacgcggcgcgtatcccggctatatgcagcgctatttccgcgacaacggcattacgctcaccatcaccgacgccgatcgtgaagcgctgaaaaccaccgtcgactttatctctttcagctactacatgaccggctgcgtcaccgccgacgaggcgctgaaccagcaggcgcgcggcaatattctcagcatggtgccgaacccgcatctggcgagctcggagtggggctggcagatagatcctctcggtctgcgcacgctgctgaatgtgctgtgggatcgctatcagaaaccgctgtttatcgtggaaaacggtctgggcgccaaggataaggtggaagccgacggcagcattcacgatgactaccgcatcagttacctgaacgaccatctggtgcaggcgcgggaagccattgacgatggcgttgagctgatgggcttcaccagctgggggccgattgacctggtgagcgcctcgaaggcagagctgtcgaagcgctacggctttatctatgtcgatcgccatgatgacggcaccggcaccctggcgcgcagtaagaagaagagttttgactggtataaggacgtgattgccagccgcggcgccagcctgaaagcgtaa

SEQ ID NO: 219226 - DNA, 486 bp, Klebsiella pneumoniae
atgacccgcagggatgagattgactatcgctgcgccgatctgcaaaccctgacgctgcccgccaactgctgcgatctggtttacagttcgctggcgctgcattatttaccggacattgctccgctctttgccaccctgcatcgggcgctggttcccggcggcacactggtcttttccgctgaacatcccatctataccgcccccttgcagcagggctggcaggtggatgagcagggacagaaaagctggccggtcagtcactatcagcaggagggtgagcgcgtcagcaactggtttgccgagggcgtcatcaagcagcatcgcaagctcgcaagctggataaacgcgcttatcgccgcgggttttgtgctggagcagctggatgaatgggggcccaccgccgaacagattgccgcccagcccgcgctggaggaggagaaagagcgcccgatgatctttttactgcgcgcgcgcaaaccgggctaa

SEQ ID NO: 219227 - DNA, 177 bp, Klebsiella pneumoniae
atgagccagaatatttatgacgacccgcagttttttgccggctatgcgaccctcgatcgctcggtgaaggggctggatggcgcacccgagtggtcatccctgcaggcgatactgccgccagtaaccggtttacgagtgatagatctcggctgtggctacggctggttttgccgctag

SEQ ID NO: 219228 - DNA, 1440 bp, Klebsiella pneumoniae
atgaaattgatattaaataaaagcgtgctggcggcattgcctctggccatcgcgctggctggctgcgcgccatctcatgagattgctaacccgccgcagcagcaaattccggcttcccacgtgtcgatggagctccctgccgccgtcaaaaatggctggccgcaaaccgagtggtggaaagactaccacgacccacagctcaataatctgatccagcgagcgttagccaacgccccggatatgcaaattgccgaacagcggatccgtctggcggaagcccaggccagaatgtcgcaagccaatcttggcccggagatggatttctccgccgatgttgaacgccagcgcatgtcggccgaaggcctgatggggccgttcgccaccgacaccgacggcaacaccggcccgtggtacaccaacggtaccttcggcctgaccgccggctgggatctggacctgtggggcaaaaaccgcgcactggttaaagcgcgcatcggcgagctgaaagcccaggtggccgagcaggcccagacccgcgaattgctttccggcagcgtggcgcgtctgtactggcagtggcagacagaagcggcgatcaaagcggtgctgcagcaggtgaagagcgagcaaaataatattgtgacggtcgataaggcgctgttccagcgtgggatcactaactctgccgaaggggcagagaacgatattaacgtcagcaaaactgaccagcagctggcggacgtagcaggcacgatgaaagagatcgaagcgcggctgatggccctgaccaacagtcagagccagtcgctcaatctcaaacccgccggcctgccgacggtcagcgcgcagctgcctgatactctcggctatgagctgctggcgcgccgcccggatctgcaggtcgcccactggtacattgaggcgtcgctgagtgaagtggacgcagcgaaagcggcgttttatccggacatcaatctgatggctttcctgcagcaggatgccctgcacttaagcgacctgttccgccactcggcgcagcagatgggcgtcaccgctggtctgacgctgccgatctttgacagcggccgcctcaatgccaatctggatatcgccagcgcgcagaacagcctgtcgatcgctcagtacaacaaagcggtggtggatgccgttaaccaggtggcgaaaaccgccagccaggtcgaaacattaatggcgaaaagccagcagcagcagcaggttgaaaaagacgcccagcgggtggtggacctggcgcaggcccggatgaacgcggggatcctccctggctcgcgggtaagcatggctaagctgccggcgctgcaggagcggattaccgcgctacgcctgcacggccagtggctcgacgccagcattcagctgacctcggccctcggcggcggctaccaccagacggtgaagtaa

SEQ ID NO: 219229 - DNA, 756 bp, Klebsiella pneumoniae; identical to SEQ ID NO: 36288

SEQ ID NO: 219230 - DNA, 264 bp, Klebsiella pneumoniae; identical to SEQ ID NO: 164762

SEQ ID NO: 219231 - DNA, 192 bp, Klebsiella pneumoniae
atgaaagtagcggtaattaattacagtggcagtgttcgtaaaaccttaatttcatcttacctgttagccccgcgcttgactggtgcaaagttctatgcggtagagactatcaaccagtctgcttccgatctgggtattgaaaatgtgaccagttttaaaggtgacgacttctcacgtttgattgaggggtaa

SEQ ID NO: 219232 - DNA, 336 bp, Klebsiella pneumoniae
atgaataaaccagcagatctgaaaccccgcaacttatcggctgctgtcagattgcgcctaaatgaaatcgagaactggctggacagagggctaacgcggcatgaaattgctgaaatcctcgacagcgaatacagcttttcggtaacagccaaagggcttgagatggcactgtatagaacgcggcaaaaccgaaaaaatgtattgcacaatacacaaccgtctgagcctgaagcgcaggaaagtaaaaaagcagagagtcccggcattattgataaagaattcttcaagaaaatcggtgagaatttcgaccctaagaagttcaacaaaaaattctga

SEQ ID NO: 219233 - DNA, 678 bp, Klebsiella pneumoniae
atgcaaaacaggctggacaataaacagcaggccattattccaattgcggctttcgccgcaaagggcgacacagaaaaactcgctgctgaaatacagcacgggctggatacaggccttaccatcaatgaaatcaaagaagtcctgattcagctctatgcctatgccggttttcctcgcagcctgaatgcccttgccgtgcttatgggcgtggtggaacagcgtcagcagcaaggaattacggataatgcgggagaagacgcatcctcttttcctgagaactggaatgcccttgaaggtggcacgcaaaaccagacgcgtcttatcgggaaacccgtaacaggcccgctatttacctttgcgcctgcaattgaccagttccttaaaacgcacctgtttggtgatattttccagcgtgacaccctgagctggcagacgagggagctggccaccatttcgtttctggctgcaattcccggtgtcaccagccaactgaaaagccattatgccatcagtctgaatgcgggattgacggctgagcagctgtgggcatttacggcaattctgggtcaaaaatgcggtgctgatatggcagacaacgccaggcccgtgctgggtgagctgctggatgaaacaaaaacgccccggcacggtggcttatccacaccgtggctttgttga

SEQ ID NO: 219234 - DNA, 810 bp, Klebsiella pneumoniae
atgactgacattatcgatccttaccatttcacggctggcagtgcaccgttgcttatcagtattccccacgcgggaacacaactgacgcaggaggtcgacaatggtctgagcgatgccgcacgcccgcttggcgataccgactggcatattccccgcctgtacgattttgctcacgccctcggcgccagtatgctggtcgggaattattcccgttttgttatcgacctgaatcgccctgctgacgatacgccgctctataccaccgccaccacaggattgtacccggagactttatttgatggtcgggacagctttacgcccggcatgacgccgacagccgcccatcgtcggcactatctggcgcaaatctggcacccttaccaccagcgtatccagtcagagctggcgcggataaaacaccagtttggttatgcactgctgtttgacgcgcattctattgcatcggttatcccgcgtctgtttgatggtcggttgcctgatttgaacctcggtaccaacggcggcgccagttgcgctgcagccctgagcgaccgtctggtcgattgctgtcagaaacagtcgccattcagccatgtgcttaatggccggtttaagggcggctatattacccgggcatacggacagcctgacgcgaatattcatgccgtgcaacttgaactggcgcaggtcaattatatgaacgaaatggcgccttatgcgtatgcagaggaaaaggcccctcaacttcaggcgctgctgcgatccttacttgagaatatgctcgactgggcagatagccactatcaataa

SEQ ID NO: 219235 - DNA, 1263 bp, Klebsiella pneumoniae
atgtccttagcctcgtccctttgccttactgtcacgcccccggagcactgtgacagtgtctggcgcggcgccacgctggtcaccatgcaggatggccgttacaacgtgatagaaaacggcgcattggcagtgacggagggaaaaattgtctggcttggccgtaatgccgactgcccggcgtttccccatgcacaacagcatgtattcgacggcgggataattaccccgggatttatcgattgtcatactcatctggtgttcggcgggaaccgcagcgccgaatttgagcagcggttaaatggcgtaagctatgcagaaatcgccgcggcgggcggtggtattttatccactgtaaacgccacccgggacgccacggaagaggaactgctccggcaggctttattgcgtttgcaaccgctgctggccgagggggtcacctgccttgaaattaagtcaggctacgggctgaccctggacagtgaattaaaaatgttgcgggttatccgcaaattagccactctgttgcctgtcgatattcagtccacctgtcttgccgcccatgccctgccgcccgagtacaaagaccgggcggaggactatatcgactttatttgcgataccctgctgcccattgtcgccagagaaaaactggcggatgccgttgacgcattctgtgagcaccttgcgttctccccagcacaagtcgagcgcatttttgatgctgcacaggctttggggttgccggttaaattgcatgcggaacaactctctgccctgcatggcagttcactggcggcaaactatcacgccttgtcggcggatcaccttgaatacgccacccaggaagatgctcacgccatggcggccagcggcactgtcgccgtcctgctgcccggcgcatggtatttactgcgtgaaaaacagcacccgcccgtgaattttttccgccagtatcaggtgccgatggccctggcgagtgatgccaacccggggacatccccggtgctgtcattgcgcctgatgctgaatatgggctgtacactgtttggtctgacgccggaggaagcgctggccgggattacgtgccacggcgcgcgcgccctcggtctggccgcgtctcacggtacgcttgccgaaggtaaggttgccgattttatccactggccgctgtcgcgaccggctgaactgatctactggctgggcggtcaattgccctgcacggtggtctatcgcgggaaaatacgaggaaacgttcatccatga

SEQ ID NO: 219236 - DNA, 801 bp, Klebsiella pneumoniae; identical to SEQ ID NO: 129120

SEQ ID NO: 219237 - DNA, 1374 bp, Klebsiella pneumoniae; identical to SEQ ID NO: 129119

SEQ ID NO: 219238 - DNA, 597 bp, Klebsiella pneumoniae; identical to SEQ ID NO: 129118

SEQ ID NO: 219239 - DNA, 987 bp, Klebsiella pneumoniae; identical to SEQ ID NO: 129117

SEQ ID NO: 219240 - DNA, 882 bp, Klebsiella pneumoniae; identical to SEQ ID NO: 129116

SEQ ID NO: 219241 - DNA, 786 bp, Klebsiella pneumoniae; identical to SEQ ID NO: 129115

SEQ ID NO: 219242 - DNA, 1551 bp, Klebsiella pneumoniae; identical to SEQ ID NO: 129114

SEQ ID NO: 219243 - DNA, 1683 bp, Klebsiella pneumoniae
atgaacgcgccacagaaaaatgccgccgcccatgtcgttcgcgctccccagggaacagcgctgagttgtcaaaactggttgatcgaagcggcttatcgcatgatccaaaacaaccttgaccccgatgttgccgaacgcccggaagacctggtggtctatggcggtattggtaaagccgcccgcaactggcctgccttcgaagccattctggacagcctgcgggcgttgcgtgaagacgaaaccctgctggtacagtccggtaagccggtcggtgtttttcgcacccataccaatgcgccgcgcgtgttgattgctaactccaatattgtgccgcactgggcccactgggaccactttcacgaactggataaagcgggcctgatgatgtacggccagatgacagcaggctcctggatttacattggtgcgcagggcattgtgcaggggacgtatgaaacttttgccgaagcgggccgacagcactacaacggcgacctgcggggcaaatggattctgacggcagggcttggtggtatgggcggcgcccaaccgctggctggcgtgctggcaggggcctgcgtcctggccattgaatgccaggaatcccacattgatttccgtctgcgtacccgttatgtggactataagacccgcagcctcgatgaggcgctggcgatgattgaaaaagcctgtgcggagaaaaaagccatctctgtcggcctgctgggcaatgccgctgagttgatgccgcaactggcggcgcgggcaaaagcgggtggcctgcgtccggatattgtgaccgatcagacctccgctcatgatccgcttaatggctatctgccggaaggctggagcctggaaaaatggcaggccgcccgtcagtcagatccgcaatccgtggtgaaagccgcccgcgcttctatggcaaaacatgtccaggccatgctcgattttcaccatatggggatccccaccttcgattacggcaacaatatccgccaggtcgccaaagaagagggcgttgaaaacgcctttgatttcccgggttttgtcccggcctacatccgcccgctgttctgtgaaggcaaagggccattccgttgggttgccctttccggcgacccggaagatatctataagaccgacgcgaaactcaaagaactcttcccggacaacaccaatctgatcaactggctggacatggcgcgtgagcgcattgccttccaggggctgcctgcgcgtatttgctggctgggcctgggtgaacgtcaccgcgccgggctggcgtttaacgaaatggtgcgtaacggcgaactgaaagcgccgattgttattggccgtgatcatctggatacggggtcagtggcatcgccgaaccgtgaaaccgaagcgatgaaagatggctctgatgcggtatccgactggccattactcaatgcattgctcaataccgccgggggtgccacctgggtcagtctgcaccatggtggcggtgttggcatgggcttttcacaacatgccgggatggtgattgtgtgcgatggcactgaagatgccgatgcccgactggcgcgtgtgctgtggaacgaccctgccaccggggtgatgcgccatgcggatgctggctatgaacaggcaaaagcctgtgctgaacgtcatcatttgaatttgccgatgatctga

SEQ ID NO: 219244 - DNA, 1167 bp, Klebsiella pneumoniae
atggcttctgatgtagcagtttccagttcacttgttgattcacaacagcagatactgaaaaacctcgccaggcccacagcgcggtcattaagcctgtataacgccgggttgtcggcggaagcggtacgacagcaatatgggttgagccatatcgccaaactggccagtaatgaaaatccgctgggcgccagcccgcaggtcatcgcggcactgcaggcggatgccggtttcagcgcagtctattcggatgctgccagtacagcgctgcgcgatgcgctggcaacgtataccggtgtgcaggccgggaatattgttatcgggaatggttcagaagatatcctgcatatgctggcactggcctttctcaaccccggggaccgcgtggtcacattgcgaccttcatttggtctgcatgagattttcccgcgcatgatgggcgcggacgtcaccctggttgacgtgaataagcagcatcagttcgatatcgccgcctggactcaggcactttcgatgcccgccaaaatggtgattttcagcaacccgtcgaatcccgtgggctgcatgctcgacaatgcaggttttgagcgcatcatcgccgcggcacctcaggactgtgtgctggtgattgatgaggcctatttcgaatattgccggaacaacccggattatccggacagccagcgtgtgctggccgcgcagtcgcgcccctggattgtgctgcgtactttttcgaaagcctacggcctggcgggattgcgggtgggctatggcttagccagtcaccctgaactggtcaatctgctcaatcgcgttcgcacaccgtttaatattaaccgttcggcacaagcggcggccgtggtagctctgggggatcagcaacatgttaatgacagcattgcgctggtcagtgcgcagcgcgacatgatgtcggcgcagctcacggcgctgggtttccgcgttgcgccatcctgcgccaacttcctgttttttgactgcgggcagcctgcggcagaactggcgcagcgtctgctgtgcgatggcgtcattatcaagccatggcgggagaaggggtatgaacactggatccgggtgtctgtggggaatgaacaggataaccagcagtttattcggagcctgaaacgtatcctggcggaggatgccgcgtga

SEQ ID NO: 219245 - DNA, 1158 bp, Klebsiella pneumoniae; identical to SEQ ID NO: 37168

SEQ ID NO: 219246 - DNA, 1086 bp, Klebsiella pneumoniae; identical to SEQ ID NO: 37169

SEQ ID NO: 219247 - DNA, 219 bp, Klebsiella pneumoniae; identical to SEQ ID NO: 129109

SEQ ID NO: 219248 - DNA, 534 bp, Klebsiella pneumoniae
atggagcagcaactgacgattgagatgattgccgatgcgttcagctacgatatcactggatttgattgcggcgaggaagcgctgaatacgtttttaaaagagcacctcaagcggcagcacgatggacaaatcttaaggggttatgcgctggtctccggggatacctttcccaggttgctgggttattacaccttatcggggagttgtttcgagcgaggcatgttgccgtctaaaactcagcaaaagaaaatcccgtatcaaaatgcgccaagcgtaaccctcgggcggctggccattgataaatctgttcaggggcagggctggggagagatgttggttgcccatgcgatgcgagtggtgtggggagcgtctaaagccgttggcatctacggattgtttgttgaagcccttaatgagaaggctaaagcattctatcttcgcctggggtttatacagctcgtggatgaaaatagtaacttactgttttatccgaccaaatcgattgaacagctctttactgacgatgagtcataa

SEQ ID NO: 219249 - DNA, 1434 bp, Klebsiella pneumoniae
atggccgctaagcgccccttttccctggccacccggctgaccttctttattagcctcgccaccatcatcgccttctttgccttcacctggatcatgatccattcggtgaaggcccactttgaagaacgcgacgttcacgatctcaagcagctcagcaccacgctggagacggtcctcgaccatgccgactatccgcaggcgcggcggctggagatcgtgaggaatatcattgcgggttacgccaacgtttttatctgtctggacgacggccagggcaatattctgtttcagtcacccgacgggccggatctcagccatatgctgagtacgccggggctggcgatgcagctgcgcgacgggaatgtgatttcatggactgacccgcagccgcgggcaatggtgcatgataatcatccaatggagacccgcgcctggcggctgattatgctgccgctgggcaagcaggcggacggcaaaccggcgtaccacctgctgatggccttatccatcgattttcacctgcactatattaatgagctgaaagcgaagctgatttccgcggcgacgataatcagtttgctgatcatcgccatcgtgctgtttgtggtctatcaggggcataagccgatccgccagatcagccgccagatccagaatattacctcccgggatcttgacgtgcgcctcgacccgcaggcggtgcccatcgagctggagcggctggcgctgtcgtttaaccatatgctggagcggatagaggatgtctttacccgccagtctaatttctccgccgatatcgcccatgaaatccgtacgccgattaccaacctggtgacgcaaaccgaaatcgccttaagccagagccgcagcccgcaggagctggaagaggtgctctattccaacctcgaagagttttcacgcatgtcgcggatggtcagcgatatgctgttcctcgcccaggcggataataaccagctgatccccgagcaacaggcgctggatctggccgaggaagtgcataaggtgtttgagttctttgaagcgtgggcggaagagaaagaggtggcgctgcgttttgtcggtagccactgccgggtgactggcgatccgctgatgctgcggcgagcgatcagcaacctgctgtcgaacgcgatccgctatacccctgccggccaggcggtgactatccagttgagcgacagcgccgagacgatccgcctggtggtggagaaccccggtacgccgattgccgccgagcatctgccgcgcctgtttgaccgtttctatcgcgtcgacccctcccgccagcgcaaaggcgagggcagcggcatcggcctggcgattgtgaaatccatcgtcagcgcccatcacggcagcgtggcggtgcagtccgatcaacgatctacgcgttttattgtggtgttgccgaaatag

SEQ ID NO: 219250 - DNA, 684 bp, Klebsiella pneumoniae
gtgaagattttgattgtcgaagatgagaagaaaaccggagagtacctgaccaaagggctcaccgaggccggcttcgtcgtcgacctggccgataacggcctcaacggctatcacctggcgatgaccagcgattacgatctgctgatcctcgacatcatgctgccggatgtgaacggctgggatatcgtgcgcatgctgcgcgccgccgggaaaggcatgccgatcctgctgctcaccgcgctcggcactatcgagcatcgggtgaaggggctggagctgggcgccgacgactatctggtgaagccctttgcttttgcggaactgctggcgcgggtgcgcacgctattgcgtcgcggggcggcggtcatcgtcgaaagccagtttcaggcggccgatctcagcgttgatttggtcagccgcaaggtgacgcgcggcgcgactcgcatctcactgaccagcaaggagtttaccctgctggagttcttcctgcgccatcagggcgaggtgcttccgcggtcgttaattgcttcgcaggtctgggatatgaatttcgacagcgacactaacgctatcgacgtggcggtgaagcggctgcgcgccaaaatcgataatgacttcgagccgaagctaatccagaccgtgcgcggcgtcggctatatgcttgaggtgccggatggccgctaa

SEQ ID NO: 219251 - DNA, 141 bp, Klebsiella pneumoniae
atgaaatatcaggaaaatgacagttttgtcattttcctgtcacgcgttgaacagagcccgctacgtaaagtagccgccatggataaatcgtcgaaacgtctgccgccatgcgttcaatacagctacttaccctcagcgtga

SEQ ID NO: 219252 - DNA, 2406 bp, Klebsiella pneumoniae; identical to SEQ ID NO: 95355

SEQ ID NO: 219253 - DNA, 2400 bp, Klebsiella pneumoniae
atgaaattcaagcttttggcggcactaatactcggcaccctttcaatgtccgtccattcccgtgtttatgagtacaccatcaaagatatctacggtgtggagaaatcagtcagcgccgattcagcgaagctgaacaccacggaaaaaatccagcttagcctgatttcagggctggacaggaaaatccgggtgacggtgaaaaaaggcgacgtgaatgtctacagcacgacgacagaaagcgtgaaagttgccgatcgcatcaaatcatcatcagatgaagagttttacgggaaagtgataaccctgcccccgttaagtgatgggctgtataccatcacttcggaaatattgaatacccaggatgcccttattgattcgacaacccagtcattcctgattgatacgtctggccccactgccgataacatgagtattgaccagcgtccgggatatgacatggtccttaccggaaacctctgggagctggggttgggggcagaagcaaaactctatgtcaccgtcaaaaatgtgaaagcgacggccggttttgataaagccactatccagatcctaaatcctgataataccgtctattccaaaatggacatggtttacgacagcggttctgcatcgctttctgttccgtggaccaaggggagcgcggttaaagccgactggatgccggtgtccaatgcggatacagaatatcgctttcgtgtcacgctatacgacaaggccggtacccgaaaagtcctgccggatcagaagttcctctttgactcggatttaggcgaatacacgctagtcgcggtgtatgaccctacagctgaaaccagtgttatacccgaattcagtaaaggctatgttgaatataaatcggggatgacggttaatctgaaccccattacatttgtctaccgtgtcccttctacgaaccgcagggagtacagaaaaggcgggctggccttcgggaacataatttctgaggcgaacggctacagctatgtgtcggtcacgaccccttaccagacgctctctgttatccataacggttatcagtgggggggagccagtgttacctacaatattaaaatgggtgcagatgcgccggtaagcccaactactcctgacgtgtggattacctcggacaagaaaagcgcggtaagctcatatgattacatctggaaaacatccgatctccctgtgacatttcttactgcccgcgtgaaagcgtcggcacgaaattacatccaaaaggctatgtctaataccggcgatttcttgtgtgacattcctgtcggagagctggagtgtgaagggaaaattatagggaatattcaaaaaagtggtaacggccatatggggtttttcttcaagatgaccaacgccgatggctcccttttctcacaatatgctgaaaggcggcaatactggaatgctgaccagttacccagaattactggctatgattaccaggaagccaagaaaaaggttctgctatttgtgaatctgccggggaacggcagtttacggtacaaattgcagcttaagtctgctgttctgattaatgcagattcaaatgtccaggtgttaaccggtaccaatacagcgattgctggtgatgattacacctacacgtttgatttgggagctctcccggaaggcaaatataacctttccttccttgccaaagacaccttcgataatgaatcgtcttccccgttcatcacgctggtgaacgatatgactcccccggacgtcatatttaattatgaaaatgcccctctcgcttccggttctaccgtgtacgggctggagaacatcgcgatcagcctgaatgacgcgctgacaaagcctgttctcgaacgtcttgagctgaaaggtggccccgcatctgatagcgtgatccttggcttcaaccagaatgccgatggctcctatacgccagattatccccgtctgttccctacccttgacgaaaataccgataaatacaccctgacggcgtatgcaacggataccaaagggaacgccacgcagaaaagcattcagtttgcctactatccgaaaaatctcgtgaccctggaaaaactcaaaacgctgggtgtggtgaaggcgctgaaaaccagtgacaacacaccgctggccgtcatgcgtaccgggcagttgaggcgtaacgatggctccctggttcagggtgtacaaacggccaacatcacgctcaggactgacgctaattatgcgatcaacattctgggtactgtcattcagccgggcgaaaccaaagaaatccagatagacctcggcgctggtgtaaacgccacagtcccaattttcccggcgacaaacggcgctaccgggcaaagcgatttcatcattgagtttccgcaaattaaatag

SEQ ID NO: 219254 - DNA, 678 bp, Klebsiella pneumoniae
atgcgctgttccaaaaccagaatcgccctgattgattatgaaaatatcggaagcctagagggtgtttcccttcatgactttgacaaagtgcttttcttcacgggcgctaaacaggaaaacattaaaattcctgttacggccctgagctcgacgatttctgtacgcatcattccggcgactgaggtatccaaaaacaatgtcgatttccatctggttctggaactcggccagctgaccgcgttagccggggatatgtcacacttctctgttatctcccgtgacaagggttatgacggcattatcacccgtctgaatgcagcagggatcagctgtacaaggttctctccagccctgcccgctccgcacccagttaaagacacggcttcaacaatgaatgtgatgaaagccaaagagcatgacatgggctactggattaacagattgaagcttgcctgcgcatcctcccctaaatcgctcccggcaacgccaaaggctttacaaaattacctttcaaatttgacggggcaaaaggcctgttcattgctgaacgaacggattaagcaggagctaattcgtcttggtttcattacgatttacgaaaaaacgctggtctggaatcgctcattacactcaccagcccagaagagcaggcgtgctgttctccagcaggtgaaataa

SEQ ID NO: 219255 - DNA, 417 bp, Klebsiella pneumoniae
atgagctcaaaacacgtggttattagcgcgaagcatccggttgccgggtacctgtaccttgaaatgatcccggatagcgaggtggggttttcagatatctatcagataacagacagtctttttcgtgcagacgttctgccctctgactggcgagagcaaaagtggaagtggggtaaggaatttctgggccacggttcatgggatgtgtactacatcaagcagcatgtgaaccggattaactggtttgacaatgacgtcattaaaacaatcgtggccaggaacagcctgtccattaaagagcttattgactgggtttccgaccccggccgttggatagatattgccgtcgaggtggatgattccagcggctccagacctatggccgtagccatggtgaatcaggacacgctcttttag

SEQ ID NO: 219256 - DNA, 771 bp, Klebsiella pneumoniae
atggcagagcataaattacactcaggtgaaaaaatactggtgctgggcgcaggacaactcggggcggctgtactgcagcatctgctccccgcagtctctcagcgagaaggcactgtgtgcgttatcgtttcgcctcgtgccagggatgaacaaggtcaactgcgcgcttccacgcatcaaaaatatgtggatgccgaagcaaaattaatccctctggacatcgccaacagcacgatggacgccctgaaggatcagtttaaagagtttgataccgttatcaattgtatggggtttgttgcaggcgcaggcacccagataaaaattacccgcgcagtactggaagccggagttaaccgctactttccatggcagtttggtgttaactacgatgtcgtcggcaaaggcagcggccagccggtctgggacgaacagtatgatgtaagaacattactgcgagaacaacacaacaccgaatggatcattatctccaccggtatgtttaccagctttctcttcgagcctgcattcgatgtggtgaatttatccgcacggactatcaatgcgctggggggatgggacacacaggttacagtaacttctccggaagatatcggccgactcaccaccgacatttatctacatcagccgcgtattgccaacgaagtggtgtttgttgcaggagaaacgacttcctatggtgaactggcagaaacggtcgagcgagtgacacaacaaacctttgtaaaaaaggttcttgtagtggtcaagtaa

SEQ ID NO: 219257 - DNA, 906 bp, Klebsiella pneumoniae
atggataaactggcagcaatgcaggtctatgtcagcgtggtggaaactcatggctttgcaagagcggcagaagtgctgggtctgccacgctctacggtttctagggttatccgggagctggaatcctggcttggtatccagcttttgcagcgtactacccgcaaactcagcatcacggcggagggcctgcgctactacgacgaatgcaaaaggatcctgacggatattgcggccatggagtcgtcttttcccacccgatctgagcagccaggaggccgtttcaaagtggggatgccccattccctcgcccgacattgcattatccccgggctcccgtcgtttctccgccagtaccccgggctggaagtgatgctgtgctcaagcgataatgttgaggatatcatcagggaagggtatgactgcgtgatccgtactggcaggatcgaagattcaacaaccctggttgcccgcccactgcctggttttacctgggtcgttctggccgcgccgtcttatattgatgctttcggcaagccgcaaaaactggatgaactggaaaagcatcacgcggttggctatctgaatcaccgcaccggacgcacaactgaatggttttttacccttgatggtggggatcgggcgatccgtatgagagaggtgctaatcgttgacgataccgatgcctatattcaggccgggatagagggggttgggttaatccgtgtcgccagttatctggctatgccgtacctgcaaagcggggaactggtctcctgtctggagaacagcacctctaaattaccgctatccctggtatacccctatagccgttatataccaccgtcagttcgcgctttttatgactggagcagaacgatgttaagtcacccggataatcgtcagtaa

SEQ ID NO: 219258 - DNA, 558 bp, Klebsiella pneumoniae
atgcatgacagcctgcctgcggagaaagcgtaccgtattcttgaagctggtcccgttattctggtatccacgagggggacagatggccgaacgaatctgatgaccgcaggttttcacatgatgatgcagcatgccccaccgctggtcggtgtgattatcggcccctgggattacagctatcaggcgctgtcagatacaggggaatgtgttctggctgtaccgccagccgggatggcaaagaccgttgtggacatcggtaattgctcgggggaaacagacgacaaattttcgcgtttcggcctgacgcccgtcgccgcgcaatcgatcagtgcgcctctggtagatgaatgcctggctaacctggagtgcagagtggtggatgaccgccaggtgcggctctataacctgtgggtgctggaagttcggcggatttggcttgacagcgcatggcaggaactgcgcctgctccaccatcagggcgatggccgtttcagtgtcgacggagagatgcttgaccttagtgacaggatggtaaaatggcgcgacctgatgaactga

SEQ ID NO: 219259 - DNA, 858 bp, Klebsiella pneumoniae
atgcaacaacaaacctcccctgcaaaagtctggtttatcaccggcgctgctcgtggtattggcctttcactggcacgccagttactggcgcgaggcgatgccgtagccgcaacctcccgcaccctgaccagtctgcgtcaggcattcggcgacgataacgcgcgactgctggcgctggaggtggacctggtgaacgaagccagcgttcaaaaagccatcgacagcaccattgccgccttcgggcgcgttgactgtgtggtcaacaacgcaggctacggccagcagggcaccattgaagcattaaccgacagcgaattgcgtcgcaatttcgatgttaacgtatttgctcccctgcatgtactgcgccatgccctgccgcatatgcgtacgcggcgcagcggccatatcttcaacgtggcgtcgatcgtgggctttcagggcggttacgcgggctggggcagctatgtcgccagcaaattcgcactggccggtctgaccgaaaccctggcggccgaactggccgagctgaacatcagagccacagtggtttatccaggaccggtgcgcaccgggttcctgtcaaaggagacgctggtcgtggcccagcgcacaatctctgattataccgaagctcaggcctcgctggacctccatctgaacggtctggacggcaaacaggctggcaatcctgataaagtcgcttctctgatactgcaggcggccagtgctgacaccccacccgtgcatctttttgcaggtaagattgctaacacccttgctgaacaaaaaatgcatgcagtgagtcaggacattgatgtctggcgaagtgcgtcagatgccacggattttgaagagtaa

SEQ ID NO: 219260 - DNA, 768 bp, Klebsiella pneumoniae
atgtcagagtcaggctctttttccagggctatgccctttgcaggccgtgttgcgattgtcaccggtgccgccagcggtatcggcctggcgaccgtcgaactgttgcaccgccagggcgctcgtatcgtcgcagttggccggggggataatgtcaatgcgctagcacgtgaaggcattgtccccgttgtcgccgacgtgactcaggaagccagtgcggaactggccgtgcggactgcaacagaacagttcggtcgcctcgacgtcttaatcaacaacgctggcatcatcatcaaccagcccgtggcagaaatgacgctcagggaatggaaccaggtcatggctgttaatgccacgggggcattccttttttcaagggaagccatgcgcccaatgatggcggcaaaatcgggtgcaatcgttaatattggttcttacgcctgttatcagtcttttcccggtatcgccgcctatgcagcctccaagggggcgctggcacagttaacccgcacactcgcgctggaggctatcgctcacggtattcgtgttaatgcagtcggttccggagatgcggtgacaaacatcacgaatacaatccagcccgacgggcaggcatatctggcagagcatggtcgtaaagcgcctgttggtcgtgcagcccaccccgatgaaatcgcagaagtagcagcctttctggcgtcagacagggccagttacattgtcggcgcagtggttatggccgacggtggcatgagtgtcgccattcagtga

SEQ ID NO: 219261 - DNA, 744 bp, Klebsiella pneumoniae
atgaaaacagtggtatcagaaacgtctaaggtggtcattcttaccggtgccagtagtggtataggtgaggccacagcccgtcatctttccagtaaggggcatcatttgtttatcggtgccagacgtatggaaaaactgaccgcactggcgacagaattgcgggcaatggggggtaatgttgatgccatggcaattgacgtcacgcaaccagaagatttgcaacgcatcgcagccagggcgctggagaagcacggacgcattgacgcgctcataaataacgctggcgttatgccactctcaccgctggcagcgttgaaggtcgaagagtggaaccgcatgctggatgtcaatgttcggggcgttctgcacggaatagccgccgtcctgccgatcatgcaggagcagggttatggccacatcattaatattgcctccacaggcgcgtatacggtctcgcccacagccgctgtctattgcgccagcaagtttgccgtgcgcgctatttctgacggactgcgacaggagaccgacgcgatccgggtgacgctggtcagcccgggggtggtcgagtcagaacttgccgatcatattacggacgaaacagcccggactgccatgcgcgaattccggcgcatcgccttacctccggagcccgtggcgcaggcaatcgcctatgccatcgaacaacccgctggcgttgatatcagcgaactcatcgtccgccctgtggccagtcctcattaa

SEQ ID NO: 219262 - DNA, 945 bp, Klebsiella pneumoniae
atgccagaaagattgccctccatatctcaacagtccgaaatggcggctatgatttgccagctcgccccacatgaaggtcacacccgtacgttgctggatggcgtgcgtctgatgcgtgctgacggtgcgctggggcgtacccccgtgttgtacgaaccaggcattgttattgtctgtcaggggcacaaaagaggttacctggctgacagggtttaccactacgaccctttgcactacctggtgctgtcagtacctctgccattttcaagcgagacagatgccagcccggcagaaccttttcttgctgtgtccattcggctggatatgacagctgtggcagacctggttatggctgtcgatcaccatgccactgcatcaggttcacccgttggcattgtctccacaccacttgacgacacgctggcagatacgacagttcgtcttctgaaggtattattttcaccacttgaagcgcgggttctggggccggggattgtgcgggagctgatttttcgtgtgctgctgggtgaacagggcggagccattcgtgctgcgctggcctgccatggcaactttggacgtattgcacgtacgttacggcgtatccacctcgattacgcccgtccactggatgtggcttcacttgcgcacgaagctggcctgagcgttccggcttttcatgcgcatttcaaagccgtggcggcgacttctcccattcagtacatcaagtcagtacgtcttcatcaggcgcgactgatgatgatacgggacaacgttactgcagcaggggcagcagctcgggtcggctacgaaagtgcgtcgcagttcaatcgggagttcaaaagactgtttggtcgcagtcccggagaggagacacgtaaaatgcgcacggcattcgcactgatggaacctgcgcaactcgaagcagcgacatcgacacactaa

SEQ ID NO: 219263 - DNA, 375 bp, Klebsiella pneumoniae
atgtcattcgataatgtgttagaacagttatgggtctgcctcgtcattgcactgatgtccagttgcatttcaatcaccgtcacgcagcaggaaatgtttcgcccgttgcgtgaatggatggtcaaaaaaaatgccatgataggctacctgttcagttgtttttattgtttcagtcactgggtggtttttgccggtgttgcaatttacaggcccgttcttgttcattccggattctggttaattgaccttgcggttacggcattctttaccatcggtttaacggctatgttcagcgggatcattctgaaagtaatgagaaacgctatcgccaaagcaattgaagaaaaagaaatgaaagacaagctgggtttgtaa

SEQ ID NO: 219264 - DNA, 420 bp, Klebsiella pneumoniae
atgagaaaagaccaccggctgtcccgtgcattacacgtgctgatacatatggataaaatccgcgatcccgttacctccgaagatttagcctcgatgatcaatacgaatccggttgtggtcagacgccttttccaggggctcaaacaggcgggtatcattcattctgaaaaagggcatggaggtggctggacactccagaaacctctcggagacatcactctccttcaggttttccacgctattggcagcactgaacttttttcaataggctgggcgactgaacatgacaaatgccagatagaggatgcagttaacaatgaaataagtgatacgcttgaagaggcgagacgtctgattacgaaccgctttgctgaacttacccttgataagcttgtgccggaagtccttaaacataaataa

SEQ ID NO: 219265 - DNA, 3192 bp, Klebsiella pneumoniae
atgaaagtatcaaaattctttatcgacaggccggtttttgctggagtactgtctgcgttgttcattctggcagggattatcgccatatttcgtctaccggtatcggaatacccaccggttgtccccccatccgttatcgttcatgcccagtatcctggagccaatgccactacgattgcacagacggttgcagctccaatagaggaaactgtgaacggcgtagagaatatgctgtatatgcagtcactttcaaatgaggatggcaatctctatctgacagtgaccttcaaactgggcacagatcccgatcaggctcagcaatgggtgcagaaccgggtgtcgcaggctctgccccggttacctgaagatgtccagcgactgggtgtcacaacgaataaaagctcgccgaatatcacacttgccgttcatatgatatcgcctgatggcagatataacgataattacatcagtaattacgccatacgtaacatcaaagaccagctctcgcgtattgagggagttggccaggtatcagtatggggccccggtggttacgcgatgcgaatctggcttaatcctgatgctatggctgctcgcggactgacgacatcagatgtcgcctctgctatccgtgaacaaaacgcccagtcaccagtgggaagcgttggcgcagcccctatggcagaagaaacaccgttacagttgtcagttaatgccagcggtcggcttaaaacggctgaagaatttggcaacattgtgctccatgcccgacaggataccagaacgacattattgaaggatgtcgcccgtattgaactggccgctgaaaattatgccatgcgtacttacctggataaaaagcctgcggtagcgctggccatacaggagtctccgggcgcaaatgctctggaaattgcctcacaagtaagtcgcacaatgaaagatctgaaaaaacagttccctgaaggactggattaccagatagtttataatccaaccaaatcagtcagggcgggtatagaagctgtgcttcatactctttttgaggccatactcctcgtggtactggttgtttttcttttcctccagacctggcgagcatcaatcattcctctgctggctgttcccgtttcgataaccggcacaatggcatttctgtacctttttgggttttcaatcaatgccctgagcctttttggcctcgtcctggctattggcattgtcgttgatgatgccattgttgttgttgaaaatgtagaaagaaacatagaaagaggcatgacgccatatcatgccgcctgcaaggctatgcaggaagtcagtagtcccattattgcgatcgcgctgacgctgagtgccgtatttgttccgctggcttttatgagtggcctgaccgggaggttttatcagcagtttgcagtgacaatagcagtttcaacgattatctccgctattaactcccttacgctctcaccggctctctctgccatgctgctgaagtcacgtgattcagacagcgactggcttacgcgcattatgcatcgtagttgtggacggttctttactgttttcaaccgcctgttcaacagtagtgccaggcgatatgaaaaaggtgttggcgcgcttggccagcgcaagattctgattatggtgatttatggcattctgctggcaattacgctgttactgggcaggtctgtacctggggggtttatccctgctcaggataaagaataccttatcagttttgtgcagcttcctgctggcgcatcattgtccagaacagaccgggtactggaaaaaatgaatgaaatagcacgaagtgagccaggagtatcttccacatcttcttatgctggattgtctgtaaacggcaccaccacaagccctggttccggtctgacatttgtcctcctcaagccttttgagcaacggcctggcatcagcgcagatgatgttgccgcctctctgaatgccagatatcagtcacttcctggcgcagattttgcggccgttttcccggcaccacccgttatgggtctgggttccctggggggattcaaattgcagcttgaagacagaggaaatatcggttacgacggaatggccgaagtacttcgacgctttcaggcagaagcagctaaatcacctgtgctgacgccacttttttcaacataccagaataattttccacaaattaatgtcgatattgaccgtaatcgcgccaaacaacttggggtgaacatcagtgatatcaccgagacattacaatcctatcttggctcatattatataaatgatttcaatataataggtcgtgtatatcaggtaagaatgcaggccgacgcagagttcagggcgaccccggaggatatactgaaactacagacccgaaatgccgatggcaatatggtaccgctgtctgccatagcccgtattgagccgacacacggtcctgagctggttacccgttataacggttttacagcggtcgatcttagtggcgctcctgctccaggctattcttcaagtcaggcgatggaagagattgaacgtatagcgatgaaaacacttccacccggcgtagagtatgagtggacagacctgacctaccagcaaattcttgcaggcaacagtgccgtctggatttttccactctgtgtattattggtattcttggtactggctgcccagtatgaaagccttacgctccctttggctgtcattatgattgtcccaatgagtatcctttctgcacttaccggggtgtggctgactcatggggacaataatatctttacgcaaattggatttatcgtcctggtcgggctcgcatctaaaaatgccattcttatcgttgaatttgcccgtgaacttgagctttcaggtaagtctgcctttaacgcggtgaaagaggcatgccgtctcaggctgcgtccaattctgatgacctcactggctttcatcatgggtgtaatccccctgatggtatcgcatggagcaggcgctgagatgcgtcaggcaattgggatatcagtattctttggcatgctcggcgtcaccctttttggcttgtttatgacccccgtgttctacctgttagcccgacaaatatcagggaaaccactgcactcggccactttaccggacgcgcctgaggaacggccgataacagaacaggcttcagactaa

SEQ ID NO: 219266 - DNA, 1170 bp, Klebsiella pneumoniae
atgactgtatcgttcaaacttcgcatgttgtgcttaaccggtacactggctgtcatcgggctgttcctttcaaaacagagcgtcatacccggcgcgtatgcacttgagacatcaaactttaaaacggtgcgaactacgtccgcagttgttcatacggtaaacgactgggtcgaattctcgggaaaactggaagccaccgatgaggtcactgtacgttcaaaagttacaggctcgattgtggatgttaagttcagggatggtcagttggtcaggaaaggcgatattttatttattatcgatccagccccttataagactgaactggcccgggctcgtgcagcatacgcgcaggcaaaagcgaagcaggacttggcattgctggatctgtcccggggtaaaaaacttatcgggacccatgctacctcacagcgcgattatgacgttctgaacaatgccgcccgggaatcgaaagcagccagggagattgccgaagctgaggtcgagagcgccaggctcagcgaaagctatacccggatcaccgcaccggtaactggccgtatttccagagcagaactgacagtcggtaatctggtcgcagccggtattgacagtccggttcttgcatccattgttgctcttgatcccttgtatgtcgcttttaatgcggatgaacgaacctatcttaattatatcgacaagctttcaaataaagacaaacctgaagtgctggtaggactggccgatgaaaaagattatccacataaagccattcttcattctgtggataatcatctcagtactgaaaccggcactatcaggatgcgcgcacttcttgataatccaacatcaaggttgcttcccggtttacaggctcgggtcagactccaggcaagcaaatcttatacagcagtaatgattgaccagacactgatccgcaccgaccaggacagacgctatgttctggtagtcggaaacaatgacaaagttgaatatcgccccctcgaactgggaaacagacagggggaactgattgttgtgaaaaaaggcctcaataagggtgacagagttatttccgatggggcgcagttggtcagtcccggtgaaacagtcgttgtcagcaaagacgaatccccttcttcaaaatcccgggaaggaaataagtcatcatga

SEQ ID NO: 219267 - DNA, 1032 bp, Klebsiella pneumoniae
atgctggcgctgaatatcaacccggtacagcagcgggctgctgaacgtggctcacgaacaccggataaagtttttaaaaacgtggcgctggcgtggcataaaagtaaccggaaatggtcgcagaacaccgctgaccgtctgcttgccagcctgaacaatcacatctttccggttatcgggaacctgcctgtatcagaacttaaaccccgtcatttcattgacctgctgaaagggatcgaggaaaaaggtctgctggaagttgcgtcccgcacgcggcagcacttgagtaacataatgcgccatgcggtccatcaggggttaatcgatactaacccggcagcaaaccttggcggcgtgaccacacctcctgtcagacggcactatcctgccctgccactggagcggctgcctgaactgcttgaacgtattgaggcatatcatcagggccgcgaacttacccggcttgccgtcctgctgatgctgcatgtgttcattcgctccagtgaactgcgtttcgcccgctggtcagagattgatttcacaaaccgggtctggacgatacccgcgacgcgagaacccattattggcgtgcgttattccgagcgcggggccaaaatgcgaatgccgcatatcgtccccctctcagaacatgtcatcgccattctgaaacagattaaagatatcaccggtaataatgaactggtcttccccggcgaccataacccgtataagccaatgtgtgaaaacacggtcaacaaggcattgcgggtgatgggctacgacacaaaaaaggatatctgtggccacggctttcgggcgatggcatgcagtgcgctgatggaatcgggtttatggtcaaaggacgcagtagaacgccagatgagtcatcaggagcgcaataccgtgcgcatggcttatattcacaaggcagaacatctggaagcccgcaaggcgatgatgcagtggtggtccgattatctggatatatgccgtgaagcctacgttccaccatatttccttatcagaaaataa

SEQ ID NO: 219268 - DNA, 231 bp, Klebsiella pneumoniae
atgtcccttaccgacgcgaaatccgcactctcaagccttctgataaaccctttaaagtctccgattcccacggtctgtatctgctggtcaagccgggtggctcacgtcactggtatctcaagtaccgtattaacggtaaagaatcccgcattgcgctgggtgcctatcctctcatctccctgtctgatgcgcgacagcagcgtgaaggtgtccgtaaaatgctggcgctga

SEQ ID NO: 219269 - DNA, 1146 bp, Klebsiella pneumoniae
atgaaaagaaaagtactggcactcatggtaccggcactcttaatggccaatgccgttaacgccgcggaaatctataacaacaacggcaacaaactggacctctacggtaaagtcgacggcctgcattacttctctgacgacacttcagaggacggcgatcagacttatgttcgctttggtctgaaaggcgaaacacaaattgcctcagaattaaccggctacggtcagtgggaatacaacattcaggcaaacaccaccgaaaaagaaggcgcgaattcctggacccgtctcggctttgccggtctgaagtttgccgactggggctcactggattacggtcgtaactacggcgtagtttacgacatcgaatcctggaccgatatgttgccggaattcggcggcgatacctacacccagaccgacgtctacatgaccggccgtaccaacggcgtggccacctatcgtaacagcgacttcttcggcctcgtcgatggcctgcacttcgccctgcagtatcagggtaataatgaaaacgccggttctggcgaaggcactaataacggcggtgatcgtaaactggcgcgggaaaatggcgacggtttcggtatctccagctactacgatctcgatatgggcatcagcttcggggcagcctattcgtcttctgaccgtacccataaccagctggcagaagctcgtagcagccagcgctacgccaatggcgataaagccgatgcctggaccgtcggggcgaaatatgacgccaacaacatctatctggccgccatgtatgcagaaacccgcaacatgaccttctacggcaacgatagttttggtgggattgccaacaaaacgcagaacttcgaagtggtcgcgcagtatcagtttgacgactttaatttaccgctgcgtccgtctgtcgcctatctgcagtcgaagggtaaagatctctacacctattcccgctacggcgacaaggatctggtcaagtatgttgacgtgggcatgacctactacttcaacaaaaatatgtccacctatgtggattacaaaatcaacctgctggatgaagacgaccgcttctataaaaacagcggtatcgcgaccgatgacatcgtcgccctcggtctggtctatcagttctaa

SEQ ID NO: 219270 - DNA, 216 bp, Klebsiella pneumoniae; identical to SEQ ID NO: 152577

SEQ ID NO: 219271 - DNA, 273 bp, Klebsiella pneumoniae
atgaacttcacgataaaatcccgtaaaaccggcgaaattttcagtttttacgcacccgaaagtggtggctatgttcacctggagtctcagggacactctggtaactcaggtgctcagatttgccgtgggggagggtttatgggcagtacgctgtactgtgacgcttctgaggacgatcttgccagtgttgcccgtaaatggtaccgacagttcgtgagggagcggcgcaaattcttaattatgtcgggccagtattctgaggataaccagtga

SEQ ID NO: 219272 - DNA, 156 bp, Klebsiella pneumoniae
atggttcgcgtcagtgtggcgctggcgctactggttctgtctgtgctggtggacttcaccagccggattctgtcagtggccgcggacggtgttttggtcataacaggcatcactctgttgctaccagttctaaggaaggtgcgaacaagttcctga

SEQ ID NO: 219273 - DNA, 426 bp, Klebsiella pneumoniae
atgtttggtatttttaaaaagaaagttcgtaaagcagccgtagaagtgaagaagatggaaaaccgcgacgccgtagaagcgactgtttggggtgcctatgcgatcgcatatgctgacggcacctgtgacgcgaaagaaatcagcgttctggaaaaaaccatctctgccctgccctctttctctccgtttgctggcgagatcgcccagatgagttccaacatccgttcccgctacgaagcgtccccgcgttccgctaacgctgaagcaatgcgccagctggccgaagttgctggcacaaccgatgcagttgacgttctgtgcctgtgtctggatatcgctgataacaacggtatcgatgagaaagaagagcagatgctgaagaaaatcgctcaggctctgcaactgtctctggatcagtacctgtga

SEQ ID NO: 219274 - DNA, 273 bp, Klebsiella pneumoniae; identical to SEQ ID NO: 199028

SEQ ID NO: 219275 - DNA, 225 bp, Klebsiella pneumoniae
atgacttatgaaacaaacatcgtcgccttggctgaaaacgaattcctggcaaacaccagaaaactgatggagagccgtgatcaggctttcaccctctaccagtgggttgttgacagcctccgcgaaggtaagcacgcagacgaaatcgggatgctggtcggtgacctgatcaactcgaactttgcgcttgaggttcagttaaaagggcgagcggatgctaggtaa

SEQ ID NO: 219276 - DNA, 624 bp, Klebsiella pneumoniae
gtgaacggttctcagaaaataaaaaacagagagcgcgatggcaatctacgcgacctctggcgaacgcctctgtggttgtttcatgctttcgaagtttatctcggcatgaagttccaggtcgacgtcgcgtgcaacaaagacaatgcgatcctgcctgactttatcggcgtagaacgtgacgcgctaaagtccagctggtgcgaagccggtacaatcgcattcctcaacccgccctactccaaaatcaaaccatggatagacgccgcggcgcgtgaacaggtcaatggtgttacaactgtcatgctggttcctcagtccctcgacactcagtggtatctggacgttaagcgcagcgcgaatcagaccgtacttattgttggcggtcgcgtcgcttttatggagccagatacaacgctgggattggttgaagttcgcgagaatactggcggtagcatgttgctggtcttccggggcttctatggcgctgctggacaccagacgacggagatcgacatcggcgtgatgaaagcgctgggcggttacgatccgctgacggcgaagagaaagcctcgaaagaagaaagcgaagccccccttaattaaaaagattttaaaagcgctttaa

SEQ ID NO: 219277 - DNA, 1083 bp, Klebsiella pneumoniae; identical to SEQ ID NO: 177586

SEQ ID NO: 219278 - DNA, 795 bp, Klebsiella pneumoniae
atgagcgctacacattcaactaataaagaaaacagcaacgcagacctgatcgcaatgctgtcagagctagatggcttaaaccccattgaagagcacgaagaggttgcaggtgaagttgttgaggtgaaaaaacctacgacctacacaactgatgatttgttcagcgaactcttgccgctagtctcatctgaaaagcccgtcagaagtgaagaagaggcgatacaggagcttctaagtaatattgatgatgaaattaagccgattgagaaatcgatagaagtggttgaagagccggttgaagctgttgaagcgcaagtagctgaagaacaggcatcggatacaaagtcagaacctgaaaagccgaaacgctcaccatcttcaaccggcgctcgcaaaaaacggttctcaatggatcaactttcagacgaagtcatggctgagctaggttttgaacgcaaagccttcatggatgcatataatgcttgtccggtaaaagcgatggacaaggtgcagaactttatggcctggagtcaggggttggctgagcttagcgtatatacccagatatcggtcactcatctcattaacgcaggcaccagcgatacggcaggattccgtctggctatgatgagcaatccaacaaagccatacccttcatcgaccgcgtcagcgcaggcggggcagatgatgagcatccttccggtgttggggatggcgatcaaagatggtaaaacgctcacgttgaatgaagattcaccgttggttaagaaatttagaagagaaatacttttgtga

SEQ ID NO: 219279 - DNA, 552 bp, Klebsiella pneumoniae
atgacagttgcaacaggtgtggatattgagaccactggtctcgatgtttactcaggccataaaattattgagatcgctcttgtctcatatgagttagagacctcgcggaaaattcatgaagtgtcgctgaggttcaacccacgacgcagcattgacgcgaaagcccaggcagtccaccacatctcgcttgagatgctggccgactgtccactgttcgaagataaagccgctgcgctggctaaagcattggcagcggcgaatgtgtgggtggcgcacaacggtcgacagttcgacatccccttcatcaccaaacaaatgagagattgcggcgtagagctgtcgcagcgtccgctggtggacaccatggatgcgcggtgggcatgtgagaacggcaagatcccccgattacaggaactagccgtcgccatgggattcgtctatgacgaggaaaaggcgcatggggcgctttatgatactgacctcatgatgaagtgcttcatgaaggctagaaaagactacgggttcttccccatccccgaattggtgatttag

SEQ ID NO: 219280 - DNA, 408 bp, Klebsiella pneumoniae
atgtatagcgctgccgaagaacttgacagaaaagtttcagaaacccttgtggacataatcaaaaagcagactggcggattgatgacgacgaatgaggcgaaagcagccattcattcggtgttctgttctgtcatgggtctggtaggcccggatgtcgccgaacttctagaagaggcaatgaatacgatagagaaggagcgaccgtcgccgttccctctctatctgaaaactgccaatggcgtttatatctcggtaacgccagatcctatgatcaggagagttttcgtcagggttatggctggtgaatatcgaacaatgaattacgagtgcgaaagcgcaagcagcacgattaaaaaggcacttgaagtggtgcagttacttgtcaaacagggtgcaaaacgactatga

SEQ ID NO: 219281 - DNA, 651 bp, Klebsiella pneumoniae
atgaaaattggcctttgtggtgcgcaaggaacgggtaaaacaacgctggcgaaagcttacagtgaagtgtcaggcattccatacatcgacgctaaagtcggcgattttctcaacgagataggcgtagatttgtcacgaagcgatatgccgattgttgaacggatgaaggcgcaattaatggtggccggccacatcgcgagcataactgaggcgccagatctccacaagaccgggtttattatcgaccgcacgcctatcgacgtcatggcgtacacccacgacattgccgttccacactacaaaaatgatgaggtgctggagctgtatgctcagacgcatatggtatgtctggacgcggtctcggagaattttaatctgtgtctcatgctgcgccccggtgtccagctttcctcgcaagaccattaccgaaagcagagagcctcactgcagccgttctacgttaaccacatcgatatgctcatggcttcgatgatcatgtcgttttcaacaaaagtggttgccggctcactatctcgatttgcgtttatgcaggacgacgttgttgacctgagcctccgcgtcgatgccttggaggacatcgtgagaaatatcgctttaaattctgttacgaagcgcgagccttgtcattga

SEQ ID NO: 219282 - DNA, 483 bp, Klebsiella pneumoniae
atgagaatgatagcggccgttggccgaaattttgaaataggcagaggaaatgatctgccttggaaatgccccgcagaactgagtctcttcagacagttgacgcatgggttcaccgtaatcatgggcagaaaaacagccgagagtctgggtaaggcattgccgggtcgacgcaacgtaatgctgacacgttcaccagctgtagtggcgcctcaaggcatccagatcgcctcagtcgaacgctgtttgcgcgagttccccaatgcgtgggttatcggtggcgccgtcgtgtatgaggtgatgcttccgcatgtgacggaaatttggctgagccatatcaatattgaagtgccggatgcagacgctttcttcccgtttgaagcaatgcgtcagatgggttttgaagcggttgatacggtgaatgaatttgctggtgatgagaattcaccatcgtttaaacaaattgtttacaggaagttgaaatga

SEQ ID NO: 219283 - DNA, 414 bp, Klebsiella pneumoniae
atggctaagggaatgttcgcgctcgtggagctggatgacgtagtcgcagacagcagacatcgcgcctccgtagacattgaaaaagatcgcatcgacatgatggccggtgacgagctgatttacccaacgagcaggatgctgaaaggcttctatcgctcgggtattgaaatcgtgctggtcacaaccaaacgtcttttgaaagaagagcgggaagttacccgggcgtggctttccgctcacggcgtcagttacgactatttggttcaggccgaaagcgtggagcatctggctcgatggatcaaagacaaccagcgggaaaatatttttgtcatggcgatttgcgctggcaacaagctaatcagcatggcgaataaccacccgcacaagcctcatatttaccaggttcaacgatga

SEQ ID NO: 219284 - DNA, 1092 bp, Klebsiella pneumoniae
atgaacgaactattcgaaaacggccttttgaccgattcatcctacgcctgtgttctcgcggaagccgcctcctccgacattaagtccgacaatcgcactggaactcctactattggcacctgctatgtgaattcacagtatccgctctggggcgctgccgttccgcttatctccgccaaagccgtcaatctgaagcctctacttgtagagcttgagtggtatttgaaaggaaccggtgatgtctcttttctgcgcgaacacaacgtaaaaatctgggatgcatgggtaaaagaagacggcacgcttggcccggtatatggcaagcaatggcgtcgctggaacgatacccggatcgtcaatcgatatgaattcgttaaaaacggtctggactatcgcaagcgcggctacaaagtcgagggttatctgggccacgaagaagatcgcgtcgttctctctcgtgaaattgaccagttacagcgcatcgtcgacaagctgcgaagcaacccgactgatcgtcgcatgatgatgagcgcgtggaatgttggagaactcgaagacatggcactgccgccgtgccacttcatgtaccacgtttggagccgcgaactcggctttgaagagcgtctgcgccaggccaatgccatcggtgaggttcatgcaaaatatctccacgagtcacgctatacggctctactggccgagattgagcgccgcggcgaagccagcgaagaaatgctggactcattaaacatcccccgccgtgcgctctgttcggcaatgattcaacgtagcgtcgatgtgttcgtcggtatgccattcaatatcgccggctacggcatcctgacgtctctgattgctcagatcaccaaccacatgccgatgatgttctctcacttcggtatggacgttcacgtctacgaaaaccacatggacggtgttaacgagatgatgaatcgcgacattccagaaaattcagacccggtcgtcatttttcctgaatcgtggaaagagattgatgacttccgctggcaggacgttcgcatcgaaggttacgcgccgcatccgtggatcaaagtgccggtggctgtttga

SEQ ID NO: 219285 - DNA, 867 bp, Klebsiella pneumoniae
atgttaaagaaagtattagagaaatctcgcctgaaatctgaagccaaaaatggtgcagaaatcgacacgctttacgagatctaccctggcggcttcgacattacgatgaaaatcggcgagatggtgtcagagtttcatgaactatttcagcatccgatcgcggtcgacgtcacgcctgagcttttagaacttcgggctggtcttatccgtgaagaggctgtagacgaagctgccgaagccgttgaacgcctggacatggataaggttctggacgctatggctgatggtttatatgttggtattggcacattgatcagcgtgcgtggcggtgtagctaacgccatggcccacttcacaaaagagcagagcgaagacatttacatcggctatgttcatgctcatagcaaaaagccgcaggaagacatcattctcggactatctcagtttggagtggccgtagaagagcttgagattattgcggccaaaatccgctctgggtatgcagactccaccagtttagccgttgatttgcgtggcgcaatgaatcgcatctacgtggcgtcacagatggtttatcacctggcggatttgatgaatgtccctgttgttgatctggtggccgaagtccatcgcagcaatatgacgaaactttggccggctgacgccgaactgcgcacgaagttggttgcgaagtgcaaatacgacaaagatgacctggcattccgtgttgctgaaggtcgggatggtatgatcggatatcgaatttctgatggcaagatcctgaaatcgccgacatatgactcggcggacttgtcccggtttgttgatatggcaatgaactcaataatcgggcgtcactttttctaa

SEQ ID NO: 219286 - DNA, 1143 bp, Klebsiella pneumoniae; identical to SEQ ID NO: 177595

SEQ ID NO: 219287 - DNA, 405 bp, Klebsiella pneumoniae; identical to SEQ ID NO: 177596

SEQ ID NO: 219288 - DNA, 2328 bp, Klebsiella pneumoniae
atgattcgaatcatcaaacggaatggcagtgtcgaagcactgtctgaagagaagtataaccgcgtcgttatgtgggcaacggacggtgttgatggcgtaagcgcctctgccgtcgctatgggagccgcagcgagtatcgttgacggcatgacgacaagccaagtacacgacgctctaatcaaagctgccgccgatcttatcagtgccgacacacctaactacagccaggttgctgcgcgtctgagtattttcaaaattcgcaaagatgcccacggccaatacgaataccctgacttctacgaacacatcctgaagaacgttactcgcggcgtttatgatgacgaaatcatgcataaatacagctgcgaagagatcgacgagctgggcgcgtacatgaagcctgagcgtgacgacaacttcggttacgcggccacgacccagctgcgcggcaaatatctggtacaacatcgagtcagcggggaaatctatgagtcacctcaacatatctacatgctggtgggcatgtgtctatatcaggactgggctgacggtgatatgggcaaaacacggctggaaatggtcaaaggcttttacgatgtcactagtacattcaagctgtcgttacctactccaattatggccggtgtccgcactcctactcgccagttctcaagttgcgtcctgatcgagtccggtgattcactgaagtccatcaatgcaacgacctcggccattgtggagtacatctcccagcgtgccggcatcggcgttaacttcggttctattcgtgcgctgggtagccctattcgcaacggtgaagcgacccatacaggtgttattccgttcctgaagctgttccaggcggctgttaagtcctgttctcaaggtggtgtccgcggtggtgcggcaacggcttattatccgctatggcatctggaggcgaatagtttgctggtgctgaagaataaccgtggtgtcgaaagtaaccgtgttcgccacatggactacggtgttgaattgaaccgcttaatgtaccgtcgtttgatcgagggtggagctatcacgctgtttagccctcatgatgttcccggtcttctgaatgccttctatgctgaccaggatgagtttgagcgtctatatgttcagtacgaaaatgacccgtcaatccgcaaagagtctgtgcctgcagtggagctattctcttcgcttatgcaggaacgagcatctaccggccgtatctacatcgccaacatcgaccatatgaatacgcatggcgctttcgatgaggctgtggcgcctattaagcaatctaacctttgcgccgaaattgccctgccgactaagccgctggcatttactgacgatccgaacggcgaaatcgcgctgtgtactctgtccgcattcaatcttggcgctcttgagtctctggcagatctggaagaagtagccttctacgctgtctctgcgctggactgtctgcttgattatcaggactatccgatgtttgcggcggaaacaccagccaaggcgcgtcgtagtttggggattggtgtaaccaacttcgcttactggctggctaagaacggtgcaaagtattccggcgttgatggaaacaaactggttcacgaaacatttgaagcggttcagttctatttgctgaaggccagtaacctgcttgcatcagataagggagcgtgcgaatggtttagccagacgaaatatgcgaaaggtttgctgcctatcgatcactaccgcaagcagctggacgccccagaactgaatgccaaccaccctcttcttctggattgggatgggttgcgaaaagatattgagcgatacggtctacgcaactccactctgtccgctcaaatgccctgtgagacctccagccaaattaccaactctaccaatggcattgagccgccgcgtggcccggtatccgtgaagtcgtccaaagatggtgtcgtgaagatggtcgtgccggaattttctcgcattggcgacgcttacgagtacctgtgggacatcgctgataactttggctacctgaccaaagtggcgatcatgcagaagttcatcgatcagtctatttctgccaataccaactatgacccgacgcgcttccccaatggccgcgtgccaatgcaaaagatgctgactgatttgctggatgcgtatcgcatgggggtgaagacgctttattaccacaacacccgcgatggcgccggcgctcgcgaagacgacaagatcacacatcaggcgcatcttccatcttcgaccgaatttgtcgaggaagaggatgagtgcggcggcgcttgcaaaatctga

SEQ ID NO: 219289 - DNA, 198 bp, Klebsiella pneumoniae
atgatgatctcatatcaggaacttgttcgcaccttccctaagcatccggatgctggctggtttacgaagaaggttaaaggtgaagtgagtattgtcagcaaaaacgaacatccggccgacgcattggctgcggtttataccggactggagacggatcaataccgtcaagctgtctctatgatgagagcattcttttaa

SEQ ID NO: 219290 - DNA, 744 bp, Klebsiella pneumoniae
atgttagaacaagtatgtcagcttgcacggaacgcgggcgatgccatcatggaagtctacgatggaaaccagccgatcaacgtcgccagcaagaaagatgattctccggtcacggcggcggatatcgcagcgcacaacgtcatcatcagcggtctgaaagcgctggatcctgacaccccggttctttccgaggaggacccgccggcctgggaggtacgtcagcactggcagcgctactggctggtcgacccgctggacggcaccaaagagtttattaagcgtaacggcgaattcaccgtcaatatcgcgctgatcgaaaacggcaagccgacgctgggcgtcgtctatgcgccggtgatgaaggtgatgtacagcgcggaaaaaggtaaagcctggaaagaagagtgcggcgtgcgcaagcagatccaggttcgcgatgcccgtccgccgctggtggtgatcagccgctcccacggtaacgatccagagctgcaggagtatcttgagcaactgggcgagcaccagaccacctctattggctcttcgctgaagttttgcctggtggcggaaggtcaggcccagctctatccgcgcttcgggccgaccagcacctgggacaccgccgccggccatgcggtcgcggtcgccgccggggcgcatgttcacgactggcaggggaaaaccctcgactacacgccgcgtgaatccttcttaaaccctggtttccgggtctctatttattaa

SEQ ID NO: 219291 - DNA, 2010 bp, Klebsiella pneumoniae
atgtctcatttattttatggcgtggcgtattacgatgaatatatgccggaagatcggctggctaaggatatcgccttaatgcgcgaaaccggcattaacgtggtgcgtattgccgagtccacctggagtacgctggaacctgaagagggccagtacaatttctaccatatcgaccgggtgctcgaggcgatgcatgaggccggcattgcggtcatcgtcgggacgcccacctacgcggtaccggcctggctggcggcgaaacatcccgatattctggtcaccaccgtcgtggggcagcaaaaatatggtccgcggcagatcatggatatcgtcaatccgacctttcgccgctatgccgaaaaaattatccgcacgctgatggcccatgtgcagcaccatccggcgattatcggctggcaactggataacgaaaccaagcattacgacaatattggccgctatatgcaggagggcttcgtgcgcagcctgcaggagaaatatcctgacctccggcagctgaatcgcgatttcggcctggattactggagcaaccgtattgaccgctggcaggattttccgccggtggagaacaccatcaacgccagcctcgcctgcgccttttcccgctatcagcgccagcaggtcaccgagtatctggcctggcaggcggccatcgttcgggaatacgcccagccgcaccagttcgtcacccacaacttcgattttgaatggcgcggttactcttacggcgtgcagccgcgggtcgaccattttgcggcggcgcaggcgctggatatcgccggcgtcgatatctatcacccgagtcaggcgcacctgaccggacgggaaatcgcctttggcggcgccatcacccgctcgcttaagccgggccagaactacttcgtgctggaaacccaggcacagggcttcgcccagtggaccccgttcccgggccagcttcgtctgcaggcattcagccatatcgcttccggcgccgccatggtctcctactggcactggcactcgattcataacgctttcgaaacctactggaaagggctgctcagccacgacttctcgcgcaacccaacctggcaggaagccaccactatcggtgccgatttcgctcgcctgtcgccgcagctggcggagctgaaggccgaaaatgacgtcgcgttgctcataagcaatgaggcgatggacgccctcaatcacttccgtcccggcgatgctgagggcaacatttataacgatatcttccgccgcttccacgatgcgctgtatgaccacaatatcagcctcgacatcatccacgatgtgaacgaggaaacctcgcgctaccgggtgctgatcgttcctggtctgtacgccgccgatgatggcctgctaacgcggattaacgactatatcgcccggggcggcagagcgctgatcggctttaaatcaggctttagcgatgaaaacgtcaaggtgcgcagcagcgcgcagccggggattttgcgccagagctgcggcgtcagctacagccagttcaccctgccggaagcgacgacggtaagctcttgctgcgcagagattgattgccgcaatgacaatcaggctgagctgtggatggaattactgacgcccgacgacgggacccgcaccctgctgcgctatcagcatccggcatggggcgaatacgccgccgcaacgacggcggattatggtcagggtcgcgccctgtacgttggctttctgccgcagaagggcctgattagccagctgtttgatgtcctgacggcggacctcacgctgaactcgcgaacttccgcctatcgctatccgttagtggttaaaaagatgcgtaaccgcgccggaaagactatccacttcctgtttaattactccggcaaggcgcaggaggttatcagcgagaccgcgggtaccgcgctgttgagcggggaggcagtagacgtcggccagccgttgcgcctcgaggcctgggaatttactatcatcgaaagctaa

SEQ ID NO: 219292 - DNA, 1233 bp, Klebsiella pneumoniae
atgataacgtcaaataaaaattactttatcagctgtctgtttttcctgttcttctttataggctggggatgctgctacccctatttatcactgtggttgacggaaaccatcggtattaactacaccgacgtcggcctggtctattctttcaccgccattgtcgccgtctgcgttcagccattattcggcttcatctccgataaactggtatatcgtaagaatctgatgtggatgctggcgattattatcacgttattcgccccttactggatttatgtctttgctcccctgttaaaaataaatgtgttcctcggcgcgctggctggcggcctttatattggcatggcctacggcgcaggctgcgggatttgcgaagcctacattgataaagtcagccgcgcctccggcttcgaatttggccgggcgcggatgtttggcggcatcggcgccgcgatcggcacctttgcggcaggaaaactctacggcatcgatcagaacatgattttctggttggccagcggcgcaggcgtctgcctgctgatcattgtctggaaaatgcagatcaacgcccacccgcagcaggggttgctgtccggcaaagcctcgccggttaccctccacgatgccgtctcgctgttgaaaattaaaaaattctggttcttcgccctctatgtcattggcgtcggggcggtctatgaaacctatgaccagcagttcgctatctactacagccatttctttgagagtaaagcccggggcgcagaagtcttcggttatttaaccacgggtcagattttccttgatgccatcgtgatgttctttgcgccatggttcgtgaataaaatcggtccgaaaaatgcgctgttatactgcgggctgattatgagcttgcgcattatcggctccgcatgggctattggcccggtctccattagccttattaaactcctccacggttttgaaagctcggtgctcctcgtcgcggcgctaaaatatattaccgctaactttaaccctctgctgtcagcgaccgtttacttaattggcttccagttttcgaaaagctttagctctatttttctctcgaccggcatcggccatatgtaccagagcatgggctttaccagtagctatatcgtactcggcggtatcgcgctgtgcttcacgcttatttcttttattacgctggataaagcgcgtgtcttctcttcacaaccagtgcccgcgaattaa

SEQ ID NO: 219293 - DNA, 753 bp, Klebsiella pneumoniae
atgcataagaaaatagctttgatcgtatgtgtcgccctggggttacctgccgccggccacgcgctgactttcgatgtcagaggcggatatcgggcgggaagtcactcttatgaatcccgctataaagtgagtcaggggtggcagaatggctggtgggcgagtatggaaatggataataaaaacaacaaaaataaccatcagggaaaaaatggcactgataaaacggatgcgtcccactcctttggcgacagtaccgtcgattacaatgaaatagaggttaactatagctggccattcgctgaaaaatgggccttgcagccaggcggtatctatcactggagcagtaaaggcacccagttacgtccttattttcgcattaactataaagcgactcccgatctcacctttggactccgttatcgctatgactacaacacttacgaaacggttaatagcgtcggtgagtcacatcaggacagcgtcaaccgcctggatttatatgttaattataaatttaatgcccaatggagtgccctgtatcaaggcacggtctatcgacatgtcaacgatgactataaatataataatgataaatcttcggcgacagaaaatgccgtaacgctacgctataaatggaatgagtggtttagtccctatatcgaatatgattatcttgataaacagggttaccatgatggcaaaaataaaatttcagaatcacgatatcgtatcggcatgacgtttacgctataa

SEQ ID NO: 219294 - DNA, 1023 bp, Klebsiella pneumoniae
atgggaaatcaatcatctccagagcacaatggaagaaccattacgatgcaggatgtggctcgcgccgccggcgtgagtgtttcaactgtttcgcgcgtgctggatgaacgtctccccccgtcccgcagcccttcggctgaaaaaatacgggaagcggcgaagcagttgggctatcgacgtgactacgtggcgtccagtttgcgccgtggcgatacgggcacgataggcgtactggtcccgcgattgaccgataccgtcacggcgatgttctatgaagcagtctctcaggccgccgcgcgtcagggctatttcacggtggtggcaacctgcggcaacgatccagacacggaagagcgcgccacacaatctttactggatcgccgggtcgatggcctgatcctctccacctgtcgcctggatgaccgcctgcctcagcaattgcgggagaaacagatcaaccatgttctggcgctgcgtaccgacggtatcagcccatccgctattggggatgacgaactgggaggctatctggcgacccgccacttactggatctcggccatcgggaaatcggcattattgccgggcccaatttttcatcgagcaccttaaaccggcaaaaaggatttttgcgagccatgcaggaagcgcaggccgaggtgaatccgcaatggtggcgagattccgactttaccattgtggccggtgaaaacgccggttatgaaatcctgaatagtccggcgcgccccagcgccattttcgccgtcaatgatgacctggcgatcggcgtgatggcggcggcacatcgactcgggctggagataggccgcgacgtttcgctggtaggttataacgacattccgttagttagtcgcctgccgatccctttgacctccgtgaagacaccgctcgatcagcttgccagccatgccgttgaattactgctaagtcatcatgtggaaaacccccagcgctactcgttacccaccctgattccgcgcgcttccacgcggccttatcgctaa

SEQ ID NO: 219295 - DNA, 933 bp, Klebsiella pneumoniae
atgaaagcacttgatttgcgtggaattgttccagcaccggttacccctttcacccgcgatggccgcatcgatcataaagccatcaaacgtttaggttcctggctgggtagcgtaaaaggcgtgaaaggcctggtggttctgggacacgccggggagggcaccttcctgactcagcaggaacaggctgacgttatccgtagttttgttgactcgaccgacggccgtgtaccggtcatcgccgggattactggcgaagggacggaagtggcggcgctggaagcgcagcgtgccgtggaagccggggcctccgcaggtctgctgtatccttcacacggttggctgcgttttggctaccaaaaaggggcgccgcaggatcgttatcgcgtggtatatgaagagagtggattgcctcttattcttttccagtatccggatgtcactaaagccacttataacctcgaaacgatgctggatatttccgcgcaaccgggggtctttgcgatgaaaaatggggtgcgtaatatgcgccgctgggatacggaaattccggttattcgtcgcgaacgccctgatttacagatcctcagctgtcatgatgaatacctgctgcatactgccttcgatattgatggtttcctggtgggatatggcaatattgcccctgaactcctgctggaactgctggaggccggaaaagcgcaggattatgtgaaggccaaagcggttcatgaccgtctgctgccggttaccaaggccgtttatcaccgcggttcgcacatggaaggtaccgtggcgttgaaacatgctctggttgaacgtggcattctggaacacgctaccgttcggtcacctctgttgccgctggaaccgggcgcagaagaagagatcaaagcggctatccgtgccgcaggcattaaaaaagcggttatttaa

SEQ ID NO: 219296 - DNA, 1290 bp, Klebsiella pneumoniae
atgagtaatttagaaaaaacatctaccgctgtacccgcacaaatagaaagacttcccttctctcaattaattcgccgcatcggtccggggattgtgcttaccggagtcgtgattggccccggcgcgattaccactgcgtcgatgttaggggcggactatggctattccctgctatggctgctgatccccattgcttttatggggatcacgtttatgttgacgacctatcgtatctccatgctcaccgggatgccgtcaatagaggcgatacgacactattacggtaaagtcgcctcggggtttgtaggcgtggccacttttttagcctgtcttttttttaccatggggaatatctcagggaccggagccggcatgaaccttgttttcggtattgactggaagctcggtgcgttaattatgattgcggtgatgatctattgctatttctctaaaggcgtttattccaaagtcgaaaaagggatcactatttgtattgtggcaatgattatcgccttttatatcacgctggtgggaacggggggaccagactggaaagccagcggggaaggattaacgcattggatctttcctgcggggagtttagtcaccgcgctgggctttatcagtaccaatgcctccctgacgaccgggatctacggcacttaccttggcaaagagaaaaaatggaaaaaagatgacctctttaatggcgtgatggtggcggataccgtagcccatattatcggtgtgctgctgatcagtggggccattattctggtgggggcgattgtgctttttcctcaagggatatcaatcaatacgccgacgcagctggctgatttattaacgccaagcatggggcgcgcggcaaaatacatcatgggtatcgccttattgggcgcggggttttcatctttactagggaatactcagcgtggggttgtcctgctcaactcggggttcaataaatccactgcgctggagagtaaagcggtccagtggggatccatggtggtgctggtggtcgcggggttaatctgctttagcttcggcggatcgccggtgcagttaatttacttagcgaatgtcgcaacggcggtgtcgacacctgtcgcgggtctgtttatctgcctgctgctgtggcgaaaggatattaataaaggatataagacgccaaggttattacaaatatgtatggcgatcagttatctcttttgtttgttactcactctcgtcgccctgattaacaccttacctaaatttatgtcctctctttctgccatgttttga

SEQ ID NO: 219297 - DNA, 288 bp, Klebsiella pneumoniae
atgaccagtgaaaataaaggctatgctttagcgctggaaaactgccagctacaccagaagcgtgaaaaaatattcctcaaaccgatggcgctgtatattccgcagcaggcagtggaggccgttaatagtctgctgaatgacctgccgggtggcaatgaacaaggagagtgggtattgaccgtcaccaataataataacggcgtctcggtcgataaaaccttttcctcgcgcacagcgctagggaaggtgcgaataagcaggtcatttcttcccaagctgactcgctga

SEQ ID NO: 219298 - DNA, 1788 bp, Klebsiella pneumoniae
atgtcgcagatggtgtcggaatatatgcggctggagtcccgactggcgggaatggcgattggggccgaaggggcggaccacgatgaggtgcgcctgcgcctggagatcatgatgagccagatcgaactcctgcagcagggcgatctgggtaaatttattaataaaagcgagcagcgaaagacggttgtcgccacgctgatccgcaatctccatcagcttgataaacaggttgataccatgacgccggcgcaggttaaacagatcctgccggtgttaagcgagctggacggtcccctgacctcaatggccgccgccacgctgacgcaagatattaatatcgttaatgtcacgcatgataaaattcagcatctctattatatctactcggtgatctccattctgctgatcgccatgtgtattaccctgggtttgctgatgctgcggcagaataataacctgcgtcgcgcccatgttcgtatgaagaccctggccaacgatctgcagatctcaaaagagaagctgcaggtgcagaaccgccgtctccagtacgatgcctaccatgattcactaaccggcatgcccaaccgcctctctttctggcaacgactgcaggagatcgtcaatcaggtgcgtccttataagggatgcgccgtggtgatgctttttgacctcgacagctttaaggatgtgaacgacaccctcggccatgatgctggcgataagctgctgcaggatctggccagtcgtctctccttttttcgtaaaaccaccgagacgctgtatcgcctcggcggggatgagttcgcgatgctctcttacgatctgaccgaagagatggcccttgagcgggccaatgttatccgcgaaaaaatcagccagccctatcagatctatgatgcgcaaattaatatcgacgcctgcattgggatcgtgatttcagacggcgaaagccgtaccgattatttgtacaaatgtgccgacctcgcgctgtatgaggcgaaaaaagagggcagcgggcatgtgcaaattttccgacccgggatgctgcaacgtttgcaggagaataaatcgttcgaagacgatctgctgctggcgttggcccatgacgaattcaaagtttactaccagccgatcgccgataccgttacccgcgaaatctatggttatgaagcgctggttcgctggtttcatccggtgcgcggcgccgtgccgccgacggtctttattccggtggcagagaaaattggcctgattaatgcccttggtgagtgggtactgaagaccgcctgtgccgaagcggccagctgggcgacgccgctcaaggtctcggttaacgtttcacctattcagctgatgaacagctcgctgactgacaccattatcagtgtgctgcagcaaaccggcctcgatccgcgacgcctggatctggagatcaccgaatccgatgtcttcaacgagaacacccgctcgctggaaattctcagccagctgcgtgagcagggcattcagatctccattgatgactttggaaccggttattcctccctgtcgcgcctaagctacttcccgttcgacaaaattaaaatcgatcgctcgtttgttattaatattccggcgcaaaaagacgatcttgatatcgttcgtctgattatcagtatgggaaagagcctgcatatgcgtattgtggcggaaggcgtggaaaccgaagaacagttgacctcgctgcaggcgctggggtgtgatctggtccaggggtatttaatcggtaagccaagtccactgcgctag

SEQ ID NO: 219299 - DNA, 411 bp, Klebsiella pneumoniae
gtgctgaccatttccggaaaaatcggaaatacaaacgtcggtgacaaggccgtttttgatctcgcgatgctggaaaaactggggatgaagacagtggaaaccacgaccccctggtacaccggcaaggttcgttttgacggcattccccttaataaactcatggatttagtcggcgcgaaaggcacatctgcccgcgtgctggcgctgaacgactacacgaccattatcccgatggatgatttttataaattcccggtcattatggcgttaaaaatgaacggcgaatatatgcgtattcgagataaaggcccattatttatcgtctacccttacgacagtagtgctgaattacagaaccagatctattattcccgatcggcctggcaagtttcaaagattattatagaataa

SEQ ID NO: 219300 - DNA, 579 bp, Klebsiella pneumoniae
atgccatctcagatcccccttgacccaaaactcccggccaattttgatgacacccctaatagtgaacgaagcaaaaaacagctggatgaatggtgggaccatccttatgggatcactaaaccagacggctcaattacggtcaggtgtctcaacggcggagcgtgggaccgctcatcggtgcttggaaatgcaagtagttacgaagaggcttgtgtcctggctcacgacgcccaggcaaaatgggtcaatacccgtcagaaacctatcttcatttactctaacgaaccgcctttcaggctagtggttcagtcccagcgaccggactacgaagaaagaatcattggtgagttcaatactattgatgaaatgaatttgttcttgttaaagcaacaaccccccgaactacttgaactacctccgaccatcgacacaaaactcattggtcttgaggacttgccctggtatgggaacgagcttgatctggctgcatccagacttaaagctgagcttatggccatttctgttttgcgtgacgaggtcagtatggccgttctaaggaaaaaaggagacgccagttag

SEQ ID NO: 219301 - DNA, 360 bp, Klebsiella pneumoniae
atgtttaaaagccttgccgagtatctgcagtctcaacgagacagggaggaatcacagaaacgtaaactaaacctgttaaagcgtaccgtaaggaatggtgaggcgggagaaataatcgcaggactgattgacctgggttcagttggtgtggattttaaaaaaacgacgaccgattacatctatgagtactttgcatccgcccgttctattgatgtgttagtggtcatgctatttctcaatatgaagcatcccctctccgatggagcaataaaaaaagcctatgcaaggcaaaccgacagcgaagattcgaggtctgcttatataggcctgatagtggacactatggataaacgccggtga

SEQ ID NO: 219302 - DNA, 642 bp, Klebsiella pneumoniae
atgtacaaaaacaccacagcggaaaaactaccagatactactggtaacctgacagattttcagcttaatttactgaaaagaataaacaatattgcactgtctctgatgcctgagtttgaggacaaatctcaggccatggaagcgatcactctggatgatggctcattgatgcagttgctgtactctgtgcaaatgcagcagaaaacgcgcgcatctgagtatgaaatgcgtaaggttcatcgccgtcgtgaaaatctggaagctttttacagaagccttcaggaaatgggcggcacccttaaagtcaatgatgtggctgacatactggggattacccgacaggcagtaaacatccgggtgaagaagaatcagcttctggcctttaagcaaaacggtgactttatgttcccggtcttccagtttactgataaaggactgagacctggatttaaagacatcatggacgcattcgatgaagatacccatccggtgttgcggctggaggttttcaaagcaccgattgcggtcagcgatgagcaaaccaaaacacccgtccagatcctgactgatggcgcagctgaagatgaactggctctggccgttcgggccgcacgactattcggcagtcatattgccagctga

SEQ ID NO: 219303 - DNA, 711 bp, Klebsiella pneumoniae
atggataaatggatttttgaagaagataaagtgacgcagggaattgtagcgttacaaaaggtaggacgtattccgacagtgacaatcaatccggcttcggctgttttgaagcgtcaccagaagaagcgttatgcaagtgcagtacagttcagtgcgccagtgttatttgaagattgtggacgctacaacccacccggtggttcgattgccgtgtggtacgctgcagactcatcattaacggcagcggcggaagcatacggacgtttacttcatttgggtggtcctgttaattacccagaaaaagtcttacatcagcattatatgtgctcgatagatgtcaacagaacggtaaaagtgatcgatattgttggtttatgccagctgcttcacattccacctgacagcgttgaaaacgaaaactataccttcacacaatggcttatgtcgtatttgcatacgcattttggaagtgattttgatgggatctcttattctggaaggcactatcgctacaagcgttgttatgctttctgggaaatgcctggtaagccaccagctttcactgatactcccggggggatggtaccttatgcatctttcagggagacagatacagggatttttcctgtaggttggcatggcacgttcatgaccggcgaagagatgtttgaggaattactaaacttcagaattatgcccgaaccgaagtaa

SEQ ID NO: 219304 - DNA, 435 bp, Klebsiella pneumoniae
atgacgcaacaatactcacctccgcgtgaagtggtggagatgtcccggcggattcttgaaaatgtaatctccagtagcctcaatactgctgataccacaggaacctgtatgtatggttcgattctggtttcaatgctactggagaaattttcaggggtcaggacgcgtatcgccggtggggatggtgttggtgatggcggaatagtcacccctgaaggcatgaaagggcattactgggttgtcgctaacgttcatggcatgctctttattgtcgatataactgccgatcagttcggtatggacagtatcatctacaaaggtcttaaggatgccccggagtacgtagaagggcaccaagctttagtagatgagcatgtcgctgatagttttcacaagatttttccaagctactcttcagaggatacccggctatga

SEQ ID NO: 219305 - DNA, 744 bp, Klebsiella pneumoniae
atgagccctgtcaaaaatggcgacatcatgaaacgcctcagaaaaatgatgcccaagaccgttgagcctgcattcaattcacctgaggagttattgcaatggcagcgggaacagggacagcttcgctcggaggcccttgagcgcgagaatagagctatgaaaatgcaaaggacttttaaccggtcagggatacgtcctctgcatcagaattgttcatttgataactacttagttgaatgtgaggggcaaatgaaagcactcatgctcgcccgccaatatgtagaggaatttgaggggaacatcgccagttttattttctctggaaaaccaggcactggcaaaaaccatttggcagcagcaatctgtaatgacctcttgttgcggggaaagtcagttttaatcataacggttgcagacatcatgtcgtccatgaaagataccttcggcaacaggaataccagtgaagaacaactactgaacgatctcagtaaagttgaccttctggtcattgatgaaattggagtgcaaactgaatcacgctatgaaaaagttatcatcaaccagattgttgatcgcaggtcatcatcaaaacgccctacggggatgctcactaacagtaatatggaagagatgaacaaacttgtaggtgagcgcgtcatggaccgcatgcgtctcggaaacagcctatgggtagtgtttaactgggaaagctaccgacatcgtgtttctggaaaagaatactga

SEQ ID NO: 219306 - DNA, 663 bp, Klebsiella pneumoniae
atgaaatcctcgaaattttcgaacttctcccggtcatccctgccagtcattcttctgactgcattcatgagccctgttagctttgccagcagtattgatgagccagccaatcataaatttgagtctagcgagatacggggtttgaaccacttaactgatctgattaatgaacgaaacactacttctgagaaaatatctgagcacaatgtgcttaataaaagtcaggaggaactgaccaataaaatatccatgcaactgaagcacaaacttgaacaagaaaaaattgaacaactgctctcagcattaaacaaaaataactcatccagcgaagagttgaattccagcattcagcatctggtctctttactggaaagccaaaaacaaatccatgaggcggtcacctccaaaaatataactgacgaagctaatgggttaaaatcaacaaaaaatgacatgattgatttattcgtggaagatttggtttcagacgttcaaaagcaacaagtcgctattgagaacaacgatcttcatagaacgacggcgttatacgattctcaagcaatggatgatctcaggagccaatggctagcgtttttcttcacaattttagtggttggtctgcttgtttttatcgcatgcaagaacacgacacgcaaaaagtaa

SEQ ID NO: 219307 - DNA, 204 bp, Klebsiella pneumoniae; identical to SEQ ID NO: 92423

SEQ ID NO: 219308 - DNA, 369 bp, Klebsiella pneumoniae; identical to SEQ ID NO: 92424

SEQ ID NO: 219309 - DNA, 306 bp, Klebsiella pneumoniae; identical to SEQ ID NO: 214954

SEQ ID NO: 219310 - DNA, 324 bp, Klebsiella pneumoniae; identical to SEQ ID NO: 92432

SEQ ID NO: 219311 - DNA, 651 bp, Klebsiella pneumoniae
atgccaaaggaagggggccatgagagttccattggagcaaacggtagttaccgaactcattatgcctatctgaatgcgagcgccagcgccggcaagaatcaacagcagtactcccttgggacttccggcgcgttagttgcgcatgaaggaggggtgattgcgacacctgatattggtgaaacattcgccattgtacaggcccctaaggctgccggtgcaacggtggccaaccgtattggacgtccagtggataatcgtggttacaccattatcccttatctgaacccatttactgaaaactggctggatctcgatccgcaaggaattagcgatcaagttgagatcgtatcaagtagcacggtcgtcgttcctgactcaggcgcggccgtgaaggtaaaatttgcgacccgtactggctacccatggtttgccaatgtcacgctcagtgatggtaatacgccgccattgggtgctgaggtctttgacagcaaagaaatagccatcggggccgtgggacaaggagggctgctatatgccagagtcccggacatcaagggggttttacatgtggtctggggcgacaatagtgttcagcgttgccagcttgcgtattccgttaatcaacagaccagccgaaacctttgcaaatag

SEQ ID NO: 219312 - DNA, 1020 bp, Klebsiella pneumoniae
atgaaaagagaaatgatactagggttatctgttttcctgtatctaggatatatccccacaatacttgcatgcgtgatgaccagtggtaaaacaattgaatatagcgtcaatctgggtaataaaaatttttcagtagatgtgcttaatcgccagcctggagatttattattcacctatggcggcatgactctgaccaataatacggaatggaatataacttgtagtggttcagaaccgagtggctacaatagtattggtggcgctcccgttggaccggcttatcaaagcaagccaggatatgtttacagtatcgatcgtctaccggggattggttacagttttcaaatgggtgaacaggatggtattgatttcgattccctttttatgccttatccaacagcacgccccttttctgggggcaggtattttaattcagaaagcaaaaaacccactatttatttttggcgcattcctgataccagcggtttaccacctccaggccagtattgcctgaatgattatctcggtgatatttatcttgagggggtcagcgccttaaagtttagtgtaaaaggattgtgcattacggtaaagtccccaacctgcaaaatcagtaacgctgatattaaagttaatttgggaagacacaataggtccgtatttatggggcctgggagtaccaccaatatggtaccgttcaatatagatcttaccacctgcgagaatgttggtaacatctttatgcaatttaatgcaacggctgatggtaatcacgcggcaaacggtattataaaaatagatgatagtggtgatgatagttccgcgaccggggttggagtccaggtattaaaaaatagtgtcccgatagtgttgaatgaacctgcgacaatctggtcgggaagtaaaggtagtgagtcggcctacagtttccagtatcaggcaagatacattcagactgaatcgacggttaccgccggtcaggcgaatgcgagtgcgacgtttgtggttacctataattaa

SEQ ID NO: 219313 - DNA, 2577 bp, Klebsiella pneumoniae
atggaagctccattcgttatcaagtttatcgagaccaaatggcacgataagcaaaccttagtcagtgttagcgagtcggagtactcgctaaagcttgagcagacgggaaacaacgccttttccgcgcacaccaccatttacccaaaggtcgatgaactgcgttttgctcaacttgcgataaaaactaagcagggtgatcagtcaccgccctacattgccatgcccaatggtgagagaaggcagttagagtcgattaccgatcccgcttctaatgaggagtggtgggttgagcctgcccattgggatgcaaaacagcgggtttggcgcagtgaagcgcgaaggactgctggccaaatcatgtttgtcattggcagctcaacactgaagcttgatattgatatttccgaacagactaaatcggatctttcacgttacctgtcagattttaaagcggacctgtgggagttgatcctcgatgagagtagtcatatcacgggcgacgctaaaaattcacaggttgcagccatcgaccaagaagcgctgtcattagtcgcatcaattcttagcaatgcacaaaccatcctcaaaaagcccaaagttgaactgaaagaaattcaagcgttaaagccagcaaaagaagtacgtcctgttccacgtacatttatggagatttgtaccaaaggttcgcgtaagcatttaacgagccgcgcatctgagccgagttacaacgtgccagaaaaccagtatgtgctgtatgtggtttcgagcacgctgagcattgtaaagcaattggttaaggtggctgagagcaaaaagagtcgtttttctggggctattgaaaagctcaatgagcgtttagacagtttaaaagactatcgtattatcaaccgtgacctagtagttaaagacttagaacgacttaaaaagcgctttgatacagaagtaatcaatgccgagttatcggaacagttagcgaaaatcaacgttaatctgtctcgaagttactctgaaaaaggttacctaagattggaaaaagcaacaggctctgagaatgagtggtgggctaaaattaaaccatcgcaaaatgatgactggcaacagtttgagccagatggatataccatttttagttctagagatcattacgccagcttgtttaaatcttatagcgactatgagatagaagcgaagatccctttaccgttaagaaggggaaaagcggtggtcttgtatccagaatacatctcacgaatttgcgtattaccagagtctcgttctattcaaagagagcaagaaaatttcactaaattgcgtgacaaaggcattgctctaagtaaaaaggattggcaagcgaagctgacaacagatgaactcgctgaacaggaaaaagaacgtgctaccatcaataagcgcttgggttatttcgcaactgaacatgaaaaggtgggaatcgtacacaaagcgcttgagccaaaactgaaacctttccagcaaatagaaaaagaatggcgtcaatgcaaagtcaaaagtaaaagcacctttcctaactctatgacttttgtgcaaaaccctgcctatcaagcggttcactcgggttttaaaaagttaaaagagcagattggcttggccgatgaggacattttgctttcgctggagaagatcgaagcgattgggttagtcaacatgccactactttatgaacgctggtgtttgctgcaaatcatcaaagtgctgactcaggcattccgctatcagccagaggacaactggaaacgaaaattgattgcgaatattcaaggcaatgaagaacaaatcagcattcagtttttcaacccaagtgtttcaagagctatcactctgcaatacgaaccgttcttagcaaatggtaagcgccctgattttgttttggatgtagaagcgattaccaaaagtggtaaccagatttcaaagcggttagtcgtcgatgcaaagtactattctgctgcctatctcaagcaaagaggtgggatcggtggggttatccatgaactttacaacggcaaagattatagcgaatgccaagagaacagtgtgtttgttcttcaccccgtgttagatgcggttgagaaagtcgtctctccacaggaatgggcgaaagacagttatttgggcgaactatccatgtttgattgggaacctgcacaccatcaacgccaagctacaaactatggtgcagtatgtgcaaacccaatgaagtcgcaacgctatcttgatgaaatccaacgtatgctagggatgtttctacagtacggcattgaagacaatacatcttttcgaggagcatcggatgatactcatgcggtgaatttttgtgtttcttgcgggtctgaaaaagtagttgatgtaacgaaatcaatgagttcaaataatcaaaagcgttggtatcggtgcaatgagtgtacacactttaccgtgtatacccactgtggtacatgcaatacacgattaattaagaatggcgagtattggacctatttgtctttgatgcctatgtcttcaattaacataaagtgtccaaactgcgagtctcccgtatga

SEQ ID NO: 219314 - DNA, 2208 bp, Klebsiella pneumoniae
atggctttagaacaagttatctacaaccttgaagaggttaaagggctctctgatgaagagctttaccaacgcctttatgatagttggggcttggaaaatcataaaattgatgtctggggtgaactgagtattaacgaggcagggaactgggctggtatccgtaacgcaaaaactcttagtggcaaccaaagcatagaataccctctggctgattcgcatgaattgcaatcaggtgtgtttttaaccccatcagtagcaaaaatagtgttaggcaatgacactaaagggatggttgcttgtgaactgatgttagcatccatcccgcaaagagctaaaaaaaacaacccatttctattagccgtcaatgataagacggttgagcgtttgacctatctgcccgatgcattacctaatttagatcggcaagccctaattcaaaatgaagatgaaacactgctacgcaaagttatttatgacgcagaagtaaagcgcgttaaacataaaatcgcctcagaaacagaagcgttagaggcagcgttgcaagaaaaacaacaggatatgactgacaagttggcggagttgtcagacgcattcaaaagtacacaggataaaatcacagcatcaacgacagagcttgaaagctcaatcaagagaaatgaagaactaaataatgataatcatcggctaaatctgaagattcaggaaagcaaagctgagttagacgtcattatcgaaaagagccgaaaagtagaggaaaatatggcaagaaaagtcgagaaactaacagatttcatcaaagagaaagccatcttcctgaagagttttgagtttttggatgaggaagatttcgacttttttgttggaagccccttgtctaataaggagcgtggtgaacatatctctttttcacaagccctttattcaaactacagcgatgcagtttcttacattcaagcgtacctcaaagaacgagacatcctgtaccctcgccatattatcgagaacttcctaacgcttattcgcaccaatgatctcatcattctggcgggggactcaggctcaggcaaaacaaacctggttcagtcgtttgccaaggctattggtggggtatctaagatcattccggttaagcctaactggactagttcagaagatttgctgggctattacaatcccctagagaagaaatatttggcgacaccatttcttgaggcattgatcgaggctaagcaaaacccagatatcccatacttcatctgtttagacgaaatgaaccttgcccgagtggaatattactttgccgactttctttctaagctagaggagcgtaacgagcaaccgaccattcaactttactcggatgatgaagctgcacacgttcttgccgagctaaaaggggttgtttctgtcatttctaacgcgcaagaaaagttcagcaaaaatggcatcgtggacttcgttgcgctcatgcaagatgaagaaattaacgctgaaatgaagcgcgcgtttggctttagcgataaagactcactgattaaataccacggtgatatcagacgtatgttggcaggtgttctcggcacgccttcgtcaatcacgattccagcgaacgtaagaattattggtgctatcaacatcgacgaaacaacccattacctctcaccaaaaatacttgatcgtgcacacgtgatgaagttcaagagtcctttgctgaccgactgggatgctatttttgatgagattgactcttacgggctcgacgacgttactttaccgctagtgtttgatattgaagagcttggtgagcgtaccccttatccgaaatttgaacgtttgaatgaattctgcgagttatttacgactttaaaccgcgatgttttcgacccgcttggcgtggaatttggtatgcgaactattcgacaagggcttaactatgtaagtttatttagcgatgtaaacgataataagtctctggccatcaacaactttatcgttcataaggtgctaccaaaattcacatttgatggcgataagcaagtgggtgattacagtaaagctgagcttgttagccgtgtattcttacctcgccttgagtcgctgctggacaaccaagtagaaatagcggcggagttttcatgcaccaaatcgatagagcgtttagttaaaacggctgaatcgaatgatggcgttgtgaactactgggcgtaa

SEQ ID NO: 219315 - DNA, 780 bp, Klebsiella pneumoniae
atggtcgaactgcaacatcaacggctgatggtgcttgccgaacagctccagctggacagtcttatcggcgcagcgccggcgctgtcgcaacaggcggtggatcaggaatggagctacatggacttcctggagcacctgttacatgaggagaaactggcccggcatcagcgtaaacaggcgatgtacacgcggatggcagccttcccggcggtaaagacgttcgaggagtacgacttcaccttcgccaccggcgctcctcagaagcaaatccagtcgctgcgatccctgagcttcatagagcgtaacgaaaacatcgtgttgctggggccatcgggcgtgggaaaaacgcatctggcgatagccatgggctacgaagcagtacgggcgggcatcaaggttcgcttcacaacagcagcggacctgctgctacagctgtccactgcacagcgtcagggccgttacaaaacgactctcaatcgtggtgtcatggccccgaagttgcttatcatcgatgaaataggttatctgccgttcagtcaggaggaagccaagctgttcttccaggtcatcgccaaacgttacgagaagagcgcgatgatcctgacctccaacctgccgttcgggcagtgggatcagacgttcgccggtgatgcagcgctgacatcggcgatgctggaccggatcttacatcactcacacgtcgtgcaaataaaaggggaaagctatcgactgaagcagaaacgaaaggccggggttatcgctgaagctaatcctgagtaa

SEQ ID NO: 219316 - DNA, 1023 bp, Klebsiella pneumoniae
atgatcacttttgagattcgtatggaaattaaagtcctgcacaagcggggaatgagtatccgggccattgccagggagctgggtatttcgcgcaatactgtccgcagccacctgaaagccaaatctgaaaagccgcagtattcactacgcccggcaccatcatcactgctcgatgaataccgtgattacatctctaagcggatcagcgatgcgcatccctacaaaatcccggcgaccgttattgccagggaaatcatggagctgggctatcgtggagggcttactatcctgagagagttcatccgtaaacagaccctgccagcacaggcagaaccggtcgttcgcttcgaaaccgagcccggacggcagatgcaggttgactgggggaccatgcgaaacggcaagtcacccctgcatgtgttcgtcgctgttctgggatacagcagaatgctttacatcgagttcaccgacaacatgcgctacgacacgctggaagcctgtcaccgcaatgcgttcagcttcttcggcggtgtaccgcaggaagtcctgtacgacaatatgaaaacggtggtgctgcagcgtgatgcttaccagaccgggcagcaccggttccatccttccctgtggcagttcggcaaagagatgggcttctctccccgcctgtgccgtcccttcagggcgcagactaaaggcaaggtggagaggatggtgcagtacgcccgcaacagcttctatatcccgttaatgacacgcctgcgtccgatggggatcaccgtcgatgttgaaaccgcaaaccgttacggcctgcgctggctgtacgatgtggccaatcaacgtaagcatgaaactatccagacccgcccctgcgatcgctgggtggaggaacagcaatccatgctggcactgccaccggagaaaaaacagtatgacgtgcaggttgatgaaagcctgatgaccttcgacaggcagccgttgcatcatccgctctccatctatgacacgttctgcagaggagccgcatga

SEQ ID NO: 219317 - DNA, 141 bp, Klebsiella pneumoniae
atgtaccgggtaaaacagctgttcgggggttcactgacgctgcgtgactacgatggtcaggttgaggaggctatggccctggtacgagcgctgaacaaaatgacgaaagcaggtatgcctgaaagcgtgcgtattgcctga

SEQ ID NO: 219318 - DNA, 231 bp, Klebsiella pneumoniae
gtgctgggcaagcgcctgccggtacgtattcagacagataacggcagcgagtttatctcgaaaagtctggataaatgggcgtatgagcacagggtcacaatggacttctcccgccctggaaaaccaacggataacccggttattgaatcatttaacggcagtctgcgggatgaatgcctgaacattcactggtttctctcgctggaagatgcgcagggctttgttgaataa

SEQ ID NO: 219319 - DNA, 162 bp, Klebsiella pneumoniae; identical to SEQ ID NO: 181398

SEQ ID NO: 219320 - DNA, 780 bp, Klebsiella pneumoniae
atgataaactattatgaatatcttgagctggatatgaatgccagcgttgatgaattaaacgatgcgatacaaaaagtaagtaaacgtgatgatgcagatttaaaattcatccgtgaaatgaaatccattttgttaaacgatgaagccagggtattgtataataataaattgatttcttttattgttggcgatagaaaaaagtctgatttggtaagcgctgaaaatatccgtaaattattaaatatagacaattcgtcgctacatgacaaatatatctggattgcaacgggattgtttgttgtcggcgttttatccgcatgtttgtttagtttagctgtcaactatacggttaatctgttcgttatgattgccctggttattttgttctatatggactggaagctactggataaacatggtaaggcaagcttttcaaaatggtggattcttttttcgccagtttatattgctaaacgttgtaaagccgttggtcagggaaaaatgctgttgctggtctggcttgggatctgggttgtatatggcatcgggaactttgcgttcaacggtagcaaagcgatgctggaacgtacagcatgtgaggtggtaacggatatctatcataaacagttacgtcaatactcacagcaatgtgagaacgtaacgttaactgaaagtgaagggaaacagcactatggatttgctcaacttagtgatggtacaactaaagatattaccgtgacagaacaatcagatggtaagattgttgtatatattgaatag

SEQ ID NO: 219321 - DNA, 888 bp, Klebsiella pneumoniae
atgaggtttttaaatggaattaaatatgtgactgctctgggagtaattactatctcctgttcagtaatggcatcaccttatggagattcagatgtcttgttcgggtgtgtcataaaagataaaatcactaaagaggtggctgtgttaaggtataataatgaggtcacttatttattcggtagatcggacattaacggaggtggtggggttattcctgaaatcactttggtaaaaaatgtgagccagttaagtcagacctggaattacagtaggactgagggtgtgtcgatacatacattgaacataccagaaaacgagtatacttactctgtttcttatatagatgatggaaaaaatattgagggggaaataactgttttaaaacagggaaaagaaatcagtacgataaaatgcgatgatgtctgggaacaacatctgggtgacagcaatatgatgcatggtatccccgatgaacattcagacaatattaacgaacatgaaagtaataaatccaactcagaatcagagaagataccatctcaatcacctgttaagatcaaaatagaagataccacttataacttcaaaggtaatgtcagtgctgagcacactataagaagacatgtttatgtttatggtttgaaggatagtgtaacgattactggtttaagtatagaccgtggtagttgttatcggtggaatacccgaccagtaactctgggctatggtaaaggtacagatttctctcttgttatcagtcaaaaggttgcctatgcaaactccgggtggaattgggttgagatgaataatagatactcaaaatgtatgtggtcagaagtcgaggttaaaactaatagcggtaattatagttttaatctttccagatag

SEQ ID NO: 219322 - DNA, 378 bp, Klebsiella pneumoniae
atgccgttaactgtgtttatcagccgtgaagtcatttccagaatcgtgcttatcatcatggctgttgccgtgctgagcagttcgtttatggcaaagccacaggctgcatacagcgttcaggaaacaacgtccatcagtgaccatcaacacgacagcgatgaaccactgaatgagcacgatccattgttgtttcactcccacggtagcgtgcatcacctcaatgccgatcattcccacgatctgaataaactctttgctctgcctactctgcacgcatggaatccgggcatgcgggtgatatatgcgttgagttcagaacaaatactgcaaatgccgcagtccacccccgaacgccctccgagaatcctgtctgcgtaa

SEQ ID NO: 219323 - DNA, 267 bp, Klebsiella pneumoniae; identical to SEQ ID NO: 95291

SEQ ID NO: 219324 - DNA, 558 bp, Klebsiella pneumoniae; identical to SEQ ID NO: 95292

SEQ ID NO: 219325 - DNA, 261 bp, Klebsiella pneumoniae; identical to SEQ ID NO: 95293

SEQ ID NO: 219326 - DNA, 507 bp, Klebsiella pneumoniae
atgaaaaataacgtcgagacacaactgcgccggttacttcgtaaaacgtcaggcctggacattatggttctgcggctgtcagtgattttcatcttcgccctgtttggcacctacaaatggtttgccttcgaggccaatgcccttcaccacctgctgccaggcacctggctcggtgcgctgtatccggctctcggcgttcaggggctcagctacgcactcggcgtggtggaaaatatcacccttctggccctgattgccggatttttccggccggcagtgggtgcagcaggcgccttgatggtggcaggcaccggcatcgtcaccctgagccttctgccgcagctgggtcgcattgacagcttcattatcaaggatgttcttctgattggggctggactggtgctgttgcgtcatgacctgcgacggacactgattaaccggagggcgaagcaactcagcgccgtgcacaaaccccgctcgtctgacgcattgtcagccatggggtga

SEQ ID NO: 219327 - DNA, 150 bp, Klebsiella pneumoniae; identical to SEQ ID NO: 120984

SEQ ID NO: 219328 - DNA, 462 bp, Klebsiella pneumoniae
atgaacaaaccgtataaaaaagacccacagaccattcaggcactgacggaactgcagttcagcgtcacccagaaaagcgccactgagcgcccgtttaccggagaatatgacgaccactttgaggacggactgtacgtggatatcgtctccggtgagccactgttctcgtcgaaggacaaatttgattcgggctgtggctggccggcattcagcaaaccagtggaaaacaacgtccacaacctgagcgacctcagtcatggcatggtgcgtactgaagtgcgttcccgtcacggtgacagccatctgggacacgtcttccctgacgggccacaggataccggtggattacgttactgcattaactcggcttcactgcgttttatcccgaaaggcgctctggaaacagaaggatacggtgaatttcttcccctgtttgagaaaggagataagcatgaaaactga

SEQ ID NO: 219329 - DNA, 495 bp, Klebsiella pneumoniae
atgaaaactgatgtggcaatccttgccggtggttgtttctggggtgtccaggagctgatccgcaaactcaatggcgtggtcagcaccgaagtgggctataccggcggacgtaatgataacccgacataccagcaccacccaggacatgcggaggcggtgaaggtggtgtattccccggataaactgagctaccgaaaactactggaatatttctttagtattcacaaccctacaacaatacttcgtcagggtaatgacgtcggctcaagctaccgctcagccatctttttcaccacagaggagcaaaagcagcaggcaaaccagcttatccgtgaaatagatgattcaggagtctggcccggagtcgtggtgacagaagtagagcaggccggtgagttctggtctgcagagccagagcatcaggattacctgcagcataatcccgacggctatacctgccattttgaacgacctgactggacgcttccgggataa

SEQ ID NO: 219330 - DNA, 222 bp, Klebsiella pneumoniae; identical to SEQ ID NO: 95298

SEQ ID NO: 219331 - DNA, 282 bp, Klebsiella pneumoniae; identical to SEQ ID NO: 133516

SEQ ID NO: 219332 - DNA, 606 bp, Klebsiella pneumoniae; identical to SEQ ID NO: 92417

SEQ ID NO: 219333 - DNA, 384 bp, Klebsiella pneumoniae; identical to SEQ ID NO: 149085

SEQ ID NO: 219334 - DNA, 3381 bp, Klebsiella pneumoniae
atgcctgacattatcccgcaccaacaacagccggaacgtcttcataaatttcactccctcaagggagggcaatactggcgcgcaaaaaacgatattcctgagcaatgtattgaacaggatgaagtgttgctgattgagtcgctccgctgggttgataatgcactccatactgtgatcctccgcacccatccgtcaaaatacggcaaagactttgttttcaaatttaccgatgctgctggccgtagctgccgcaccacgaaatcgtttaaagagcatcgatttctgtttaatgactttctggataaatttgaatttgcagatgatgggcaggatatccggagccaggaactgcttgcagctcaaaaccgggttagccagctgactcagcaaatgaccgaaaccatgtctgatcctgaagctctgcgtacggaactcctcggcagggttgaagcaaagaaagccagttcatcgacgccaggcgatgacaaaaagcaacttcctatggttatggagctgtcttcatcaactgagatagcgtctcttggcacagctctgtcatcaggtatcgatgaagccaaaatagcacagctccagcaggctgttgagttcagacatgaaatcgcacaggcgcaaatcgactggattaaagaaaagaataatgcgatttcgagagccgtcatggctattactccctatctggaagagtctgctgccgcccagcttgccattgccgaagaaagtcgcgaaacgctgaataaactgatggacggtataaagtcccttgacctctacatcgggaaagatgtggtggtgaacactatcagggagggtgaatcagcaccgccacacattcccttgacgttcgtacagcgtaagctggccgtcgatgaggaaacggctgtttttctcgatataggagaatggtttgattttgaaaagttgccactttttttccatgcattaaacaaccatccagggctggtggagcagatcttcccgtcacagcgctgcgtggtatgtatgaccactacccgtcgctatattgattatcaggaccgttgggctaactgggagctcaatgcaaaaaaccagacagtctttctgatggttcgggacggcgaacggctgttccaggtttactctggagtagagtctcacctcggcgctcatacacttttcccaaccaccgatgaacagggaaatatctttcgaggcattgacggttcgcaggttacgttcaatgacgtgtcatacaccgacaagcttaaagcccatgagatggttgctctgcattattaccggtttcttatcctgtgctgcgggctcgaccaccggctaaagctgtttggtgagttctacgaccctcaggaccgcttaagtttcgtctctatggcgttccaggagaagtattgtcgattcatttatgatcatgatggtactggccttctggacgatcctgatgcgaaagtgcgcccctctattgaggagtatataacccaggccaatagccatttgcgctcaggttcaagagtgttttgcgagtggagaactgtttgtacaccaaatactgcgccgggtgttgtgaaagtcgatactagtaccagttaccgatcctattattttactgccgatttcatcaatgatgatggaatggcagtggcctttacccgcaacaatgagatttgcgtggaggttccggtcaaaaaagatatcttccgtcgcacccgggctaatgatgtacgtgaatttaatgcgaaagtatctctcactaattttcagcgtgatccgtgggatgacgcctgcagcgtgggattcctctgtctggacgcggttaaagccgatgatctggattattacatccacagccgttccagccgtaagaattttatgtactacataaagctcttcaaacgcctttcagctgtcctgagagtggaagaagagcaggagaagccctatcggcaaaagctcatcagagcgctggtggatggcaacataggcacaaaaactaatcgtgctgaaatcgtcgacaagacagtcatcacctggcgggcggacaaaaaaggtcagccgcttagtgaaggaattgacaacgagaaaagctggaaagcattacttggcatgatggacctgatcgcctggcgcggtttgagccatagagaggctgcagtggagatggccatctcccggggtagcaaaccgttacgtcttatagtcacgacaaatgccagactggctctgtatgttacccctacagccgaggaacgtgacgatcgcgtggaaaaacataagtgggccatgctgctgacctttaaaatgttagcaaaaggtctgactcttgattccagcaaacctgcgttgctaagcaaaaatagtgtgtgcgaaacaaccctctatgaatggccggaggccaatgagtggaaagggttgaaatcagtgttctccagctttaacgaaaagcaaagagcgtttgaatatattgagacaggcaaagaggacctccgaaaactgtctccggctaacccctcagaatttgaggctggggtacgtgaatggatgacggcctactgcgaaatgaatgattaccgcaaaaccgggggccaggtgcagcagccgagattgatgataccggtaggcatctacattaaccggggagactggcagtatatctacgtcacaacagaaagtgaggccgctgggtatttttatcacaacagcagcgaacgcctgaaaaaggaactttatcaggaatatgtttcacgctttgctcacccggaaggaaagctcgaaaggcttgaaactcgggggaacaggctggcattgggcatgacgaacagaactcccgacatcggcatgttctgtgcagatcgcaatgttgaaatggatagcgtgaattatggacctttatcttacagcgcctacagtcagcttcagcgaattgaaaaccgattgttttttgtcctcgctgaagcggaacgtgggttacatcgcaggatttatattgccgataaccttaaaagcgataatggtgagtttatcatagataaactccttggttcttcacatctacaggtgcagtctgccgttgatgtattcgaagtcattctacctaagtcgttgtcagaagggccgctgccggtaatcaaatcgagtggtgaaatctaccgtattcaccactggtttgatatctgtccaaaaggcgctgaggctaatatttcattgagcaatatcgaggcaccagtaaataaggttaccagacacagtttcgatagcagggaggcggcaatcatgcatatcctgatgcagaaggaaaccgttaagaaaagtgtctccggagacagatccaacacgccagaaggcgttgtcgaaaggtggtattag

SEQ ID NO: 219335 - DNA, 354 bp, Klebsiella pneumoniae; identical to SEQ ID NO: 95382

SEQ ID NO: 219336 - DNA, 792 bp, Klebsiella pneumoniae
atgaatgcttttaataatctgtttaaccgtcactgtcaaaacactctgctggctcgcggatggcctgccgatatggaactgaactattcattagcttactgccagggagatggtgtggcattttacggcgtgctgcatgacaaagaaatattgtccttactggctggtctggtgaaatataatcatatcactacaaaactggcagaagaggttgccgaattaatcaaagacagcgaaacaaaactcatccttgaacgcaacggttttgggtaccgatattcacatgcaaataccatccgagtcctgttagaaaattacccggaagatatcggatatgaagatcgcttttatgacgttctggatagtatccaggggagcattgaggagatatgtagcacgcttgaaaatgacggttataaaatccatgaaaatatgagcccttcctatgcaggcgaccttgttatgtcacgtgccacagctaatttcgaaatcattgtaaccgaaagcgaagaggaattttgggacacatcagatgcatgggatgatgaatgtaaagatttatacatagctgatcttcttaccgggagatatgaactgaagaatcttgaaataatcgtgaggggaaaaacgacaggaaaggtatacggacaacattacgccgaactggtttcaattaacaaaaatagtccggtgcgacgttggtttgaccgcgaatggttaaggttagcatttgaggaagcgcgggtaaaaattaaagatagccgtaaggaacttacaaacataaggttatag

SEQ ID NO: 219337 - DNA, 513 bp, Klebsiella pneumoniae
atggcgaagcctgagagcgtaaagcgcatggcgcgattaaagcgccagaaggagcgagagggcgcgaaggacaggcgcacgaaatacaacgacgaccggccccgggagttgctcgcctacgtcatttcgtggtgcgagatggccgggcaggtcaagaccaagcgtcttgggtggcgcaatgactaccggaaacacgtcggactgtccacgtcaacaatcaccaagtggcgcaggactcacccggcctttgcccgggcagagctggaggcataccacgtataccgaacgtggctgtgcgacctggcggccgagggcgacgagcggttaacgctgggcaagccggacaggctctaccaaaacaggcagataatcattgaccagcagatcactatcccggtgctcaagtacggctacagctacggggcgctgagatacacggcgacgctagacccgcgtgatctggtcgataactcgcagtatgtgacgattaaaaacagatcgggggatcggtaa

SEQ ID NO: 219338 - DNA, 381 bp, Klebsiella pneumoniae
atgagtaaaaacagggtaacaggtgtttcacttgaggttcgacgcggtggcgcagggacggagattgaggaatcagttggtggattcattgagcacaagatccagctgttcggcggtgaggtatcggcggaggttatcggcatcgggggccacccttacgccgtcctgctggcgcatatccctgaccaggaccataacggggagtcgtggattgcacgccacaccaacacaacgccgatcgacagccgcacgctttacatcgccaccgtgtcagctttcagcagcacccgctacggtgcccttgagctggtacgcgagggaatcatagaggcgataaacaggggtgacgacgccgcagcacggcgcaggcagtacgcataa

SEQ ID NO: 219339 - DNA, 396 bp, Klebsiella pneumoniae
atgctcccccgcaacctgggcgagggtatacgggcaatgagagagccgccgaaggtctggtttgacgggaaggtatacaaagtcctcgtgaatggcgttgtgtcgtggtcacaggccacgctaacaccggcgcaggtggaatcactcaaagtacgcatacggggccgcacaacgtactacagcgcgtttccgtgcggcgagtgtggcgggtcaactttctacgccgtgccagtgctggacgctttcaggatggggcggcgcaaatgtaagtgttgcgagtggaagcggcacaatctgtactacgggatcgtgagcagggcgcacgacatccgcaaggaaactaaacacgggcgcataatgcgccaggtacgcaaagcactaaggggctggaaatga

SEQ ID NO: 219340 - DNA, 189 bp, Klebsiella pneumoniae
atggcctctctcccgacgtacaccggcacctcccggccaaccacccatacctctaccagctcgccgtcgatcgtgactctggtaatgcccctcagtgtgggcaatccgcttacccttaccctgtcgcctttccgtaggttcttcgccctaacttgtttcatcgttttttgtgtgtcgttctgtgagtga

SEQ ID NO: 219341 - DNA, 1617 bp, Klebsiella pneumoniae
atgagtcaccaatacgaagacctgccgcagtacggcgacgacgaaaccgactacgccgcgctcgaagagtacagaagcaacgtagtgcagatgccgcagccgggcgcgccagcaatgacgccggagcaagttcaggccgcacttgatgccatgcctgacggtcgttcgcgcgtttcattttcacagcccacaccggcgcacaagcggccagagcatggcgcgaatgcctcagagctgcgcagggaagtagaatcccgaaagtatgatcccgacgttgcagaaaggaacaagcgtcacttagacgccattatgggccttgatgcgccagattgcgccacgccagcagatgccaatatcgactacatgcgcaaaaactttgtgttagtgggcgggcgcctggtcttgagccttgtcgatcccacgttcgcaatgaagattgacgatgcggccaaccactttaccagcatcacgaccgacggaatgccgggacttgagcacactaagcgcggggcggatggcgtcgaaaagagggcgtttgccgtctggctggctaagcccaagaaggaaaatattgtccagcaaatgaccttttctcccggcaagccgaagatgttctatcacgagaagtacgggcgagtattcaaccgctacacgccgctatcgtgggacttctccgcagttgaggacgtgacctggtttatcgatcacctgaataacctttggggccggaaggcgcaattgttccttgagtggctggcgtatggcatccagaagcccgaggccacgatggagctggcatttctgcacatcaacgagacgcgaggatctggacgctcaaaggcattcgagatcattcgtaaggtttacggtcggtacgcagcgccgcgcctcaatctggctgaaatgctggaaacgaagcacaacacggaagtggacgggaatattttcttcgcctttgatgagattctgatcgagggcgtcaagcgccgcaagctggcggaggctgttaaagagttcatcgacaacggcacgaagcaggttaacccgaagggactggcgaaatatgaagtggtggtgaatagtcgggtgttattggcctccaactacatcaacggcctacctattgagaagggagaccggcggatagtggttcacatcggcaaccttccacgcctggacattgccaccgctcaaaggctgatcgccgcagcagagcgtaagagcttcatcaactcatttgcaaagttcctgatggaatatgacgtgagcggattcaatcccggcctcgttgacgtcgacgacgaagaccacgcccgcgttgtgggtgccacaatgtcgccagaagacaagatgatagcggagatcattaactcaggcgtgtctatcctgacctctgacatgctcacccagcttgccaaaaactacggcttacgcggcatgcctaaggacacgttaagcgccatgaaggacgccgggaaggtgacggcgcagcgcctgagagtcgacggaaagcagacccgatgctgggtgttccgcgaccatgaacgatggagaagcgcagatggccgcgaagtcacggcgcaagtggtaagcgaccgcggactaatcgacatctaa

SEQ ID NO: 219342 - DNA, 894 bp, Klebsiella pneumoniae
atgagtattttaaaagagatagcagcaaaggcggcggcactgcgcggcgacctgagggacgttaagagcagcaaaggcacacgcaccatgacgccggtgtatgacgacaaccacgttagtgcgctggcaaagtctatccgccagaacgcgccggagtggctgcaattgtggttcgagatatcgatcgagactggcgggcgaaccgcggacattgcgggccttcgattttccgacctgagcgcatccggtgaactgcgctatgtggtggctaaacagtcaaaagcagccatgagccgcgccacacgcaagggcgtggagctggtacgcgagcagcgcaaggcagcagccaagtcggcggggcagtgggagctgtacgcgcagaccgacgccgccacagctgacgaactggctgagacgttgaccgacgccgaggaggcgatggtactggaacaggtgagccgggcgcaggtgaagatcgacagcaaacagctttccccgggactctgcaagcgtattgccgcgtatcgtgcccgcaccattggcgcagacgatgacagcgcgctgatgttccccgctgccgctaccggtagcaaccgcgccgccggtgtgtggcataagccagtgacacgccagaccatatggcgactgattaagccgttcatgctggcgatcgagaaggctggcgacggtcttatgcgcctcagtgcctacagcacgcgcaaaatagccgcgttccggtggatgaaagccggtgataagcagcagccggggagcgggatcacgctggtaatggagatgttaggccatagcagtctggcgatgagtaagaagtatttaggtcttgataagctggcggcgagactgcaaagaggggtagccctgggaacgctgtaa

SEQ ID NO: 219343 - DNA, 138 bp, Klebsiella pneumoniae
atgtctgcaaccagaatattagcggtgtgcctggcactagtccagggcgaaaaggtaaggatcccggcaatgaccgcgggcgagctgggcgaattgctgaactgcgtggcaatgctgaaaggggagatcatgggatga

SEQ ID NO: 219344 - DNA, 189 bp, Klebsiella pneumoniae
atgaaattcagagaagtgagggcgggagagctgaaagttggcgataaggttttgagttgtgggccgcaggtggtagcaaggatcgaggaaacatttttcgacaagcgcgagatgctgatgacgttcgttagtgggcttgctggcgtatgggataagagggattttgtgacgctgatcgtcactgagtaa

SEQ ID NO: 219345 - DNA, 993 bp, Klebsiella pneumoniae
atgccgacccagatttcggacgtaatcgtacccgaagaattcactaaatacctggtgcagaacaccatggtagccagcgccctattccagagcggcgttctggcaaacaacgacgtggtactggcacagcttgccgccggtgctgacatgttcaatgtcccttattggaatgacctgtcagacgacgaggcggacattgtcaacgacaacccgtccgacatcgccgcagccggtacgctgaacgcggtaaaacaggccgtgcgtaagtccttcctgcataagggatggtcgaccatgaacctcgccagcgaactgtctggtagcgacgccatggcgcgagtacgcgaacgtgctaccgcatactggacacgccagggccagaaacgcctgatctctatgctgatgggtatcaaggcgcacaacatcgccaacgacggcggcgacatgattcacgacgccagcactgaaaccatcggcgctactcaggttatcgacgcagccggtacgctgggcgacgctatgggcgctttccgcgctatcgcgatgcattccgacctgtacaagtccctgctcaagcaagacctgatcgagtacatccgcgactccgatggctcgctggtgatgaccacttatcgcggcctggccgtgaccgtcgacgacggactggtaccggacagcaacggcgtctacacctccgtgctgtttgctgccggtgctattggctacggcagtgcagagccgcgcatcgccgcaggcactgagatcgagaacctgccgggcgctggtaacggtggcggccagcagatcctgcacacccgcgtcaatctggcgtttgccccgctgggctatggctggactgaggcgagcgtagcgaaggaatccccttccatcgcagagctggcgatcgccgaaaactggaagcgtaccgccgcagagcgtaagcaagtcccgatcgcgttcctgctgaccaagggcgaagccgcagcggaataa

SEQ ID NO: 219346 - DNA, 507 bp, Klebsiella pneumoniae
atgagcgaccacgacaaccacgaagaccacgaagaccacggcgaagagcagaacccgggactggtgaagaagaaccgccagctactgagtgaagcaaagcagagccgtgcgcgtgctgatgagctacaggctcaacttgatgcggccaatagcgagctgacagccattaagctgaccaatccggttaacgacatgctgtctgacctggtgcatccggcacttagtgagtctgccagactggctaccgtgggcgagttcatcgactttgccctgcgcgatgatggatcgatcggcgtcttcaaaaaggacggttccgaggctggcgtggaattcagcgtcacagagctgcgcgaatacctgagcaaagtgtcaggcgggcgtctcgactccctactgctcgctcctgagtctcgcggtactggcatgcacggcaacggtggctatcgcagcaacgtgccgaagcaacccgcgccagcgattctaagtaaccgacttgggattaagtaa

SEQ ID NO: 219347 - DNA, 468 bp, Klebsiella pneumoniae
atgttaaaacacctcaacttcccggatgctctgtgtgcagaggtagacgccatcaggggcgatgaatcatttacatcatggcttgctggcgcggcacgcatgcggctggattctggaaaacatgaccagctggacaggatcgaggcgatgctcaaagtgctgaccggcggtcacaatgcccctgtaacgcctcaggagccgccgaaaaagatttggggaggtagaccccttaaagggccaaataacgcccctaagaagcgccagcaggccccacggggcggaatatcaccggcccagcaggtaatcattgagttgtgcaacgcagcagaggggtctgagggactcgatcaggctatcgcggacgaactcaaccggcgcggcatgctgtcaccgtctggcgtggaatggacacaccgcacgatcatgaatactcgggttcgcctgcgaaagcgtggcctgattagttga

SEQ ID NO: 219348 - DNA, 528 bp, Klebsiella pneumoniae
gtgaaccctgactatgtgcggacggcggaggacgaatacagcgaaaagatggcggcaaggcttaatgatccggtgcgcaagcagggcactatcagaaaaatgattgttgacgctggactaaacccgccattggggcttgtcggtgacgaagagatggcgatcgagatggcctctcaggccgccgtcatagctgagcgaaacaaaccagaggtgaagcatgaaccagagaacaggccgcaaaccagtgctgagaaggcggagtttattcgcctggatgctcaattcggggcaggaggctggctatcagggaagccaggcggcaagtacagcgccgatctcgatgacgcgatccggttcattgtcgggcgatacgtcgaactgtccagacgtgggcgagtcggattcatgccggttattgctggcgagctgaacgacatggcgatgccctccttcggtgggtcgaagtggcggcccgtcgatgtctcctggatggtgacaaaactccgggacgccggatacatcaactaa

SEQ ID NO: 219349 - DNA, 258 bp, Klebsiella pneumoniae; identical to SEQ ID NO: 152525

SEQ ID NO: 219350 - DNA, 891 bp, Klebsiella pneumoniae
atgtacaagacacttattatcatatgggcaatgatatctatcggtgtactgctaaatgttgtaatccaatatccatgggctggtgcggtaatggatattgatgggggggcaatttatattgcaaaggaatggactacatatgatgttactcgttatgctggtttctctgtagcatcttattcagttgcgactcaacttcttgcaattggtgtttatcttatctgtgtcgccaaaacaaaaaaaatcaaagtgatattttttgtcgttacttttatcttacttgttttaaccacaactaaaggtgctattttttctttagcagcagtggggcttctattgtttttttatacgaataaaaaaatcatgctccataaaatattaataatcgtgctgattattgatattatacttcctattttatccctttcgtattctgactctttggtgtatagcggtaatcgaggtgggtcatggttacttactactgaaactatttatgagcgcatgacatggatgtggcctgaatctttatcttttattttacataaaggtaatgtcattatgggggctggaatgggagggataggtacagcattatcattgttttatcagcaattcgatgaaaatgctttacgcttcgcttctgctgacaatatattcatatatacatttggtctgtttggggttttgggagtaattgctttatttgttttatgtaaaaaagcatctaaaatcaattggcaagatgatctctctatttacgtatatatgagcacattaagtatgcttttatttggattggtcggtgctccttttgaaagagagttttggcttgtatttttaggaataacaatccaaattgcttttaaaaatactaatcaagctaaataa

SEQ ID NO: 219351 - DNA, 1320 bp, Klebsiella pneumoniae
atgctgcaagaaactattaaccgattgattggtttagatactaaagagccattagttatctgtaatgagcagcatcgttttttagtcgcagagcaattacgtcaaaataatcagttatccaaaaatattattttagaaccttctggaagaaatacagcaccagctatagctttggccgcaattaacgcaactatgtcaatggatgatgatccacttcttttggttttggctgcggatcatattatacagaataaaaaatcttttcatgatgctattaaaaatgctattcctcatgctgagcgaggaaagcttgttacttttggaataattgcaaaatcacctgaaacggggtatggatatatacaaagaggtgaagaagttaatgaagattcatctattgcgtataaggtgaaaagatttgtagaaaaacctgatttagatactgccaagttatatttaagcagtaatgattattattggaacagtggaatgtttcttttccgtgcaaagcgatatctcgaagagctttctacccacagacctgatattttagctgcttgccagcaagcaatggctggccagtcttctgattcttcgcaaaattttattcgtgttgataaagattcatttatgaaatgtcccgatgaatcaattgattatgctgttatggagaaaacttcttcggctattgttgttccattggatgcaggttggagcgatgttggttcttggtctgctttatgggatgtgaacgataaagatgagcaagacaatgctctcaaaggtgatgtgtttgttcacgatactaaagattgctatatcaatactgaagaacagttcgtggctgctgtcggagttgagaatcttgtaattgtcagtactaaggatgcaattcttgttattgataaatctaaagttcaaaatgtcaaagaaatagtaaaatacttgaaagaacatggtcgccgtgaatctcgtttacatcgtgaatcttatagcccatggggacgaagtgaccagatagtacgttcatctcgctataacattaataaagttaccgtaaagccgggtggtaaattttctttgcaattacattatcatcgtgccgagcactgggttgtattgtctgggacagctcaggtaacacttaatgaaaaagtatttatattgactgaaaatcaatcaacatttattcccattggttcacaacatatgttggagaatccaggaaagattccgctagagttgcttgaaatccaatcaggttcatatctaggtgaagacgatattattagaatcaaagatcattatggaataatgtaa

SEQ ID NO: 219352 - DNA, 1377 bp, Klebsiella pneumoniae
atgtcttctaaattaacatgtttcaaagcatatgatattcgtggtaagttaggtgaagaactcaatgataacattgcctatcgaattggtcgtgcatacggagagtttctcaaacctaagacggtggtaattggtggtgatgtcagactgactagtgaaagtctcaagctatctttggctaatggtttgcaagactctggagtagatgttatcgatattggcctctgcggaacagaggaaatatattttgcaacttcatatttgaatgtcgatggcggcatagaagttacggccagtcataatcctatagattataacggaatgaaacttgtaagggagcaatcgagaccaataagtggggatactggattgcatgacattcagcgaattgctgaatgtaataactttgcgaaggtagaacaaaatcaaagaggattttatcaaaaaaataatattcttgatgcatacattgataaattattaagttatgtagactttagtaaatttacacggcctcttagatttgtttttaattctggaaatggggcggctggtcatgtgattgatgcaatcgagagccggtttttaacggctaaagttccagttgagtttattaagattcatcacagtcctgatggtaactttcccaacggtattccaaatcctttattaccagaatgccgtaaagatactactgaagctattataaagtataatgctgatatgggaattgcctttgatggtgactttgatagatgttttttatttgatgagcacggtcaatttattgagggatattatattgtgggtctattggcggcagcttttcttgaaaagcatcccggctcacgtattatccatgatccgcggttaagttggaatacaattgatattgtgactaaagccgggggagtgcctattttatccaaaacaggacacgcttttattaaagaaagaatgagggaagaggatgcaatatatggtggagagatgagtgcacatcattattttcgtgacttttcctactgtgatagtgggatgataccatggttattagtgtcagaacttctttgtgttaaaaatcaaactctcggacaattggttgctgatcgcatggctgcataccctgcatctggagaaataaatagtgtcttatctgatgctaaatctgcaatagagagagttagattgaactatcaatcagacgctaatattattgataacacagatggtgttagtatagagtatgatgattggcgttttaatttgaggagttctaatactgagccagtagttaggcttaatgttgagtcaagaaatgatattgatttaatgcttaacaaaaaagaagaaatattacgtttgttgcgtggctga

SEQ ID NO: 219353 - DNA, 1155 bp, Klebsiella pneumoniae
atgaattctaatttagatgttggtatagttggtgattggtttgttacgtatgctggttcagaaaaggttgtagctgagtttttgaatgtttttcctgatgctagtctttatgctgttgttgatttcctttccgcagaaaataaaaaacacttcaaaaataaagatattacaactacgtttattcaaaaattacctaagtcaaaaagcaaatatcagagttacttaccattaatgccacttgccatagagcaacttgatgtgtcaaagcacgatgtaattttatcaagtagtcatgctgttgctaaaggggtattgactggaccagatcaacttcacattagctatgttcattcaccgatacgttatgcatgggatctgcaacatcagtaccttcgtgaggctggcatgtctaatgggttgaaaagcctcttagcccgtatagttcttcataaaatgagaatttgggattgtcgtacagctaatagtgtcgatcattttattgctaactctcagtttattgctcgtcgtataaaaaaattctacggccgtgacgctgatgtcatttatccaccagttgatgtagagcgatttactttaaatgagaataaggaaaattattactttactgcttctagactagttccttataaacgtattgatgtaattgtcgaagcatttagccatatgcctgataaacggctcgttgttgttggggatggtcctgagatggcgaaaattaagtcaaaggcaaccaaaaacattgaaatattgggctatcagtccaatgaggtaatgcttaaacatatgcaaagtgcaaaagcctttgtgtttgcagctgaagaggactttggtataacacctgttgaagctcaggcatgtggaactcctgttatcgcttttggtaaaggaggctctttagaaactgtgcgaccatatgggcaagataatccgactggaatgttttttagccaacaaaagataaatgatattattgattctgtaaatagcttcgagaaaactagtgaagtatttaccccagcgaattgccgtatgcatgctcaaaagttttcagtcgctagatttaatcaacaaattgacaattatgtaactgaaaagtggaatgaattcaaagaaaagaaaagagttatttactga

SEQ ID NO: 219354 - DNA, 1722 bp, Klebsiella pneumoniae
atgaaacgaagagaattgcttacaaaaatcgcattactatctggcggactaatcgtatcatctaaatcacaaagtacagagcaaaaaatatttcacaataacaatataatcacatgtaataatatcaatgaattaagacaactaggagctcaacataacaaccaaataatatacttagtttcttattatgggaataataaacccattacaggaggaggatatttttactatgatgataaagatgaagcaacacctgataatggaggctcctgctttgtcacaaaaacaggagccagattcaaaagaataataaaaggaactatctcactttcagaatttggtgcagatggatcaatagaaaacgacgataatgcaaaaaataacgcgttgttattttgtgaagaaaataaaataaatttaattatagagccgggaagatataatttcaaaacacccttagagtggaaccctcaaaaatactctataattggaaatggcgaagcaatatttaacttcagtaactgcaaggagaatgaatacgctataatagttaaaggagatgataattcatcaggtgaagtatggaatgcattaatacacaaaatgtcaaatctagtgatagaaggtaaaaagggaattaatggaattataataaatcaagaaaaaaacaaaagcactcctggtgtttcatttgagcatatagcagttaataattttgataatagcgttttatttggagataacgaatggtgtatatcattcacaaaatgcatcttccgaggaagaaataatgaaaaaacaacatttataacagttaacaaaaaatataatgcttgcgaaaaccaatcattcacagaatgtatatttaatggttgtaataatgcaatagcaattcgtcatatccatggtagctgcgagattaacttcaataaatgttcatttgattattgcagcaaggtattaacaataaacaatccagaagctaaaggtatatggagatataaccaatgccactttgaagataatggggagcaagaacaattcacagttaatagtgaaagagcaagtttttatatagatataattggatgtgactggtatttcacaaacaacataccattaactatcggtacatttaaaagtaaaaacaaatcatctagattaaccatcagagatataaaaatccccatttatagtacatctgcggatagaaaaaaatccaatttaatcaatgtgatagacaaaaacataaactgtacatttgatggaatatcgttggaatcatcagagaatgattattttaacgtatttagcctttcgcaaaatttaataatagcaacagaaagtaacagagataatttagtaaaggaaataccagaatggtctttttcagaccatagcatatttctcaaccctacagaaaaagaacactacgaagcaaaaatcaggcaaaacaaaaaattctcaatatcaggaaacgtatttctgacagagaaaacagagaaatctttcgttgaaatctcatacatagatagtaaagggaaagaaatacaaaaagacataataacattacctaacaaacataatacatggattcgttttggtaaaaacctaacatcaccactgggaactaacctaattttaatttcaggtttacggcaagattttaaaaacaaaaattcgcaaatgattgctaatgactggactgttgaacaatattaa

SEQ ID NO: 219355 - DNA, 852 bp, Klebsiella pneumoniae
gtgagaaatttctctatagacaaagctaaaattttagcagccttttgcattgtcttggtgcattctggtacttacccagagtttggatattatttgggcggggtttttggcaatatctctcgctgggctcttccattcttctttcttacatctggatattattttggtctttctaatgcttttgatattacaaaacgtgtgaataaattaatatcaattcttttttggatatctttaatttatttgcctttgagggtgattaaatcgtttttatcttctggtagtattgggaatagtatattttctttaaattcatttgttggcggtgtttactttcatctttggtttttagtttctcttgttgtggcttttttgattttaggatatgccattaataatggtagtcgtttatcagttgcatttttttctgttgtattgatagctttgttttgggtttttgatattgttaattcgtcagggacaaaaactgaagcctattacctttttaggttgttatttgcatttcccattttttttattggatttaagtttgctaaaaataactatcttcagcgtttttcttcatttaattatattgtgatgatttttttttgtttagtttttgttgtttctgaaacttcttttttatattttaaatatggatttgatttacatgaaaggcagtttcctttaggggttttacttatttctgtgggcgttctaggcttgtgcttgacgaatatatctaataataagtcgtatttttctttatgcggtgaaaaatattctttaggtgtgtatttattacacccgctatttcttgtgtttttcagcgatatatcaaaaaaatag

SEQ ID NO: 219356 - DNA, 150 bp, Klebsiella pneumoniae
atgcccgcaatccgattaaagggattatggctggaggccgccggttttaacgtgggtgccgagatggaagtgcgggtgatggacgggtgtattgtgctgatggcaaggcaggtacagataagagaaatagccagggtaaatggagtttag

SEQ ID NO: 219357 - DNA, 246 bp, Klebsiella pneumoniae
atgattagcaatatcatggcagaaaacgcaatccgcccctttgctattggccgtaaaaactggctattcgctgacacacgcaaaggcgcagaagccagtgctgcttgttactcattaattgaaacggccaaagccaataacttagaaccgcaagcctacatcaaacatattctggaccacatcgcgactgccgacacgcttgagaaacttgaactactgctgccatggaatgtaaagctggattaa

SEQ ID NO: 219358 - DNA, 1023 bp, Klebsiella pneumoniae; identical to SEQ ID NO: 129977

SEQ ID NO: 219359 - DNA, 936 bp, Klebsiella pneumoniae; identical to SEQ ID NO: 140467

SEQ ID NO: 219360 - DNA, 870 bp, Klebsiella pneumoniae; identical to SEQ ID NO: 95286

SEQ ID NO: 219361 - DNA, 753 bp, Klebsiella pneumoniae; identical to SEQ ID NO: 95287

SEQ ID NO: 219362 - DNA, 333 bp, Klebsiella pneumoniae
atgaaggaattaatgctgttaattcctctgggcggcgctttgctcttaaccgggtgcgcgggcacagagactgaatttcaatgtaatgccacgacgtcggatacctgtatgacgatggagcaggcaaatgaaaaagcgaagctgaaagaggaacgcagtgatgcaaagccggctgcggccgggttgccacaactggctgagggtaatttcagaaccacgtcagtgaattcgtacccgttgccgccacagtccaacctgacccaggccagagtggccgcggagaaagatcgagcacgtgcagtgtacctaaggaaggtgcgaacaagttcctga

SEQ ID NO: 219363 - DNA, 1425 bp, Klebsiella pneumoniae; identical to SEQ ID NO: 152556

SEQ ID NO: 219364 - DNA, 201 bp, Klebsiella pneumoniae
atggatacagacactgatttagacagagcgctggctttttatcagccgccaccagaaagctggtattctggcatacagaagaaaattgaagcgaccgggcagtggatttgggaaaccattcagggagattttaacgataaccagagtaccgggcaggtagtaacaggtactgttatttctatgattgtagtggcacagtaa

SEQ ID NO: 219365 - DNA, 2556 bp, Klebsiella pneumoniae
atggatgtacagaacttcgaccactcacaccacgcgttaaaaatccgcggcctgagcagcggcgtggacgtactgtcctttgaaggcaaggagcaattaagcgccccattccgctatgacattcagtttaccagcagcgataagtctattgcgccggagtcggtgctgatgcaggacggggcattcagcctgaccgccccgccggtgcaagggataccgacgcagactcccctgcgtacgttgtacggggtgatcacaggatttaagcaattgtcttcctcacgggacgaggcgcggtatgaggtgcggctggagccccgtctggcgctactgtcccgcagccatcagaacgcgatttatcagaaccagacggtgccgcaaatcgtggagaaaatactccgcgagcggcatgagatgcgcggtcaggactttgtgtttaacctgaaaagcgactacccgtcacgcgagcaggtcatgcagtacgacgaagacgatctgacattcatctcacggttgctgtcggaggtgggtatctggttccggttcagtaccgacgcccgactgaaaatcggggttatcgagttttacgacgaccagagtggctatgagcgcggcctgacgctgccgctgcgtcacccttcggggatgagcgacagcggaaccgaagcagtgtgggatctgaacacggcctacagcgtggtatcgaggtccgtcacgacgcgggattacaactaccgtgaagcgatggcggagatgacaacaggccagtttgacgcaacaggcggggataacaccacctacggtgaagcctatcattacgctgacaattttctgaaaacgggtgacaaagcgacgccggagagtggtgcattctatgcgcgtatccgccacgaacgctacctgaacggacgcgccatcctgaagggacagagcaccagttctctgctgatgccggggctggagataaaggtcgagggtaatgatgcgccagaggtattccgcaagggcattctgataaccgggattaccgccagcgcagcacgagaccgcagttacgaactgacattcaccgccatcccctattccgaacactacggctaccgccctcctctcatccgcaggcctgtgatggcagggacactcccggcgcgggtgaccagcaccacggcaaatgatgtctacgctcatatcgacaaagacgggcgctatcgagtgaacctggactttgaccgggatacgtggaagccgggtttcgagagcctgtgggtacggcagtcacgtccctatgcgggagatacttacggtctgcacctgccgctgctggcgggaaccgaggttagcatcgcgtttgaggatggcaacccggacaggccatatatcgccggggtgaaacacgactcggcgcacaccgaccatgtgaccatccagaactataagcgcaacgtgctgcgcaccccggcgaataacaaaatccggctggacgatgagcggggtaaggagcacatcaaggtcagcacagagtacggcggaaagagccagctgaacctgggacatctggtggatgctgggaagcagcagcgcggtgagggtttcgaactgcgcaccgatatgtggggtgcgataagagcgaaaaaaggtgtctttatcagcgccgatgcgcaggaaaaggcgcaggggcaggtactggatatgcaggcagcaataacgcaactggaaaatgcgttatcgatagcaaaaagtctgtcacaggcggcggaggtggcgaatgcgcatggtgcggatcttgatgggcatacgtcgctgaacggcgcgctgtcggagcttgtaaaggcagggatagtgctgagcgcgccggaaggcgtggggattgtaagtccaaagggcgtcagactgggttcaggagagagctgtatagggctgatggcgggaacaaatattgatgcaggggcgatggagaaggtgactgtctcggcgggagacgcggtgagtgtatttgcgcgcaagggagggatgaagctgtacgcaaaccagggaaaagttgaagtggaggctcagaacgagagaatgcggctgacatcgcgccatgggatgaagataagcagtacggaagatgtggtggagatagaggcagagaaggaacttgtgctgaaatgcggcaaggcgtacatcaggctgagcggcggcggggtggaggtaggaggaccgaagaatatcctgttgaaatcagcgaatgtacagaagatgagtaaagcgcagttgccggttgagatgcctgtgctgccgggaaaaggtaattacgatctgtcgctggatctgcgggactgggatggtattcccattggtggcgcgaagtacaaaatcgcttttgagtcaggggctgtattgtcgggcatgttagatgataaagggtacgcactgcatacaaatgttccccccgaatcagcaacggtggaatacgaatttccagagccggaaccggacaaaccttgggatccctattcgtccctgcttgccgcagtagatgctgaattagggacggatggacagggagcataa

SEQ ID NO: 219366 - DNA, 1704 bp, Klebsiella pneumoniae
atgagccgggtgagtaacacgctgaaacaggcgcttttgctgtggagcatgctgctggtgctggcgctatggctgggattcaatcaggcctctacggcgatgaaatttggcgtgacagtggcgcttatcgtcatcgcagtaggcctgctggcgtgctggcgcggaaaaaaaagacagactgaggccgacagcgcatggctgtcccgattgccgcccaaaacatatcggcagcccgtagtgctggtgtgcggcgacgcggcagcatcgttattcacagaaaacccgctgcggcaggtcgcgggagggctgtacctgcacgttgcggatgaagagcaacttatcagacaggctgaagtgctgctggctgaccgccccgcatgggcttctcagttgtgtgtggcctgcacggtcgtgccggttgttcatctggatatggctgttctggcgggacaattgcgacgctttgtcggcggtctggcgacagtgcgccgcagggcgggcataaaagtgccgctgctgctgtggagctggctgcccggcacagggcgagaggatgatctaccgtggtttatctgcgccggcggcaaggttcaggtggtgacgcccgccggagaaagctctccgacggcatgggcggcacagcccggaaccgatgggagcagcctgcggctttgccatcttctgcggatggaaagcctgatgcagtggctcaatcagatggtgttaccagagctgaacgggtatccgccgctggcggcgggcatggggcaggcgccatcgctgcctgcgctggaaggcaatctgtggcagacatggacaacggcaaaaacgggactgacgccggaggcgataccgaagatcggcgcatctcccctgccgttcccggacatgatgctgccgctgttaccacgtcaatcaggatttacgccagtgcgccgcgcctgcgtggcggcgctgctgatgaccaccgtggcaggagtggctgcgctctgtctgtcagcaaccgcaaaccgcagcctgctgctgcaggtgagcgacgatctacataaatatgatgccgttccggcagacaacgacgccgctaaagcccaccacctgtcggtcctgaaggacgatgcaaatattctggatagctattttcgcgaaggggagccattacgtctcagtctgggcttatatcccggcgaacggctacgccagccggtatggcgggttattcgcgattaccgtccacctgagaaaaaaagggatgtagcagacgcattaccggtacagagcgtgcgtctcgacagcatggcgttgtttgacgtcggacaggcccgtctgaaagacggctcgacaaaagtgctgattaacgcgctggtaaatatcagggcaaggccgggctggctgattgtggtcaccggatataccgataccaccggcaataaaaaagccaatcagcaattgtcgctgcgacgagcggaagccgtgcgcgactggatgctacagaccagcgacattccggccacctgttttgccgtacaggggctgggcgaaagccatcctgcggcaactaacgatacgccggaaggcagggccgctaaccggcgcgtcgaaatcagtctggttccccgcactgacgcctgtcaggacgtgaaacagaacatgctgccagaaccggcgttatctcagttaaatccacaaggagtttcagccagctaa

SEQ ID NO: 219367 - DNA, 666 bp, Klebsiella pneumoniae
atgacacaggaacggaaaatcgacattgacgtactacttcgcgacacctttctgacggtggtggaactgcgtcagggcacttctgcaagacacggacaggaactatatcgccattgtctgcagcaggtggaaggggtacgcgagcgtctgacagcggccggattcagccagcaggacatagaacatatcacttacgctcagtgcgcgctgctggacgaaaccgttctcagccgggacgggatggatgatggccagatggtctggctaaaaaaccctctccagtcgcattttttcaatacccttcaggccggcgaactactgtatgagcgtatgaagcgggttttacaggagccagcccccacgtcggcggtcctgacctgttttcatcgcgtgctgttgctggggtttcgcgggcgctatcaggaccccgaatctgatgaacggcagcatctcattgcgatgttcagcaagcgggttgagccattcagggtgcaagaagattcggcagtgctgaatgtgcctttgaccaggcgtcagcattacctgtggcagtctcctttttgctggctgctactgctaatgcttgtgctggttggcgtctggtgggggttgcatagctggctgaatgtactggtggatgaactgctgccaacaggcaagtcttga

SEQ ID NO: 219368 - DNA, 1341 bp, Klebsiella pneumoniae
atgaaaattcatcgaccactatgggctgagggaacgttcctgtcctcacaacagtttcagcagcaggcccgctgggaaacgtacagtaacaacagcattgcacagctgggtatccgtcatccatggggtgtggcgagagtcgagtttgacagagaagcgctggcgttagggaagttaaaattacgtaccctgcgcctgcgtttttcagatggctcgttgatcgactccgacgtttccgatgcgctgcctctggcttgtgatttacatactctggcggtggaaaatacggcaatagttgtcctggcgttaccgctggaacatgcgaatggcggtaatctgggacaggaaaagcatactgaaagacccctgcgttatcgtcaggaatggcataaagtacaggatatttatggcagcgacagtgaagaaatggccgttgaatgccatgcgctgtcattgcgtttcgcccatgataacaatcaggattacatcacctgcccgcttgcacgtctgacgcggaatggtcagggtaactggtctcaggatgaaagctacatcccgccgctgcttgccctcagcgcacatactggtctggtggagcgactggatacgttgctgttgcagctacaggcgaagtgccggcgtctgatggccctgcgccgggaaagcaatcagcgtatggcggacttcgcggtagcggatgtgtccctgttctggttactcaatgcgttgaacagcgctgaaccggttctaagtgattttttacggtatccgagcatccatcctgaactcgtctggcgcgaactggctcgtctggccggcgcgttgctgaccttttcccttgaacacaacgtgagcgccattcccgcatatgtccatgatgctccatcctccgtttttccgccgctttttaccctgctcagcgaactgctcgaagccagcctgccgtcgcgggtgattgcgctcgagctggaatcccttcccggcaaccgctggaaagccgaacttcacgatccacgcctgcgggaagaggcggatttttacctttctgttcgctcctcgctgccgacgcacgtcgttctgcaacagttaccacggctctgcaaaatcggggcgccggatgacgttacgttgttggttaatgttgcgctgaacggtgtgcctgttgttccgctgacgcaggttccggctgcattgccattacggctggagaatcagtattttgcgctggatatgcagagcgctccggctaaagccatgctggatgccgggtgctgcatgatttacgcgccgggtacgctgggcgatctgaaacccgagctttttgcggtactgcggtcatga

SEQ ID NO: 219369 - DNA, 1182 bp, Klebsiella pneumoniae
atgaatgattcggtagttattctggctcgttcattacctattcataatatgggtgggatggaggttgtctgttgggatttatgttgctcacttgcaaagcatggtctgactgtctatgttgtaacaactccataccctaaaggtaaaaatttaactaaggtacctgaaggaattgaattatgtattttagataaaacaaaacctggccaatatagtcgtgaatggtggagtgattcggcagactttattaaaggattgaaagacaaaaatgtaaaagcaattattagtataagcgctgctggtttttcttgcttgaaatataaaaattattttcctaaagcaagatttattatgcaagcgcatggtacttcatacgatgagatatcttcaaagattagaagtggttcattaaagaggattttatccgcagccaagaatgctctttggttttttaaagatggaatgagctatccgaagtttgatgatttagttgcaatcggagaatctgtttatcatagtttgactagtattccgacaaaaattattgtaggtgattcaaatgtagtcaaaatagagaatggaattgataacgaattgttttcggatgatctctcctttcgggatgaaataagacagcatcttaaaattcctaaggatgcagttgtattcttatcggcatctaggttacataatcaaaaaggtgttgataataaccttttggcatttaaagagtatttctctctaaataataattcttattatttagtctgtggtgatggagaggaagctggacgtctaagtcaattagcatctgatttaggtatttcaaaaaatataatttttctaggaggaaaagaacgttgtgagttagcgaggttaatgcaggcgtcggatgtttttgtatttttaactaaacgggttgaaggtttgccactgaatgtccttgaggcaatgagttcagggttacctgtaattatttctaagcatctaactttttctgcatcggataaagttattaaggtaaatccggaagaatataaggatattgctagcgaaatctatggtttattgaaatcttatgatagagagaaacgcttttcatatattttagcacaaaatacactgtcctatgctactgataggtatttacagttaatatatactgataaagtcaggaaataa

SEQ ID NO: 219370 - DNA, 1134 bp, Klebsiella pneumoniae
atgaaaacagtcgcaatttttagaaatcaacttttcaaaaactcagaatcatttataactaatcaggccgactcaataaaaaaatttaaatgtgtatatgtcggaagaaaagttttaaataaaacaaatagagataatgtaatatcattagagagtgttgtatctagtaacgtaagaacaaaggagttttggaatgctatttttagagattcatatgcttatagtttacttctgaaaaatactcaaatcgatatcattcatgctcattttgctatcgactctctctatggcctttcgatagcaaagaaattaaatattccaataattactacattgcatggatttgatgtaacgactaagaaattagatttaataaaatccttatctccagcttggattaattattgttttttttcgagtaaactaaaggaacatggagatatgttcttatgtgtatccgattttataaaagagaaggctttatctgcaggtttccctgaaagtaagctaaagactcattatattggtattgatgtggagaatataactccaattgctgatgcagagcgagataaaagtatattacatatagcaaggcttgtggaaaaaaaagggacactaacgattatttctgctgttggacttataaaagatcatctcaatggatataaaataaaaattataggggatggtcctctttatcagaaaataaaagataagataaatgaaatgcagttaaatgagcatatagagctcatgggtgaagtcaagcatcacgaagttatgcaaatgatttcttctacttcaatgttattagttccaagcgtgactgcaaagaatggtgattcagagggacttcccactgtcatattagaagcatctgcaaataaagttcctgttattgggacattgcatgcaggaattcccgaagccataattgatggagaaacaggattccttgtagaagaacatgatgccaagatgctcgcagaaaaaattcaatatttaatagaacatcctgaggttcgtaatgagtttggtcataatgcccgccagttaatgttaaggaaatttaatttacctgtacagacggaaaagttagaacaatactataaggaagtaattaatgaatga

SEQ ID NO: 219371 - DNA, 1428 bp, Klebsiella pneumoniae
atgacgcattatatgaaaaatataatatgcagtgtggcgttagcattagtggactttattagtttcattgcctcattgtatttggctcttggtatactatcaattacgttaacaaactttagtttaagagttccagatgaacagatagaaggatggatgtacctccattgggtacttggcggttgctgtgtagcttggtacggtgttaggttacggcattacttttatcgcaagactttttggtttgaattaaaagaaatcttaagaacgttacttatttttgctatttttgaaatggctgtaatggcattcgcaaagtggtatttctctcgttatgtgtggctactaacatggatacttgccgcattactagttcctttggcaagaatggtaacaaaatcgctccttaatcattttggaatatggttgcgtgatacatggattatcggtaatggaaataatgcgcgtgatgcttgggtagcaattaacagtgagcgaaatttggggcttaaagttgtaggttttattgccagcggaagctctgagccatgtgatgccaaaattttcgacgtgcctgttactacagtaagcgaaaaatggttagatagtgtaagtaaaagaatgcaatttattgtagccgtagaatcacaccaaagcgagttacgaaatagatggcttcgggaattgatgatcaaaggatatcggtatgtatcagtaatcccaacattaaggggcatgcctttagatagtactgatatgtcgttcatatttagtcatgaagtaatgatatttcgagttcagcataatttggcaaaatggtcttcgagattgataaaaagaacttttgatgtttttgcatctattgggattattataatgctatcaccattacttatttatattgctcaaaaagtaaaaaaagatggtggcccagcgatttatggacatgagcgcgtaggcaaaagtggtaaaaaattcaaatgtttaaaatttagatctatggttataaattctaaagaggttctcgaaacagtactttcaaatgatccagatgctaaaaaagaatgggacgctacctttaagttaaaaaatgatcctagaataacaacgattggacactttttaagaagaacaagcctggatgagttgcctcagttattcaatgtattgagaggtgagatgagtttggtaggcccaagacctattattactgatgaattggagcgttataatgaagaggtggattactatttattaagtaagccggggatgactgggttatggcaagtaagtggtcgcagcgatgttgattatgatactcgagtctatttagatacgtggtatgttaaaaactggtctatgtggaatgatatagcaattcttttcaagacaatcagtgttgttttgaaaaaagatggcgcatattga

SEQ ID NO: 219372 - DNA, 2157 bp, Klebsiella pneumoniae
atgacgtcagaaattactaataaatcatcatcgtctgatggtgatgaaattgatttaggtcgccttttaggtgagctaattgattttcgtaaattaattgtcgcaataacagctggatttactgtcttagctgtgttgtatgcattgctagcgacgcctatatatcaagcaaatgcactaattcaggtggagcaaaggcaaggtaatgcaatcctcagcagtttgagcctgatgcccccagatagccaacctcaatctgcaccggaaattgctttattacagtcacggatgattttaggaaaaacagtagatgatcttaacttacaagcacaagtggaacaaaaatatattcctcttgtagggagaggtttgtctagactctttggtgataaaccaggtgaaataacaattagccatctctatttaccagaggcagatagtagtacatcgaaaattgaacttacggtgctcgataagaaacaataccagattgaaggtgatggtttttcattgaaaggaactgtgggtaatttattagatgataaggggatatcattactggtaaataatatagatgctaagcctggaacaacttttataatttcttatttatctagattgaaagcaataactgaactgcaagaagtatttaatgtttctgatcaagggaaagatactgggatattaaatttaactcttacaggaagtgatccttccttaattgctaaagttctcgataatattagtcaaaattatttatctcagaacgttgctcgtcaagcagctcaagatgctaagagtcttgagtttcttgacaagcaattgcccaaagtacgaaccgatttagatgcagcagaagataagttaaatacttaccgtaagcaaagagactctgtagatttgactatggaggcgaagacggttcttgatcaaattgttaacgtagataatcaattaaatgaactaacgtttagggaagcggagatttcacagttatatactcacgagcatccaacatataaagctctgatggagaaacgccagacgcttcaacaagaaaaatctaagctgaataaacgtgtaagttctatgcccggtactcagcaagaggtattacgactaagtcgagatgttgaatctggacgtgcagtatatttacaattactaaatcgccagcaagaactgaatattgctaaatctagtgctattggtaatgtacgtataatagataatgcaattactcagcctaaaccagtaaaacctaaaaaaataatggtggtggcagtaggctttatttttggtttatgcttatcagtttgtttggtattgctgcgggtatttttacgtagagggattgagtctcctgagcaattagaagaggtgggtattaatgtttatgcaagcgtacctgtatcggagaccctagaaaaggataaccgacgcgctggaaccaggaaaaagcaacaaagcagtacattgctggcacttgaaaacccagcagacctcgctattgaggcgattcgagggcttagaaccagtctccattttgctatgatggaggcaaaaaataatgtactaatgatttcaggtgctagtcctaatgcaggcaaaacttttataagcagtaaccttgctactgttatggcccagacagggcaaaaagttctgtttattgatgcggatatgcgtaaaggttatgtacataaattatttaatgtagataataaaaaaggattatcagatatactttctggatcagaactaattgacaatgtgattgtgaaatcattggaggctggttttgattatatttctcggggtcaggtaccgccaaatccagctgaactcttaatgcattctagatttgaaaaattattgaatgatgcatctaaaatgtatgacttggttattgttgatacaccaccaatattggctgtaactgatgctgcaatcattgggcgctatgccggaactacgttaatagttgcacgctttgaagaagatactgtaaaagaaattactgttagcgtaaaaagatttgagcaagcaggaacaatagtaaaaggatgtattctgaatggcattgtaaaaaaagctagcagttactacggctatggttatagccattatggatatacctattcagataaaaaataa

SEQ ID NO: 219373 - DNA, 1308 bp, Klebsiella pneumoniae
atgacgcacctcacggttcgcgaatggggtggtgtttgtgtgaacactgaaagcagcataaacgctcctcatgcttttacccgccctcaggctaacgcgctgcttacggcggcgcgcgagcatccgctggcaaatcagcacggtactaatatcttaatcgatcgccataacaaaattattgccgggcaaatggttggggtcattgccgctccgggatgtagccttgagatcctgcccaaattcgacgacgagacgatagaaccggacgccacaatacgcaatcgtctgatacgtatgcttgatgtcgccctcggccttaaactcggcaatggacaggctgcaacaatggcgagacaagctgaaagcttacttgagatactcatccgcttgttcgccgagcgactcttatctgaagtacatcggggattaccgcgcacctatttggcacaggaagacgatttgccctcattgcgcggaaggctcaatatcaaacgacaattcactacgcttgccgtccgccccgaccgtctcgcctgtcgttacgacgaactgtcggctgataccgccctgcttcgaattatgaaggcgtgtgtagttctgcttcaccattatgcccgcgctgctgatacgctccgtcgtctgaatgaattgcgcatcctgttatcgggtgttagcgacgtccctttcagtcatctgccgtggtcacaggtacggatcgaccgaaccaatcatcgctgggaagccctctacaatctggcacgtcttctcctgcgacgcgactggcaagctacacaccacgataaacgagcgcagaacgggattacactgcttttcccaatgaacgacctgttcgaggcatatatagcggcgctggcgaagcgtgctgtacgcggtacggaatggacggttcgtgcacaggcaggcaggttatactgtctgatcgaggacgtaaaagaaggcaaaccacgcttccagacccgaccagatctgcttatcgagcggaaccatcagattgttatgatcatagacactaaatggaagcgtattggtcgtcatcccgaagatgccaggcatggcatatcgcaggctgatgtctaccagatgatggcctatgcacggatttatcaatgcccacaagttatgcttctctatccacatcatgcaggtctgggaacgcaacctctgaatgcaggctataggattctagcaggcaaggaacaattacaggtggctagtgtgaatctggttctcgatgaggacaagattgtcgagcagttaattaacctactcagcatcaacacgcagtga

SEQ ID NO: 219374 - DNA, 2157 bp, Klebsiella pneumoniae
atgctcgaagttgaatttcaggaatggttgaagagaaaaggcgccaaaacgcaagcaggcctcaattcccgtatttatgctgtcaaaactatagaaaaaaatctcgcagcacttggttctcctcatgcagatctggatgcagcctaccaggcggatggatttgcacaattgcggcagcggatcaaagagattcgccgtgatgccaaagacaacggcaatgactatcggttactaatgcctgaatcagagcaaccgcttaaccgattgtctaactggaatagctggctcggacaatatggacgttttctgagcggtgatgactctcaggccgacgaaattcgagattatgtccttgaaaactacatcaccccagccagagagcgaggtgacacaagtgtcaccctggtagttggtcctctgaatactgaaatgggtctcgacaagggatggccgaacatctgtcaggctcttgatggtcaaaaatttcaggaactagcggatgttccccctccggtgacggaagggcctaaaaagagcacaacccggaaatatacgttcatccttacggaaggaagcgaactggtggcccagactaaaccaactccgactaaccttattttttacggtcctccaggtaccggaaagacctatcacacggcgagggaagccgtagcgctctgcgatggcaaagatgcctatccgaactcaaaagatgggcgtgcggccctgatggcgcgctataacgaactgatggcagaaaagagaatctctttcgtcacattccaccagagctatgactacgaaaccttcgttgagggtcttcgtccagaaatcggtgaagatgagtcttcgtctgctggattcagactcatgcctacgccggggctcttcagagaaatttgtgcccttgccgatcaggccagaacacaaccccgtgcacagacagatgcctcggcactgcaactatcccagaaacgcttctggaaaatggggcaagggacaattggtaccgaagacgatgtgtatgaagatgcccgcgacaatgggtatatcgctctggggtggggtgggaccatagactggagcgcggatagattctcatcgttcaacgcgattcatgatgaatggatcaagcaaaatccagggaatctgacgcctagtaactggacgcaaacctatcccttccgttgcgaaatgaagcctggtgatatcgtgattgtcccttacgggaacactgcgtttcgcgctatcgctgaaataactggtgattactatttcgttcctgaagccgaaggttactatgcccaccgccgcccagttcgctggctactgacccttgatgaaccactgccactcgatacaattatcgatggtaacttcaccatgcggacgctctattccattgccaccagtcgtgtgaatatcccggcgctaggcagactgctctcgagtacagagaacctggataatagttccgatgttaaaggacaaccagaacaattcgtcctcattattgatgagatcaaccgggcaaatatctcgaaagtgttcggtgaactgattacgttaattgagccggataaacgtcttggaatgcctgatgcactcaccgtaactctgccttattcgaaaaagaaagattttggcatccccgccaaccttcatatcataggcaccatgaataccgccgatcgatccatcgcattgctcgacacagcattgaggcggcgattcaacttccgggaaatggctcccgacgcgaccctgctaagtgaagtagaggggatcgatctcaaagccgttcttaccaccatcaaccagcgtattgaatatcttataggtcgggaatatcgcattggacacgccttctttatcaattgtgaatccagggcacaagttgaagatgcagtgcgcaataaggtcataccgctgttacaagagtatttcttcgaggactggagccgaatcgcggcagtgctgggcgatggttttatgcaggaagcgcagattttaccgccacccggaatagagggggaaccattatcaagctggtcggtacgtgcaccgttcagaaatgacgcctttgatcgactgataggcaaaaccagaacgttaaatgtcaccgatcttgaggtggctggtgaatcgaaagaatga

SEQ ID NO: 219375 - DNA, 801 bp, Klebsiella pneumoniae; identical to SEQ ID NO: 208919

SEQ ID NO: 219376 - DNA, 1173 bp, Klebsiella pneumoniae
atggtcaggcaaaagtgtagcggtattaggcgcagctatttaggtgaagaaaaacagaagaacaccatcctgcgtcagctgctggaagactttgccggtcaagatcttaacctgaagccgagccgtgtcggtacgctggacgttatcggtaatgcctacgaatatctgatcaaaaactttgctgccagcggtgggcagaaagccggggaattctataccccgccggaagtttcggacctgattgcagaactgctcgatccgcaaccgggtgataccatctgcgatccagcctgtggttccggttcattattgatgaagtgtgggcgtaaaattgtctccgggcatgatagtcgtaactatgcattgttcggtcaggaagcgatcggttctacgtggtcgctggcgaaaatgaatatgttcctgcacggggaagacaaccataaaatcgagtggggcgataccattcgtaacccgaagctgctcgataaaaatggcgacctgatgctgtttgatatcgtgaccgctaacccaccgttcagcctcgataagtggggccatgacgaggccgagaacgataagtttggccgttttcgtcgcggtgtaccgccgaagactaaaggagattacgcttttatctcgcatatgatcgaaaccctgaaaccgggaactggccgtatgggcgtagttgtgccacacggtgtgcttttccgtggctccagcgaaggtaaaattcgccagaaactgatcgacgaaaatttgctggatgcggtaattggtctgccggaaaaactgttctacggtacggggattccggctgcgattctgattttcaaaaagcagaaagttgatgacaaggtgctgtttatcgatgccagccgtgaattcaaggcaggtaaaaaccagaaccagcttagcgaagaaaacattaagaaaatcgtcaagacctaccgtgatggcgataacgtcgagaaatacgcctatctcgccagcctgaaagagattcaggacaacgactataacctcaatatcccgcgctatgtcgatacctttgaagaagaggatgagattgacctgctggcggtgcgagcagaacgcgagcaactgaaggcggaattggcgaagctggaaacggagatggctggatatttgaaggagttgggttatggctcgtga

SEQ ID NO: 219377 - DNA, 393 bp, Klebsiella pneumoniae
atgcctaaacaggtgattattccgccaggcaccaccacgccgattgccccctttgttccggggacgctcgccgacggggtggtctacgtctcgggcaccctgccgtttgataagcaaaacaatgtggtgcacatcggcgacccaaaggcgcaaacccgccacgtgctggagaccatcaggagcgttatcgaaacggcgggcgggagtatggcggatgtgactttcaacagcatctttatcaccgactggacaaattacgccgcgattaacgaggtctacgccgagttcttccccggcgataaaccggcgcgtttctgcattcagtgcggactggtgaagcccgatgcgctggtggaaatcgccaccgtcgcccatatcggcaccccgacatga

SEQ ID NO: 219378 - DNA, 183 bp, Klebsiella pneumoniae; identical to SEQ ID NO: 185176

SEQ ID NO: 219379 - DNA, 669 bp, Klebsiella pneumoniae; identical to SEQ ID NO: 185137

SEQ ID NO: 219380 - DNA, 765 bp, Klebsiella pneumoniae
atgaatagtcataagaattacaaagagttagggttattgcaggatttttttagaaaaaaccataaagctacctttaattgtgatcaaaataaagttgagatcacctctagtgatatcactccacttcttgttaaaggtaaaagtaactttcaacaggctaagttttgtttatccggaccggtgatgcatttacggtatcaacctttatggtttgctattttgctgggactgaacgctagacaaccaatccatcaagaacttcagttcaatatttcacttgttgaacttatagaaaaatcgggacgtgtttgtcaggcactcggaatcaggcaagtcaactatacacttgctgaagtttcttactttttgttgctactcatagagttcagaatcgagatacaaaaaagtaatatctgtcagacctgttcggtttttacagaaatcagtcacgatatagattttcagtctatcagcatggctagtgttactatcaatcctagagtggttgacaaactttgggaactggctaattcggcgtcagtttttttgacaactctcttttttgccaagcgcccggaactatacagcctactgcaaaagttactttcaaaaactgaagaggtttcccttagcgacattgctcctgcaacgtttcaacacgtacagttgttatgccgtcatggcctcgtcacctacactaaaaagcataaaatacttgatattcatagtgttagtgttttaattgaaggcctccacccattgtaa

SEQ ID NO: 219381 - DNA, 129 bp, Klebsiella pneumoniae; identical to SEQ ID NO: 95522

SEQ ID NO: 219382 - DNA, 522 bp, Klebsiella pneumoniae; identical to SEQ ID NO: 95523

SEQ ID NO: 219383 - DNA, 2439 bp, Klebsiella pneumoniae
atgcgcttttcactattcttaaatcattctgctttagctttgagtctctcaatagccacgagcatgttttccaacgcccaggcccgggtatacgagtacacctttacagatatcaatggggcgcaaaaaagtgtccctgaaagtgcgccctatcttaatccacatgggaattttaacgctctcctcattggtggcttggaccaacaaatccgcttaaccgtaactcgcgatgctgataacagtgctgtttacagcacaacaacaagtatcatctctgttgatgacaggatttcttccgctaatggaaatatgttttacggaaagactgtcactattccacctatcagtgatggtcgttacaccataaaatctgagattttagactcaaaatcgaccgttgtttcaacaacatcccatccttttataatagatacggtaggccctacgtctgataacttctctgtaccatggattcctgggtacaacatggttgtaaagggacctcgctgggaacttggccaaggtcaagaatctgccataaatcttgcaattaagaatatcaatgatctatctggttttgataaggctattgttcaaataataaaaccagatggatcaatacaatccagctatacaatggcctacgacgatgggtcaagagctgctacagcccctataactaaaggtggtggagcgatagctaaagctacatggatgccagtgtcggatgccgatgtagagtttcgctttcgagcattcctttatgataaagccggaaatgttactcaagtccccgaccaaaaatttgtatttgattcttctgcaggtgaatatgagctatttgcagttgcagaccccaattcttcaactagtgttgttcccggcatttcgtctggctacattaaatattcagcagggatgactgttaatactaaccctgttactcttgtgtacaagattcccaaacataattatagggcttataacaaagctggtttattcttcggttctttgcttactgaagataatagttatgtatatataaaacaatccaccccagttggtacatcatttactattcataatggataccaatacggaggaggtaacgcttcgtataatgttaagttaagttcaatcgctccgaaatccccatcaataaaatcctactcagcaaacttttcaacaattggcgatttttctgctggcacaatgaaattcacaaacatagatttgccaggtgagtatcaaagtataactgtgtttgtagaccctagggattatgtgcagtcattttataaccttacacaaggctacgaagtttgtactattgagcccggagaaagttcttgcactggtcctttttcatacgcaataaataaggggaatggttacatagctcattattttatagttcgcaatcaagataagacacttacatcaaatcaatttgagattcgtagcatctggaatacggatttaatacctaagatcacagggtatgattacaaagaagagaataaatctgtccttgtttatgtcacacaacccggcaatggcaattggcgtgatgtcttgatgctttctaagctagagatactggatacaatttctaatacggttcttctgacgggcacaaaagccgcgatgtctggagaggactatacttatgcatttgatttatcggctatacctgaagggaagtatgatttaaccttcagggccactgatacttttaacaacagttctcagttgccgttcagatctcttattatagataactcccccccttcaatttcattttcgtatgaagggaaaccactgttatcagaaagtacagtctatggattagaaaacatctcagtagctgtatctgatgctttaagtaagtccaagatctctcaaatggttcttcaaggaggccctgcatcagatgatgtagaattaggatttacccataacacagatggttcatacacaccactttatcctcgtttgtttccttcacttgatgaaaaaactgataaatacacacttgtagttaaagctatagatgatgcaggtaatgagtcatcaaaatctatccgttttgcatattatcctaagaatctcattgttcttgataaacttaatacccttgcggttaacaaacctttaaacctttcttcaggtgaacctctggctgttcttaaagcaagtcagttacgccgtaatgatggttccttagcaaaaggcgtacagacagctttaattactgttaggggtgactcagcattcccaattagtgttattggaaaccttgtttctccaggtgaaacgaaagaaattcaaatagatttaggttctgtaggaaatgacgttgttgtccctatattcccaggagtatctggcgttgtcggtgcctccggttttattgttgaattccctcaactaaaataa

SEQ ID NO: 219384 - DNA, 213 bp, Klebsiella pneumoniae; identical to SEQ ID NO: 168455

SEQ ID NO: 219385 - DNA, 645 bp, Klebsiella pneumoniae; identical to SEQ ID NO: 199030

SEQ ID NO: 219386 - DNA, 435 bp, Klebsiella pneumoniae; identical to SEQ ID NO: 199031

SEQ ID NO: 219387 - DNA, 318 bp, Klebsiella pneumoniae
atgaaattaccgctcattctcttagccgtttctctggtcggctgcagcgctcggcctgttaacacaatcaaattccctgatcgagcatatcaatacggtgtctatggcactgttcatgtgcaatacgacgtcaacaaagacggccgcatagaaaatatcgtggtcaacggcgacgacgacggcttttttacaaagcagatcgtcaatgacatgaagcattggcggcttgagaaaggccatccgatgaaagcccagaagcttaccgtagctttcgaaagagatcgtgttcgagctaaaggtggattccttgaaaattaa

SEQ ID NO: 219388 - DNA, 540 bp, Klebsiella pneumoniae; identical to SEQ ID NO: 199032

SEQ ID NO: 219389 - DNA, 651 bp, Klebsiella pneumoniae
atgagttacggatttgaagtctataacgacgcaggggcgctacaaatagactcggacaacaaaacaacacttttttctgatatcagaaacatcgatggtctgacagatagcggttactatcagattaataacccgttcggcgggtcgtatccgttcggatttctaaagccatctgacatgccggttcctggttatctatattggtttcgtttaaatgccggtgccttcgccatgcctggcgcctttagctttcagaacggaagcggacaaatcatcaggacaactcgaaaccttggggttgaaagtgggtatcttgatgtgatgaatggtaacggcgatctgatatggagcgcaaaaagcgccagtcgtgtgcctcgcgtcaggggctttatcgatctaccagcaaactcgccggtcgatagtcagatagtgtctttctctccgggcttcaatccgtggattttgatgaacatggtgcctggcaatatttctgacgatggtgaatcgacaggttattctggtcttctcattaaatggactggctctgaaatccaggtgaagtatacgtcaaaatatcaaaaaaccttctcacaatcatttggcggaagaggggggttaaaaatcccctatgcctacttccaggggtattaa

SEQ ID NO: 219390 - DNA, 297 bp, Klebsiella pneumoniae
atgggattcgggcttcaatgctgggacgaaaatgggaaccttgttgtcgataccagtgattataactgcaggtacatagggacttacaatgtgggaacaggcggtggcaattcagttactcaaggcgtttcgggtatcaacgccagcaacgcctacgctgtgattgttgccggttcttatggaagcgcctttaacgaggctttttgcgcagtaagcgacaatgcatttaccttatttacgctgtctggatacggcacgtcccagactttcacagtagaagtatatcgatatgcttag

SEQ ID NO: 219391 - DNA, 261 bp, Klebsiella pneumoniae
atgattttcagacagcgtcactatctctttatccgcgagcactacaaacacgaccgcttcgaggggcgcaacgatgccacttgggggcgcgactactcttatcgcgtggcccagagcggtctggactcactagcgaagtatggctacagcctcatctcgcagcatgaatcgaaaactggcgaagcagtgtattacgatcgcaacctgaatatcctgaccggcgaccagattaaggtcgctctcagaggggaactggtatga

SEQ ID NO: 219392 - DNA, 639 bp, Klebsiella pneumoniae; identical to SEQ ID NO: 199033

SEQ ID NO: 219393 - DNA, 1665 bp, Klebsiella pneumoniae; identical to SEQ ID NO: 199034

SEQ ID NO: 219394 - DNA, 180 bp, Klebsiella pneumoniae; identical to SEQ ID NO: 199035

SEQ ID NO: 219395 - DNA, 231 bp, Klebsiella pneumoniae
atgaaaattaaaaacattggcatcgttgcaatactttttctggcttcaggttgtaatgatgtagccgttaaaccatatgaaatggtgctcaacaaaacaccatctcaggtggatatggcaggttatacgatggttgatcaggacggggaggcaacggacaaaccaatcaaagccaaggatcgtttttctcagtatctatacgcaccatcagaatacgtagggctttgttga

SEQ ID NO: 219396 - DNA, 141 bp, Klebsiella pneumoniae
atgtaccgggtaaaacagctgttcgggggttcactgacgctgcgtgactacgatggtcaggttgcggaggctatggccctggtgcgagcgctgaacaaaatgacgaaagcaggtatgcctgaaagcgtgcgtattgcctga

SEQ ID NO: 219397 - DNA, 123 bp, Klebsiella pneumoniae; identical to SEQ ID NO: 149139

SEQ ID NO: 219398 - DNA, 855 bp, Klebsiella pneumoniae; identical to SEQ ID NO: 185214

SEQ ID NO: 219399 - DNA, 807 bp, Klebsiella pneumoniae; identical to SEQ ID NO: 185213

SEQ ID NO: 219400 - DNA, 576 bp, Klebsiella pneumoniae
atgattaatgtctacagtcacctgatgtccgcatggccagccacaatggtcatgagcccaaagttgaacagaaaaatgcccaccttttctcaggtatgggactacgagagaattacaccagccagtgcagctggtgaaacactgaagtcaatacagggagccataggtgaatactttgaacgccgccatttttttaatgagatcgtagctggcagtgaaaaaacattatacgaaatgatggatccgccagccgcagatgcttttacagaagcgtttgttcagacttcttcgctgacagaggatgcggtcagaacccacagattcaagactactcgcgccttcaatctgtttagcctggagaaacaagaaatcccagcggtcattattgctctcgacaatataacagctgctgatgacctgaaattttaccctgacagagatacatgcggatgtagctttcatggtaatttaaacgatgctatggacggtgccctgtgcgagtttatggaaagacagtcgttactgctttactggttacagggaaaagcaggtgatggtgccaacttactgatttag

SEQ ID NO: 219401 - DNA, 558 bp, Klebsiella pneumoniae; identical to SEQ ID NO: 120952

SEQ ID NO: 219402 - DNA, 582 bp, Klebsiella pneumoniae; identical to SEQ ID NO: 104060

SEQ ID NO: 219403 - DNA, 339 bp, Klebsiella pneumoniae
atgctggactggaacaactatcgctcagagttaatgcaacgtttaggcgagttgggcaaactgacccccgagaccatgaaaggcgtggttgccctgggcaacgcaggtaacaaaactgaccttttgggcgcaaaagtgcgtgaactcattgccctggcgtgcgcagtcacaacccactgcgacggctgtattgcttttcacgccgacgccgctgtgaaagccggtgcaaccgacgctgaaattgctgaagcgctgggcgtggcgattaacctcaacgctggcgcggcggtcatttattcagcccgcactctggatgccgtcggtcaggcacgcggttaa

SEQ ID NO: 219404 - DNA, 330 bp, Klebsiella pneumoniae
atgcgtacattaacagcttataacgaagataatttccgccagatagagcagtacaacggaatatcggtggtacgtttctctgcaccctggtgtccgccctgtcaggccagcgaagaaatgttcagtcagtttgcagaccggctcgatagagatattcaggtggggaaagtcaatgtagatcaggcgccggtgctgacaaccaaatacgagatctgggggctgccgtctgtgctgatatttcatgaagggcaattagttaaacgcataccgggtgtgaaacctgcatcggtatatgctcaggctattgcggacataaaaaaagggcagtaa

SEQ ID NO: 219405 - DNA, 1107 bp, Klebsiella pneumoniae
atgagtaagcttttcaccccctacaatctgtctggcctggcgttaaaaaaccgtgtagtcatggcaccgatgacccgcacccgcaccatgaatgacgtgccggatgaggtcgtggctttgtactatgcacagcgtgcttctgctggcctgctcatcaccgaagggatgccggtttcagaagaaggccggggttacctttatacccctggtatctacaacgacgaacacgtccagggctggcgtaaggtgacacaagcggttcacgccaaaggtggccgtattttcgcgcagctctggcacgtcggccgtatgtctcacgtctctcttcagccaggccacatagcgccggtttcagcgggcaccgttcaggcggtcaataccaccgtttttgcgctgaccgaatccggagaaccgggcccggttgtaccaagccagccacgcgcgctggaaacgcatgaagttaaacgcatcactgcagacttcgtgcactccgcacgcctggcgatggaagccggctttgacggcgtggaaatcatggcggcaaacggattcatctttgaccagttcctcagtagcgaactgaacacccgcaccgacgaatacggcggctcggtggaaaatcgtcagcgtttcctgctggagaccattgacgccgtggcggaagccgtgggtaacagtcacgttgccgtgcgcctgtcaccgttcggccgcatttatgacctcgcgccgtatgaaggtgaagagcaaacctggtcagccatcaccgacgcgctcggtcagcgggaactggcctacgtacacctttactatcagccggtgtacatcaaagcgccacttccggaaggcttccgccgccgttttcgcaacacgtttaaaggcaccatcatcgctgccggcggttttacccgtgatatcgcagagcaggctctggaagatgatgagctggatctggtggcatttggtgtgccctacatcgctaacccggatctggttgaaagaatgcaaaacggctggccactggcagaaagtgaccgcgccacctactacggcgtcagtggttccccggaaaaaggctataccgattacccggtctggcaggcgcaataa

SEQ ID NO: 219406 - DNA, 702 bp, Klebsiella pneumoniae
atgcaaacgctgaaacccacccttaccatcgatatctggtcagatttggtctgtccgtggtgctggattgctaaaaaaagatttgaacagggtctgaatcgctttgaatttcgcgaccaggtggtgatccgccatcacagctaccgtctggccggtggtactcccgcgatgccttttaaggatgccatcgttaaaaagctgggcagtcagcattcagcggagctgatgatgaatcaggtgggcaccgccggtaaatctgaaggtctgatctacaacttcgacggcatgatgtttggtgatacagaagatgcacacaccctgctggttgccgcgcgtaaggccggaattgcggacacggtggaagaacgtttttatcatggcagtatcaccgaaggtcgctctctctttgaccgtcagcagctcgttgccatggccgtagaagccggtatgccgaaagctgacgctgaagccgccctggaaaatgacgattttcgcgccaccgtttccgacgatgaagcccacgcacagtctattggcctcagcggcgttccggtttttgtgatgaacgaaaaatatgccatcagcggggctcaggcagcagataactttttgaatgccctgcgtcaggtctgggatgaacagcaaaccgaattttcagccactgcgggtcagacctgcggaacggatggctgcagtatttaa

SEQ ID NO: 219407 - DNA, 774 bp, Klebsiella pneumoniae
atgaacacttttttcaaaggtaaaaaactgctcgtcgtcggcggtaccagcggcatgggcctggccgtggcacgcatggtactggaagcgggcggcagtgtcgtgctgaccgggaataaaaaagacaaagccgaagcggtgcaaaaagaactgagccctctgggaccggttgcggtcatcgcggcgaacctgatgaccgaagaaggtatggaaactatccgtcaggaaattaatgctcaccatcgcgatatcagcctgatggtgaatgccgccggtatcttcatgcccaaaggatttaccgagcacagctttgccgattatgacatgtatctttcgctgaaccgagccacgttctttattacacaggatgtcgtgaagaacatgctcgccgcgaagctcgaagggtctatcgtcaacgtcggttcgattggtgctcaggctgcactgggtgactcaccggcctcggcctattcaatggcaaaagcgggtctgcatgccctgacgcgtaatctggcgattgagctggccagcgcgggtattcgtgtcaacgcggtgtctcccgggattgttcatacgccgatatacgaaggcttcatggacaaagcggatatcgcagatgctatgaagtcgctgaacgatttccacccgctgggacgcgtcggaactgccgaagatgtggcaaacactattctcttcctgttgtctgacaaaacctcatgggtgacgggcgctatctgggatgtcgatgcgggcatcatggcggtcagacgataa

SEQ ID NO: 219408 - DNA, 123 bp, Klebsiella pneumoniae; identical to SEQ ID NO: 185206

SEQ ID NO: 219409 - DNA, 549 bp, Klebsiella pneumoniae; identical to SEQ ID NO: 185207

SEQ ID NO: 219410 - DNA, 456 bp, Klebsiella pneumoniae; identical to SEQ ID NO: 185208

SEQ ID NO: 219411 - DNA, 561 bp, Klebsiella pneumoniae; identical to SEQ ID NO: 185209

SEQ ID NO: 219412 - DNA, 729 bp, Klebsiella pneumoniae
atgaccataccacttttagaaataaactcccttagcttttcatacaaaggccatcctcctgtattcaataatctgtcgcttgaaatagagcagggaggactgataggtctgcttggtgaaaatggggccgggaaaactaccctctttaacataataaaaggggggagcgacaattatgaaggttctgtcaaacgttacttcactggtggtgaaatggtaagtctgcctcaagtgataaatctttccgggacgcttagaaatgaggaggtttttgatctaatttgctgttttaataaattgactaaaaaacaggcgtgggcagaacttaacagtaagtggaatgatgatttttttatccggtatgaaaaaataagacataaaagaacctatacggtaagttatggtgaaaaacgatggcttataatatccctgatgttaactctctgtaaggatgcccgtttctttttgctggatgaaccaacggttggtattgacattcaatacagaatgatgttgtgggatcttattagcgaaattgccgctaatgggaaaactatttttttctcaacacatatatttgatgaacttaccagggggtgtattccattctatatgttgtctaggaatggtattaagcactatactgatatggataatttcatgcatgtaaacaacgaaaatgcgccagaaaaggcttttatcaaagaaattatgggagcagagggttga

SEQ ID NO: 219413 - DNA, 726 bp, Klebsiella pneumoniae; identical to SEQ ID NO: 185211

SEQ ID NO: 219414 - DNA, 1167 bp, Klebsiella pneumoniae
atgaaaattactatttccggtaccggttatgttggtttatcgaacggcatcctgattgcgcagaaccacgaagtggtcgcgctggatatcgtacaatctaaagttgatatgctgaaccagaagatatcgccgattgtagataaagagattcaggaatatctggccgaaaaaccgctgaattttcgtgcgacaactgacaagcaagatgcatatcgcaatgctgactatgtcattatcgccacaccgactgactacgatccgaagaccaactacttcaatacctcaaccgttgaagccgttattcgtgatgttgcggagattaaccccaacgctgtcatgatcatcaaatcgaccattccggtcggtttcactcgtgatattaaagagcgtctgggtatcgacaatgtcatcttctccccggagtttctgcgtgaaggccgggcgctgtatgacaaccttcatccttctcgtatcgtcattggtgaacgttcggaacgcgcagagcgttttgctaacctgctgaaggaaggcgcaattaagcaggatatcccgacactgtttaccgattcgaccgaagcggaggcgatcaagctgtttgctaatacctatcttgctctgcgtgtcgcgtatttcaatgagctggatagctatgcggaaagccagggtctcaacagcaagcagattatcgaaggtgtttgcctggacccgcggatcggcaatcactataacaacccgtcattcggttacggcggatactgcctgccgaaggatactaaacagctgctggcaaactacgaatcggtgccaaacaatatcatcggtgcgattgtcgatgctaaccgtactcgtaaagactttattgccgactctatccttgcgcgtaaaccgaaagtggttggggtatatcgcctgatcatgaagagtggctcagataacttccgcgcctcctcgattcaagggattatgaagcgcattaaagccaaaggtattccggttattatttacgaaccggtgatgcaagaggatgagttctttaattcccgcgtcgttcgcgatctggatgccttcaaacaagaagctgatgtcatcatttctaaccgtatggcggaagagctggctgatgttgcgtataaggtctatacccgcgatctgtttggtaacgattag

SEQ ID NO: 219415 - DNA, 420 bp, Klebsiella pneumoniae; identical to SEQ ID NO: 92447

SEQ ID NO: 219416 - DNA, 429 bp, Klebsiella pneumoniae
atgcagtatgtgaatacatgcccggtcctgaatgttgaggagtccgaccgcctgtcttttatgccgtacctgttcggcacggatttcatgctcgcggaattacaggtgtacgctctggccaaaaaatggatgcccgaatatgagggcggcttctggcattttattcgcctgccggaggggggcggctacatgatgccggattgtggccgggtacatctggtcagtagcgaaaactggtttgatcgcactgtcagcgccgacgcggcgggcattattctgaccagcctggcgattaatcgccgtctggcggcccatcatgacagcagtaacccggcgctgactcgcctttatatgctgcgtgatgcccagctctggaatcacatcacctttcaccccgaatgcagtgctatttacgccgcgctggactga

SEQ ID NO: 219417 - DNA, 261 bp, Klebsiella pneumoniae; identical to SEQ ID NO: 101356

SEQ ID NO: 219418 - DNA, 885 bp, Klebsiella pneumoniae
atggccaatgataacaataagttagcgctaatcatcactgaacaagataaaagttctggtgaagttatacatttggttcctaactcaaaacagagtattcaacccaaatcgctactgcgattgggggtctttgttccgacagtcaaggatggcagtgaccctatggcacgaggtcatgtcatcgatgcaacgactgagttgtgtcgtctttcttctatcgctggagaggggtacgaaaagataagtatttttgggcccaggcttgatatggatacggatttcaaagtctggctagggatcgtggacacactcgccaacacatttcttgagcctgatgggactgttagggtcaattttattgattttgctttcagttgtgggcttgctacaaaacgagttgattcaaggttaaggaaacgttttagcgactcactgacacggatccagcacacccatttccagttcatcaaaaactcaacagtagaagggaaaaaagtaaagatcgacatgagcctggtgtctacttcttactatgatgagggaaccgatgaggtcattatcaggccaaatccggatttgaatactctgtatcgtgtcgacgggaagacccgactttacttaaaaatattgaagaccctgtctcgaaaagaatcagcccaggcactgtatctttatctagttgaattacctgaccatttttatcgcattggattcgaccgcttaagagaacggttgcagctgacttcacacaaaggtgctcagaatgcgacgataaaaaaagcgttagagcaactggatgaagctggttttttaaaatacacgatagaaaaaaatcgtggggattatgtactggtcattcttagtcgaaacaaaaaagttacctga

SEQ ID NO: 219419 - DNA, 453 bp, Klebsiella pneumoniae
atgtttttggggggacgttgctacacggctaaacagctcgaaaaggactatctctctgaagtggcaggttacagcgacgaccgctgggaagcgccgcaaagagctgcccggctggcggcagcggtaaaacgctacaaaacctccgagatgctgcgttttatttttgccaccatcgcgtatgatcccgacccggatctgaccccgcttgccgtgaagcggctgtgccaggccctgttcggcagaaccggtagccagtggcttattgtggaaattttcggggtgaagggacggcagcaccgcagcgttgacagtacgccggaggccgttgaaaaaatggcaaccaggtatcgtcatgcagcagagctgcactgggcagcaactctggcggaaattgaacgggtaaagcgcaactatcagaccctggttaaggcacccgggaagagagaagggtaa

SEQ ID NO: 219420 - DNA, 243 bp, Klebsiella pneumoniae
atggccgcgaccgcgtcttcaatgccgatgcgctttttgccaaatgcgatcggttttttccagccgaaatttccgggtatcccccgtcgcttccggccggaattaccgtgcaaatcgacaagtcaggaagccgttttgatacagaaaaattgggtgtatagccactttagcttcaagttaatgtatgcgtacattagcattaagcttatggtatttacccttctctcttcccgggtgccttaa

SEQ ID NO: 219421 - DNA, 189 bp, Klebsiella pneumoniae; identical to SEQ ID NO: 120977

SEQ ID NO: 219422 - DNA, 366 bp, Klebsiella pneumoniae; identical to SEQ ID NO: 95550

SEQ ID NO: 219423 - DNA, 906 bp, Klebsiella pneumoniae
gtggatagcgcacgcgcccttattgcccggggatggggagtaagcttcgtcagccgttgtctccgggtgtcgcgtgcgcagttgcacgtcattctcagacgaaccgatgactggaaggacggccgccgcagccgtcacacggatgatacggatgtgcttcgccgtatacaccatgttatcggagagctgcccacatatggttatcgtcgggtatgggcgctgcttcgcagacaaacagaacttgatggtatgcctgcgatcaatgccaaacgtgtttaccggatcatgcgccagaatgcgctgttgcttgagcgaaaaaccgctgtaccgccatcgaaacgggcacataccggcagagtggctgtgaaagaaagtaatcagcgatggtgctctgacgggtttgagttccgctgtgataacggagaaaaactgcgggtcacgttcgcgctggactgctgtgaccgtgaggcactgcactgggcggtcacaacgggtggcttcgacagtgaaacagtacaggacgtcatgctgggagcagtggaacgccgctttggcagcgagcttccggcgtctccagtggagtggctgacggataatggttcatgctaccgggcgaatgaaacacgtcagttcgccaggatgttgggacttgaaccgaagaacacggcagtgcggagtccggagagtaacggaatagcagagagcttcgtgaaaacgataaagcgtgactacataagtatcatgcccaaaccagacgggttaacggcagcaaagaaccttgcagaggcgttcgagcattataacgaatggcatccgcatagtgcgctgggttatcgctcgccacgggaatatctgcggcagcgggccagtaatgggttaagtgataacaggtgtctggaaatatag

SEQ ID NO: 219424 - DNA, 348 bp, Klebsiella pneumoniae
atgctgtttcgtaaactggtgttgttgggaggggcctgtaccttacttttggtctatcacggtggttattggctaagcgactggccgtggttgttttattacgcgttggtcttctggtggttttcatttagctggtatattttcattacccctaaagttccagttgttcctggatttgcccctatatttccagacacctgttatcacttaacccattactggcccgctgccgcagatattcccgtggcgagcgataacccagcgcactatgcggatgccattcgttataatgctcgaacgcctctgcaaggttctttgctgccgttaacccgtctggtttgggcatga

SEQ ID NO: 219425 - DNA, 624 bp, Klebsiella pneumoniae
atgagctggtattcggttacttttttaggcgacagcactctgttactgcccagtgcagtattgctgtttgtggtggcgttattttcctcccgccgtcaggtggcgtggcagtgggcgctggcgttcggggtgaccggggcgattgtttgcagctctaaactggcctttatgggctggggaatcgggttccgccagctggattttaccgggttcagcggccacacggcgctttcttcctgtttctggccggtgtttttgtggtttgtctgcagccgcgttgcgccggggttgcgccacctggcggcactgtgcggttacgccgttgcggcggtggtgggcgtgtcccggctgatgatccatgtgcattccccggcagaagtgattgccggttttgtgctcgggtgtactgccagcggtgcatttttgctgtggcaacggcgcgcctcactggcgatgctttccggcgccgggctggcggcagtgctggtggtgccgatggtgctgtttaccaccggttcgaaggcgccaacccagacgctgttgcagcatattgcggtgcagctgagtgccgccgaaaagcccttcacccgggaagatttacggcgtggtgccgcaggctggtaa

SEQ ID NO: 219426 - DNA, 2094 bp, Klebsiella pneumoniae
atgaaaaaacgttacctgctcagcattattgcggcctctgtggccggtgcctgccaggcaatggcggccgaaacctacccggaccctatcgggccttcccagtctgactttggcggcgccgggttactgcaaaccccgacggcgcggatcccgaaggaaggggagttcagcgccaactaccgcaataacgatcaataccgtttttactcggtgtctatggccctgttcccgtggctggaaacgacagtgcgctatacggatgtgcgtacccgtaaatacagtaatgaccccggcttcagtggaaaccagacctataaagataaatccttcgatgtaaaactgcgcctgtgggaagaggggcgttacctgccccaggtggctctcggtaagcgcgacatcggcgggacggggctgttcgacagcgaatacctggtggccaataaagcctggggggattttgatttctccctggggatgggctggggctatatcggcaatagcggcaatatcactaacccgttctgctcctggaaagataagtactgccatcgtccccaatcccgggagacgggcaactttaacctgagtgactcttttaaaggcccggccgcgttatttggcggggtggagtggcagaccccctggcagcccctgcgcctgaaactggaatatgacggcaacgactataaagatgactttgccggcgacctttcccagagcagccgctggaactggggggcggtataccgcctggcagactggatggatgtgaatgccagctatgagcgcggcaacacctttatgtttggctttaccctgcgaaccaacttcaacgatctgcgcagccatcagaaagatccggcaccgaaatataacccgcagacccagccgccgcacctggtgaactacagcctggccgccggggaactgtacgaactgcgtgacaatgccgggctggcaggcccgcgtgtggagatcctcggtgatacgctgaaagccagcgggcagcaggacaaatatcgcgacacgcagaaaggggtcgaccgcgccaatgtggtgatgctgaaagatatgcctgccaatgtgaagaccctggatgtgacccagtaccgcaacggcatgccgatggtgaccacccgtaccgacgttaacagcctgcgtaacgaaatagaaggatatccgctgggccaggaacagccattgcgccagcagcgtgtggagccggacacccgtaagggccagggcttctttatggataaggaccggctgaattacagcctctctccggtattgcgccagtctgttggcgggccggaaaacttctatatgtaccagataggtgtggtggcggatgccagctactggctgaccgatcactggctggcgggcggcagcctgtttgccaacatcgccaataactacaacaagtttaactatgacggcgtaccccatgactccagcctgccgcgggtgcgtacccatatccgccagtatgtggataacgacgtgtatgtgcagaccctgcagaccaactatatgcgtgcactggggaatggcttctatggccaggtatatgccggctacctggagatgatgtacggcggtgccggtgcggagctgctgtatcgcccgctggacgccagctgggcagtgggtatcgacggtaactacgttaagcagcgtgactgggacaatatgatgaagtttaccgattatcatgttgcaaccgggaacctgaccggttactggcggccgtggtttgctgatgatgtgctggtgaaactgagcgttggccgttacctggcaaaagataagggcggcacggtggatatctccaaacgcttcgacagcggcgtggtggtgggggcctatgccaccaagactaacgtttccagcgatgaatacggcgaaggctcctttactaaaggcttctatatttctgtgccgctggatctgatgacgacacatccgacacgcagtacaccgacagtcagctggacaccgctgacccgtgacggcggccagatgctgaaccgccagtatcagctttacgatatgaccagcgatcgtgatgtgccggtgggtgagccgtaa

SEQ ID NO: 219427 - DNA, 744 bp, Klebsiella pneumoniae
atgaaaataacaaccacgctaatttgcgcagcaggggtgataactgccgcgtgtgccccggtatggggtgaaggacgggtaacgatatatgcgccgggcagcagccacagccaggtgcttaaccaggtgaaggatctgcgccagctggtggcggatccggcttttggcccgtaccagcccggcatgaccattgccgtgcctgcggccacccgcaaagcagagcaggacaagctgcaaaccctgaaccgtctgcaggcctgggccgccacggaagacggggagcgggccgcggctatccggctggtgataaaccagctgaccccgctgaaggtgaccgggcggcagtttgcctccctggatccggattttgtcaaaaataacgataaagccaaccgcccgctggcgggcgagtacagcctttatcaggcttctgctccggcctctgtatggctgatggggcctgtcagcggggcggggaaactggtgtggcagcccggccgccaggtgagtgattatttatccgggcatgactttttatctggcgcgcaaccgagccaggtgtcggtgattgatcctgatggtgcagtgcgcgtggccccggtggattactggaaccgccgccatgtggaaccccagccgggcagcatcattctggtggggttcacctcccgggcattacccggggatggtgacgatcttaaccagcagatcattaatattctgacccaccggatccctgactga

SEQ ID NO: 219428 - DNA, 636 bp, Klebsiella pneumoniae; identical to SEQ ID NO: 67329

SEQ ID NO: 219429 - DNA, 2907 bp, Klebsiella pneumoniae
atggcctatttcagtgagcaggatctggcatttattaatgctcatcgtaaaccggccagccggtttggtttcgccgtccttctttgctatctgaaaaatatcgggtttgctccggataaaaaatcgtctccaccggcagaattgctcagagtcatcggcaaccgccttaaactttcagcagaactctggcaggaatatatttccggccgtgataccacccggcgcgagcacctgggggaactgtatcggtatctggaactgaaagcctttaatggggcacttcagaaagaatgcatccagcatctgctccctctgtctaccaggaccgatcggggcatacttatcgccgaggaattactgaagcgtctgcatcaacagcgaattattattcctggtattgatgttgtggaacgtacctgtgctgaagcaatgacactgggtgataaagcggtttacaccacgttgaatgcgcatcttagtatcacgcataaatcagcgcttgatgcgctactggtgacaactgaaaaacaaatctcccgtttgacgtggttgcttcagcctccgggaaagatcaatggaaagaatgtcctgcaacatatcgaccgccttaacgccattgaagcactggcgctaccggaaggcgtggataaaacagttcatcagaaccggctgctgaaactggcgcgggaaggccgcaaaatgagcagccgggatttagctgatttttcccctgctcgtcgatacgcaacgatggtctgtgtactgactgaggccagagccacaatcattgatgaaattatagaactgcatgaacgcatactgggcagtatgttcagccgggcaaaacgtcagcaggccgaacgccttcagaaaacgggcaagctgatacagcagaaattacggcagtatgtttccgttggacaggctatcttggatgcacgcaacgcaggcgaagatcctctgtctgctgttgaacagatattaccgtgggaagattttgccgccagcttggaggaaacccggctccttgcacgtaaggataatttcgaaccgcttcatcttattaccgaaaaattcagcacgctgcgcaaatattcgtcccggttgttatcggccctgcaactgagggccactccggccgccttatctcttaattatgccctcgatactatccgtgaaatgtatcgtaagcagctaagaaaggttccctcatcagcgtcactggatttcatccctgagagctggaaaaagatggtgatcaccccctcaggtattgaccggcaatactatgaaatttgcgcaatgaacgagctgaagggggcgctgcgggccggtgatatctggatccggggttcccggcgctacaaaaacttcgatgactatcttatgccaggagataatttcgaaaagttattaaataataatcagttaaatatacctgtcgaaacagattgcgaagcttaccttaaggcaaggctgacgctgctggcctcccgcctggaggaagttaacgcaatggccgttaccggggatcttcccgatgtggatatttcagataaaggtctaaagatcaccccgctggataacagcgttccttccacaatatcaccactggccgacctgatttacaacatgttgccacacccaaaaattacagaaatactggatgaagttgagagatggacagccttctcgcgacattttacccatctgaagaacccgcttacccgcccgcaggataaccgtttgctgcttaccaccatcctggcggacggcatcaatctggggctgaccaaaatggcagagtcctgtccgggaaccacgcgggcttcgctggaaaacatgcaggcatggtatatccgcgatgaaacgtactctgctgcactggctgaactggttaatgcccagaagtcacgtccgctggcggcattatggggagacggttcaacctcatcttctgacggtcagaattttcgggttggcagccatggccgctatgccggtcaggtcaacctgaagtacggtcaggagccgggggtgcagttttatacgcacatttctgaccaatacagtccgttttacaccaaagtgatcagccgtgttcgtgattccacccacgtacttgatggcctgctgtatcacgaaagtgatcttgaaatcacggaacattacaccgatacggcaggtttcacggagcatgtttttgcgctgatgcatctgctggggttcgcttttgcacccaggatccgggatcttcatgacaagcggttgtttattcaggggaaggctgataaatatccggctctacagtcaattatttccacaactcaactgaatatcaaagagatagaaacccactggaatgaaattctgaggctggcgacctcaataaagcagggaactgtgaccgcttctctgatgctgaaaaagctggccagttatccgaaacagaatgggcttgccaaggcactgagggaaatcggccgcattgagcgaacactgtttatgctggactggtttcgcgatccttcactgcgtcgcagagttcaggcaggtctgaacaaaggggaagcccggaatgcccttgccagagccgttttcatgcatcgtctgggcgaaataagggatcgaggtctggaaaaccagagttaccgggccagtggactgacgctgatcaccgccgcgatcacattgtggaataccgtatatatagagaacgccgttaacctgctgaagaggaaggggctacatctcaatgagcaattgctgtcacacttgtctccgttgggctgggagcacattaatctgacgggagattatatctggagaaacaataaaaaactggcagaagggaagtatcgacctttgcggccggttgatatcagccagtacaaaaaacaaccttaa

SEQ ID NO: 219430 - DNA, 1131 bp, Klebsiella pneumoniae
atggaatttaaaataaagaaaatgactgttaaagacagcagagaaattaaaaaaagatttgaagattgcattaagatagcagaagaaaaaaatatgcaagtgggctcaattttaaatattgagatgcaagatagattgaaagaaattaatttaaaagtaaaaaaagaaacagcagaacaatatagaaaattgtttaattataaattgtctgtgaatgcagaagatattattcaacacttgttagaatgcaacacaagaaacagttttgataaaacaagaactgcttttagattttgtatagctgaaaaaatacaagagctaagaaacgaagcagatcgagcaagaaaacaaaagaattttgatttaatgaaagaaaaaaccattgaagcatataagttgtttttcttttttgagcgagattttttgagcgaaaatcgcgtaacttggaatgatatttcttacagaaaaatagaatctaaaagcaaaaaaaagactatgaatagtgtttccagtattaaagcaatttttgaagatttgaagcaaaagccagagctttttgataagtattcaatgattttagcaatttcaagtttgaccggctgtagaccagcagagatccagaaagggatagggctggaactaagcccaccactattaaatatatgtattagcggggcgaaagtgggcgaagatcgagggcaggaaaaaagaatattgaaattcaatataaatgaatttgctgaaaatgagcagttcaaattgattatgtcaaaaatgaagcaaaataataaattagaatataaatgctcaaagcaagagtatgattcattgagacaatatttatatattaatcacccaggtttttctttgtatacattaagacatagggcagcaagtgaattaaaaaaagacggattttcggaagaaatgatcgctgctttcctggggcacagggtaaccagatctctagagaactatggatacgcaaaatctgggaaaggtggtccgacagtggcaggtgttgagcacacaaacgcgattaaaagcaatacaaagcgatatgagaagaaaaccaacccaggagggggaaacccttccagtactcgtaaacgagccttaaaacgattttag

SEQ ID NO: 219431 - DNA, 702 bp, Klebsiella pneumoniae
atgacaatatctaagaaaaatagtaaattgagagagcgatttagagaatattcaagtaatgcagacatatttgatcttgctgatttgagatatgaaatattaaaaatatattgtgatttcaaattaaaaagcgatatgaatgagcaagaaagaaaatctcaagactcaagaagaaaagcacatttaacagcattaaaaaaaagaattaaacgagaaatcgtctcaaaaatagttattgatttagtgaaatattacaatatagaaaaaactacttttcattttttttctcatatatgcactgagattttagaaagaaatgttgataacagatacattctgaataatttttcaaatataattttagacgaaaaaaaagaattaaaaaaattaagtgaaagtagaaatgcttcaaacaaaatgagtttagaaaactcatacaacgaacttgtttctatgtcacatataaaagataaattattcataaataacaatttcaaaactgcatatttaaaatgttatgcttgtgcaaatgaagaattttcaagatttaaagtttttgcttttccggataattatgagacattagattttttatttgaagaagaaagaataaaaaaagaagaaaaagaaatatctaaaataatgattgaacaagttgaagaagaacaaaaaatacagcaaccaaagaagagaagactataa

SEQ ID NO: 219432 - DNA, 249 bp, Klebsiella pneumoniae
atggaaatagaaaaactgatagatagatattttttagcattagaaaagaaaataattgctgagatttataataaacaaacaagaaaagaattagaaaagtttatatttaagtgcgatcaagagctaatggggtttgaacagcgatttaatataatatgctgtactgaatattatgagaaacagaaacttatatttttaattaattatatctcagcagaatttgagcaacgagaaaaattaaattattaa

SEQ ID NO: 219433 - DNA, 276 bp, Klebsiella pneumoniae
gtggcttctgtttatatcagctgtccctcctgttcagctactgacggggtggtgcgtaatggcaaaagcactgccggacatcagcgctatctctgctctcactgccgtaaaacatggcaactgcagttcacttacaccgcttctcaacccggtacgcaccagaaaatcattgatatggccatgaatggtgttggatgccgggcaaccgcccgcattatgggcgttggcctcaacacgattttacgtcacttaaaaaactcaggccgcagtcggtaa

SEQ ID NO: 219434 - DNA, 1500 bp, Klebsiella pneumoniae
gtgacgctgaataccagacaggtcagtttttacatggctcaacgtaataaaggtcttacgcaggaagccgctgcggccaccaccggcatctctgttcgctccggacgacgtattgaaaaagggcagtggcaatcatcaggtgagcgacactggcggacacgtcaggatcctctggaagcggtctggctcagtgatgtgcttcctttactcgcttcccgtccgcagatctcgccgacaacggttctcgaatatctgcaggataaatatccgggccagtatcccgataaggtgcgccggacgctgcagcgccgtatccgtacctggaaagcctgccacggtgaggaacgggagatcatgttccgccaggagcatcaaccgggaatgcgggcgctgtcagattttacccagctgaaaggcacggttatcaccattaacggctgcccgctggaacacaagctcttccacttccgccttgaatggagtcgctggagctggatgcgggttgtcaccggcggcgagagcttcaccgctctggccgaaggactacaggaggcgctgggtcagctgggtggtgtaccagcggagcaccgtacagatagtctggccgcagcatggaaaaacctgagcgaggaagaccaccgggatcagacagcgcgctatgccgggttgtgtgaacactacggcatgaccccttcccgcaataacagcggacggggccatgagaatggttcagtggagtcggctcacggacacctcaaggagcgtatacggcaggccctgctgctgcgcggaaataacgacttcggttccctgaatgaatatcgtcagttcgttacacagcaggtgctgcgtcataaccagcgcaatcaggatctggtccgtcaggaactggcacttctgaagccccttcctcagcgacggtgtgctgactacgaagagttgtctgtccgggtcagcagcagtagtaccatcaacgtccggcacgttgtgtacagcgtgccatccagacttatcggacagatgctgaaggttcgtctgtgggatgacagactgagttgttacgttggaagcgatgaagtaatgagctgtcagcggatccgggcaccgaaaggtaaacggcgggcccgcagtatcaacttccgacacgtgatcggtagtcttgtcatgaaacccggggcgttctatcacgccacactgcgtaacgacatcctgccggatgatgaatggcggcagctgtggcagcggatgtgttcacgtcttgcccctcagctggccagtcgcctgatggttaatgccctgaagctggcggcagagcgggaagacatctcagcggtcgcgaaggggctgaaccacctgctgctggagccgggagagccggatctgcagaagctgctcaactggctgggcgtgaaggataaacgcccgctgccggacgggaaactggttcagcacagcctgcagggttatgacaacctgatgcgtaaaggaggcctgcagtga

SEQ ID NO: 219435 - DNA, 765 bp, Klebsiella pneumoniae
gtgaccgatatccatacgcttgaaaggttgctcagaaggttacgtctgacgcgcatagccaccgagtggcacagccaggagaaacgcgcgctggccgaagggtggaccccttcgcgttatctgctgtcactctgcagtgaagaggcgacgcacagggaaagcgaacggctgcggcggtatataaaggatgcgcggttgccagtggggaaaacgctggccgaatatgacttcggccaggtcccggagctgaatgccgcacaggtgcgtcagctgtgtgaaacgacggactgggtggacagcggggagaatgtcctgctgttcggtgccagcggtctgggcaaaagccaccttgccgcagcgatcgcggacggcgtagtgagccagggctatcgggtccggttctacagcgccggcgagttgttgcaggagctgcgtaaagcccggtcgttgctgaggctgaacgagatgcttctgaagctggatcgctaccgggtgatagtgatagacgacctgggctatgtcaaacgggataacgcggaaacgggcgtgctgttcgaacttatcgcgcaccggtacgaaagaggaagtctgatcatcacaagtaaccatccgttcagcacatggggcagtatcttcgtggacgaaacaatggcggtggcagcggcggacaggctgatccaccacgggtacatcttcgaagttacaggagaaagttacagaaagaaaacatcaaaagcagtcacccagcagtcagctaagaaataa

SEQ ID NO: 219436 - DNA, 402 bp, Klebsiella pneumoniae
atgatgactgagttcaaacgcacccaacgtgattatcctctatcctttaaaatagctgttgtagagcaagttgaaaaaggcgagatgacctataaacaggcccagcagcggtatggcattcaggggcgctccaccgttcttgtctggctgcgtaaatatggccggcttgactggagccccgtacttcctgacaaggtgaagaggaaactgcccgtggcccagacgactatcccgcttacacccgagcaaagaatcagggaacttgaagaacagcttgagctggcaaaccagaaagctgatttttttgagtcggttatcaatgttctgaaaaatgattacggggtaagtgtcgtaaaaaagcggcccggcaagtgctcgcgcaaagtccggccccaaaaataa

SEQ ID NO: 219437 - DNA, 522 bp, Klebsiella pneumoniae
atggtaacccacgatttttctggagcaggcatcagtgaccagactcagataagccgtgccgctgcacagcggaaggtaagttatatcagcgacccagacctgttctggttcaagggcggtagcttgttcagggccgggtttcagcagattaggatgccggtaaaatcgatgatggctgttggtggttttgtgatatgcccgtttcactggcaccacgagccggtgttcgctcagcagtctaaacagacggtcccgtccgatattcagccttttgccgacctgagtgttcagcagatagtgcagtttacgtgtaccgattcgtggctgacgacacctgacccgggaaacaaaatcaaggacatgagcatattgttcctgtcgttttgtgcgtcttgtattgtcctgataccacgcctgtctgctgtgccccagaaactggcatgcacgcgtaacggttatttttggggccggactttgcgcgagcacttgccgggccgcttttttacgacacttaccccgtaa

SEQ ID NO: 219438 - DNA, 402 bp, Klebsiella pneumoniae
atgatgactgagttcaaacgcacccaacgtgattatcctctatcctttaaaatagctgttgtagagcaagttgaaaaaggcgagatgacctataaccaggcccagcagcggtatggcattcaggggcgctccaccgttcttgtctggctgcgtaaatatggccggcttgactggagccccgtacttcctgacaaggtgaagaggaaactgcccgtggcccagacgactatcccgcttacacccgagcaaagaatcagggaacttgaagaacagcttgagctggcaaaccagaaagctgagttttttgagtcggttatcaatgttctgaaaaatgattacggggtaagtgtcgtaaaaaagcggcccggcaagtgctcgcgcaaagtccggccccaaaaataa

SEQ ID NO: 219439 - DNA, 522 bp, Klebsiella pneumoniae
atggtaacccacgatttttctggagcaggcatcagtgaccagactcagataagccgtgccgctgcacagcggaaggtaagttatatcagcgacccagacctgttctggttcaagggcggtagcttgttcagggccgggtttcagcagattaggatgccggtaaaatcgatgatggctgttggtggttttgtgatatgcccgtttcactggcaccaggagccggtgttcgctcagcagtctaaacagacggtcccgtccgatattcagccttttgccgacctgagtgttcagcagatagtgcagtttacgtgtaccgattcgtggctgacgacacctgacccgggaaacaaaatcaaggacatgagcatgttgttcctgtcgttttgtgcgtcttgtattgtcctgataccacgcctgtctgctgtgccccagaaactggcatgcacgcgtaacggttatttttggggccggactttgcgcgagcacttgccgggccgcttttttacgacacttaccccgtaa

SEQ ID NO: 219440 - DNA, 237 bp, Klebsiella pneumoniae
atgaccgatggttatgactgctaccagaatgcgctggctgagcgggtaaacggtatcctgaaaaatgaatttttactctcgcgccctgcggacctggcgcaggcccgggaaatggtaaaagaatccgtgtcaatttataaccatgagcggccacacctggccctgaaatacaaaacgcccgatgaagttcatcaggcgttttacagacgaaaagctgtcaacctatatcaggactag

SEQ ID NO: 219441 - DNA, 378 bp, Klebsiella pneumoniae
atgcagaaaaatatgactcccggcaggcgtaaaggctgccctaattattctcctgagtttaaacagcaactcgttgctgcctcctgcgaacccgggatatccatctcaaaactggcgtttgaaaatggcattaatgccaatctgctctttaaatggcgccagcagtggcgcgagggaaagctgctattaccttcctctgagaggcctcagttacttcctgtgactctcgatgccaccgccgtacaaccagaaccgcccgctgaggactcagagctcagcatcagctgtgaggtaacgttccggcacgggacactccgcctcaacggcactgtcagcgaaaagcttctgactctgctgatacaggaactgaagcgatga

SEQ ID NO: 219442 - DNA, 348 bp, Klebsiella pneumoniae; identical to SEQ ID NO: 182324

SEQ ID NO: 219443 - DNA, 1539 bp, Klebsiella pneumoniae; identical to SEQ ID NO: 182325

SEQ ID NO: 219444 - DNA, 684 bp, Klebsiella pneumoniae
atgtttagcattcgccttcccctgatcccccggcggatatcctccaccgatatccgagtgcatccccgggtaaaccacctcagtggcaaagggcgggtatttgccgtttgcccgccgcaccgagtccagcggaaagcagagacgctgctcatgcccggagaccaggtggacacatttttttatcagcccgccataggtttcatcatccggcagctccatcgtgccgtctgcccaggacatatgcccgtcggcaaccggcaccacatgcgccaccccgacggaggccaccgtatccagcagcccgagaaactccacgctgacgggcagctgcatcccgcctgtctgcaggcactgcggcggtttttcaccttccgccgccggcgggggcagcagttcgctcagccagcgcacaaaggtgcgcgccgctgccgcgccgcgggaaaaaccatagacatacagcttgatgcctgtcagtttcggcttgcccggctcaggctgaataatcaggggcttcaaatcagaggccaaatcattcagcaaacgagtgaactcttcatagcggttatggctgccgccaaaccacagccggttccagctggtacccatttttttgagggattcacggctggctccttcggacagctttatgctgttgttttccttgtccttactcaggcgcattag

SEQ ID NO: 219445 - DNA, 1173 bp, Klebsiella pneumoniae
atgaaagaagatatagttgtactatcaacagctgattgggataatccattttggactaataagcagcatgtcacagttgagttagctaagcgcgggcaccgtgttctttatatcgagtcactggggctaagacaaccaagtataaataaaaaagatttgagcagaatttatcgacgtataataaaaggtattaagcctcccagaaaagtcagagataacatctgggtttggtcacctatatctataccgttcaataaattttcttttattcgtgttattaataaaatactactgagttcaacattaaagatttggtcatcttttataggcttcaaaaaacccatgttatggacttataatcctctaacaactcgatttttgaatgttgaaaattttaattattctgtatatcactgcgttgatgaaattaaagctcagccaggtatgcccgtagatattttagaaaatgcagaagaagatttagtccgaagagtaaatattacttttgtcacatcaccaactttacttaaaacacgtaaagtatggagcaataatgtatactacttttctaatgttgcagattatgagcatttcaatatagctaaagatgagtcgctgggaattcctgacgatatgagagatataaaaaaaccagttttaggatttataggtgcaattagtggttataaagttaattttccgttattggctgctattgctgatgctcatccagaatggtctatagttttaattggggacataggtgaaggcgatccatcgacagatgccaaacttcttaatgataaagttaatatacatataataggcgctcgtccatataagcaactaccagcatatttaaaagcgatggatgttgccctcttacctaataatattaatgaatatacagcatctatgttcccaatgaagtttttcgagtatctatctgcaggaaaaaatgttgtaagtgtagacctcgtttctataaaagagttttctgggtgtgtaaagatagctagtagtagtgaagattttatagccgctatagaagagatcctcgcaggagacgtgattgcaccagagaaaattgatcttttagctaaggagtatacatatgcttcacgaacagaaaaaatgtttaaattaattgaatctgataaatctgataaatag

SEQ ID NO: 219446 - DNA, 267 bp, Klebsiella pneumoniae
atgaaatcagatgttcaactcaacctaagagctaaagagtctcagagggcactcatcgatgccgctgcagaaatccttcataaatcgcgaaccgacttcattcttgagatggcctgcaaggctgcggagaacgtgatccttgatcgccgtgttttcaattttaacgacgaacagtatgcagagttcatcgatatgctcgatgcaccagtcgaggatgagcccgccattaataaactactggcaaggaaacctcagtgggatgtataa

SEQ ID NO: 219447 - DNA, 483 bp, Klebsiella pneumoniae
gtgggatgtataacagcgcccgagccgttatccagcgcccatcaactggcagagttcgtcagtggagaaacggtactcgatgaatggctaaaacagagaggtttaaaaaatcaggctcttggcgctgcccgaacgttcgttgtttgcaagacgggtacgaagcaagtagctggtttttactctctggccaccggtagcgttaaccatacggaagcgacaggtagtcttcggcgtaacatgccagatcctataccggtgattatactcgctcgcctggcggtagatatctcattgcacgtaaaaggggttggcgccgatttacttcacgatgcggttctacgctgttatcgcgtagctgagaatattggcgttcgtgcgataatggttcacgcgcttactgaagaagccaaaggcttctatgttcaccatggatttaaggcatcacaaactcatgagcggactctgttccttaaacttccatga

SEQ ID NO: 219448 - DNA, 1539 bp, Klebsiella pneumoniae
atgagcagctcacttcctgacgatatcaatgcactgaaacgtctccttgccgaacaggaggcgctgaaccgtgccctgctggaaaagctgaacgagcgtgaacgcgaaatagaccatctgcaggcacagctggataagctgcgccggatgaacttcggcagccgctccgaaaaagtctcccgtcgtatcgcacagatggaagctgacctgaaggcacttcagaaagaaagtgatacccttaccggtcgggttgacgacccggccgtgcagcgcccgctgcgtcaaacccgcacccgcaaaccgttccccgaatcactcccccgcgatgaaaaacgactactgccggcagcgtcatgctgcccggaatgtggaggctcgctgagctatctgggtgaggatgccgccgaacagctggagctgatgcgcaacgccttccgggttatccggactgtacgtgaaaagcatgcctgtactcagtgcgatgccatcgtgcaggcccccgcgccttcacggcccatcgagcggggtatcgcaggaccggggctgctggcccgcgtgctgatctcaaagtatgcagagcacaccccgctgtaccgccagtctgaaatatacggccgccagggcgtggagctgagtcgttcactgctgtcgggctgggtggatgcatgctgccggctactgtcaccgctggaagaagcgcttcaggactatgtgctgactgacggtaagctccatgctgatgacacgcctgtcccggtgctgttgccaggcaataagaaaacgaagaccgggcggttgtggacctacgttcgtgacgaccgtaacgccgggtcaacgctggcgccggcggtgtggttcgcttacagcccggacagaaaaggcatccatccgcagacccatcttgcggggttcagtggtgtactgcaggcggatgcatacgctgggttcaacgagctgtaccgggatggtcggataacggaagccgcctgttgggctcacgcccgccgtaaaatccacgatgtgcacgttcgcaccccgtcagccctgacggaggaagcgctgaaacggatcggcgaactgtacgccatcgaggcagagataaggggaatgacggcggagcagcgccttgccgaacgtcagttgaaaacgaaaccgcggctgaaatccctggaaagctggctgcgtgaaaagatgaaaaccctgtcgcgacactcagaactggcgaaagcgttcgcatacgccctgaaccagtggccggcgctgacgtactatgcagatgatggctgggctgaggcggacaataacatcgctgaaaatgcgctgcggatggtcagtctgggccgcaaaaactacctgttcttcggttcggatcatggaggagagcggggagcgctgctgtacagcctgatcgggacatgcaaactgaacggagtggagccagaaagctacctccgttatgtccttgacgtcatagccgactggccgataaaccgggtcggcgaactgctcccctggcgcgtagcactgccgactgaataa

SEQ ID NO: 219449 - DNA, 348 bp, Klebsiella pneumoniae
ttgatcccattaccatcagggacaaagatctggctggtcgctggcatcaccgatatgagaaacggcttcaacggcctggcggcaaaggtgcagacgacgctgaaagacgatccgatgtcaggtcacgtttttatcttccgtgggcgtaatggcagtcagataaagctcctctggtctaccggcgatggactgtgtctgctgaccaaacggctggagcgcggccgcttcgcctggccgtcagcccgggatggcaaagtgttcctcacaccggcacagctggcgatgctccttgaaggtatcgactggcggcagcctaaaagactgcttacgtccctgactatgttgtaa

SEQ ID NO: 219450 - DNA, 1068 bp, Klebsiella pneumoniae
atgcgacgtaatgcacaaaaatggatcccgtttggatttgatacggattcaaataaaattgttgatatcgccagcgttgaaaatgggctttcgtgtaactgtatctgcctcatctgtgggacctccctgattgccaaacagggtcaaaataaaaaatggcattttagccacagcacagaagtaaaagggatttgtagtgagctcacactacaacatataaaaaaatacataaaggtgaaaatacaggaaaaaaaataccttgctctccctcatcttctgcagggtaaggagaaagggatagttaacctcaaaaatctcgctggtggtgggattgtttgtggccttaatgctgacctcacagggatatgtaacgatacgactatcgggatatttattaatgatacgtcggaggatatccagccaaatccagacctgttagcgcaaacagaccagctggcgctcgtggagatcgatgccgttcggattgaaagtatcatcgctccatatcgtgagaatggggaaggcataaagatgatggatgcgatagaaaagttacttttcgtttctgaggaagcgaaaaaatggatctaccatcctatgatgaagaaggttaaacaccatactttacaccagtaccggcgtgagctgtctaccagtggaaatcagatccttgctttaattcctcatgaacttccgataagcatgaacgccctcccatcctccccggcacagcagtggcatcaccttcgagccacgattaaccttctttgtcgcctgagccgttctgatatccctcaaggcagtattgcctttgaagaactggtttattatatcccccggcttctggaagcatctgaatctatcaatgttgccgcctacgaacgatggtatgacttctatatacggaaaaaaggagagggtgtactgaatgaggctgaaattgaatttttgtcttttatagtgaaaatcattaactggaacttgtccatacataaccttcccaccttcgatagcaagcaggcctttcgggattggtttttgctaaatgatcctaacaagtcgctatag

SEQ ID NO: 219451 - DNA, 255 bp, Klebsiella pneumoniae
ttgttgaaaagcccaaatgcgcacagtagcctgagagaaacctatctcctgaagttcagaaagtgcagtacgactgaaacccttgaccgagtgtttgagcgtatccaggataaattaaatgatgaaggtggggatataaataagataaccagcctgaacggagcttatgatcaccgcagggctgagatctacatgaaaaaaaactatgacaaaatacctgcttccgtgtggcatctcatccccgatgagatatga

SEQ ID NO: 219452 - DNA, 1437 bp, Klebsiella pneumoniae
ttgaacgtcacctccgccgtacgccaggccgtcgaacggacatcctggtttaaaaaacgtcagcgttatcgtgtgctgtactggcgcgaaatcagccctctcgctgtgccaattctgctggaaaatgcctgtgtgctgttgatgggggtattgagtaccttccttgtcagctggctgggaaaagaggccatggccggggtagggctggccgatagcttcaacatggtgattatgtcgttctttgccgccatcgatctcggcaccacggtggtggtggcctttagcctcggcaagcgcgatcggcgacgggcgagggcggccgcacgccagtcgctggccattatgaccctgttttcgattttgctggcgggggtgatccatgcctttggccaggagattattgattttgtcgccggcgatgccaccgcccaggttaaggacctggcgctgacctatctggagctgacggcgctgagctaccctgcggcggcgattgcgctgatcggtagcggggcgctgcgcggcgccggaaccaccaaaatcccgctgctgatcaacggcgggatgaatatcctcaatatcttaatcagcagcgtgctcatctacggcatcttctcctggccggggctgggctttgtcggcgccgggcttgggctgaccattgcccgctatattggcgcgatagccacgatctgggtgctgatggtggggctcaacccggcgttacgactgtcgctgaaaggctactttaaaccctttaacttcgccattatctgggaggtgatggggatcggcattccggccagtatcgaatcggtactgttcaatggcggtaaactgctgacccagatgtttgtcgccgggatgggcaccaacgttatcgccggcaactttatcgccttttcggtggcttcgctgattaacctgccgggcaacgccctcggatctgcctcgacaattattaccggcaagcggctggggaaagggcagattggccaggctgaatttcaggcctggcacgtattctggctgtcgacgatcattctgacgctaattgcctggggcagcgcccccttcgccggctttattgcctcgttctatacccatgaagaagacgtaaaagaggtggtgaaacagcttttgtggctcaatgcgctgtttatgccgatctggtcgctgtcgtggaccttaccttgcgcctttaaaggcgcgcgcgacgtacgctataccatgtgggtgtcgatgcttggcatgtggggctgccgggtggtggcgggctatacgctcggtatcgtgctggggatgggggtgatcggcgtctggttggggatggtgctcgactgggcagtgcgcggcgtgttgttttacttccgcatggtgagcgggcgctggctgtggaagtacccgcgcgtgaaggcttcgccagaaaaaaactga

SEQ ID NO: 219453 - DNA, 1518 bp, Klebsiella pneumoniae
atgaaattcatggagatcaatgttgggttaataataataataccatggggtgttgcatggtcagaagacgcatttaatttcaatagtgcgcatttgcataacgcgacacatatcgatctccagaaatttaagtatggtaatccgatgaatgtcgggaagtatcgcagtaagctttacttaaatggttcgtatgcgagcgaagttgaattcgagctacagaaggtgggagaaaaaattgagccctgcataacaccagtattatttagagtgatgaggcttaaagataaaacgtggccagaaaaggcttcatgtctccagttatcgcagatcaatgctggcatttcatggcattatgacgtcggggagaatgcgttaaatttaaccatcccgcaggcgttacaaaaaccgaagtatcgaggcgagattaatcctgagagtatcgatgttggtgttccagcagcagtattacgttatcaggcgaatagttatcaaagcatcaatcatggcgatagtcataattacagttatgtcgggcttgatggtagttttcgcgcttacggctggcgcttttaccaccagtctagttatcaggcaaatgataacgatactcagtgggataatatttcgacatacgccgagaaaagccttttcgatttgagctcaacccttaggctcgggcagggatggacagatggcaccttcttcgacagcgtcagcttcgtgggcgccagggttgcgactgacaaacggatgctgccagggtcacgacgtggttttgcacccacggtaacgggaatcgccaggacaaacgcgcgcgtcaccgtcactcaaaatggttccttactctatgaggccagcgttccgccaggtaaattctcctttgcggacctttatccaacgaattcaggtggcgacctgatcgtgacgattcatgaggccgatggcagccaggacacgtttactgtgccttatgcttccatacctggcctggttcgtgaggaggcgctgtattacgatttgtcgatgggatatctggatgacagctatatctcaaaccggccgggattcggagaattaactctgcagtatggttttaatgactatattagcggctatatgggggtaaatggaaccgatgggtattactccactcttgtcggtagtgcattaaatacttactggggagcactggctgtcgatgtttcgcgttcctcctggaaaactgttgaaaatgactggctggatgggtatcgctggcgcgtttcggcaacaaaatcattgaccagtgatacccgagttaccttatcaatgagtcacagtaacgatgcaaggtatatttcaattcgtgatgcggcatcggctaatgaccatgacaactatacttaccgcgaaatgacaaagtatacagccaatctatcgcaacaattcggcggcggtagcttgtcattttatggcatatggagtgaaaactggaagcatggtacctatcactcctatcagctaaatagctgcgcctaa

SEQ ID NO: 219454 - DNA, 180 bp, Klebsiella pneumoniae; identical to SEQ ID NO: 148834

SEQ ID NO: 219455 - DNA, 1341 bp, Klebsiella pneumoniae
atgatcaaagagactgttacgatgagtcataaggaactccaccgacttcagattattcaggagtcaattaatcgacatattactcaggaacaagctgcggcacgcattggcatttctattcggcaggttaaacgtctggtgcaacggtatagaaatgaagggccttctggtctggtttcccaccgacgtggaaagcgtcctaataattccttttctactgaattcagagcaacagtaatttcactcctcaaaggccgttacgctgattttggacctacgtttgcgtgcgaaaaattgcgcgagatacacggtttatctttatccgttgaaactctcagaaagtggatgatagaagaggggttatggcgtgaacgccgtcgtaaaattgcccgtatatatcaacgccgcatgcgacgaccatcttacggtgaactgatccagattgatggctcacctcatgactggtttgaaaatcgaggccccagatgtacactgatcgttttcattgatgatgccaccagtgcgttgatggcgttgcgttttgtgcctgctgaaacaacccgggcttacatggaaaccctccggggttaccttaatgatcatggcgtaccgctcgctctctactctgacagacacagtatattcagggtaaataacccagagcgggaaggtgagctgacccagttcactcgtgcgataaagacactgggcatcgagccaatccatgccaacagcccgcaggcaaaagggcgggtagagcgcgccaatcagacactacaggacaggctggtcaaagaaatgcggcttcagaatatcagtgatattgaaacagcaaatgcatggttgccgacctttattgaagcctataacaaccggttcgctacgtcgcctcgtactactgataatgctcatcttgatgtgcaccattctgaagaggaactgggttatatcttcagcctacaggcgaagcgcgttctgtctaaaaatctcactttccagtacaaaagcagtgcgtttcaggtacgcagtgagggccggggatatcgacttaggcattcggttgttactgtatgcgagaactttgacggtgaaattaacgttctgtatgacgggaaagcgctgggctgggaaaagtatgttgatggcccggagcctataccactggatgatgaaaagagtgtccatgaacgagtggataatgcccgtattgatttacgctcaaaatactatgttaaacctaaagctgaccatccctggcttacgcgccgaacgcaaagtcatcagcaagttaagcccccgaagttacctaaaaagaagcctgatcccgataaaaaagattga

SEQ ID NO: 219456 - DNA, 1239 bp, Klebsiella pneumoniae; identical to SEQ ID NO: 95921

SEQ ID NO: 219457 - DNA, 1329 bp, Klebsiella pneumoniae
atgcacattggacaggctcttgatctggtatcccgttacgattctctgcgtaacccactgacttctctgggcgactatctggacccggaactcatttcccgctgtctggccgaagccggtaccgtcaccctgcgcaagcgtcgcctgccgctggaaatgatggtctggtgcattgtcggcatggcgcttgaacgtaaagaaccccttcatcagatcgtcaaccgtctggacatcatgctgccgggcagtcgtcccttcgtcgcccccagcgcggtgatccaggcccgtcagcgtctgggaagcgaagccgtccgccgcgtattctcgcagacagcacagctctggcataacgccacgccgcatccacactggtgcggcctgaccctgctggccattgatggtgtgttctggcgcacaccggacacaccagagaacgatatcgccttcccccgccagacgcatggcggaaacccggcactctacccacaggttaaaatggtctgccagatggagctgaccagccatctgctgacggcagcagccttcggcacgatgaaagacagcgaaaatgcgctcgcggagaaacttatagagcaaaccggcgataacaccctgacgctaatggataaaggctattactcactgggtctgctgaacgcatggaaccaggcgggagaacaccggcactggctgatccctctgaaaaaaggcgcgcagtacgaagaggtcagaaaactgggtaaaggcgaccacctggtgaagctgaaaaccagcccgcaggcacgaaaaaagtggccgggtctgggaaatgagatgacagcccgcctgctgaccatcacgcgcaaaggaaaagtctgccatctgctgacgtcgatgacggacgccatgcgctatcccggcggggaaatggcggatctgtatagctatcgctgggaaattgagctgggttaccgggagataaagcagacgatgcaactgagcaggttgacactgagaagtaaaaagccggagcttgtggagcaggagttgtggggcgtgttgctggcttataatctggtgagatatcagatgattaaaatggcagggcaactgaaaggatactggccaaatcagctgagcttctcagagtcctgcgggatggtgatgcggatgctaatgacgttgcagggcgcttcaccgggtcgtatcccggagttgatgcgtgatcttgaaagtatggggcagttagtcaagttaccgataaggagggaaagggtcttcccaagggtggtgaaagagaggcctcagaaatacaccaccgccctgagaaagggccagtcagttgcttaa

SEQ ID NO: 219458 - DNA, 1026 bp, Klebsiella pneumoniae
atgaaagtatcaactcttggtatcgacctggcaaagaacgtttttcagcttcatggtgtcgatcacgaaggccatactattttgcgtaagaagctgactcgggctaagttcgttcagtttgttattcaactggacccttgcctgattggcatggaagcctgttcatccagccatcattttgcacggttattcagtcgccacggccatgaggtaaaactcattcctccgcaatatgtgaagccctatgtcaaaacgaacaagacggatgcagcagacgctgaagcaatttgcgaagcggtaacccgcccgaatatgcgttttgtacagataaaaaccgaagagcagcaggccgttctagcgttacacactgaacggggaatacttatccgtgagcggatcgcctgttccaatagtttaagagccacacttgctgagtttggaattacgattgcggccggacaaagccatttaacctgtgagctgccagccattctggaggacggcgaaaatggtttatctcccttcgtcagaaccagcatctacagacagtctaaacatatccgggaacttgaggagcaagttaaacaggtagaagaagctctggactcttggtacagaacgcaggaagcctgccagagaatggccaaaatcccgggggttggcatgctaacggccacttatgtggtagcagctgtgggtaatgcccgacaattcagtaccgcaaagcagttcgcttcatggctggggctgacaccaaaggaacattccagcggagggaaacagcaactgggagggatcagcaaacgtggcgatggatatttccgatacctgctggttcacggcgcacgtgcacttaccgcctgggtcaaccggaatggcgcggttgaggagaattcctggcttcagggactacttgagcggaagcactacaatgtagctgttgtcgccatggcggcaaaaacagcaaggatcatgtggtcaatgttgacacacaatactgaatatcaacctcgccagcctgcctga

SEQ ID NO: 219459 - DNA, 519 bp, Klebsiella pneumoniae
atgcttcagtccggggtgcacgccaccatcgcgggtatcctgctggcgctctttatcccgctgcgggtaaccgatccggataaacaatcccctcttgcccggctggagcacggcatcaatccgtgggtgacgtttctgatactgccgctgtttggcttcgcaaatgcgggggtcgcgctctccggtatgacggctgatgacctgatgtcgccggtaccggtcggcgttgcgctgggcctgtttgttggcaagcaggcgggcattttcggcctgtcgctgctggccgtcagcctgggcctggcaaaacggcctgaaaaaagtacctggctgcaggtttacggcgtatcggtcctgtgcggaatagggtttaccatgagcctgtttatcggcaacctggcgtttgcagaaagccccctgttggtggacgaggtcaaggtgggggtacttgccggctctgtactggcagcactggcgggtatgctgatactgcgcttttctccttcgcatccttcccggtaa

SEQ ID NO: 219460 - DNA, 1011 bp, Klebsiella pneumoniae
atgaatattaaacgtattggcctcgatctcgcaaaacaggtttttcagcttcatgcggttgatcaccaggaacgtgttgtgcttcgcaaaaccctgcatcgcgcccggatgctcacctttttcacccggctcgaaccctgtcttattggtatcgaagcatgcggctcctcgcattactgggcacgcgagctgacccgactcggtcacacggttcgcattattccgcctcagttcgttaagccttatctgaagggcaataaaaatgatgccaatgatgccgaagcgatctgcgaggccgtcagccggccggggatgcgctatgttgccattaagtctgaagcacaacagagcatgcaggctgaacaccgggttcgtgcccgcctgatccacgacagaacggcgctcagcaacgaaatacgcgggatgctgggtgaatttggctttgtacttcccgctgggttgtccgctctccgtaaagcactgccggaaatactttctcagcaggaaaaatgggataaccgctttatccgtctgctgagtgagttaacagaagaacttcaggcacttgatgagcgactgaatcgttatgaccgccggcttaaacagctggcgcaggaagatgagcgtatcagacgacttcaggagatcggcgggattggtccggtaaccgccagcgccctggtcgccgcagtgggtgatgcaaaacagtttaagagcgggcgggagatggcagcctggctggggctggtgccccggcaacattcgagcggcggaaaaacaaaaatgggtcacatcagcaaaaggggcgacagctacctgcgaacgctgctgatccacggtgcccgtgcggtgctgaatgtgtgtgatcacaaggaggaccggcgaagccggtggcttcagtcggtggcagaaagacgtaacaggaatatcgcaacggtcgccatggcgaacaaaaatgcacgtatagcctggtcggtactgagccggggggaagagtatcgtgtgatgtga

SEQ ID NO: 219461 - DNA, 1200 bp, Klebsiella pneumoniae
gtgatcaccaacccgcagaccaccgccgcctcgccggatatggccattccgttcggcctcaagttcagcggctatgcccgctatggcgcccacttccagaccggcgaccagaaatatgtcggcgtcgacggctcctataacggcgcctcggcgatcggccgtctgggcaacgaaagcaacggcggcgaattccagatcagcaaggccttcaaaagcgcgcagggggctatctgggatctcaacgtgatgttcgaccactggagcgatgaagttaacctgaagaaggcctacgtcggcgtcaccaacgtgctggaatccaaccccaacgcctatctgtgggccggtcgcgacttcctccagcgtccgcaacaggggatcaacgactacttctggatgaaccacgacggccagggcgccggggtgaagaactttgatatcggcggcgtgcagtttgacgtggcggcggtgtcgcaggtgaaatcctgtagcccggaagtgatggccgacgagactaacccgtcgcgcatcacctgtaccggcagctccgacaccggcgacaacggccactacgcgctgaccaccaaaacccacaacatcaaagccgggccgatcgacgtcgaggtgtacgccaactacggctttgactcgaaggcggtggacagcgacgcccgcctcgaagcctggcagggcgggctggtgctgagccacaccaacgacagcggagtgaacaaggtgatcctgcgctactccgacaactcggataacagcgtctacaacaaaaccgacgacctgaccacggtctacgccagcttcgagggcagccataagttcacccagcaggcgcagatcgaatacctgctggccttccatgactacgacaacggcaaggacaacaccgacaaccgtaaaaactacggcgccatcgtccggccgatgtacttctggaacgacgtgcactccacctggctggaagcgggctaccagcgcgtggattacgaccagggcggggataaccacggctggaagctgacgctgtcgcagaacatcgccatcggcatggggccggagttccgtccgatgctgcgcttctacgtgaccggtggtcaggtggataacgagcataccgcgaaggtcaacaacaccaaagaccagcagctggattcgctgaacgtcggcgggatgtttgaggcgtggttctga

SEQ ID NO: 219462 - DNA, 219 bp, Klebsiella pneumoniae; identical to SEQ ID NO: 152582

SEQ ID NO: 219463 - DNA, 411 bp, Klebsiella pneumoniae; identical to SEQ ID NO: 152583

SEQ ID NO: 219464 - DNA, 348 bp, Klebsiella pneumoniae; identical to SEQ ID NO: 16878

SEQ ID NO: 219465 - DNA, 348 bp, Klebsiella pneumoniae; identical to SEQ ID NO: 127406

SEQ ID NO: 219466 - DNA, 348 bp, Klebsiella pneumoniae; identical to SEQ ID NO: 16878

SEQ ID NO: 219467 - DNA, 1221 bp, Klebsiella pneumoniae; identical to SEQ ID NO: 185278

SEQ ID NO: 219468 - DNA, 1203 bp, Klebsiella pneumoniae
atgtcccaacccttcgatttcgacaaagcacttaaagcactccagtccggtcaggcactaaccggcaaggacggtgttttaacaccgttaatcaaacagttaaccgaagcagccctggctgctgaacttgactcccatctggctcaggacgtcgaagctaaccgtaaaaacggttccagtaaaaagaccatcaaagctccgaccggcagcttcgaattgtcgactccgcgcgatcgcaatggcacttttgagcctcagttagtcaaaaagcatcagaccacgctgtccgacgagattgagcgtaagatcattcgcctttttgcgctgggaatgagctaccaggatatcagtcgggaaattgaagatttatatgctttcagcgtgtccacagccactatcagcgccgttacggataaagttgtccctgaattaaaacagtggcagcagcgcccgctggagaaggtttatcccttcgtctggctggatgccattcactataaaatccgcgaggatggccgttatcagagcaaagcggtttataccgtgctggcgctgaatctggaaggcaaaaaagatgttctgggcctgtatctgtcggaaagcgagggcgctaacttctggctgtcggtattaagcgacctgcaaaaccgcggtgtggaagatattctgattgcctgtgtggacgggctgaccgggttcccggacgcgataaacagcatttatccgcagacagaggttcagttatgtatcattcatcagatacgtaattcgattaaatatgttgcgtcaaaacaccataaagcgttcatggctgacctgaagccggtttaccgtgccgtgtcgaaagaggcggcggaaacagcgctggatgagctggaggcaaaatggggtcagcagtatccggtagtgctccagtcgtggcgacgcaagtgggaaaatttgtcagcatacttccgctatccaactgatatccgtaaggtcatttacaccacgaatgcgattgaatcggtgcatcgtcagttcaggaaactgaccaaaaccaaaggcgctttcccgaatgaaaacagcctgttgaagctgctttatctggggctgatgaatgcacaggagaaatggacaatgcccatccagagctggaatttgacattgtcgcagttagccatttattttgaaggacggctgaataaagtgatgacgctgtag

SEQ ID NO: 219469 - DNA, 1221 bp, Klebsiella pneumoniae; identical to SEQ ID NO: 218052

SEQ ID NO: 219470 - DNA, 222 bp, Klebsiella pneumoniae
atgaaaaagtatttaatcgtggcgctgctggcctctctgctggcaggctgtgcccatgactctccctgcgtaccggtttatgactcgcaaggccgcttagtccacactaatacctgtatgaaaggcacaacagaagacaactgggacaccgcaggcgcgatcgccgggggtgccgccgcggtagccggtctcacattagggatcgtcgcactgacccgttag

SEQ ID NO: 219471 - DNA, 348 bp, Klebsiella pneumoniae; identical to SEQ ID NO: 16878

SEQ ID NO: 219472 - DNA, 780 bp, Klebsiella pneumoniae
atgaaaagtaaatactttattatagtattgatatctacactcttattaagcgcctgtgcatggacttcgcgaggtaaaatcaaccgtaacctggagagcgcttcctatctggcaaataagaattcatattcttcttcctattgtgacagccttgattacctgaagggagccctggcaatcgcacaggctaaggggagtaccggtctgcaagccaaagtattgcaggcctatgtcgataattataataaaattataattaatcttaaatatattcatgcacaatctagtattaatgatatttggcaaaaaggcgaaagctatgcctgctggatgccggagatgcgccgcgtcatgcccttaatgacggcagaaatgaaagcgcagattcatcctgaatcttacccatccacggcttacgagcaaaaaggaagggacctggcgggagaggctttttatcaactggcgcaaaaagaaaaaaataaaacagtgaagctccatgatctgcttgcaacttatcgttacagcccggggcgtaaaggtcttaatcacgatctgcaaacggcttatgacaatgctaccaatcatattattttaaaaaatgccggggaccgggctatcgcgggtaaagatgtattgagggaaggcgttattcccggacttcgtcactattacgcggaaaaatcactcgatgaacgcaaaaaagaagctagcgacaggaataaagtgcttccttaccctctggaagtcagctgtatgtgtcactatggctttgttgaataa

SEQ ID NO: 219473 - DNA, 354 bp, Klebsiella pneumoniae
atgaaaactcaaaacactccagctgatcacagcgacattctttttacccatatcgtgaatacgctggtggaccttgctaaacatgaaggtactttaatgacgtttgaaggccttctgcggaacggtatcggggtagatgaagagatgatggatagcatgctgggggtgagtcaggacatagctgctcagtgcgtggttcagctaagggattgtggcgccataacgagccctgcggtatatgagatggttacacacgttgaacaactggcgatgcgtttagccccagactggtggaagaaaatcgtgccatgctcggttcagccgctgcggtactaccaggaagaggctaaataa

SEQ ID NO: 219474 - DNA, 981 bp, Klebsiella pneumoniae
atgagccatcaactcaccttcgccgatagtgaattcagcactaagcgccgtcagacccgaaaagagattttcctctcccgcatggagcagattctgccatggcagaatatgaccgctgtcatcgagccgttttatcccaaggcgggcaatggccgacggccctatccgctggagaccatgctgcgtattcactgcatgcagcattggtacaacctgagcgacggtgccatggaagatgccctgtacgaaatcgcctccatgcgcctgtttgcccgattatccctggatagcgccctgccggatcgcaccaccatcatgaatttccgccacctgctcgagcagcatcaactggcccgtcaattgttcaagaccatcaatcgctggctggccgaagcaggcgtcatgatgacccaaggcactttggtggatgccaccatcattgaggcacccagctctaccaagaacaaagagcagcaacgcgatccggagatgcatcagaccaagaaaggcaatcagtggcactttggcatgaaggcccacattggtgtcgatgccaagagtggcctgacccacagcctagtcaccaccgcggccaacgagcatgacctcaatcagctgggtaatctgcttcatggagaggagcaatttgtctcagccgatgccggctaccaaggagcgccacagcgcgaggagctggccgaggtggatgtggactggctgatcgccgagcgtcccggcagggtaaaaaccttgaagcagcatccgcgcaagaacaaaacggccatcaacatcgaatacatgaaagccagcatccgtgccagggtggagcacccgtttcgcatcatcaagcggcagttcggcttcgtgaaagccagatacagggggctgctgaaaaacgataaccaactggcgatgttattcaccctggccaacctgtttcgggtggaccaaatgatacgtcagtgggagagatctcagtaa

SEQ ID NO: 219475 - DNA, 987 bp, Klebsiella pneumoniae
atggaaaacaaactccactttatcggcattgatgttgccaaaactaaactcgacgtcgatatgctgcgccctgatggccgtcaccgcagcaagaaatttgccaacaccccaaaaggccataacgagctcgtcagctggttgtgcggtcatcaggtcagcaatgcccacgtctgcatggaagcgaccgggacgtatatggaagatgtcgccgctcatctctctgacgcggggtatcgggtctccgttatcaatccgttgctcagcaaagcgttcgtccagagccagggaatacgcagcaaaaccgatacggtggatgcccgccagctggcgtatttttgccgggagaaacgcccggtgatatgggaagccccccatccggttgagcgggccctgcgggcgctggtgctgcggcatcaggcactgacggaaatgcatgttcaggagcagaaccggcgggaaagtgcccgtgaagttcagttgccgagtatcgacatgcacctgctgtggctggagacggaactgaagcgtatcgaaaagcagataaaagacctgacggatgatgatccggatatgaagcaccgtcgcaaactgctggacagtatcccggggatcggagcgaaaacatcggcggtgttgctggcttacgtggggctgaaaaacagattcctggaagcgaggcagttcgcggcgttcgcgggtctgacaccaaagcagcatgaatcaggcagcagcatccggcgggtgagtcggatgagtaaaatgggtcatatgtcgctgcgccgtgcgctgtacatgccggcaatggtgacgctgtacaagacagaatggggtcggatattcagggaacgactggagaagagcggaaaaaatgcaaagctgatcatcggtgcaatgatgcggaagctggcacaggtggcgtacggggtcctgaaatcgggacgcccgttcgatgccacgcagcatacggaaaatgcttgcatggcataa

SEQ ID NO: 219476 - DNA, 1032 bp, Klebsiella pneumoniae; identical to SEQ ID NO: 189860

SEQ ID NO: 219477 - DNA, 1032 bp, Klebsiella pneumoniae
atgccgatcatagcaccaataccccgtggcgaacgacgcctgatgcagaaagctattcataaaacgcgcgataaaaatcatgcccgcagactcacggccatgctgatgcttcatcggggtgaacgggtcagcgatgttgccagaactctctgttgtgcccgttcatccgttggtcgctggattaactggtttacgcactcaggtattgaaggcctgaaatccttacccgcagggcgctcccgacgctggccttttgaacatatctgcaccctgttacgtgagctgataaagcattctcccggcgattttggttatcaacgttcacgctggagcaccgaattactggcaataaaaatcaatgagataaccggttgccagttacatgcaggaaccgttcgccgctggttgccatctgcggggcttgtatggcgcagggccgcgccaactctgcgtatccgtgacccacataaagatgaaaagatggcggtaatccacaaagcgctggatgaatgcagcgcagagcatccggtattttatgaagatgaagtggatatccaccttaatcctaaaatcggtgcggactggcagttgcgcggacagcagaaacgggtagtgacgccggggcagaacgaaaaatactatctggccggcgcactgcacagtggcacgggtaaagtcagctacgtgggcggcaacagcaaaagttcagcgctgtttatcgctctgctgaagcacctgaaagccacttaccggcgggcgaaaacaatcacgctgatcgttgataactacattatccataaaagccgcgaaacacagcgctggttgaaagcaaatcccaagttcagggtaatttaccagccggtttactcgccgtgggtgaatcatgtggaacggctatggcaggcacttcatgacacgataacccgtaatcatcagtgccgctcaatgtggcagttactgaaaaaggtccgccattttatggaaaccgccagcccattccccggaggaaaacatggtcaggcaaaagtgtag

SEQ ID NO: 219478 - DNA, 957 bp, Klebsiella pneumoniae
atggcctggatcaccgcctggcgcatcgaccgctatgccagaggctcgatgctgaaaacgcccttctatcagcgcgccacgaataccgaagcgctgcctgccgcgcggaaggcggcagaagaggttcgtgatgaaaaacaggcggcggtgctcagggctcgccagaaccagctagcaaaccagcctcctgacaggatggatgaactggttctgcagccgggcgtgaaggattttgacccaaagatggatcaaacccagctgttcgacgcggcgaaggagttcggaaaggattaccacgacggttaccgtatcccggagaacctggcgcagctggtgctggataccgtgctgcagccagtgattttcgtcctcaataccgatgatgaagcgcaggaataccggcgcatgaagcgtgacggagaggcccgggtggccgtcctctttcccgatgccggcgaggccagcaacgcggagcagcctgccgggctggtgagggcgctgtttgatgaccaggtgcatgactcacgcgcctggtttatgtatgccgcgcttggcacgcgcgagatgtggaccggttacttccgctaccggatgatttacttcagcgagcgctgcagtaaaccgctctcgccgctggtgctcgccggagacctggtgggttttgcgaccgtgaccgcgggtgtcgtgctcagtttccggcaaaagcgcctgaccggcaagctggccgggctggccgcgacaggcgccgtgcgctcgctggaggtggcggtgctggacaagataaccggggaagcgctgccggagctgcccggaggggagcagctgcgggcatttacccacgagccgggaaccgttgtcgcacagcaaaaggcgcggaaagcggaacagcagctggcgcgggggcaagccgcgctgccggccagctggctggaggacgttctgacgacaacggtctga

SEQ ID NO: 219479 - DNA, 666 bp, Klebsiella pneumoniae; identical to SEQ ID NO: 217982

SEQ ID NO: 219480 - DNA, 432 bp, Klebsiella pneumoniae
gtgattgtcggccagtttgatgatatcagtgcggtgcacggtaatccgtctgtcggcgtgtcacaggtcactcgcgcagctgcaggcgcgctgcgtgcggcagacagcgaaaccagcgccctcatcgctgacactgtcatccgcaaccgcaatgatcgtcagtatctgcagcgtgtgatcaacgatgccggtaaaattgacgaggttcggaacaaaataacagaggcaatcacttccctgggagcgcgtgtcaccagtgagctgacggccttcaggaacgttaaccgggtattcctggtcgggggaggggcttccctcatagaagaagctatccgtcaggcctggcctctggctcctgaccgtatcgaggttataggcgatccgcagatggcgctggccagggagattgccctttacaataaagaggactaa

SEQ ID NO: 219481 - DNA, 555 bp, Klebsiella pneumoniae
atgaacgatattaatatcagcctcgacgaacttaaaactattgatttatcccccttaatccagagtaagctgccagttacctgctttgatatcacaaagtatctttcgagcctaggggatggaagagcggagataagactgctaacccatatttgcggttttcactttcgtcccgaaaatccacaggtaccatttggtccgagctttcaaagtagccaaggtagatcagcaattccggatgacattaacggattgtcgctggaggtactttctcaattttgcccgacgatagagctacccgaacttcaagctcgtattgctgatacactttgggttcgtaaaattggtggaatccgttttcctctgctggcggtccgtgcttattatgcgtccagcatggcgattatgacatcgcaagggtcgtgggttagtgctttagaacgcctagagcgtgcgcttaggctgtgttgttttttccgaaagaatactgatttcagggatgaatttgatcagctttcggcacatctactagggaaggtgcgaacaagttcctga

SEQ ID NO: 219482 - DNA, 135 bp, Klebsiella pneumoniae
atgagtcatcaacttaccttcgccgacagtgaattcagcagtaagcgccgtcagaccagaaaagagattttcttgtcccgcatggagcagattctgccatggcaaaacatggtggaagtcatcgagccgttttag

SEQ ID NO: 219483 - DNA, 609 bp, Klebsiella pneumoniae
atgcggggcctgctgggtgagtttggtctggtactgccggtgggaataaggcagctacgtaaggcattgccggagatactgtcgcaacaggagctgtgggatgaccgctttatccgcctgctgagcgaactggcggaagagctgcagatgctggatgagcgggtcgcccgccatgacaggcggcttgagcagtcagtacgggatgatatccggataaaaaggctgctggcgatagagggtatggggccggtggtggccagtgcgctggtggcggcggtcggcgatggcagacagttcaaaagtggtcgggagatggcggcgtatctgggtctggtcccgcggcagcactccagtggcgggaaagcgcggctgggggctatcagcaaacggggagacagttacctgcggacgctgataatccacggtgcgcgtgcggtgctgaacgcgtgtcagaataaaaccgacagacgcagccagtggctgaaggcgttatcggaaaggcgaaaccggaatatcgcgacggtggcgctggcgaacaagaatgcgcgaatagcatgggcgatactgagccgcgaagaagattaccatgggttacaggccgccggttaa

SEQ ID NO: 219484 - DNA, 705 bp, Klebsiella pneumoniae; identical to SEQ ID NO: 8686

SEQ ID NO: 219485 - DNA, 246 bp, Klebsiella pneumoniae
atggcggacggtagtctgtacaatggcgatctgctggttgtggacagtgctgaaaagccgcggcacggcgatatcgttgtcgccagcgtacagggggaatttacggtgaaacggcttctgctgacgccgcgactgacgctgcagcccatgaatgcctcctggtcgccgatttatcctgatcccgacgagctggatatctttggcgttgtcacgcatatcatccaccgcccgagggagatgtactga

SEQ ID NO: 219486 - DNA, 456 bp, Klebsiella pneumoniae
atgccacggcgacagatactgagcagcgaagagcaggaacgcttactggttataccagatgatgaaattattctgacccgaatgtgttttctgaacgaactggatattgcgctcattaataagcaccgaaggccagcgaatcgcctgggctttgctgtattactctgttatctgcgtggacctggatttattccggacaaaagcagtgctcctcacaatggcgttgtatccagggttgcttcccgactgaaacttcagcctgatttatggccggaatatgcatccagagagcaaacccgctgggaacatctgaccgaactttatcgctacctggaactatccccgttcagccggtcaatgcaaaaagactgtatccgtcatctgcacccctatgccatgcgaactgacaaaggatttatgctggcggaagaaatgctggcactgttgcaaagttag

SEQ ID NO: 219487 - DNA, 498 bp, Klebsiella pneumoniae; identical to SEQ ID NO: 119724

SEQ ID NO: 219488 - DNA, 186 bp, Klebsiella pneumoniae; identical to SEQ ID NO: 194148

SEQ ID NO: 219489 - DNA, 147 bp, Klebsiella pneumoniae
atgctgtacatcatgagtctgcagtggcttctgctatccgattgcgaacaacggggttgtattcaccagctgcacataatgagtctgctgtggcttctggtatccgactgcgaacaacggggttgtttcaccggctgcaaattatga

SEQ ID NO: 219490 - DNA, 348 bp, Klebsiella pneumoniae
ttgatcccattaccatcaggcaccaaaatctggctggttgccggtattaccgatatgagaaacggcttcaacggcctggcggcaaaggtgcagacgacgctgaaagacgatccgatgtcaggtcacgtttttatcttccgtgggcgtaatggcagtcaggtaaagctcctctggtctaccggcgatggactgtgtctgctgaccaaacggctggagcgcggccgcttcgcctggccgtcagcccgggatggcaaagtgttcctcacaccggcacagctggcgatgctccttgaaggtatcgactggcggcagcctaaaagactgcttacgtcactgactatgttgtag

SEQ ID NO: 219491 - DNA, 255 bp, Klebsiella pneumoniae
atggagagtctgatcacgaacggcctgccagtggggacaactctggctttttgcatgagcactgtggctgccagctttcctgagttcattctgctcaaacaggtgatgaagtggcaattactgtgcaccctgctgttgctgttgttgacctctttcacactggttggctggatttttaacgttgtattcccgttaattccctgtaagcgtcgtctcagcaccgtctggcagatcctgatattcctgagaggatag

SEQ ID NO: 219492 - DNA, 294 bp, Klebsiella pneumoniae
atgagaaacggcttcaacggcctggcggcaaaggtgcagacgacgctgaaagacgatccgatgtcaggtcacgtttttatcttccgtgggcgtaatggcagtcaggtaaagctcctctggtctaccggcgatggactgtgtctgctgaccaaacggctggagcgcggccgcttcgcctggccgtcagcccgggatggcaaagtgttcctcacaccggcacagctggcgatgctccttgaaggtatcgactggcggcagcctaaaagactgcttacgtcactgactatgttgtag

SEQ ID NO: 219493 - DNA, 306 bp, Klebsiella pneumoniae
gtggtcaaagtcagcgacggcggcgatatcagccagctgacggcggccaccccgtcttccgcaccggttcaggtagcagctccggccggcaccggcaccccggtgaccgccccgctggcgggcaccatctggaaagttatcgtcagtgaaggccagacggtggccgcaggcgacgtgctgctgattctggaaaccatgaagatggaaaccgaaatccgcgccgcgcaggccggtaccgtccgcggtatcgcggtgaagtccggcgacgcggtggcggtcggcgacaccctgctgaccctggcgtaa

SEQ ID NO: 219494 - DNA, 303 bp, Klebsiella pneumoniae
gtggtcaaagtcagcgacggcggcgatatcagccagctgacggcggccgttcctgcctccgcaccagctgctccggccccggccggcgccggcaccccggtgaccgccccgctggcgggcaccatctggaaagtcatcgtcagtgaaggccagacggtggccgcaggcgacgtgctgctgattctggaagccatgaagatggaaaccgaaatccgcgccgcgcaggccggcaccgtacgcggtatcgcggtgaaagccggcgacgcggtggcggtcggcgacaccctgctgaccctggcgtaa

SEQ ID NO: 219495 - DNA, 783 bp, Klebsiella pneumoniae
atgccatcaataatcattaaaaccgccgacgaactcgcccggcagcgccatgccggccagctgctggcgtcagtgtttgatatgctggatacttttatcgttcccggcgtaacgacgatggcgattaacgatcgagtggaagattttatcgtcaaccagctgcacgcccgcccggccagcaaggggcaatacgattttccctatgtgttgaacacttccattaacgatgtggtgtgccacgggatccccaaagcgaccgaacatctgcgctccgggatgattgttaacgtcgatatcaccctcgagaaagcgggcatgattgccgactccagtaagatgtacctgataggcgatgtctccccgctggcccgccggctggtaaagactacctatgaagcgatgtggaaaggcattgaggtggtgaagcctggcgcgacgctgggcgatattggccacgctattcagcgctgggtggaggaacatggctatagcgtggtcagagaatattgcggtcacggcgtcggtcaggaaatgcatgaggaaccgcaggtgctgcattatggccgccccggagaaggcgccgtgctgcaggaaggcatggtgttcaccattgagccgatggtcaaccagggcgacagccgtatcaaaaccaaaaaagatggctggacggtggttacccgcgataaaaaactctccgcgcaatgggagcacaccgtggccgtcaccgccaacggttttgaggtgctgacgttacgcgacgatgaacagtcgcggatccgctga

SEQ ID NO: 219496 - DNA, 1557 bp, Klebsiella pneumoniae
atgaacagcacctccgccgacttccagaatctgtaccaggccctgagccacagcgccgcccgcagcccggataccctggccctggcgtttgaggatcggcgctatctgtaccgcgattttcatctgcgggtacagcgggcgatggcgcagcttgatcgcggctggtcgctgcgcaaaggcgaccgtattctgctggcctggggcaatcaccccgctttttgcgaagtcctttttgccgcgctgggtttgggcatcgaagtggtgcctttcagcaccaagcttaagcaggccgaaagcgaggcgctggtaggccatatcgctccccgggttgtcctgttcgatgcgaccgtacaggactggctgaaaaacacccctgacgcgcgtgcggtttcactcagcgaatggcaggcgctctgccttcccgaaccgctgacccgcccgccggtcccggttaaccgcgacgatacggcggtgatgatgttcacctccggcaccaccggagagcctaaaggggcgattatcacccacaataacctgctctgcgcgattgacgcctatacgcaaaaactgaatctcaccgccgcggatagcaccatcctggcggtgcctatctatcacatcaccggcctgtcggcgctgctggcgctgtttattagcctcggcgcgagcatctggctgcagcatcggttcaatgccccgcaggtgatcaccaccctgcgcgagcagaacattacctttctgcacggctcgcccaccatttttatccttctttgccaggctgcgcgtgagcagagcgtcaaccatcccagcgattttccggcattgcgcacgattgcctgcggcgctggccacctgagcgatggactgatcaaggagttaaaaaccctgttcccgcataccgcgattcagccaatctacggcctcaccgaaacgacctcgcctgcgacgatttttccgggcgacgtctggggcagcgataaatgcggcagttcaggtcaggcgatcccgggtctcgccattaccatccgcaacgatcgccagcagcccctccccgccggacaaatcggccatatctggctaaaaggcgatgtggtgatccgcgaatactggcagcacagcgagcgacgcccgagctgcgatgcgcagggctggttttgtaccggcgatctgggctatctcgacgacgaaggctggctgtacatcaaagaccgcagcaaggacatgatcaatcgcggcggcgagaaaatttactcactggagctggaaaacattctctctacctatcggggagtacgggaagttgccgtcatcccgacccccagcccggtctacggcgaagagcccgtggcgtttatcgtgccggatggccagcatcacctgaccagcgaagagatcctcgactggctgaaggtcaaaatcgcccgctttaagctaccggcgcgcattattttcacccgtgctttaccgcgtacccacaacggcaaagtgagcaaacagcagctcaaaacgcgtctcgcagaatccatcatcacgctatcaacggaggataaaaagtga

SEQ ID NO: 219497 - DNA, 426 bp, Klebsiella pneumoniae
gtggtggcgatcaacggacgttccattctcgacacgctaaatgtcgataaagcatttatgggcaccaattcgctgtcgctgaaacacggcgcctgcgtggccgatatcatgctggcagaaacgaagaaagccgcaagggtggccacggggcactgcgcatttgctcggcgtgatgaccatttcaatatgcagattgtggctggctggcaaaccagcgcgcagaaagtgctggcagatcaatggatgtccagaattcagcacatcatgccctccctgagtgaaggcatgtcttaccctgctgtcgtggggtcagaaggtcaggagcgtgcccggaacttttacggcccgtcgctggaaaggctgctcaggctgaaaaagcagtttgatcctgacaatcgtttccgggccccctacggcctgttctga

SEQ ID NO: 219498 - DNA, 357 bp, Klebsiella pneumoniae
atgaaaagagaaacattgttcaaatatgcccgggagcactttaagtccgagccggaatatttatggagtaatttgcctcactatgtagtgctgcgtcatcaccatggtgaaaaatggtttggtattgtcatgaacgtacccggtacaaaactgggtcttaaaagcgaggaagaggttgacgtgctggaagtgaaggtcagacctgagcatatcgggtcgcttcgcaggaaagagggtattttacccgcctaccatatgaataaagagcactgggttagtgtggtactggcaggcccggtgacgccctcagaaattcacgaactcctggctgaaagccatgaactgacctcagaatag

SEQ ID NO: 219499 - DNA, 879 bp, Klebsiella pneumoniae
atgaatcttttcaacggcattgaagccttcatacaggtggcagaaaaggggagctttgcaggtgctgcgcgccaactgaacctttcaccgtctgcggtcagcaaacttgttgcgcgcactgaagatgctctgggtaccgtgctgttcaaccgcaacacgcgcagcctgagcctgacgccggaaggccagcttttcctgaaaagaggccgggtgatcctcagtgaaatggctgcggccaaggcggatattgcagcagcggccggcacgccgcgcggtcagcttaaaatcagcatgccgaatatcacctctttttttctgccgctgattggcggtttccaggaggcgtatcccgaaatcgatctggagctggatttcagcgatcgtgtcgttgacgtgattgatgaaggttttgacgtggtatttcgcgtggggcagttgtctgactcaaggctaacctcccggcaggttgcccgtatcaatatgcagctagtagcgtcaccggcgtatgcggcgaagaatggtctgcccgactcggtcgaaagccttgcgcaccatcactgcatccagtaccgctatcccaccacgggacggctggaagcctggccccttcctgaggagtacagaggaagcctgagtttttcaaaacggctggtatgtaacagtgccgacgcccgattaggtctggcgctccaggggcacggaattgctcttatgcccgacctgctgtccgcgccttatctcgcctcaggcgatctggttgtggttctggggcagtctgtgcaaaaagagtatcaactgcacctgctttggcccacgaacaagcatgccatgctgcgcctgcgtgaattcgtcgactatttccaccatcacctttcctga

SEQ ID NO: 219500 - DNA, 588 bp, Klebsiella pneumoniae
atgcagtttgatttgtttgcagacgaagcgctgccctccattccggggctgatttatcaggccgattttctcacgccggaagaagagaaagggctgctggagattatcgccacgctgcctctcatgcctgcacggtataaagagtatgaatcaaaagtccgcattctcagcttcggcgggcttaatgatttcaacacgcatactgtcaagcccagtccggcgcttgatgcacgtctggttccgctgcgaaaccgcgtcgccgactggctgaagattgagcacggggcgatttctcatctgctcgtcaccgaatacctgtccggcacgcagctgggatggcaccgcgacgtcccggtctatgaaaccatcgtcggtatttctctgggcaacccggcaacgatccgcttcaggccctggccgcccgacgtgctgacaagccaccggaaggtcagccttgaagtaatgccccgctcgatttataagctcgacggcgaggcccgctggggatggcagcacgccgtacctccagtgaagtatccgcgctggtctatcacgctgcgagtgaaccgggcgaagccgggccgttga

SEQ ID NO: 219501 - DNA, 2538 bp, Klebsiella pneumoniae
atgtcatcagaaaaaccatcacaaagcataaatgcacagcctgaggatatccgtaccggcgtcactgtacatggagccaggacgcataacctccgggacgtttccttcacctttccccgtgatgccatggtggtttttaccgggatatccggatcgggtaaatcctccctggcgtttgacacactctacgccgaagcgcagcgacggtttatggagtccgtcgcgccgcacgcgcggcgcctgattgagcaggcttcggcaccagacgtggacggcatagacgggttgccgcctgctgtggccctacagcagagccgggccggcgcgcaggaacgctcaacggtcggcagcctgacgcggatctccgtcaccctcaggctgctgttttcccgtgccggcctccatcccgctgacatcccgttcctgccggcagaggccttctcacccaataatccgcagggcgcttgccctgcctgtcagggcatgggcatggtgcatgaagttaaggccgacgcgcttgtccctgacgggtcgcttagcatccgcgaaggggcaatagcctcctggcccaacggctggcaggcaaaaaacctgcgttcaatccttgattcgctgggctacgacatcgatgccccgtgggatacgctggctgaaaaagatcgggaatggatcctcttcaccgacgaacagccgtcagtgccgatttttatggggctgaatgcggagcagcgccgggaggcgatcgcggcaggtaccgagcccgcctataccggtacctataccagtgccagaaaatatcttcttcagagctattcgggcggtaaggactcagtgaaaaaacgcctctcccgcttcatcaccgtgggaccgtgcaacgaatgccacggcaagcggctcaacagaaatgccctggcttacaccttcgcgggccacgacattgccgaaatgggtgagctgacgataacgcagttaaaggcgttgcttttaccctttgccgaaggccattcgtcgcatatgcctggcgaagccgcgctgcgggaggccgtcatcaggatgacgaccgatatctgcggccgcctcgaccagctcgaaaggctgggcctcggccacctctctctgggtcgccggactaccatgctctcgtccggtgagctgcagcgtatccgactggccacgcagcttatctcccgtctgtttggcgtgatctacgtgctcgacgagcccgcggccggcctgcatccggaagatgttcgcgccctcctccaatccctgcgtctgcttctggaggccggtaactcgctggttattgtcgaacataatctggacgttatcgccgaagccgactggctcacggaggtggggccgggccccgggcgcttgggtggtgagatcgtttataacggcgcgccatccgggatggcacggatttcccgctcgcctaccgcaggctacctcttcgacaaacaccgtccgggcctgcgccggcgtcgacttcccgaacgctggctggagcttgagcaaatcacctgcaataacattcacgggctggatgtccgcatccctcttgaacggatgaccgccatcaccggcgtatccggctcgggcaagtccacccttctggcccgggtgctcccggcgttgcttcagcgactagacaaaaccccggaggatgatgagtcagaggaagacaacctggtgccggaggtacagggtaagatcacggcaggcgggacctccctgaaacgtctggttcgcatcgaccagaaacccatcgggcgcacaccgcgctctaacctggcaacctataccggcttctttgataccgtgcgcaagctatttgccgataccaacgaggcgaaaaagcggaattttgacgccagccgcttttcctttaacctgcccgccggccgctgcccctcctgtgaaggacagggacagatcactatcgaactgatgtttatgcccgaggcaagcgcgccctgctctgcctgcggcggacggcgctacaatgaggaaacgctccaggtccgctggcataacagaacgatagcggacgtgctggacctcaccgttgacgaagccgttgaggtgttcagaaataatgactccatccagcgctccctggccgcgcttgccgcgcttggtctcggatacctgaaactgggacaacccgccaccgaactgtccggcggcgaatgccagcgcattaagctcgcctgggagctgcagcgcgtacagcggggtaaaacgctctatctgctggacgagccctccacggggttgcatccggcggatatggacaagctgatgcgggttctcgacaggctggttcagcgcggcgatacggtggtcatggcggagcacgatatgcgcattgccgcagaagccgactgggtactcgatctcggtcccggctcgggcgaaaacggcggacgcattgttgcgaccggcacgccggaagaggtcagccgcagtaaacacagcctcaccgcgccctggctggcggccaggctaaaaaaaaaggaatggcgatcctga

SEQ ID NO: 219502 - DNA, 621 bp, Klebsiella pneumoniae
atgaacctggtagacggtattgaggcgttcgtgaaaattgctgatctgggcagcttcgcggccgccgcgcgcgagctgaatatttccccctctgccgtaagtaagctggtcagcaaaacagaagaagagttgggtacgcgtctgcttaaccgtaacacgcgcggtttaagcctgacgccggaaggcgaaatgtttcttgagcgcagccgggtaatacttgatgagctgacagcagcgaaggaggagctttcgtctgtatcaggcgagcccagaggcaagttgcgtgtgagtatgccctatatcccgtcctttttcctgccgttgatcagccgctttatggagcaatattcggcagtaactcttgaggtagatcttagcgacaggctggttgatgtggtggaagaggggttcgatgcggtaatacgcgtcggccaattgtcagactcccggctgacggcccgctcgctcggtaactgtgccatgaatctggtagcatcgccggactacatcaggcgatacgggattcctgcctgcgtggaggatctcagttcccatatctgtatccagtaccgctatccctcaagtgggcgcacggagccttggccacttacggtgaattaa

SEQ ID NO: 219503 - DNA, 369 bp, Klebsiella pneumoniae
atgtgggatggtggcttacaagaacaggaagtgttggctatcgagaaaataaaggctgctttttcagccaacgtatctaagcctgacaagcctgtccgtggcggttcaattggcgagcaactacaaagctatggttttaccggcaatggaatgttcccctggaaaggttatgcaggttttcgatttgttgaggcaaaaaaagagggtgaattcgatttagttattgtcacacactgcaacgtgatcattgttgaactgaaagattggaaccatcagcctgtaaccgcgcgcggtgatacttggtataagggtgacatgaacatggggcgctcgcccgtaagcgtgacccgtggcaaaaaatcattatag

SEQ ID NO: 219504 - DNA, 789 bp, Klebsiella pneumoniae
atgattaacattccggtgaataactctaagttaagtgtatcgcttcaaggccttgaggttggaatatctggggccataccagaacgcagtgactggtcagaaccagcaatggatcgtggaatccttgaatttgtttctcttttcagtgggttaatatttaaatatgggggacgtgttattcatggaagtcaccccagttttacaccgattatccttagacaggcccgccagcatgctgttaattttgataaaccaccagtaactctggttatgtccgacttatggttttctgattatgcaggtgaagatattcaatcattgaccgatatagcagaactcatcatcactaaaaaatttggtgatggagacattttcgatccaacaaccagaaaccatagtttaaccgcaatgagacgggtattgatttcgtctcaaaatttgatggtcactgttggaggaaaaatgcatgatagggatggttttaatccaggtattgccgaggaaatgcatctagcagaaatgctaagaatacctcgataccttgtcggaggattgggtggttactccaaggaactagcaaaagagttaacccccgcatctttaaacaatcttctttccagagaagaaaatgtagaactctttggaacaaatgatgtttcatcttgtgtccaaatcatttttgaaaatttatgtcaaaaatactggactgatagttcactcaatctatcacccacatctcttgaagctgtggagcatttgatagacaaaataataccgccatccgcatag

SEQ ID NO: 219505 - DNA, 1230 bp, Klebsiella pneumoniae
atgatcataattttgcataatacagccaacagcgtactcgctgagagaataaaaagcgtcattcttgattcttttcataatcacgtatctgtgatgaccatgtctgaatcgaaggttagctcatggccttgcgaagaagaatggaatgacttattgatcgttctttatgaccacagtgaattttccgacgatgctgataaattcgttagctcttatctggaaaatagacccgataccgcactagtacttcctattgctttagaaagtacttgtcctgtcccgccaaaagtactctctcaatttaaagcgctaccatatgatccaaacgacactctggtttcagaaagaagtattatctgtcgtgcaggcgcaatgatgggattacgcctacagggtcgagacacaaagatatttatttcctatcgagctcaagatggaagagatattgctgagcaattgtatacacatcttttaagtctggggcacaaaccctggctagatgaagctaaagaagttgatggctataccaaaatcttacctggggagccggtccagatagaaattgaaaaagctctggacgatgcaagtctgttgcttctaattgacacaccagcatcaccagaatccaaatggataaaagaggaagttaacattgctgatggaaaactcattcctattcttccgatcgtattcagaccaaaatcagatcctaagaaagggccgcgcttccgtactttactgagtttgcaacgctggcttgagattgtctttgatgcccccccggctaaaaccattttatcatcagttgatcttgacaagatcgtattagaattagaaacttatctctgcgatatattcatgagaaaatgccgtatacctttcaaggttaaaaagaattttctaaacgccggatacgattggtgcactttaaatcagtccctttctgtgtatagatctcaacaacagcataatgtaagaatccgaacaacggttcatagtcattgttcaatttactcgactatttatccaccatctttcaagcacttcaaagattttatttctaatcaaccccatgctaattattcgcttttcatctatgatggtgatttattgtcagatgatgatcttgctgatcttgctgaactactggatactgaaacaataatattgcatcaccaggaaatatcagcactcttggcatcaaattttactaaagtaggtaatgcatga

SEQ ID NO: 219506 - DNA, 753 bp, Klebsiella pneumoniae
atggcaagatgcaactcaaaggattcggatgccctttttttagggcatcaatcaccattacaaaattggggcaagagaatgggacgtaaaatattcgtaacatataaatatgcagacgataaagttcttgttctggacaatgaagaaacaactgcacgcacctatgttgataagcttcaggaaatactggtagacagagaacatataaataagggtgaaaaggatgatgctgatttaagcgatttcaaagatgacacaattcaaactaaactcggtgagaaaatatttgacagttcagtcaccattatcatggtatctaaagggatggttaattcctacttatcagaaaaagagcagtggatgccatgggaaatatcatattcactaaggaagaaaaaacgtggtgaccgcacatccagccctaacgctcttcttgcagtcgtgttgcctgatgaattaggaagttatgaatatttcatagttgagaattcatgcccgcattgtaagtgcaggacattgaatacaaatattctgttcaagatcatgaaagataacatgttcaacattaagaaacctgaatactctgactgcgaatatcactctgaaacttctaaagtgtatactggaaactcttcatacatacactctgtcaaatggtcaagcttcatcgaaacccccgacttttacattgacaaagcagtgaaaatttcagaggaaatagataaatataatatcgccaagattgtcgaatag

SEQ ID NO: 219507 - DNA, 315 bp, Klebsiella pneumoniae
atggatatggaagcaaccgtcatggaactcatcattaacgccggtgagtcccgcagtctggcgatgcaggcgctgcaagccgccagaaaaggagtgtggcaggacgttgataggctgatgcaggacgccgcagatgccgcaaaacgcgcgcatgatgtacaaaccatgcttattggtatggatgagggctgcggcaaagtaccggttaatcttattctggtacatgcccaggatcatataatgacctctatgctcgcgcgggagttgatcgcggagcttattgaggttcagcgccagctgcaacatcgcaactga

SEQ ID NO: 219508 - DNA, 441 bp, Klebsiella pneumoniae
atggtgcgtcgttttatggtgtttcttcgccgcctgcgctttctgcgctactgccggtttagcagcggctttatggtgtttcttcgccgcctgcgctttctgcgctactgccggtttagcagcggctttatggtgtttcttcgccgcctgcgctttctgcgctactgccggtttagcagcggctttatggtgtttcttcgccgcctgcgctttctgcgctactgccggtttagcagcggctttatggtgttttttcgccgcctgcgctttctgcgcgactgccggtttagcagcggctttgtggtgtttcttcgccgcctgcgctttctgctcggctgccggtttcgcggccgctttgtgatgtttcttatggtgaacggtagtatggctggctgctgcactcggggtggtgcttgccgcattggcagcgaaagcaactga

SEQ ID NO: 219509 - DNA, 624 bp, Klebsiella pneumoniae
gtgaaaaccgtggctgccagcctgcgtcgtcaggggctacgggcgaaagcttcacgaaagttcagtccggtcagttaccgcgaacatggtctgccagtctcagagaatctgctgaagcaggacttttacgccagcggcccgaatcagaagtgggtgcgtgacatcacgtatcttcgcactggtgaaggctggctttatctggccgtggttatcgatctgtggtcgcggtcagtcattggctggtcgatgtcctcacggatgacagcacagcttgcctgcgatgcgttacagatggcgctgtggcggcgtaaacgtccggaaaacgtcatcgtgcatacagacagaggcggtcagtactgttcaacggattaccagagcttgctgaaacgccataatctgcgggggagtatgagcgccagaggttgttgttacgacaatgcctgtgcggaaagcttcttccatacgctgaaggtggaatgtatccacggagaggactttgtcagccgggaaatcatgcggacagcagtgtttaattatattgagtgtgattacaatcggtggcgtcgtcacagtgcctgtggcggtctcagtccggaacaatttgaaaaccagaacctcgcttag

SEQ ID NO: 219510 - DNA, 216 bp, Klebsiella pneumoniae
atgaagtatgtcttcatcgaaaaacatcaggctgaattcagtatcaaagccatgtgccgtgtacttcaggttacccgtagtggttggtacatctggcatcagcgtcgttatcaggtaaaccggcgtcagcagttccgccttgtctgtgataacgtcgtcagggaagcaatcagtgacgcaaaacaacgctatggcgcgccacgcctgacggattag

SEQ ID NO: 219511 - DNA, 300 bp, Klebsiella pneumoniae
atgacaaaaccaacatcaaccaccaaaaagccacgcaagcagcacactcctgaatttcgtcaggaagccctgaaactggctgaacgcattggggtggcagctgccgcccgcgaacttaacctgtatgaatcacagctctacaactggcgaagcaaacagcaaaatcagttctcttcttctgaacgcgagcaggaaatgtccgctgagatcgcccgtctgaaacgtcaactggcagaacgggatgaggaactggccattctccaaaaggccgcgacatacttcgcgaagcgcctgaaatga

SEQ ID NO: 219512 - DNA, 759 bp, Klebsiella pneumoniae
atgaataaaatattattgtttttattattcatttcctttcattcaatggccagtttttcaggtcattgggtcaatgagagtgaatcgcaatcgttaacattggatttgttcgagaacggtacccaccttacaggtaaatattgttttataactaatgatggtaatagaattgattgtgctgaagataatgatagaaatattaatggcataattaaagataatgttggagtggtatcttttgaaagcacatttggtaatgttggtgaagcaacattatctgttggaaaggatactctcatattcactattaacaatgatatgccatttatcaatgccaatatgtctgtgcccaaagttatatttttcaaaagagcaatgcaaaatataacaaaaaaatcttatgaagaatgtgataatgatgaaacattaattgcattatgtgaattatctggggcagaaaaaaagtggcaatattttttcgcaaataatgaaaacaaatcccggtacttactcaaaaaagtggatactggtgctgttgagcttgaagtgaactttgatgtcaaaaataaattgaaaagatggttggatttaagtacctatacaacctattttggtttcaataaaggggcttattcctatattcttggtgttcctgaagaaaaacctggtgccgtagcgtttcttgatattaagaaaaatggaaagactataagtgctaaagaatgctcttcaaattcatttggtgaaaaaaaatattaa

SEQ ID NO: 219513 - DNA, 867 bp, Klebsiella pneumoniae
gtggtgaaggggattctggaacagttgtataaagcggcacaggatgaaacgcgcaccactcacgcgctgaacaagtataactataaacggctgctggaattgatagacagtaaccaggacgggtattaccaggagcaggagtatcttcaggcggtacataatatctcttaccgcgaccgcctgtaccgtgtaattgcaaagcacgccagtgaatggtactacggcaaggatgccccgctctggaagacatacctcgatacgttaaccagggatgcgccattgtggaagacgtatctggaaacgtttcttgataagatgacgtggatgaagacggtatccgaaaagggcgttgcgctggggtcggagccgtggcatatgcatccggtggtgtttttggaggcgatccgtattaaagaaagatgtagagagctattttctaaaatttccagtgtaatacttcaacatgaagggggatatgttaacgatcctaatgatcgcggtggtgagactaatatggggatcactattgcgacctggagagcatatgcacctagtgatctcggaattgaagcaactaccaatactctcagaaatatgacaaaggaacaggcagagattatttattataatcattattgggagccaaaaggtttttgtaagcttgagactataaaaatagccttaatgttatatgactggacaattacatcaggtcgcgctgttacacaggtacgaaaaatgcttcataatgagtacaatataaacttagttgtgagtaacacaatggatgatgatatgattcattgtattaatgcaattgaagatcaggagcaattactgtcacgcatcgcagaggttagaaaataa

SEQ ID NO: 219514 - DNA, 1620 bp, Klebsiella pneumoniae
gtggccacccgggactacaactaccgggaagcgctgacgccgcaggacagcacggaaagtatcagcagtcaggaagggatcaccgccggtgaaatttaccactacgcggagcctttcctgacagcgggtgatacggaaagtacagagtccgggacgtatttcgcccgtctgcgtcacgagcgcattctgaacacgcaatatcatgtcaccgggcattcctccagccctcatctggcgccgggccaggttctggaaacggacggctcgttacccgatgtcgttaaggaaggtatcgtcatcaccacggtacgcaccagcggttcacgcaaaagtagctttacgctgacatttgaggggagcccctacagcgaaaccgtctgttaccgtccggcgctgctcagtcgcccggtgatatccggctcgctgcctgcccgggtggaaagcacacagaaaggtgatacgtactcctggctcgacccggagggccgctatcgtgtgaaactggactttgaccgcaacagtaccgaacagggctatgcgtatctgtggctgcggctggcgaaaccgtatgccggtgatacttacggcttccactcaccgcttctcgacggaacggaagtggccgtcgtatttgacggtggagacccggatcgtccctacatcgcttatgccctgcatgattcagagcatccggaccatgttaccagcgacaatcatacgcggaacgtgtggcgcacaccggcgaacaataagctgcggatggaggataagcgccaggaagagcatatcaagctcgccaccgaatacggcaaaagccagctcaatatgggccatctggttaacgcacagcgtgagcagcgcggcgctggttttgagctgcgaacggatgagtttggcgcggtccgcgcagccaaaggcctctacctgacggcggatgaacaggcaaaagcgcaggggcctgtgcttgaaatggcccctgccattaatcagattaaccaggcgaacagccagatgcaggccctgaacagcgccgccgaagccgccggagccctgatctgcgacatcaatacccagataaattttgtgaccgacaaaatcaaagacctccagtctgcggtcctgctggggagtgcgccgcagggggtggcactgacctcaggcgaacaccttcagctcagcagtacccgcaacaccatgatcaatgccggtcagcatcttgatatcggtgcgatgaagaatctgtctgtaacggtagaaaaagccctgggtatgtttgtgcatgaagacggggcgaagctggtcgccaatcagggggatattgatattcaggcgcagcacaacacgatggtgcttctggcaaagcagcaggtgacgataaccagctgcgaggatgggattaccatcagcacgccggagacactgacgctgaatggcggcggatcgtatctgaagctgagtaaaaacgggattgagcatggtactgagggaatgatggtgatgaaggtagcgagctatctggtgccaggaagtggcagcagtctgccactggagacaccggactttaaaacgacggacgtgaaggtcataacaaaaaattccgccaaatggacaagtgaataa

SEQ ID NO: 219515 - DNA, 297 bp, Klebsiella pneumoniae
atggctcatctgctgaggcatcgcaagctaagcgaaggcgtcactttgttgctggacgaacgcttaaccgccatcctgcgcacgcacgccgcggtgagcgtcatcggtcatgtcctggtgcgcggcgccgggctgggcggaccgctcggcgccgcgctgaacagcgtgaaagcggtgagcggcagcgcctaccgggtcaccattcccgcggtcctgcatattgcctgtttacggcaaatgctccagccgccgtcagacaccgcggaaattggtgaaaaataccccgccagatcatag

SEQ ID NO: 219516 - DNA, 822 bp, Klebsiella pneumoniae
gtgagaatatataagattttttttagaattattgccatggtcattatggttatgatcctttctgattgtcgtcagtcgtattatattgccagaaatacggggcgcaatataatgaccttatccgaccatcagcgcgctaaatcggcgttaaacgctaacgatttaaatgcagctcagggctacctgacgggagaaaaatacaataatcgctacaggcctgttagcggtgaggaatcctggggaagtttacaatatcgggcggcgaaaatcgtcgccaacgccgcggcgaacggtcaaaaagtgcgtgatgatgcgctctatctcgcttatatctctttgtttgaagcagaagagggagtgcccgaacatcccgatattatgttgggttacatgcataaagccatggcgctactgttagcgaatccgcaattactcgataaaatcgattctaaaaatgtcagtactttacccagccagtttacccttgaacgctatgctgtatggcaatatttatacgatggcggcgagattgactggaccaaaaaagcgcctgaaggtgaaggttatacaattgctggtgaaagctatcagacctggaatatcaagttaaaaaaagctatctggaatcggggagacgcttttttaacaaatataggtaaacaacaatttattcatgacgctatagattattcgcaatttccggttattgcctgtaccgccaggcgaaaaggctggcacttaacattacctgctgactaccgggaacaaaatttccgcagcggtggacgttttgattgggcttcatgtcgcgctgttgaataa

SEQ ID NO: 219517 - DNA, 486 bp, Klebsiella pneumoniae; identical to SEQ ID NO: 94213

SEQ ID NO: 219518 - DNA, 267 bp, Klebsiella pneumoniae; identical to SEQ ID NO: 94214

SEQ ID NO: 219519 - DNA, 726 bp, Klebsiella pneumoniae
gtgaaatgcagaatcaaagagatctatgatgagaacctgggccgctatggttatcggcggatagcactggcgctcagaagagagggaggagcgttgaaccacaaagtggttcaacgtctgatgaatgtgcttcgtctcaaagctgcgataagagtgaagcgctacagttcatggcggggtgaacatgggcgcgctgctgacaatatcctgcaacgaaacttcaaagccagccggcccaacgaaaaatgggtcaccgatgtcactgaattcgccgtcagtggccgcaaactctacctttcacccattattgatctcttcaataacgaagtgatctcctacagtatttcagaacatccaaccatgccgatgatcgatgacatgctcattaaggcatttgccaggcttgatgcgggtaccaatccggttcttcattcagatcagggctggcaataccgtcatcgatggtaccagtatcagttacgggagtttggcatcatccaaagtatgtcccgcaaaggcaactgcctcgataatgcctgtgcagaatgttttttcgggactttaaaatcagaatgtttttacaccagtaaatttaaggatattgatgaacttaagatagttattgaggattacatacgatactacaatacccgacgaattagccttaaattcaagggactcagcccggttgaataccgcctaaagagctatccaggcagaaattaa

SEQ ID NO: 219520 - DNA, 132 bp, Klebsiella pneumoniae
atgatagtaaaacgtactcctgagtatctgagctatctgcaaaagctggtcgaacgaatagtgctgcctcagttcgtcgataattctgaccttatcccttaccgaactaaggctttcaacttttttaaataa

SEQ ID NO: 219521 - DNA, 510 bp, Klebsiella pneumoniae; identical to SEQ ID NO: 94219

SEQ ID NO: 219522 - DNA, 486 bp, Klebsiella pneumoniae
atgttaattcccggcagattgcgctcccgatatttcttctgcgctatgtctcttatggcgcagggagcgcacagggggcggccagtcgccgccgccccctgtacccccgggctccggccagcaaaatcgccgctacgcggtcccttcgacttatccctgcaggcttcgggtcgggccgaggcagcgtccgtgcaaaacacggccctcagcccgcatccatgcgggctgccccggccttccgggaacgtctcagcgattttgaggccgccagcaccggcagtttcagtcgcgcaagtggttaaaataacaacaggtcgcacgaacagtaggccggataaggcatttatgccgccatccggcacaaccacaggtgcggtacctgaccgcccggggataccaggatcgttacagcgccttcgacaaatagtggcgctgcatgcctgcgtgcgggaagtcgggcagcgacatctgcagctgatagcctaa

SEQ ID NO: 219523 - DNA, 417 bp, Klebsiella pneumoniae
atgacactaatcattacaaaaagcattaatcccgacgatcaacaagaactgtttgccggtctgcggcagtataatcagcagtatctcgatgcggcgcagtttggcgatctggggatttactcgcgcgatgcgcaaggggtaatgcagggcgggctgattgctaaacgcaagggcaactggctgtgcattgagtatctgtgggttagcgagacgacgcgcgggcgcgggctggggagcgagctgatgcaggaggcggaacagcaggcgcaggcgcaaggctgcagccatctgctggtggatacctttagcttccaggcgctgccgttttatcagaaattaggctatcagctgcagatgtcgctgcccgacttcccgcacgcaggcatgcagcgccactatttgtcgaaggcgctgtaa

SEQ ID NO: 219524 - DNA, 1365 bp, Klebsiella pneumoniae
atgtttcgtttaagttttatgtttatcgcgctcctgaccgcgggctgcgtctcgcttgacccgcattatgatcgcccggccgcgccggtgccggccaccctgcccggggcgcacggcgaatcgacggcggtggtcggcgactggcagaaagtggtcaatgacgcgcggctgaaaaaagtggtcagcatcgcgctgaacagcaaccgcgatgtgcaaaaggcgctggccgatatcgaggccgcgcgcgcccagtatggcgaaacgcgggcatcgctgtttcccaccgttgatgccgaactgagccacacccgcagcaaaacggtggccagcggcctgagctccgcttcacaggccgacggcgcggtctccagcttcgaactggacttgttcggcaagaaccagagcctgtcgcgcgcggcgcgcgaaacctggcttgccagcgaattcaccgcgcagaatacccggctgacgatgattgccgatttgaccaccgcctgggtgacgctggcgacggataacagcaatctggcgctggcgcagcagaccatggacagcgcggcaaactcgcgcaacatcgtcgcccgccagatggcggttggcaccgcctcagccggcgatgtaagctcggcggaaagcgtctatcagcaggcgcgcgccagcgtcgccagctatcgcacgctggtggcgcaggataaaaacgccattaacctgctggcgggggaaaccgtgccggagagcctgctgcccggcactctcgagagtctcggggataacagcatcgcgctggtgccggcgggcgtgtcgtcgtcggtgctgctgcgtcggccggacattcaggaagcggagcacaatctgaagagcgccaatgccgatatcggcgcggcgcgggcgaacttcttcccgtcgatttccctgaccgccagcgccggggtcggcagcgactcgctgtcgtcgctgttcagccacgggatgcaggtgtggtcgttcgccccctccatcagcctgccgctgttcaccggcggcagcaacctgtcgcagctgcgctatgcggaagcggagaaaaaggggctgatcgccacctacgagaaatcgattcagagcgcgtttaaggacgttgccgatgcgctggcgcgccgggaaacgctgagcgaagagcttgatgctcagcggcagtatgtcgccgccgagcagacatcgctggatatcgccatgaagagctatcaggccggggtcggcgattatctgtcggtgctcaccgctcagcgcacgctgtggtcggcgaaaacgacgctgctgtccctgcagcagaccgacctcaataaccggatcaccctctggcagtcgctgggcggcggcgccagttaa

SEQ ID NO: 219525 - DNA, 1164 bp, Klebsiella pneumoniae
atggcacgtgtttccctctcctgggcgctgatcctcggcctgctgtcgggtatcggcccgctgtgcacggatttttatctaccggcgctgccagagatcactcagcagctgcaggccaccagcacccagacccagctgtcgttgaccgccgcgctgattggtctcggcctgggtcagctgtttttcggcccgctgagcgaccgcattggccgcctgaaaccgctggcgctgtccctgctgctgtttatcttctcttcggcgatgtgcgcccagacccgcgatatcaacatgctgattgtctggcgctttttacaaggcttcgccggcgccggcggctcggtgctgtcgcgatccattgcccgcgataaataccagggcaccctgctgacccagtttttcgccctgctgatgaccgtgaacggcattgcgccggtgctgtccccggtgctgggcggctacgtcatcaccgccttcgactggcgaattctcttctggacgatggccgccattggcggcgtgctgctggtgatgagcctggcgatcctgcgggaaacgcggccggccacagcggcgcatgccgcccgccagcaacgcggccagccggtgctgaaaaatcgccgctttctgcgcttctgcctgattcaggcctttatgatggccgggctgttctcctacatcggctcttcttccttcgtgatgcagagcgaatacggcatgagcgccatgcagttcagtctgctgttcggtctgaacggtatcgggctgatcatcgccgcgatgatcttttcccgtctggcgcgccgctttagcgccgaaagcctgctgcgcggcggcctgacgctggccgtgagctgtgcggcgatcatgctgctgtttgcctggctgcatctgccggtgctggcgctggtcggcctgttctttaccgtgtcgctgatgagcggcatcagcaccgtcgccggcgcggaggcgatgagcgccgtcgacgccgcgcagtccgggaccgcgtccgcgctgatgggcaccctgatgtttgtcttcggcggcatcgccgcgccgctggcgggtctcggcggcgaaacgatgctgaaaatgagcctcgcgatggccatctgctacctgctggcgctgctgctgggcctcagcaaaccgcgcgacgcacgctaa

SEQ ID NO: 219526 - DNA, 552 bp, Klebsiella pneumoniae
atgggcaatatgacggcgctggccggggaaaagctggggctctttgcccggaccggacagctgagcgtcaaatccggggagggggcggtagaggtccaggcccagaacgccagcctgcggctgtttgcggagaagaaactgacgctgagttcagcgagtgacatctcgtttgccgggaagaagcgtatcacgcttatcggtggcgggagctatctgcgacttgaggccgggaaggtcgagtatggtacgacggcgacgtatatacggaaggtgaagcggacgatgtttgctggtgcaaattcaacaccaacgccatcaatatcaataccattagttgacgatttaatccggaatggattcttcgatgaacaattccgaatcttggatgatagtggtaagcccatggctaatgtcccatattttatctctagcgaaaatggtgaaacatttaaaggtgtcaccgacaatcaaggtttgtgcaaacgcgttttttcaaaagaatcagccaaacttaccgtttggctaggtgtcctggctctggagaggtggtag

SEQ ID NO: 219527 - DNA, 612 bp, Klebsiella pneumoniae
atgggggataacgcttcttcatatatttccactagctctgcctttccggaaggatctccaagatttgaaggtaaaacaattattgttgatattgaaaaagctgtaatgtcgggtgctaagttaatttctacagaagaaatacttaagagccttgatgattacaagagccaaaatccacacttggcaaaacgtattgataaaatatcaaaatatgttaaggatatagataaggaagtattgctgcacggtgaaaaaatacccgcatccgcggttttcactccagagacattaaaatacacaaagttctttacacgtgccgctcgtgtcgtacaggtgacaggaattgtctttacagcttatgatctagaacaggcgtcagaaaaatcgcttaaaaacgggagcgtgaaaccgataaccgctgaagtcattaggcaagctggaggatgggggatggctgtagctggagcaaaaataggtacagtggctggtgcggcggttggcattgagacgggccctggggtggtgttaacagggcttattggcggagttatattcggaaccgctggttattttggtgcagattgggtggcggaccatattgatgaaaattaa

SEQ ID NO: 219528 - DNA, 486 bp, Klebsiella pneumoniae
atggcgttgccagaggagggggggtatcctttattttcctctctagagaaaagtaatatatatgcacactcaacatgttttatgataaagcctgagggcatattagtcattgaacatttgattgagttattttttcatagggaggtaaaaataagcgaggtaaaagagaaggtttcagatcataataaagtcctcgttttttataaatttaaggagtttgaacaagatattgtaagacttatcacaaatgataatgaatttatcaattgcctttgtgaaaaaggcatagaacctccagaaccagagtgtgcatttcctgataaagactttggtacttatggtagtctgcaaggagatatggagttctggtggaacgtatactggaaaccattttgggatagtttaagagaggaagaaagaaaacaatatcttgaacgaagtaatttatcgattggtaccattgaatttctgaaacaccgccgttag

SEQ ID NO: 219529 - DNA, 1155 bp, Klebsiella pneumoniae
atgaaaattgaatctgtgaatgtcaccgttttccaatatcccactcgtcgggtttccgacagcgccgggcactcccatccgggggttgaaagcatggccaaaatggcgatgctgaccatcaccgctgatgatggggcgcagggcttttcgtttgcgcctccggaagtcgtgcgcccgttcgtggtgaatactttttttcgcaaagtgctggtgggacaggacccgtttaaccgtgagcgtatctggcaggatcttaaccactggcagcgcggcagcgcacatcagctaacggagcgcgcgctgtcgtttgttgaagaggcgctgtgggacctgatcggccgcagccttaagatgccggtttataagctgctcggcggctatcgcgacactgtcccggcttacggtagcaccatgtgcggcgacgatctgccgggcggcctgtcgaccccggaagagtatgccgcttttgctgagaagctggtcgcccgcggctacaaggccatcaaactgcacacctggatgccgccaatctcttttgcgcccaatcccaaaatggacattaaagcctgcgcggcggtgcgcgaagccgtagggccggatattgacctgatgattgatggctatcactggtacagccgcgccgaggcgctgtggatcggcaaagagctggaaaaactcaatttcgcctggtttgaagagccgatggaggaggattcgatatcttcctatgcgtggctggcggaaaacctgtcgattcccatcgtcgggccggagagcttcggcggcaagcaccacatgcgcgccgaatgggtgaaagccggggcctgcgacattctgcgcgccggcgctaacggcgtgggggggattacaccgaccatgaaggtggcggcgctggcggaatctttcggcatggattgcgaagtccacggcaacggagcggcaagcctggcggtggtgggcgcgatccgcaactgccgctggtacgagcgcggcctgctgcatccgttcctcgactacgatgaaccggcggcctatctcaacagcattgtcgacccgatggatgaccagggatttgtgcatttgtcacaacgtccgggtctcggtgaagacattaattttgcgtatatcgaagccaataccgttagccaagactga

SEQ ID NO: 219530 - DNA, 1038 bp, Klebsiella pneumoniae
atgagtaccgcaatccttgcgcccggctcacgcggccggcgcttatcaaaacggctactgcaggtggtgattacactgttcggcctgctgctgctgacctttaccattggccgcgtcatgcccatcgacccggtgctggcgattgtcggcccggatgctgaccagagtacctatcagcaggtttaccagcagctggggtttgataaatcgctgaccacccagtttggcatctatttcgtcaaccttttgcacggcgatctgggcaacgcgctgctgaccgggaaaccggtggtggacgatattatccgcgtcttcccggccaccatggagctggcaacgatggcgattattgtcggcgcgggtcttggtattccgctgggcgtgttggcggcggcgcggcgcaatagcgtctccgattatgtggtacgcattatcagcctggcgggctactcgacgccgatcttttgggtcgggatgatggggctgctggtgttctatgcctggcttggctgggtaggcggcgccgggagggtagatctcgggctggatggtgtggtgccgcgccgcaccgggctgatgaccgttgatgcgctgctggccggcaacggccaggtgttctggaacgccattaatcatctgattcttcccgcctcgctgctgggttttcactcgctggcttatatcagccgtatgacccgcagctttatgctggcccagctgtcgcaggagttcattattaccgcgcgggtgaaagggctgaccgagcgccaggttatctggaaccatgcgtttcgtaacatcctcgtgcaactgctgacggtggtggcgctggcctacggcgcgctgctggaaggcgcggtgctgattgaaaccgtcttctcatggccggggtttggctcctaccttaccggaagcttgctgctgggcgatatgaatgcggtgatgggctgcgtgctgctggtgggggtgatcttcgtgatgctcaacctgctctcagacatgctgtatcaattctttgacccgaggacaaaatcatga

SEQ ID NO: 219531 - DNA, 864 bp, Klebsiella pneumoniae
gtgacatcctcgatccccgtagtgaataatgcaccgctgctcgacgtgcgcgatttgtgcgtcgactttgttaacggtagcgcggtgacccacgccgtgcgcggcgtctccttccagctggggcatgagaagctggctattgtcggcgagtccggttcgggtaagtccaccgttgggcgcgcgctgcttcagctgcatccgaaaaaggcccgcgtcagcgccagccggatgcagtttgccgacctcgatctgcagcatcttagcgaagcgcagatgcgcggcgtacgcggcaaacgtatctcgatgattatgcaggatccgaaatatttgctgaatccggtggtctgcgtgggtaagcaaatcgccgaggcctggcttactcatcatcccgggcgcaaagatgaggcgaaagccagggcgctggagatgctggaggtggtgcgtattcgccaaccggagcgcgtttatcagctttatccgcatgaaatatccggcggacaggggcagcgcatcatgatcgccatgatgctgattaccgacccggagctgatcattgccgatgagcccacctccgcgctggacgtgtcggtgcgcctgcaggtgctgggcctgctggatgacctggttcagtcgcgcgggctggggctgatttttatcagccacgatatcaacctggtgcgcagcttctgcgaccgggtgctggtgatgtacgccggacgggtagtggagtccatcgccgctaaagatctcgataacgcccgtcacccctacactcagggattgattaactcgctgccggatatgcagcatcgtcgcccgatactgccggtgctgcagcgtcaggccagctggttaacggattaa

SEQ ID NO: 219532 - DNA, 447 bp, Klebsiella pneumoniae
atgattgaagttcaacatctcaacctcgcgtttggcgagggggagaagcgtaaccaggtgctgtatgacgtcagtttccacgttaagcccggcgagatctacggtctggtaggagagtccggttccggtaaaacgtcggtgctcaagtgcctggcggggctgtttacccactggcagggggaactgaccatcgatgctcaacccttagggcatgaaattagccgcgagcgctgccgtcaggtgcagatggtatttcaggacccctacggatcgctgcatccccgtcacaccattggcgatatcctcgaagagccgctgcagatccatcgtatcaacgaccgcgaccggcggatcaatgtgctgctggataaagttggcctcaaccgcgcctttcgcgagcgctatccgcatcagcctccggcgggcagcggcagcgcgtggcgatag

SEQ ID NO: 219533 - DNA, 897 bp, Klebsiella pneumoniae
atgatgtctacgtttcctgccagcttactgatccttaacggcaaaggtgccaatgaaccgcagctacgcgaagcggttaacctgttacgcgatgaagggattgatattcacgtccgcgtgacctgggaaaagggcgatgccgctcggtttatcgatgaagccctgcagctgaacgttgaaacggtgatcgccggcggtggcgatggcaccattaatgaagtggcgaccgcgctggtggagcgcggcggcaagatggcgctggggattttaccgctgggcacggctaacgactttgccaccagcgtcggtattccgcaggatctggccagcgccctcaagctggcgatcgtcggccgcgatgtgccgatagatatcgcccgggtgaatgataaaaccggctttattaatatggcgaccggcgggttcggcacccggatcaccaccgaaacgccggaaaaactcaaggccgcgctcggcggtgtctcttatttaatccacggtctgatgcgcatggataccctgaagccggaccgctgcgagatccgcggggagaactttcactggcagggcgatgcgctggtcatcggcatcggcaacggccgccaggccggcggcggccagcagctgtgcccggaggcgttgattaacgatggtctgctgcatctgcgcattttcaccggcgaagagctgatccctgccctgttcagcaccctggcgaatccggaaaactcgccgaatattgttgacggtgtctcctcatggtttgagatcaccgccccccatgagatgacctttaacctcgacggcgagccgctcagcggcaaaaccttccgtatggagctgttaccggcggccctgcgctgccggctgccgcccgactgcccgctgctacgctga

SEQ ID NO: 219534 - DNA, 3078 bp, Klebsiella pneumoniae
gtgaagtttttcgccctcttcatttaccgcccggtggcgacgatcctcatctcgctggccatcaccctgtgcggcattctcggcttccggctgctgccggtggccccgctgccgcaggtggacttcccggtgatcatggttagcgcctcgctgccgggagcctcgccggagaccatggcctcgtcggtggccaccccgctggagcgctccctggggcggattgccggggtcaatgagatgacctcctccagctcgctcggcagcacccgcatcattctcgagtttaacttcgaccgcgatatcaacggcgcggcgcgcgacgttcaggcggcgatcaacgccgcgcaaagcctgctgccgagcggaatgcccagccggccgacctatcgcaaagccaatccgtcggatgcgccgatcatgatcctgacgctgacctcggacacctactcccagggtgagctgtatgatttcgcctccacccagctggcgcagaccatcgcgcagatcgacggcgtgggcgatgtcgacgtcggcggcagctccctgccggcggtgcgcgtcgacctcaacccgcaggcgctgtttaaccagggcgtgtcgctggacgcggtgcgcaccgccatcagcgacgccaacgtgcgcaaaccgcagggggcgctggaggacagcgcgcaccgctggcaggtgcagaccaacgatgagctgaagaccgccgccgactatcagccgctgatcgtccactatcaaaatggcgccgcggtgcggctgggagatgtcgccaccgtctcggattcggtgcaggacgtacgcaacgccgggatgaccaacgccaaaccggcgatcctgctgatgatccgcaaactgccggaagccaatattatccagacggtggacagcatccgcgcccgcctgccggagctgcagcagaccattccggcggctatcgacctgcagatcgcccaggaccgctcgccgaccatccgcgcctcgctggaggaggtggagcagacgctggtgatttcggtggcgctggtgatcctcgtggtgttcctgttcctgcgctcggggcgcgccacgctgatcccggccgtcgccgtcccggtatccttaatcggcaccttcgccgcgatgtatttgtgcggcttcagcctcaataacctgtcgctgatggccctgaccatcgccaccggcttcgtggtggatgacgctatcgtggtgctggagaatatctcccgccatctggaggcggggatgaaacccctgcaggcggcgctgcaggggagccgcgaggtcggctttaccgtgctgtcgatgagcctgtcgctggtggcggtgttcctgccgctgctgctgatgggcggcctgcccggccgcctgctgcgcgagttcgccgtcaccctgtcggtggcgatcggcatctcgctggcggtctccctcaccctgacgccgatgatgtgcggctggctgctgaaaagcggcaagccccaccagccgacgcgcaaccgcggctttggccgcctgctggtggccgtgcagggcggctatggtaaatcgttaaaatgggtgctgaagcatagccgcctgaccggcctggtggtgctgggcaccatcgccctcagcgtctggctctacatttcgatcccgaaaaccttcttcccggagcaggacaccggggtgctgatgggcggcattcaggccgaccagagcatctccttccaggcgatgcgcggcaagctgcaggactttatgaagatcattcgcgaagatccggcggtggataacgtcaccggctttaccggcggctcgcgggtcaacagcgggatgatgtttatcaccctcaagccgcgcgaccagcgccacgagacggcgcagcaggtgatcgaccggctgcgcaaaaagctggccaacgagcccggggccaacctgttcctgatggcggtgcaggatatccgcgtcggcggccggcagtcgaacgccagctatcagtacaccctgctgtccgacgacctgtcggcgctgcgcgagtgggagccgaagatccgcaaagcgctggcggcgctgccggagctggcggacgtcaactccgatcagcaggacaatggcgccgaaatggacctggtctatgaccgggataccatgtcgcgcctcggcatcagcgtccaggacgccaacaacctgctgaacaacgcctttggccagcggcagatctctaccatctaccagccgctcaaccagtataaggtggtgatggaggtggatccggcctacacccaggacgtcagcgccctggataagatgttcgtcattaacagcgacggcaagccgatcccgctggcctacttcgccaaatggcagccggccaatgccccgctgtcggtgaaccaccaggggctgtcggcggcatccactatctcctttaacctgcccaccggccgctcgctgtcggaagccagcgaggccattgaccgcgcgatgacccagctcggggtaccgtcgagcgtgcgcggctcctttgccggtaccgctcaggtgttccagcagaccatgaacgcgcaggtgatcctgatcctcgcggctatcgccacggtctatatcgtgctgggggtgctatatgagagctatgtgcatccgttgaccatcctctcgacgctgccctccgccggggtgggcgctctgctggcgctggagatcttcgatgccccgttcagcctaatcgccctgattgggattatgttattaattggcatcgttaagaaaaacgccatcatgatggttgattttgccctggaggcgcagcgcaacggcaacctgacgccggaagaggcgattttccaggcctgcctgctgcgtttccggccgattatgatgaccaccctcgccgcgctgttcggcgccctgccgctggtgctctccgggggcgatggctctgagctgcgccagccgctggggatcaccatcgtcggcggtctggtgatgagccagctgttaacgctctacaccacgccggtggtctatcttttctttgaccgtctgcggctgcgtttttcgcgtcactcctctcaaccggtaagcgaataa

SEQ ID NO: 219535 - DNA, 2169 bp, Klebsiella pneumoniae
atgtcttctgtaacatctaacaagcaaccttcttcagagcatgatgaaattgatttaggaaggattgttggggaatttattgatcatcgtaaattaataatcacgataactgctatttttacagctatatcaataatttacatgcttttttcaaccccggtatatcaagctgatgctatgatacaagttgaacaaaagcaagggaatgcgctattagataatttaagtcaaatgctacctgatagccaaccacaatctgctcctgaaatagcattattacagtcgagaatgattttaggtcagactgtagatgatcttggtctgcaggctaaagttgagcagaattattttccaatatttggaaagggatgggctagattaactggcgaaaaagaccaacgtattgaagtaagtcgattatatttgccaaatgattccaacgatgttcctcaggttaagattgagatcattgatgataaaaattatcgcataatagggagtaacttcgatattacagcgaaagttggtgctctaattgaaaagaatgacatctctattatgatctcagatataaaggcaaagcctggcacaagttttactgtttcatatttaacaaaacttagagcaatatctgaacttcaacaggcattctctgtttcagatttgggaaaagatactgggatacttaatttagtgatgattggggaagacccgatacttatatctaaaataataaattacataagtcaaaattatttgactcaaaatattgaaagacaagctgcacaagatgctaaaagcctcgagtttcttaatatgcagctgccaaaagtccgcacagaactcgatcttgctgaagacaaattaaatgattaccgcaggcaaaaggattcagttgatctcacaatggaagctaagtctgttttggatcaaattgttaacgtcgataatcagttgaatgaattaactttcaaagaggcagagatttctcagctttatactaaagaacacccaagttataaatctttgatagaaaaaaggcagacgttgattaaggagaaaaacaagctaaattctcgagtttcaggtatgcctgccacacagcaagaagtgttacgattaagtagagatgttgaatctggtcgagctgtctatatgcaattactgaaccgacagcaggaactgaacattgcaaaatctagcgcaattggcaacgtacgtataatagacagtgctgtaacacagcctaaacctgtgaaacctaaaaaagctttcataatagcaataggggtctttataggattatttatttcctcaggaattgtcttgctaagaattttactgcgacaagggattgaatctccggaacagctggaagagttaggaataaatgtttatgcaagtattcctgtatctgagtcattatcaaagcttgagcaacgcaagggaattagaaaaaacaaaaataacaacgagtggagtggctttttagctgttgagaatcccgctgatttatctatagaagcaattagaggacttagaacaagtcttcattttgctatgttagaagctaagaataatgtattgatgatttcaggcgctagcccaaatgcaggtaaaaccttcgttagttcaaatttatctgcaatcattgcccaaacaggaaagaaagtactttatattgatacagatatgagaaagggttacgcttataagctttttaaagtctcaaatgacaagggcttatcagatatcctctcaggtaaagtaactccaacggaggcaataaagcatgttgctgctgctggttttgattcaatatccagaggaatggttcctcctaacccttcagaactcttaatgaacagtcgctttggggagctaatagaatgggcgaaccgaaattatgacctagttattttagatacaccgccgatcttggctgttaccgatgctgctattgtcggacgttacgctggtactacattactagttgcaagatttgaagaaaatactagcaaggaaattgacgttagcgtaaaaagattcgagcaaagcggaatattaatcaaaggttgtattcttaacggtgttgtaaaaaaagccagtagctattatggctatggttatagtcattacggctattcatattctgataagaaagattga

SEQ ID NO: 219536 - DNA, 1191 bp, Klebsiella pneumoniae
atggtgaaggctggagctggaaccgacagcgccatcgattccctgaagccttaccttgataaaggcgacatcatcattgatggcggcaacaccttcttccaggacactatccgtcgtaaccgtgaactgtctgccgaaggttttaactttatcggtaccggtgtttccggtggtgaggagggggctctgaaagggccttccatcatgcctggtggccagaaagaagcctatgaactggtagctccaattctgaagcagattgcggcggtggctgaagacggtgagccatgtgtgacctatatcggcgctgacggtgcgggccattatgtgaagatggtgcataacggcattgagtatggtgacatgcagctgattgctgaagcctatgcgctgttgaaaggtggtctggcactatccaatgaagaactggcacaaaccttcaccgaatggaacgaaggcgagctgagcagctacctcatcgacataaccaaagatatattcaccaagaaggatgaagagggtaagtacctcgttgatgttattcttgatgaagctgcaaacaaaggtaccggtaagtggaccagccaaagctcactggatctcggcgaacctctgtctctaatcaccgagtccgtatttgctcgctatatttcttcgcttaaagaccagcgtgtagccgcgtcgaaagtgctgagcggcccgcaggctctgccggccggggataaagctgaatttatcgaaaaagttcgtcgcgcgttgtacctcggtaaaatcgtttcctatgctcagggcttctcccagctgcgtgctgcttctgatgaatacaactgggatctgaactacggcgagatcgctaagattttccgcgcgggctgcatcattcgtgcgcagttcctgcagaagatcaccgatgcttatgcgcaaaacgctggtattgctaacctcctgctggcgccgtacttcaaacagatcgctgatgactatcagcaggcgctgcgtgatgtcgtggcgtatgccgtacagaatggtattccggtaccaacgttctctgcggcaattgcctactacgacagctaccgttccgcagttctgccagctaacctgattcaggctcagcgtgattattttggtgcgcacacctataagcgtactgataaagaaggtatattccataccgaatggttggaataa

SEQ ID NO: 219537 - DNA, 1416 bp, Klebsiella pneumoniae
atgttacttcctgtgataatggctggtggtaccggcagtcgtctctggccgatgtctcgcgagctttacccgaaacagttcctccgtctgttcgggcagaactccatgctgcaggaaactatcacccgactctcgggccttgaaatccatgaaccgatggtcatctgtaacgaagagcaccgcttcctggtggccgaacagctgcgccagctcaacaaactgtccaacaacattattcttgagccggtcgggcgcaacaccgccccggccatcgccctggcggccctccaggccacccgccacggcgacgacccgctgatgctggtcctcgccgccgaccatatcatcaataaccagccggtcttccacgacgccatccgcgtcgccgagcagtatgccgatgaaggccatctggtcaccttcggtatcgtgccgaacgccccggaaaccggctacggctacatccagcgcggcgtggccctcaccgacagcgcccacaccccgtaccaggtggcccgtttcgtggagaagccggaccgcgagcgcgccgaggcctacctcgcctccggggagtactactggaacagcggcatgtttatgttccgcgccaaaaaatacctctccgagctggccaaattccgcccggatatcctcgaagcctgccaggccgcggtgaatgccgccgacaacggcagcgacttcatcagcattcctcatgacattttctgtgagtgcccggacgagtctgtggactacgcggtgatggagaaaaccgccgacgcggtggtggtcggtctcgatgccgactggagcgacgtcggctcctggtccgccctgtgggaggtcagcccgaaagatgagcagggtaacgtcctcagcggcgacgcgtgggtgcacaacagcgaaaactgctacatcaacagcgacgagaagctggtggcggccatcggcgtggagaatctggtgattgtcagcaccaaggacgccgtgctggtgatgaaccgcgagcgttcccaggacgtcaagaaggctgtcgagttcctcaagcagaaccagcgcagcgagtacaagcgccaccgcgagatttaccgtccctggggccgcagcgacgtggtggtccagaccccgcgcttcaacgtcaaccgcattaccgtgaaaccgggcggcgccttctcgatgcagatgcaccaccaccgcgccgagcactgggtcatcctcgccggcaccggccaggtgacggtcaatggcaagcagttcctgctgaccgagaaccagtccacctttattccgattggcgccgagcacagcctggaaaacccgggccgtattccgctggaagtgctggagatccagtcggggtcgtacctcggcgaggacgacattattcgtattaaagaccagtatggtcgttgctaa

SEQ ID NO: 219538 - DNA, 1371 bp, Klebsiella pneumoniae
atgacacagttaacatgctttaaggcttatgacatccgtggtgaactgggcgaggagctgaacgaggacatcgcctaccgtatcggccgcgcctatggcgaatttctgaaacccgggaagatagtggtggggggcgatgtgcgcctcaccagcgagtcgctgaagctggcgctggcccgcgggctgatggacgccggcaccgacgtgctggatatcggcctgagcggcacggaagagatttacttcgccactttccacctcggggtggacggcggcatcgaggtgacggcgagccataacccgatgaactacaacggcatgaagctggtgcgcgagaacgcgaagcccatcagcggcgacaccggcctgcgggatatccagcgcctggcggaggaaaaccagttcccgccggtggatccggcgcgtcgcgggaccctgcgccagatttcggtgctgaaggagtacgttgaccacctgatgggctatgtggacctggcgaacttcacccgtccgctgaaactggtggtgaactccggcaacggggcggcggggcacgtgattgatgaggtggagaaacgcttcgcggcggccggggcgccggtgagctttatcaaggtgcatcaccagccggacggccatttcccgaacggtatcccgaacccgctgcttccggagtgccgccaggacaccgccgacgcggtgcgtgcacatcaggcggacatgggtatcgcctttgacggcgacttcgaccgctgcttcctgttcgatgacgaggcgtcgtttatcgaggggtactacattgtcggcctgctggcggaggcgttcctgcagaagcagccgggggcgaaaatcattcacgacccgcgtctgacgtggaacacggtggacatcgtgacccgcagcggcggccagccggtgatgtcgaagacggggcatgcgttcatcaaggagcggatgcgccaggaagacgccatctacggcggggagatgagcgcgcaccattacttccgcgacttcgcctactgcgacagcgggatgatcccgtggctgctggtggcggagctgctgtgcctgaagaacagttcgctgaaatcgctggtggcggaccgccaggcggcgttcccggcgtcgggggagatcaaccgcaagctggggaatgcggcggaggcgatagcgcgcatccgggcgcagtatgagccggcggccgcacacatcgacacaacggacggtatcagtattgaataccctgagtggcgctttaacctgcgcacgtccaacacggagccggtggtgcgtctgaacgttgagtccagagcggatactgcgttaatgaacgccaaaactgaagagattttagctcttctcaagtaa

SEQ ID NO: 219539 - DNA, 1167 bp, Klebsiella pneumoniae
atgaaaattactatttccggtacaggttatgttggtttatcgaacggtgtcctgattgcgcaaaaccacgaagtggttgctctggatatcgtacaggccaaagtggatatgcttaaccagaagatctctccgattgtcgataaagagattcaggaatatctggcagaaaaaccgttaaatttccgtgccaccacggataagcacgacgcataccgtaatgccgactacgtgatcattgccacgccgaccgactacgatcccaaaaccaactacttcaacacctctacggtggaagcggttattcgcgatgttacagagatcaacccgaacgcggtgatgatcattaaatcgaccattccggtggggttcacccgcgacatcaaagaacgtttagggattgataatgttattttctctccggagttcctgcgtgaaggacgtgcgctgtacgacaacctgcacccgtcgcgtattgtcatcggtgagcgctctgcgcgtgccgaacgttttgctgatctgctgaaagaaggcgcgatcaagcaggatatcccaaccctgtttaccgactccaccgaagcggaagcgatcaaactgttcgctaacacctatctggcgctgcgcgttgcctatttcaacgagctcgacagctatgctgaaagccaggggctgaacagcaaacagattatcgaaggggtatgcctggatccgcgtatcggcaaccactataacaacccgtcctttggctacggcggctactgtctgccgaaagataccaagcagctgctggcgaactacgaatcggtcccgaacaatatcatcgcggctatcgtcgatgccaaccgtacccgtaaagactttatcgcagattctattctcgctcgtaagccgaaagtggtgggtgtgtatcgcctgatcatgaagagtggttcggacaacttccgtgcctcttctattcagggcattatgaagcgcatcaaggcgaaaggtattccggttattatctatgaaccggtgatgcaggaagatgagttcttcaactcccgcgtcgtgcgcgacctgaatgccttcaaacaagaggcggatgtgatcatctctaatcgtatggcggaagagctagcggatgtggcggacaaggtttacacccgcgatctgtttggtaacgattaa

SEQ ID NO: 219540 - DNA, 1005 bp, Klebsiella pneumoniae
atgaagtttttggtcactggtgccgcaggttttatcggcttccatatcgcgcagcgcctgctgaatgaagggcatgatgttgtcggaatcgacaacatgaacgactattatgacgtcagcctgaagcaggcccgtctggatcgcctggcatctccggcattccatttccagcagctggatctggccgaccgtgaaggtatggcaaagctgttcgccacagagcaatttgatcgcgtgatccacctggccgcccaggccggcgtgcgctactcgctagaaaacccgtatgcctacgcagacgctaacctgatggggtatctgaacattctggaaggctgccgtcataccaaggtgaaacacctggtgtacgcctcctccagctcggtttacggccttaaccgtaaaatgccgttctccaccgaagattccgtcgatcatccggtctccttgtatgccgccaccaagaaagctaatgagctgatggcgcacacctattctcacctgtacggcatcccgaccaccgggctgcgcttctttacagtttatggtccgtggggtcgcccggatatggcgctgttcaagttcacgaaagcgatgctggaaggaaaaagtatcgacgtttacaactacggcaaaatgaaacgcgactttacctatatcgacgacatcgtcgaggccgtggtgcgcgtgcaggatgtgatcccgcaggcgaatgccgactggaccgttgaggacggttctccggccaccagctccgcgccgtatcgggtgtataacattggcaacagctcaccagtggaactgatggactacatcaccgccctggaagaggcgctggggatggaagcgaagaagaatatgatgccgatccagccgggagatgtgctggacaccagcgcagacacccaaccgctgtatgacctggtgggctttaagccgcaaacgtcagtgaaggacggcgtgaagaacttcgtggagtggtacaaggattactatcagatctaa

SEQ ID NO: 219541 - DNA, 1416 bp, Klebsiella pneumoniae
atgttacttcctgtaattatggctggtggtaccggcagtcgtctctggccgatgtctcgcgagctttacccgaaacagttcctccgcctgttcgggcagaactccatgctgcaggaaaccatcacccgactctcgggccttgaaatccatgaaccgatggtcatctgtaacgaagagcaccgcttcctggtggccgaacagctgcgccagctcaacaagctgtcgaacaacattattcttgagccggtcgggcgcaacaccgccccggccatcgccctggcggccctccaggccacccgccacggcgacgacccgctgatgctggtcctcgccgccgaccatatcatcaataaccagccggtcttccacgacgccatccgcgtcgccgagcagtatgccgatgaaggccatctggtcaccttcggtatcgtgccgaacgctccggaaaccggctacggctacatccagcgcggcgtggccctcaccgacagcgcccacaccccgtaccaggtggcccgcttcgtggagaagccggaccgcgagcgcgccgaggcctacctcgcctccggggagtactactggaacagcggcatgtttatgttccgcgccaaaaaatacctctccgagctggccaaattccgcccggatatcctcgaagcctgccaggccgcggtgaatgccgccgacaacggcagcgacttcatcagcattcctcatgacattttctgtgagtgcccggacgagtctgtggactacgcggtgatggagaaaaccgccgacgcggtggtggtcggtctcgatgccgactggagcgacgtcggctcctggtccgccctgtgggaggtcagcccgaaagatgagcagggtaacgtcctcagcggcgacgcgtgggtgcacaacagcgaaaactgctacatcaacagcgacgagaagctggtggcggccatcggcgtggagaatctggtgattgtcagcaccaaggacgccgtgctggtgatgaaccgcgagcgttcccaggacgtcaagaaggctgtcgagttcctcaagcagaaccagcgcagcgagtacaagcgccaccgcgagatttaccgtccctggggccgcagcgacgtggtggtccagaccccgcgcttcaacgtcaaccgcattaccgtgaaaccgggcggcgccttctcgatgcagatgcaccaccaccgcgccgagcactgggtcatcctcgccggcaccggccaggtgacggtcaatggcaagcagttcctgctgaccgagaaccagtccacctttattccgattggcgccgagcacagcctggaaaacccgggccgtattccgctggaagtgctggagatccagtcggggtcgtacctcggcgaggacgacattattcgtattaaagaccagtatggtcgttgctaa

SEQ ID NO: 219542 - DNA, 1383 bp, Klebsiella pneumoniae
atgacacagttaacatgctttaaggcttatgacatccgtggtgaactgggcgaggagctgaacgaggacatcgcctaccgtatcggccgcgcctatggcgaatttctgaaacccgggaagatagtggtggggggcgatgtgcgcctcaccagcgagtcgctgaagctggcgctggcccgcgggctgatggacgccggcaccgacgtgctggatatcggcctgagcggcacggaagagatttacttcgccactttccacctcggggtggacggcggcatcgaggtgacggcgagccataacccgatgaactacaacggcatgaagctggtgcgcgagaacgcgaagcccatcagcggcgacaccggcctgcgggatatccagcgcctggcggaggaaaaccagttcccgccggtggatccggcgcgtcgcgggaccctgcgccagatttcggtgctgaaggagtacgttgaccacctgatgggctatgtggacctggcgaacttcacccgtccgctgaaactggtggtgaactccggcaacggggcggcggggcacgtgattgatgaggtggagaaacgcttcgcggcggccggggcgccggtgagctttatcaaggtgcatcaccagccggacggccatttcccgaacggtatcccgaacccgctgcttccggagtgccgccaggacaccgccgacgcggtgcgtgcacatcaggcggacatgggtatcgcctttgacggcgacttcgaccgctgcttcctgttcgatgacgaggcgtcgtttatcgaggggtactacattgtcggcctgctggcggaagcgttcctgcagaagctgccgggggcgaaaatcattcacgacccgcgtctgacgtggaacacggtggacatcgtgacccgcagcggcggccagccggtgatgtcgaagacggggcatgcgttcatcaaggagcggatgcgccaggaagacgctatctacggcggggagatgagtgcgcaccattacttccgcgacttcgcctactgcgacagcgggatgatcccgtggctgctggtggcggagctgctgtgcctgaagaacagttcgctgaaatcgctggtggcggaccgccaggcggcgttcccggcgtcgggagagatcaaccgcaagctgggaaatgcggcggaggcgatagcccgcatccgggcgcagtatgagccggcggccgcacacatcgacacaacggacggtatcagtattgaataccctgagtggcgctttaacctgcgcacgtccaataccgagccggtggtgcgtctgaacgttgagtccagagcggatactgcgttaatgaatgagaaaaccgccgagctgctcaacctgttaaaagaggaatcgctttga

SEQ ID NO: 219543 - DNA, 786 bp, Klebsiella pneumoniae
atgttttcagcgatctatcgctaccgtggctttattattgacagcgttaaacgggactttcagtcccgttaccagactagcttcttaggcgcggcatggctgatcttacagccgatcgccatgatttccgtatatacattaatcttttctgagttaatgcgtgcccgcctggcgggcatggacggcccttttgcctacagtatctacctctgttccggggtgttaacctgggggctgtttacggaaacgctcaatagtctggtcaacgtttttctgaccaacgccaacattcttaaaaagcttagctttccgcggatctgtttaccaatcatcgtcactgcttcggcgttcattaacttcctgatcatttttggtctgttcgtgttgtttctgatcgttacgggcaatttcccgggcatgattttctttgaaatcattccggtgctgatcgttcagatgctgttcaccctcggcctcgggatcatcctcggggtgctgaacgtttttgtccgcgacgtcgggcagttcgtgaatatcctgctgcagttttggttctggtttacgcccattgtctacgtgtccaaaacgctgccggagtgggtctctggtctgctggcgtataacccgatggcgaccattatcggttcataccagaacgtgatgctctatcaccagagccctaactggctggcgctgcttccggtcacggtgctgtccgtcattctgtttttatttgcctggcgtttatttaaaaaacatgccgctgatattgtggacgagatttaa

SEQ ID NO: 219544 - DNA, 1296 bp, Klebsiella pneumoniae
atgagtatcaaagttcagcacgtcggcaaggcgtataaatattatccatccaaatggaaccgggtcattgagaaacttctgccgggcgataagccgcggcacagcaagaaatgggtattgaaagatatcaatttcagtattgaacccggtgaagcggtcggcattgttggggtgaacggcgcaggtaaaagtacgttactgaagctgctgaccggcaccactcagccgaccaaaggcagcattgagatccaggggcgtgtcgctgcgctgctggagctgggcatgggcttccatcctgactttaccggtcggcagaacgtgtatatgtccgggctgatgatgggcctgagccgggaagagattgagcgcttaatgccggagatcgaagcctttgcggatatcggcgactacattgaagagcccgtgcgcatctactccagcgggatgcaaatgcgcctggcgttcgccgtggccacggcctcacgcccggatattctgatcgtcgatgaagcgctttccgttggtgactcccgttttcaggcgaagtgctacgcccgtattgcggactttaaaaagcagggcaccacgctgctgctggtctcccacagcgccggggatatcgtcaaacactgcgaccgcgccattttcctcaaaaatggtgatatctgtatggacggcaccgcccgtgacgtgaccaaccgttatctggatgagctgtttggcaaatccgataaaaacagcgcgccaaaaagcgaaacggcaacctcttcagccagcggcgaaagtcagatgtctctcgatgagattgaagatgtgtaccacacgcgcccaggctaccgtccggaagagtaccgttgggggcaggggggggcaaaaatcattgattatcacatccaaagcgccggggttgattttccgccttcactgacgggcaatcagcagaccgatttcctgatgaaagtcgtatttgaatatgactttgattgcgtggtaccgggtttgttaatcaaaactctggatggcttatttctatatggtaccaactctttcctggcctcggaaggccgggaaaacatttcggtatcacgtggggacgttagagtatttaaattcagttttccggttgatttaaatagcggtgactatcttctgtcgtttggtatttcagagggaagcccgcaaaccgaaatgacgccgctcgatcgtcgctatgactccatcattttgcatgtaactaagagcatggatttctggggagtgattgacctgaagtcgactttcaatagttaccaatga

SEQ ID NO: 219545 - DNA, 2082 bp, Klebsiella pneumoniae
atgaagatgagaaaaaatcattccatgactactaatacacataaattggttagcgaattacctgaaatttatcagactatttttgggcatcctgagtgggatggcgatgctgcacgagactgtaatgaacggctcgcgctaattagtgaacaatatgacagcttgtccagagagttaggaaggccactacgggttctcgacctgggctgtgctcaggggttcttcagtttaagtttggcaagcaagggtgccagcgtattaggtatcgactttttgcagcagaacattgatgtttgtcaggcgcttgctgaagaaaatccacattgtgatgttaaatttcaagtcgggcggatagaagacattgtcagcactctggaagaaaaccaatttgatctcgccattggactaagtgtttttcaccacattgttcatctgcatggggttgctgaagtcagatcgctgttagagcgtttggcaaatctgacgcaggcgatgattctcgagctcgctgtcaaggaggaaccactctattgggggaaatctcagcctgaagatccgcgtgaacttattgaccaatgtgctttctatcgattgattggaagatttgacactcatctgtctaatatttcacgtccgatgtatattatcagtaaccacagggttattcttccggaatttaatcagccttttacttcatggcgcgacagtccttacaccggagcaggctttgcgcataaacagagccgtcgctattatttctcttcggagttcatatgtaagttctatcgttttagtacagtaagttgcttactaactgataaggagagcgagcgtaatcgtactgaactcgcccatgaagaagcttttcttaaatctccaccatctggcttaaaagtgccggcgttgtttactgcaggggggaatggagaagcgggatggttggtaatggaaaaaattcccggagagctgttaaacgacgttctggccagtgaacggcatattgatcgggaaaaagttatttccgatctcctcgaccaattagttattttggaagaacatggtctatatcatgatgatttcagaacatggaatgttttaattgacgataatgacagcgctcgtttaatagattttggttcgattggcgatgtacaacaagactgcagctggccagttaatattttccagtcgttcattatttttgtaaatgaaatattttgtgaaaataaatcctggaggggcttctggcgttccgcaccattaagtcctttccagttgcctgaaccgtattcaaattggttgacagcattctggaaacatcctgttggtgagtggagttttgctttactccaacaactcttttcaaccaaagatgctctaccggctgcgagctccattatggacgcttctgatctatgggtccgggctcaggagcccgtattgttggaaagtcaaacgcaaatacgcaatacggatgcgcgggtagtccgtctcgagtcgcaaatcaatgaactcacctccctgattaatattatgggtgagagcattcagacgtttgagaagcgtgagtatccgccacaagacgttactactaatgtacagccgcgtatcgagattgagcagagtaaagccgttgattcagaagagattatgcgacttcatacgcagctcaatgatgctcagcaagaagtagagaatctacgtcatgagattgctaaaattcattatagtcgctcatggaaaatgaccaagtggtatcggtacgctggcttacagtactatctgcttcgtcagtacggattcaaacagcgttttaagcatttactcaaacgagtgcttagcaacgtattttattttttgcgtgcacatccacgactaaagcagaaggtgatcaatctactgcgtacaattggaatttatgactttgcttatcgtatgcatcgtcgtatgaatcctggttcacataacccttatccaaacgacccacaataccagtcgcagactgaaaagcagatcttacatccagagttattgcctccggaagttaactcaatttttagcgagcttaaaaacaaaagataa

SEQ ID NO: 219546 - DNA, 2397 bp, Klebsiella pneumoniae
atgaatggcatgtattcgattgatagtataaatgaaattaaaaaaagctggggtgatatattaccgcaggaagaaatgtttattttttcagctgctggccctacagctcttcgcgactgtgaaaaccatccccggagtgttgccgccacactagctcgtgaacttgctattgctaatatcaatcccgacgttgtttttattattaatttctacgaaggttttgacgatagttataccgtctcaattcctcaaactacagtaccatggaaaacagtttgtgtttgtcacgatctaattccgttactgaataaagaacgctatctgggcgaaccaaacttccgtcagtattattatgataaactagctcaatacgaaagggcggacgctatttttgctatttccagatcatccatgcaggaagttatcgattacacatcgattccggcagaaaaaattattaatatttcatctggagtaagcgattcatttaaaattaaagattatactcacgatgaaatcaaagacttacgtaataaatatcatcttcctcaagagtttattctttctttggcaatgatagagccacgtaaaaatattgaagcgctgattcatgcatatagtttattaccgcatgccctgcaacagagttatcccttagttttggcctataaaattagcaccgatgaaaaggaaaggctgtaccgagttgcagagaactatggtttatctcgtaatcagcttatttttacaggcttcttaaacgatagtgaccttatcgcactttacaatttgtgcaaaattttcgttttcccctctatacatgaagggtttggcctgccgccactagaagctatgcgttgtggtgcagctacgctgggttcaaatgtgaccagtttacccgaggtcattggtatggaagaggctttatttaatcctctggatgtccccgacatttgccgtgttatgcaaagggccttgactgacagtgagttctactcagcattaaaagctcatgctccggcgcaggcggcaaagttcacatgggatcacaccgcgcagctcgcgttaaagggatttgagaggcttgtagataaggcttccgcatcagaacctctggatatcacaagcttcaccgcacacaccattaatagaattaaaaatattgcagaattaagtgaaaccgaacgcttacagacagcctgggcgattgctcgtaatagctttgctacacatcagcgcaagctgctggttgatatttctgttcttgttgagcatgatgcgaaaacgggaattcaacgggtttctcgcagtatacttagtgaattactgaaatctggcgttgctggttatactgtcagtgcggtttattatcgaccgggtgaatgctatcgctatgccaacgaatacctgaatacccattttaacggggcgttcgggcctgatgaacctgtactgtttaccaaagatgatattctggttgctaccgatctaactgcccatctgtttcctgagcttactgtccagctggattttattcgtctatccggtgccaaggtttgttttgttgtgcatgacattctgcctctgagaagaccggagtggagcgatgagggaatgcaacgcgtgttccccatttggttatcttgcattgcgcagcacgctgaccgcttgatttgtgtatcagcaagcgttgcagaggatgtaaaagcctggattgtggaaaacagccattgggtgaaaccgaacccgctgctgaccgtcagcaacttccatctgggagccgacctcgatgccagcgtaccgtccactggcatgccggataatgcccaggcgctgttagcagcgatggccgcggctccatcatttatcatggtgggaacgatggaaccacgcaaaggacatgcgcagacgctagcggcatttgaagaattgtggttacagggcaagaactacaatctgtttatcattggtaaacaggggtggcatgttgatgatttatgtgaacgtttacgtcaccatccacagctaaataaaaaactattttggctacaaaacattagcgatgagttccttacgaagttgtattctcagtctagtgcgttaatcttcgcatctctcggagaaggctttggcctgccgttgattgaagcggcgcagaaaaagctgccagtgattattcgcgacattccggtgtttaaagagattgctcaggaacatgcgtggtatttctccggtgaagcgccgtccgatatcgcgaaagcggtagaagactggttagccctgtacgagcaaaacgcgcatcctcgttccgaaaatatcaactggttaacctggaaacagagcgcggaatttctcctgaaaaacctgccgattatcgcgccagccgcgaagcaataa

SEQ ID NO: 219547 - DNA, 1146 bp, Klebsiella pneumoniae
atgaaaattatttttgctactgagccaattaaatacccgttaacgggcatcggtcggtattccctggagctggttaagcggctggcggtcgcccgcgaaatcgaagagctaaagctgtttcacggcgcgtcgtttatcgatcagatcccccaggtggagaataagagcgataccaaagccagcaatcatggtcgtttgtcggcgtttctgcgccgccagccgctgctgattgaggcgtatcgcctgctgcacccgcggcgccaggcgtgggcattgcgcgactataaagattatatctaccatggtcccaatttttacctgccgcatcgcctggaacgcgcggtgaccacgtttcatgacatctccatttttacctgcccggaatatcatccaaaagatcgggttcgctatatggagaagtccctgcatgagagcctggattcggcaaagctgatcctgaccgtctctgacttctcgcgcagtgaaatcatccgcctgttcaactatccggcggagcggatcgtcaccaccaagctggcctgcagcagcgactatattccgcgcagcccagcggagtgcctgccggtcctgcagaaatatcagctggcgtggcaggggtatgcgttatatatcggcaccatggagccgcgtaaaaatatccgcggtctgctgcaggcctatcagttgctgccgatggagacccgcatgcgctacccgctgatcctcagcggctatcgcggctgggaagacgatgtgctgtggcagttagtcgagcgcggtacgcgtgaagggtggattcgttacctgggctatgtcccggatgaggacctgccttatctgtacgcggcggccagaacctttgtttatccctccttctatgagggattcggtttacctattcttgaagcgatgtcttgcggtgtgccggtagtatgttccaatgtcacttctttgcctgaggtggttggcgatgccggcctcgttgccgatcctaatgatgtagacgcgattagcgcgcatattttgcagagcctgcaggatgatagctggcgggaaatcgccaccgcgcgcggtcttgcccaggcgaaacagttttcgtgggagaactgtactacccagaccattaacgcctataaattactctaa

SEQ ID NO: 219548 - DNA, 1116 bp, Klebsiella pneumoniae
ttgagagttctacacgtctataagacctactatcccgatacctacggcggtattgagcaggtcatttatcagctcagtcagggctgcgcccgccgggggatcgcagccgatgtttttacttttagcccggacaaagagacaggtcctgtcgcctacgaagaccatcgggtcatttataataagcagctttttgaaattgcctccacgccgttttcgttgaaagcgttaaagcgttttaagcagattaaagatgactacgacatcatcaactaccattttccgtttccctttatggatatgctgcatctctcggcgcggcctgacgccagaacggtggtgacctatcactcggacattgtgaaacaaaaacggttgatgaagttgtaccagccgctgcaggagcgattcctcgctagcgtagactgcattgttgcctcgtcgcccaactacgtggcctccagccagaccctgaaaaaatatcaggataaaacggtggtgatcccgtttggtctggagcagcatgacgtgcagcacgatccgcagcgggtggcgcactggcgggaaaccgtcggcgataacttcttcctcttcgtcggcgctttccgctactacaaagggctgcatattctgctggatgccgccgagcgtagccggctgccagtggtgatcgtcgggggcgggccgctggaggcggaggtgcggcgtgaggcgcagcagcgcggactgagcaatgtggtgtttaccggcatgctcaacgacgaagataaatacattctcttccagctctgccggggcgtggtcttcccctcgcatctacgctcagaggcgtttggcattacgttactggaaggcgcgcgctttgccaggccgctgatctcctgcgagatcggcaccggtacctcgttcattaaccaggacaaagtaaatggctgcgtgatcccgccgaatgacagtcaggcgctggtggaggcgatgaatgagctctggcataacgatgaaaccgccagccgctatggcgaaaactcgcgtcgtcgttttgaagagatgtttacagccgaccatatgattgacgcttacgtcaatctctacactacgctgctggaaagcaaatcctga

SEQ ID NO: 219549 - DNA, 621 bp, Klebsiella pneumoniae
atgcgtcagcatgcgttattacttgagcacaggtccgcactggcagtatcaaaccgggcgcacacgggcaaggtagcggtaaaagaaagtaatcgacgttggtgttccgacgggttcgagttccgttgcgacaatggagagaaactgcgggttacctttgcactggactgctgcgatcgtgaagcgctgcactggatggcgagtaccggagggtacgacagcgcgacggtacaagatgtgatgctgggtgcggtggagcgtcgcttcggaaaccggctaccgccgaccccggttgaatggctgacagataatggctcggcctatcgggctcacgaaacacgccggttcgcaaagatggtgggtctggagccgaaaacaacagcagtgcgcagcccggaaagtaacggtatggccgagagcttcgtaaaaacgatgaagcgggactacatcagcatcatgccaaaaccggatgggctgacagcagcgaggtaccttgcggtggcgttcgaacactataacgaatggcatccgcacagtgcgctggggtaccgttcaccgcgtgaatatctgcggcgtcggaccagtaatgggttaagtgataaatggtgtatggaaatatag

SEQ ID NO: 219550 - DNA, 366 bp, Klebsiella pneumoniae
atgatcgacgttttaggccctgagcgccgcagacgacgtaccccgcaggaaaaaatggctatcgttcagcagagcttcgagccaggtatgactgtgtcgatggttgcccgtcaacacggtgttgctgcaagtcagttgttcctctggcgtaagcaatatcaggacggcagtcttaccgctgtcacttccggtgaacaggttgttcccgcgtcggaactggccgcagccatgaagcagatcaaagagcttcagcgtatgttgggtaagaaaacgatggaagttgagttactgcgtgaagccgtagatattggccggcaaaaaaagtggatagcgcacgtacccttgttacctgagggtggcgaataa

SEQ ID NO: 219551 - DNA, 690 bp, Klebsiella pneumoniae
atgtcatcaataaatcgtttatgccttcttgacaaaaaagcgtttattgaaggacataattttattgttagcactactggcaaatatatcattcccacagagagagtgattgacactctattgattggatatgaatatgttctagtacaaaaattactttcccaatctcttaaaataccattgcctgtaacaggagctattgattttaatcatggcataacagttagcttacaaggagaaccatttcaactattcgataaaatgacatgggaagaaagaataacacaaaaaattatgcaactccctaaaaacatttcaccatatgtacataaagagatattctcaaagaggataaataattacctggggaaagagtatttcccggctcatattttacctcgggatgcctggtttgttattcgacatgctgaacttgataaagtcattgaaatcataaccaatagcagagtgcccccattatctgcaacgcgaatatcaacaccactatctcgttttttctggctggcctgtaaaaacaatgaagtcatccgtccattaattagtaaaccgtacaaactactatctattttcgaacaatgggcatctgacgaaggcattaccgacaggctcagtggtgatacgttaaaaactgcactcgtacgcggttcccccacatcaatgtcggattga

SEQ ID NO: 219552 - DNA, 807 bp, Klebsiella pneumoniae; identical to SEQ ID NO: 80288

SEQ ID NO: 219553 - DNA, 1188 bp, Klebsiella pneumoniae
atgcgttcggacaatcacgagctttcttctaccaggattcttatgctgggaattatttgttgtattgttgtggctaatatttattttaatcaatctgtcctgaatttaattgccggatcatttcccaatgaatggggagctgtttctttgatccccatggtcacccaggtaggctatgcggtgggcttattctttctgatccccctgggcgattatattgaacgtcagcggcttatcctgcgtcaagcgcaggtgcttttcctggcaatgatcggcatgatgttatccccaacggcgacagtgttggtgttcttctccttccttaccgggatggctgcaacagtagctcaacagatagtgccgcttgccgcctcgctctcaagaacttctgcacgaggtaaaaccgttggtacggtgatgagcggtgtcctggcaggtatccttgctggccgggctatcggaggccttattggtcagtatttcggctggcgtggcgtctttttgtccggcgcgatcatgacattgctggctatatttttcatcttacgcattttgcctactcagtcgttgtcaacgccaaagtttaactatctggcggtattacgttcattaggactgctgtggaaaaacgagccgcaggtgcgtggtgcaactcttacacaagcaatgctgtttgcctccttcagcgtgctgtggaccgtgctccctttctggttagcttatcgctacgattacggtgcagggataaccggcgccctagctgctttggggttaatcggtattctgtgtgcgcctctggcgggaagtttcagcgatcgtcagggaccattccgaatggttgtttttggtgtgatactcatgctgctagcctggactgttttttggagatggaacagtattgtgggtatggtggtgggcattctactactggatgcgggtgagcaatgtgtactgatagctaatcagcacacgatttattctttgcgtccggatgccagaaaccgtcttaatacattatttatgtgcgttatgtttattggcggagcatgtggctcactgactgccacctggttatgggagacaactcatagctgggcgctgatttcttcagcagggggcggactcgtgatcatggggatgttgatagccgtaaaacgtaaatattcaggcccctattcgggcacatag

SEQ ID NO: 219554 - DNA, 2775 bp, Klebsiella pneumoniae
atgctcaaaacagaagatctcaacactatgatatcaattgatgagattcactttgctgactggcaaatctggccacagctaaggattctgttacatcggggtaagccagtaagaatttctgccagagcttttgatgttctggttgttctggtgagtgccagaggtaaagccgtaagtaaagaatctttacttacgcaagtgtggggaaatgaaatcgtcgaagaaaataatcttcaggcacaaatttcagctatacgccgcatactgggacatgaccgccatctactggttactgaatttggttgtggttatcgctttaatatcaacaaatcgccaactgaaccgctctctaaatcaaaaatacctgagcccgctattaccccttttctagcgtcgattctggggcgtgataaagctgtgcaggaattatgcgccttattggatcaataccgtctggtgacgattacaggctcagggggcgtgggtaagactcgtctggcatgggaagtcgtcagtcttacacacacgcattttcctgatggaatatgtgtggctgaactggctcacatcaccgaagcatccagcttgctatccgttatttcacaagcgctccatcttccattagctgccattcataatgatgccgattcacggcaacagcttgcacggcgtcgatgtttactgctgattgataactgtgaacatgtaattaatgaacttgaaccagtgattacgttgctcctgcacctggctccccatatcaaactgttgttgaccagccaggtagcgttgcaggttgccggcgagcaacaatatctactaccaccattacaagttcctgagagcgaagaggctgatacccaagagttactgaatttttccagtgtccgcctctttatcgaacgcgggcaggcaaatcgacatgattaccatccatcagccagcgaactgtctttgattggcgagttatgccgtcatcttgacggtttgccgttggcgattgaacttgcggcctcccgtctgccagtcatgagtgtcaaagagatctatagccgactggaagaccgtttccagctattgagcaatacgcacagatctctggagcccagacatcagaaaatactgaccgcgctggagtggacttatcagttgctcaacacacgtgaacaacgattattttgctctctggggatctataccgatatgttcagtgtgaaatcagtaagcgaccttctgctgattaaagacaagcatcgctggcaggttgttgacgatctgcaaagattactggctttatccctgattcaggtcagtactcaggtaccagagacccgtttccgcctgctggaaaccatgcgccagttcgcatgcgataaactcaggcaacagggtgaatatactgttcttgaggcccgttttgccggttattataaagttctggtagaagaggcccaaggtgattggtttatgctgccaacgggacagtggcgtgaacgttatagccatatgcttaatgatttgcggagtgtattacagcaaacgttgactgagggggccgatccttctaaggggcttaagatattacaagcgatgacccctttttggattgaatattcactatacgatgaatgtcagcgccatatttatcctctgctttatgaaaatacttcgcaggtagtattaacgctacgccagagaatgaatctcagcgctgtagcaggtaaggcgtcaacctgggcaaaaggccctacgcctgaaacacattcagcctggaaaaccgcgctgacaattgcagaaaagctcgacgacaaagaaatacgtttacaggcacattacggattatggttgtattatctgcgtactggcgagttggataaagcgcttgagcatgcgcaatctatgtgcgagctagcacggtccattaccgacgaggaggcgatggcaaccgggctgcgtattctcggtgtatccctgcattttttgggccgtcatgatgtcgggcgtgattatctccagcaatctcttgattggtatgaacatggtgaattaagccactctttccgttttggtcttgatcaagagagcgccggtcaggcctttctgtctcgtttactctggttacagggtgagtataaggccgcgaaacagatggcatggcgcggtgttaaaaaagccgctcgtttgcagcatgtctgttctctttgctgtgcactggctgaaggcgcttgtatgacagcagcactggatcgtaatccgcgttgggttataaaggccgcaaactggcttattcatctggcaaaaaggcatgatttatatttctggaagacatacggcgagctgtttcttgtttgggccaaacagttcagtcataccgatgttagtcaaaccacactgtttagctcgttgcgggcgatgggattagattggcaatattcccccttgttgtcagaaattgataccgggttatcgctgagagccacccaccaggatcatgaaaactggtgcacgcctgagctgatgcgtctttctgccactcaattacctcctcagaagcaacgcctgctgttggagaaggccctggacaaagcgcgtcagcaacaggctcatggctgggccctccgtattgcttattcattggcgacattgcaggctgaagccggggaaaaatgggctgctaaacaattgatacaggacgctttacatgatgttgatgactcagacaatgcgacggatgtaagaagtgctattgcgctatgtgcccgaataggggcctga

SEQ ID NO: 219555 - DNA, 765 bp, Klebsiella pneumoniae
gtgttcgtctgggcgtacagctgtgcctcagcattgctgtgggtcccgttcagcctcattctgatagttgagggacaacaggaactcgactggagactcgctgtcggcgcagttatctcgtctgcacttcatatcgcttattctctaatcttgcaggctggctacgagcgcgccgaactgggtgttgtttatccgattgcccgaggaagtggaccagttctgacgatactgtttgcaacccttctcatgggagaacggatttcaccaggcgctttactcggcgcttttatcgttatcgctggtattttcgttgtcaccggcaatccgttcaggagcggaagccgaccactacagggaatgctttggggggcagcgacaggcaccgccatcgctggctatacactctgggacggttattcggtaatctctctgcacctggatccagtgcgctactacgccagcacactcctgctacagagtctgattcttacccctggtgcgatgcggcgacgaaatcgcattccaactgctgtacgtgtggatatcatcccaatccttatcattgctgtatgctctccccttgcctacatccttgtactgacagccatgcagagcatgccactggcactcgtcgctcctctcagggaaacatccattattgtcggctcccttctttcgtactggctttttcgtgaaaatcatctggcacgccggattgccggtgcagtggtggtgctgaccggcatcgcaataattagcctttga

SEQ ID NO: 219556 - DNA, 897 bp, Klebsiella pneumoniae
atgaacactgaaatcaatacagttgttgctgttttaggtccaggtgccatcggcacaacagtcgcggcggcgttacacgaagtcggccgcacaccattgctgtgtggacgtactccccgcgatagcctgaccttgcaagatggcaaccgctttatcaccgtacccggtccggtacagacgaatccggcacaaatcactcgcacggttgatcttatctttctggcagtcaagtccacacaaatcgacgcggcagcagaatggctcagggcgttgactggcccggagacggttatatgcgtgctccagaatggggtcgaacagttggacaggctcgctacgtactctctgcccggacagatcgttcccgctgtcgtgtggttccctgcgcaagcgcagtccgatggctcggtacgcttgcgtggtgaggcgcgcctcagcgtgccagacgcgccagcttcccgtgtagtggccgcagcgctgcaaggcacgtggtgctccgtagatctggccgcgaatttcagctccctggcctggcgcaagctgatgcagaatgcggtggctggactcatggcactcacgcaccgccgctcaggcatgtttggccgtgctgatatcgccaggcttacgctggcttatctgcaggaatgcctggccgtggcacgtgcagagggcgctgaactcggagacgaagtgccgcaggagatcctcgataagttccgggcggctcctgcagacatgagcacctccatcctcacggatcgagaagctggccgaccgcttgaatgggatatccgcaacggcgtcattgcgcgtcgcggccgggttcacagcattccaacgccgatcagcgacatcctggtaccgcttcttgcggctgcgagcgatggccctggttga

SEQ ID NO: 219557 - DNA, 348 bp, Klebsiella pneumoniae
atggccaataacaaaaagctgtatcagcataccctggtacggctttattcatttctgatggcttgccaacccctccaccccgacccgtcgctgcctgtagaaagctgttacacagcaacaacacgcttgcgccgtcagccctggcgtgccatttcatttgagagcaaggatcatccctactgccccagcgacgagaacggcatcaatgagaagctcgaacgtatgcgtctggagtttctggacgagacgtttcgcaatcatcgaaccgacgaacaatgcgatgccgatggcaagtccatgtgtgaggacaggctgcgcgagtgcgcccgatataccgaacgtagctag

SEQ ID NO: 219558 - DNA, 1323 bp, Klebsiella pneumoniae
atgtcccttaacgactcaaaaatccgcaacttaaaaccatccgcaaaacccttcaaagtttctgattctaacggtctgtaccttcttatcaaaccaggcggctcacgtcactggtatcttaaatatcgtataaacggcaaagaatcccgcattgcactgggtgcctatcctgccgtctccctgtctgatgcccgccagcagcgcgaaggtatccgtaagatgctgacgctgaacatcaacccggcacagcagagggcttctgaacgcagagcctgcacaccagagaaggtgtttaaaacagtggcgctggcatggcataaaaacaataaaaagtggtcgcagaacaccactgaccgtctgcttgccagcatgaacaaccatatctttcctgtaattggtcatctgtccgtcacggagcttaaaccccatcatttcattgacctgctgaaaggtattgaggaaaagggcctgctggaagtcgcgtcccgcacgcggcagcacctcagtaacatcatgcgccatgcggtccatcagggatttatcgacaccaacccggcagcaaatcttgatggcgtgacggctccccccatgagacaccactatcccgccctgccgctggagcggctgccagaattgattgaacacattgaagcatatcatcagggccgtgaactgacccggcttgctgtcctgctgacgctgcatctgttcattcgctccagtgagctgcgctttgcacgctggtcagaaattgatttcataaacagaatttggacgatacccgccacacgcgaagccattgtgggtgtgcgttattcagggcgcggtgcaaaaatgcgcactgctcatatcgtgcccctctcacagcaggctatagctattctgaaacggattaaggaaatatccggggcttacgaactggtcttccccggcgaccataacccgtacaggccgatgtgcgaaaacgcggttaataaagcactgcgccttatgggattcgacacgaaacaggacatctgcggacatggctttcgggcaatggcatgcagtgccctgatggagtctggcttatggtcgcaagatgcagtggtacgccagatgagtcaccaggagcgcaacaccgtgcgtctggcttacattcataaggctgagcatctggaagcccgcaaggcgatgatgcagtggtggtcagattatatcgatacatgccgggtcgcatacgtaccaccttttaacacagggcgggataaaaacaacgaagctgcatggccaataacaaaaagctgtatcagcataccctggtacggctttattcatttctga

SEQ ID NO: 219559 - DNA, 1878 bp, Klebsiella pneumoniae
atgagtcacaatgatattgttaccccggttgctacggttgacaccagccaatgtatgatcacctcgccctggtttgttcagaatacggaatacccaccggcagtggcgacgtataagccgctggtaaacggtgaggaggcctttgcggcggtatatcgagccatcgaaaaggcgcaaaaatcggtggatattatctgctgggggtttcaaccatccatgtattttattcgtgacggacaggcgctgcgcatcggggaattgctctgtctgcttgcggaaaaacaggttcaggtgcgtatactggggtgggaggcgccgtttaataccgccggggttgtcggcgaggcaaaccttcccggaaaggggatcctgcatcttcaggatcgcgccgggcagagcgcgacagacgaacaatatgcttttgaccgcgattggtttacccgtcattcatatagtgacgatctgctggattccagcaactttttagccagcacaatcaataagcagttcaatcagtggattgtcaatcccctatttgtgggccgcgggtttaacaaagtagaacgtgcggaaatcgcctggcgggcgagatatcaggctctcgataaagggctcagtgccagcgcggtggggataatgacgctagcgccatcccatcatcagaaaacggtgttggtggactatgaattacctgaaagcgccatcggttttgtcatgggacacaatatgctcgatgagtactgggataccgatgcgcactcttcccagaatcggctcgggggcccggccccctggggacctgatcaaggctctcgcggctttttaccccggcaggatatttccagtcaggtgacgggacccattcttgaacatctgcacgaaaattttgccaaagcatggtgtaaggaaaccggggaggaccttatcaaaaagcgtcaggcccttgagatggcgaaacgccttaaaccgcggaaagagtgtggtaccctgatacttgcccagctcctgcgcacgcagccgcaggagaataaacgtgatatcgaaaaactctatctgcaggcagtcaacaatagcacacagtttatctatattgagaaccagtactttcgttggccaccgttggcggaagttataaaaaaagcggcgcacgtgcagattgataaaggacgaacgccagaaaaagacggatcgttacatttatttgttatcaccaatgtcacggaaggggggattggggcgggtacggtaaatacccagcgtatgctggaaagcctggggcgcgccaatacgattccaggcgtgacccggtcccgaatgatagagaagatcagggaggaagatccaggcaaattcgcctctctcgcctggtcccgcaatccggccacccaggcgcagattaatgaagagtttatccgccggcagaaagaatatgaagcaaagctaaaacaagcagaagagttaaaagatagcgatattccaatggtaccaatacccggcctgaaaatacatatctgctcactggtggctcaggactctcccgtggataactggatgccagtttatatccactccaagctgatgatcattaatgacgttttcacaacacatggttcggcgaatattaatacccgcagtatgcaggtggacagtgaaatgaatattgcacatgagtggggcagtgtgacccgggatttaaggcgacgtctgtgggggttgcataccagcgggaaaggcgtgcaggacaatgcttctgatgcgtttgatgcatgggaatatattctaagtgaaaataaaaaacgccagcaaaaccatcaaaagcctattgccccgctgattgcgttttattacgccaaaaacgaacttaaggatctggattga

SEQ ID NO: 219560 - DNA, 150 bp, Klebsiella pneumoniae
atgaccaaggcaaagaatattgaatttcgactgagcaaacttgagaaagggccagacgagaacgttctggccatcatggagataaggtcgagagctattgcaggtagcttgctgaagcagatttcctgccaggcgttgaaagatcgataa

SEQ ID NO: 219561 - DNA, 285 bp, Klebsiella pneumoniae
atgatcgatcattactatgtaactcatgctcaactcctggcgctgagaaacgttgttgcttttattgtgcaaacgatgcctgaagaacaaaaagagagtgtccttcaggttttgaaaaaatttgctgaaatagaattaatggatggtatcgacgcgccgcctacgagtgatatcaccccgaaaacagttgagaagttaaataaagcctacaaggcaatcttcactgacattatcgatctttcaacgcctggcaggaaatctgcttcagcaagctacctgcaatag

SEQ ID NO: 219562 - DNA, 273 bp, Klebsiella pneumoniae; identical to SEQ ID NO: 190774

SEQ ID NO: 219563 - DNA, 252 bp, Klebsiella pneumoniae; identical to SEQ ID NO: 190773

SEQ ID NO: 219564 - DNA, 201 bp, Klebsiella pneumoniae
atgttgacagtaaaagtgatgtcgcctggcggcggcgaagaaatccatagcggcctgagcgttggtttcaaccccaatcagcagagtatctcagtgtctggaatggaccagaacgtgttcctgaagcagggggaggtggcctatgtgatgaacgcaaacggcaagaccatttcccgttacgaacacagggcccagcagtag

SEQ ID NO: 219565 - DNA, 279 bp, Klebsiella pneumoniae
atgcttttatctcttggaatgaataaaaacgacgtcatgcagatcatggggtcgccacgcaggacggatgtgaaccaggaacgcgaacgctggatatactggaataaggctctctatggttacacaatcattgataacgaacaattggctaacgatcgactggttataacgttcgttaatggtaaggtcaccaagtggggccagcaaacgctgactgatgacataatggagtcatcacaaaagagtgcacaggcttatgctgaggcattcaagaaatag

SEQ ID NO: 219566 - DNA, 186 bp, Klebsiella pneumoniae
atgagctttaaacatgaacttggtcaggtggtaaccgttactatcagtgaagaaaaagggcatatcaaagctcgcgcagaatatacacatggccccaatcagtaccttattcattatcgtgcagcagacggccgagctgtagatgcatggtttgaagaaggggagctgtctccatcagcactgtag

SEQ ID NO: 219567 - DNA, 492 bp, Klebsiella pneumoniae
atggatcaggaaatcgctactttaaaactcaatatcaaccagcttgccgggattactggcgtacaccggcagaccgtcgctaccaggctaaaaaatgtcagtcccgcccagggaagcaacagcaaacttaagttgtatcttgtcaccgatattctgacagaattaatgatcccgacggtttcctcatcgaatcttgaagagatgacaccccctgatcgcctcgctcactggaaagcagaaaacgagcggttgaaatttgaagtagataccaaacaacttatccccgccgaagacgtcgcacgtgaattttcaatgatggcgaaagccgtcgtcatggtacttgaaacacttccggacattcttgagcgcgactgtgcacttacgccggttgcggtatcacgcgtgcaaagcgtgattgatgacctgcgcgatcaggttgcccaaaaagtaatggacgctgaaccagaggaggatgagccagaggaggactga

SEQ ID NO: 219568 - DNA, 2109 bp, Klebsiella pneumoniae
atgacaaaacgggcatctgccagggggatacgccgcgatgtctccggtattcttcgtgccccacgtcgtatgcaggtggccgatgcggtcagctcatatatgcgtgtgccgatgggggcgggtaactccgtaccatgggaccccaatctggccccttatattattgagccgatgaattgtctggcatcccgtgaatatgatgcggtggtgtttgtcggaccggcccgaaccgggaaaacgattggcctgattgatggctggattgtctacaacatcgtttgtgatcccgctgacatgctggttattcaggtctccgaagagaaagcgcgtgaacattccaagaaacgcctcgatcgcacattccggtgtagtccggaagtaaaatcgcgactcagtccgcgtcgtaacgacaataacgttcacgaccgcaccttccgggccggtaactatctcaaactgggctggccgtcagtcaacattatgtcgtcgtcagactataaaagcgtggcgttgactgactatgaccgctttcctgaagatatcgacggggaaggtgatgcattttccctgggttcgaaacgtaccactacgtttatgtccagcggcatgactctggttgagagttcacctggccgagatattcgtgacacgaaatggcgaccaaacaccgcacatgaggcaccgccgactaccggcatattatcgttgtttaatcgtggtgaccgccgccgcctttactggccgtgtccgcattgcggagaatattttcagccggaggtagccaatatgacgggctaccgggattcccttgatcccgttgtggcaagtgagtctgcatatctccagtgcccggcctgcaaaggcaggatcaccgcagatatgaaacgtgaactgaatatccgccatgtctggttacgcgatggagaaaaaatagatcgtgatggcaacagatttggggagccgcggcgatcacgcatcgcttcattctggatggaggggcctgcggctgcatatcagacatggtcgcagatgatatacaaattcctgactgctgagcaggaatatgagtccacccagagtgaagagacgctgaaaacggtagttaataccgactttggtcggccttatctaccccgagccagtctcgaacaacgtaagagtgagctgctcgaacgacgcgctgaagacgtgccgaagcgatctgtaccagatggtgtgctctttatgactgcaaccgttgatgtgcagggcggtaaatcccgtcgtttcgtggttcaggtgactggctacggtgagcagggtgagagatggctggtagatcgctacaacatccgccagtctctgcgggcaaacgagcacggtgaatgttactccatcgatccggcaagttacccggaagactgggatttacttttgtctgacgtgttcgaaaagtcatggcccttagcgagtaacccgtcaaaacgcatgcggctcatggcgatggctgtcgattccggcggtgaggatggtgtcaccgataacgcatataagttctggcgtaagtgccgccgggatgggcttggtaaaaagattttcctcttcaagggcgacagtgtccgacgctcaaaactaattacccgaacatttcctgataacactgacagatcaactcgccgggcaaaagccgctggcgatgtgccgctttaccttcttcagactgatgcgctgaaagatcaagtgaataacgccctgtggcgagaatcacccggcccgaactatgtgcatttccctaaatggctcggcagctggttttacgatgagctgacctatgaggaacgttcacccgatggaaaatggagcaaaccgggccgaggtccgaatgaagctttcgatctactcgtttatgccgatgcgctggccatattgcacggatacgaaaagatcaaatggccggatgcgcctgaatgggcgaggcggacaacgtggatcgaagaaagcacgccggaaactggcgaagtgtcacccacgttatcagcaaaaacgacccatagcagaaaaaaacggaaggcaaataagccggatgttgaaaacaatccgtggactacatcatcaggaggctgggtgtga

SEQ ID NO: 219569 - DNA, 216 bp, Klebsiella pneumoniae
gtgaaacaaaccgatattgaatcaattatccagcgttataccgatgcggaaatagctgtgctggatggaaagtctattacattcaacggacagcagatgacgctggagaacctgtccgaaatccgcaaggggcgtcaggaatgggagcgccgtcttgcatccctgttggctcaacgtcacgggcgacctggttataaactcgcgaggtttccatga

SEQ ID NO: 219570 - DNA, 1500 bp, Klebsiella pneumoniae
atgagcctgttagatgatgcgattggcgtcttttcccctggatggaaagcggcgcggttacgttcgagagcaatgatacaggcatatgaagctgttaagcctactcgtacgcataaggcccgcagggaaaatcgttccgctaaccagcttagtcagatgggagctgtttcacttcgagaacaggctcgctggttggacaataaccacgatctggttattggtgtattcgataagctcgaggaaagggtagttggagctaaaggaattattgttgagccacacccggttctaaaaaacggaaatatagcaaaaaaactggcagaacaaatcagaacgaagtgggccgaatggtcagtcagccctgaggttacgggacagtttacccgcccgatgcttgagcggttgatgctcaggagttggctcagggacggggaaattttcgctcagatggtgagtggctcagcgcagggacttgatccagtggctggcgtacctttctggcttgaagcgctagaggctgattttgtgccgatgaccaacaatgagtcacagcaactttgtcagggggtttatgtcgataactgggggcgcccgaaaaagtacctggtttataaaagtctgcctgttaccggccgtcaattggatacgaaagatgtcgatgccgggaatatgcttcatctcaaatttacccgccgtcttcatcagacccgagggacctctctcctttctggtgtgctcatgcgcctcagtgcgctgaaagaatacgaggatgcggagttaacggcagcacgtattgcagctgcgctggggatgtacataaaaaaaggagacgggcaaagttttacggacgataccaccaaagacaatcgtgacgtaatgattgagccaggcattatttatgatgatctgctgcccggtgaagacatcgggatgatcaagtccgacagaccaaaccctaaccttgaaacattccgaaatggacaattgcgcgctgtcgctgccggtgctcgtctcagcttctccagtacagccagaaactacgatggaacatacagtgcccagcgccaggagttggttgaatcaacagatggttatctaatccttcaggactggttcatcggcgcaatcacccggccaatgtaccgaaactggttaaaaatggcggtggcttctggcgaaattcagctaccacgtgggctggatatggcgtcgctttacaccgcagtttattccggtccggtcatgccgtggatcgacccagttaaagaggctaatgcatggaaagcgcaaatccgaggaggtgctgcgacagaatctgactgggtgcgagctagcggacgcaatccggatgatgtgaaacgtcgtcgcaaggctgaagttgatgataaccgcgaactgggactggtgtatgacaccgatcctgcaaatgataaaggaggcaccagtgccgaagtcaaagaaccggacgccccggcgtccgaaagccagcgcaagaagtaa

SEQ ID NO: 219571 - DNA, 2016 bp, Klebsiella pneumoniae
gtgccgaagtcaaagaaccggacgccccggcgtccgaaagccagcgcaagaagtaattcgtggtttcgtatgcaggccagcgccgacaatcaggtagaaatttatatctacgacgagatcggctactggggcgtgaccgcccggcagtttgttaacgaccttaaagcgcttggtgatgtgacccatattaatcttcatatcaattcgcctggtggcgatgtctttgacggcatcgccatttttaatgctcttaaacatcatggtgcgtcaattaccgttcatatcgacggtctggccgcgtctatggcctcggtcattgctatggtaggtaatccggtcatcatgcctgaaaacaccatgatgatgatccataagccctggggctttgctggtggtgatgccaacgatatgcgtgactacgcagagcttctggacaaggttgagtctgttctgatccctgcttatgcagagaaaacgggtaagagcgccgatgaaatagcggcgatgctggaagatgaaacatggatggacggcaaagaatgcgtcgctatgggttttgccgaccaggtcaccccctctcttcaggctatggcctgtatccagtctaaacgtattgaggacttcgaaaagatgccaaaaaatattcgcaacatgttaacgccgccgcgagctaccacgcaacgcgatccccagcaaccacaaatgcagcagccggtggtgagccaacctcccgtaattgacgaaaacaccattcgtgctcaggtaatcgctgagcaaaaggatcgcgttaatggtattaacaacctctttgcgatgtttggtggtaaacacgccgaactgcaggcgcagtgtgtagcagatatggattgctctgtcgatcaggctaaagacaaactgctggcgctgctgggtaaagatgcttcaccatcggagaaaaccacgccagcgcatattcatgcaggtaacggtaattttgtcgccgatggtattcgccaggcattgatggcgcgtgccggatttgaagatcaggaacgtgacaatgtctacaacggcatgaccctgcgtgaatatgcccgcatggccctgactgagcggggaattggcgtatccagctataacccgatgcagatggtagggctggcgctgacgcacagcacctctgattttggcaacatccttcttgatgtcgccaacaaatcgattttgcagggctgggacgaagctgcagaaacctttgaactgtggacaaagaaaggccagttgtcggactttaagacagcgcatcgtgtggggatgggcggattcccgtctctgcggcaggttcgcgaaggcgctgaatataagtatgtgactaccggcgataaaggtgaaaccatcgcgctagccacctacggagaaattttttccatcactcgccaggcaatcatcaacgatgatctgaaccagctcacagatgtaccgatgaaaatgggccgtgccgctaaggcgactatcggtgaccttgtttacgccattctgaccaaaaacccaaaactctcagatggtaaggcgttattccacgcagaccacaagaacctgtccaccggtgctatttccgtcagcagcctggacgatgcacgtaaactgatgcgcctgcagaaagagggagaacgatctctgaacatccgcccggcatttatgctggtgccggtcgcgctggagacactggctaaccagacgattaaatcagcgagcgtaaaaggggcggatattaacgccgggattattaacccgatccagaattttgcagatgtgattgcagaggcccgccttgacgaagctgacgcaaaagcctggtatctgatggcggcaaaagggacggacaccatcgaagttgcgtatctgaatggtgttgatactccttacattgatcaacaggaagggtttaccactgacggtatcgctacaaaagttcgtatcgatgctggtgtggcgccgcttgattaccgcggcctggtgaaatccagcggccagtaa

SEQ ID NO: 219572 - DNA, 327 bp, Klebsiella pneumoniae
atggctaaaaattatgtgcaagacggcaaaaccatccccgtgaaaaattctggtaccgaggaaattctcagtggtacacccgtttctttaggcggaatgattgcggttgcaattaccgatattcaggcaggtgatgtaggcgacggattcgctgaaggtgtctttcttttacctaagctgccagctgatgccgtgaccgccggggaaaaggtatatctcaaagctggaaatgttcaactggatgacaccgatgcggtgttagccgggactgcctgggaggatgctgcggcaggcgttaccgtcctggaagtcaaaatcaatggctaa

SEQ ID NO: 219573 - DNA, 294 bp, Klebsiella pneumoniae
atggctaatgcctttgacaatatggctgacagaatggatgaactgacggcgaaaaggctgggcagaacggtgactattaatggcgatgagcatattgctgttgaaagtcacctgctgcctgagctggggccggtcgctggggatgggattaacctggttatcttcagcgcaggctatcagtcggcgcggggagatgaggttatttataaaagtcaggtttacaccgttacccgatggctcctctttaatggtaagccgcaaatctggattgaggaggtcacaggtgacgattaa

SEQ ID NO: 219574 - DNA, 399 bp, Klebsiella pneumoniae
atgattcacccgcaagtacgaaaagctgttctggataaactgaagtcaatcaaccccggaaaaatattctggtatgacggtcggccagctttcctggctccagaagagttacctgcggtcgctgtatatcttactgatgcaaaggcgacgggcggcagtattgatgaggaagagtgggaggctgtccttcacattgaagtattccttaaagcaactgctaccgatagcgagctggataaatggatggaaacccgcatctatccggccatggctgacgttcctgagcttgccagtatcgttgaaaccatcagcgttgccgggtacgactaccaacgtgacgatgaagccactacatggggctccgccgatctccaatattccctgacttatattatgtga

SEQ ID NO: 219575 - DNA, 483 bp, Klebsiella pneumoniae
atgccaactccaacacctaccacgccgacgaaaggtgccgggacaactttttggatttataccggaactggtgatccctacgatgatccgttaagtgatgtcggctggacacgaacggcaaaggttaaggaattaacacctggggaactgaccgcagagtcctatgatgattcctatattgatgatgatgcgcctgactgggatgcaacagctcagggtgttaagtcagcgggtcaaaccagcgtaacacttgcctggaaacctggtgaatctggccagaaggatctggttgactggtttatgagtggtgatgaaaaatcttacaaaattaaatatccaaatggggcagttgatgttttcaccggctgggtaaatagtttgggtaagactatttcacgaaacgaagttattacccgtagtgcacaaatcaccaataaaggtaaaccttctctggctgaagataacgcatcgactaacccttaa

SEQ ID NO: 219576 - DNA, 396 bp, Klebsiella pneumoniae
atgacttatcttaaaaaagacacattaaatcccgatggtgagaatattttactgtttgagttatcggcttacagtagaatgcaatatattgaatttatggttgaagagaggaagtcattaccgtcagaggaaagcacacctgaagaaaactttaaattggccaccttgttgactatgcgtgatcaggccatgctcgttgcattgtccttgagcgaggctgatgaagagcaacgtgaagggaaagatattttccctgaaattatacgaaaatatccaccagggttattgggcagcgctgcattacttgtgcgtatgctttcagggatgatcccaccagttaataatgacactgagaaaactgaagaagaggaagagccagatttggaaaagtcctga

SEQ ID NO: 219577 - DNA, 2697 bp, Klebsiella pneumoniae
atgtcccagccagtgggtgatctggtcgttaaaattgacggcgatagcgcaaaatttgatgaggaagttgctcatctgaataagcagctgagcgggttaggtagagccgcgaacgacagtacagcgcaggtcaccgcagctttcacgcggcaggagcgtgctgcaaaacgtgctggtatttcaatcggccaatacaataatgcaatgcgtatgttgcctgcgcaacttactgatgtcgcaactcagttagctggtgggcagagcccatggctaattttgctccagcaaggcggtcaggttaaagactcatttggtggcctgatcccaacatttcgaggattacttggagctgtaagcccgttggccgttggggttgcagctttgaccgccgcaggtgccggaattggatatatcttctatcagggaacgtcaaccctttccgattttaataagacgttgacgctatcaggtaacacggctggtctgactaccgacagaatgctggcactggcaaaatcgggacagcaagcaggactcacctttgatcaaaccactgattctctgactgcattaattaatgctggcgtgggggcgggtgcgcgttttgatgaactaagccagtcagttgcaaaattttctacggcatctggtatccccattgaaaaggttgcggaagcgttcgggaaactgaccaatgacccgacatccggcctgattgcgatggcgcaacaatttcataatgtgacagccgagcagattgattacgttgctcagttacaacgttcaggtgatgaagccgctgcacttcaggcggctaatgatgcggcgacgaagggatttaacacccagactcagagcctgatcgataacatgggaacgattgagcgctctgctgattcgttgaaacgcgcgtttaaatccatgtgggatgctgctctggatttggggcggcctgacaccgcaggggagatggtaagcaaggcgcaatcagcttttaagcaggctgatgacatctggaatctcaggaaaaatgatcgctatgtaaacgatgaagccagagcccgtttctggaatgacagggagtcggcccgactggctcttgatatggcgcagcagcaagcaggtattgccaaagccagcgcagcagcggccgaaaaggaagcggaggcagaatctgaaaaacagaaatatgccgctcaagcacaagccaattatgctaaatcgcagactgcgcttgaaaagtatactgccaggcagaatgaattaaataaagctctgaaagaaggacatatcctacaggctgattacgccatcaatatggccgcagccaagaaagaatatgaggccaccttaaaaaaaacgccgaaaccaaaaggcgttaaagtttctgctggtgatcgttcttctgatcagactgatgctgaaaccctgcagttgatgacgcagttaaagttgctgcaacagcatacggggcttaacgataccatcagtcagcaacgcaaaaatttgtggtctttacagtcaaaattcgcggttatagaagaggcgtcgaaaacacgcgcgctgagtaaagaggaacaatctttactcgccagcaaggataaggttctggcgcaggctgaggttaatgcgaaacttggcgatcagatcgttgctcaggaacgtcttaataagcttcaggataactcgttaaaatatgttactcagatgcaggaaaagactgctgcactgacagatagtgctgggttaagtgacaaggacgcacaacgtaatagagagagggcgcaattaaggcagggatggaaaaatcaggggggaagcctggaagatgaagggtatcagaaagagctttccgcacttgagggttattacgctgcacaggatgaaatgcgtaataactggttggccggcgttcagtcgtcatgggaaaactatgctgacatggccaccaattacaatcagatcgctgcggatacaaccaatactgcgctcggaggagtaacaagcaatctccagcaggggttatatgatcttgcaactcagtctgaagatgctggcgatgccctgagtaacatggttgaaggttttggtaaaacagtcatccagaccctggcccagcttgcagcccagtggttggtataccagggtgtacagttgcttgtcgggaaaaccacgcaagcttcggctatcgccccaatggtttctaatgcgcaggctacggcattgcaggctcaactggcagcatatgcatctactgcggctattccaatcgtgggcccggctatggctcccgcggctttgactgcagctattggtgtcacagagcctcttgttgctgcgatctcaggattagccctttctggcatggcgcacgatggtatcgataaaataccggaaacgggcacctggcttttgaaaaaaggggagcgtgtaacaacggcaggaacatcagcaaaactggatgccactctggaacaggtgcggaaacagcgttcccttgccggaaacccgctgcatgttgagttcaataacacctacaccgggaaaccggacgatgcaatggtccaaatgttggatcagcggcagcgtgcatctgaaaaaaggcttaagcaatattttacttcccaggttattaatccaactgagaattatggtcgatcacttaaatcagtttatccggggaggcgtaagaaataa

SEQ ID NO: 219578 - DNA, 483 bp, Klebsiella pneumoniae
atgacagcgattaaccgcctttatgcgtcctccgggtctgaggtcatcattggtacattgcagatcgatattggcggccatacgcattatttgtgtgagggttatgaggacattacggcggttaccgaggggggcgaaaccgtaacgtttattgcctgtgccattgtcctatcccttcctgccagaaacgaagacgggacgcaggacctgaagtttatgctgtgcaacatcgacggcgttgtatccacggctattcgcaaggtcattgatgccatgtccactgccagcatcacattcaggaaatacatttccactgaccttaccgcgccagcagagccgccttacgtcatgccggttaaaggaggctcctggacaccgctgactgtaaacgtcactgctggttttaaaaatatgctcgattatgcctggccacgtgacaggtacacgttgacgtacttccagggtcttcgttacacacgatag

SEQ ID NO: 219579 - DNA, 381 bp, Klebsiella pneumoniae
atgatcaacattgataaatacctgaccgtccgctggcagatgggcggccgcacttttcctgttctcgactgctacggcattgtacatgaggtccgccgggacctcggattgcctgaatggcctgcgtttgaaggtgtgataaaggatggcgatgaaatgcatattgcctgcaataacttccgtcaaaacgtagtgcggtgcgaaccctgcccgggtgcggttgccgcctgctatatgggtggggtaatcggtcatctcggcatcgtggttgagctgagcggcctgctttatgtgatggaatgcaatccccggcgcaacgtgactattcttcccctggcgcgttttgaacgtcagtttctgaaagtggagtattaccagtga

SEQ ID NO: 219580 - DNA, 3069 bp, Klebsiella pneumoniae
gtgacaatccgcctttacccgtcgcgtttgcctggcgaaccgctggagacgcatgaacaccgggatacgaccatacatgactggatgctccagcatgtcgataactaccgtaacgatatggtgcagcgtgttacgtttgaggtgaatggtaaaccggtcccaccggcagaatggcctttatgctttatcagtgctgagagcgatgtaaaagtttacccgatccctggtgagggggtgacggcaactactatcgctgcctgggcagcggcggccatcgctgcagcctcggctgtgtatgtgctgatcaccatgtcgaacatggataaaggcggctattcatcctccagtggtctggggctggatttaaacccagccaaagcgaaccaggcgaaacttggcgacccaatccgcgaagtgtttggccgttgccgtatctatccagattatgtcgtacagccagtgacgcgctttaatcctgatgatccaacgcgaatgaccgtcgaaatgatggtttgccttggaaagggtaatttcgcgtttacgaatggtgatatccgtgtgggttcaacacctatttcagcattaggggactcgttcagttacaacgtttattcacctggagcagatgtttcaggagatcggcgaagtgaaaactggttcaactcgacagaggtaggtggtacttccagcgggagtgggcttgatatggcgcagacctctccagattcgacagatatcaacgccgatagtatgaccgtttctggcgcatccgtgacgtttaacgggctggatgatggcaacgatgatgacgatgaaggcaatgcgttgcctgagtcgtgggttgagggggccattgttacgatcgtcgcaccgatgaattttctggtttcaacctcgtcgggatatagcgttctcgccagtaactctctgggtgaaattaatccctatccggggatgccggttaccctggaaatcaacggcactgaatatgaactggttattgcaacttatacggcaaagcaggacgcgatacccggggtgggtggaaatgcggccagcctgaaagcaaatgcctccccatcaacatatgattactccggtaccggccagacttttacgatcacctggcagggacatgagtacactatttccctcgttgcagactatgtgaatatgcccggcctgctggcggtgataaacgatggcctgaccgggtcaggattactggcgcaggatagcggcggtgttgtgctgattgctgaggcatcaagcccctggctcggaggaaacattacctcatcatcgctaccggtagccgtttttggcgacagtcctgtatttacctccggcaccgcgtccagcggaggcagtccggcaataactgctaacgttacgctggcgtatgggagtgcaaccggagtggcattttccgggataccggagggaacacaacgcctggcgctggctcaccgtggcaacgagtaccgcattgcggatgcggacggtacgaccgcaacggttcagcggctgattgatggagtggttgatccttcctggtctggcttctcaccccgcacgatgattgactatcaggctacagggatcagcgacaacaatacctggatggggccgttccttgcctgcccggaatctgaagtggtggacgcatttgaagtgaatttttcatttccttccggtatttgcggattcgacagcaaaggcaaaaaacgcatcaggcattgtgagtgggaaatacagtaccgtgtttatggatctggctctggctggacgagcaggcagggggtttacgcgcttaaaaatatcaacgggttgggttttacagagcgttttgatctctcttctcctgggctggttgaggtgcgctgccgtcgccgcaatgagcagggtagcaataacgcgcgtgactcgatgtactggcaagcgttacgtggtcgtttgttggctcggccaacatcctatgctggcgtcaccctgatgggggttacggttgagacggggggcaaattggcggctcagtctgaccggcgcgtaaacgttgtggccacgcgcatttatgactctggcgtagcccgtagtatctctggtgcgctttatcacgtcggccgttctcttggtatggaaatggatactgaggcaatagatgccctggagcagacttactggaccccgaacggcgagtatttcgattttgccacgggtgacagtatttctgcgctggaaatgcttcagaaaatcgctgcagccggaaagagttattttctgctaaatacccagtctgttgcatcagtgggtcgtgaaggcgttaaaccctggaccggggctatcacccctcacgagatggtatccgagatgcagaccgatttcatcacggtgactgacgacgattacgatggtgttgacgtaacctatatcaacggctcgacctgggcagaagagacggtgcaatgccgtctgcctggcaacccaacgccgctgaaaatagaggcataccgggctgatggtgtaggcaatcctgatcacgcatatcagattggtatgcgccgactgagaaaataccagttgcagcgcatgacgcataaaacgacgacggagctggacgcgctctgttacaacgtcggggatcgtattgtgttgaccgatgatatccctggcagcaacaccatttcgtgtatgattgagtcgatggctactgctggtggggtgaccacattcgatgtgtcggagccgctggactggacttttgcaaatccacgcgtctatctgcgttatcaggatggaaaagcatcacggctgtttgaagcatcacccacaggcgacaactatcaggtatccgtcccatatcaatctgagttcgctgatatcctgctggatgatccgataattgaacctccccggttaattttctgtagttctgagagcgacctgtatcacgccattgtgtccgagatagtgccacaggacgatggaacctgcgagataactgcccggcaataccgcgctgaattttacgactacgacgacgccacataccccggcgacgtcgcttaa

SEQ ID NO: 219581 - DNA, 1677 bp, Klebsiella pneumoniae
atggcctttaacccggagctggggagtacgtctcccgctgtgctgctcgataatgccgagcgcctggataagctgctcaatgggcctgcgctgactgaaccagatcgcgctggcgatgatctggatacctggcgcggaatgatggcgaagagcaacgcagctatcgacgatgcgcaaaacagcattaccatcctgggattgccatttgccacactcgcggatgcacaggctgcggtagatgccggaaaaattccagatggtgctataacatggatacgaaatgatgatgcgtcgctggcagacgagtacatcaacaacggtggtattctgtcagctaccgggcgaaagatgccgtcgcaggaatatatagatgatgggtttacccccggcagggttgttgaaagcgatacggatgtcgctatagcgctaacgttcgcggaaggttcgcgctcctggcttgagtcagattatgacggcgggcctactgagcactctgcaaaattgattggcaaggctattaacataggtgattcaccggattcggataaaaatgtcgctatagcgctaacgttcgcggaaggttcgcgctcctggcttgagtcagattatgacggcggcccaacggaatacgccgcagagaaaatcgcagaggcaataaactggagtcccccggagtctgaaagtcaaaccgtaccgctatctaccgcgccggacggaaccgcccgcgaatacccaacgttcaaacgcctgagcgcgccgattattcaattctctcaacaatctgcacctacggtttactggccatggatagtcaataaatctgcatggggcggcacaggttttgcgctcttctacagtaccgaccactcagcgacacacgatccgtccggtattttcttgtttgaggcggacgatattacaggcccatgggttaatagggggaaaatatatcgtgatgacgctggggggtggcaaaccgaaacgccgtccgttatttatgaccctgttagcaataaagttcttatgtattaccagcaagctggtgtgcccggggctatcgggcagcagcaaacctgcctcgctacagccgaccccgcagacctcacggcatggacgcgcgtcggcgtagtcctggataaagaatttcttgagcaaccgggtgatgggcattgcggttatttccgacctttttcatataacggccagttgttcgggtacagcctgtacggcgggacgaattactcaaatgcggcactgtggacgtccgatgacggcggttacacgtggcagcgcgacgggcggctaattggctggatgcaggataaatgccgccacctggcagtagcgctaaacgcagagccgcaggacgtattgctgacaatgtacgagggtgacgtactcaactggcgcggtaaaccgtggtgggttggggtttcaggaaaagcgcagtcgggcagcgtccttatccggcatttcaggctcgttacagcgcctcttgctgacgatttcgcgtcgttaacggtccgggttaaagacataacgccgcctcccgctacgtatgaagtccagggtgatattgattatccgggcaactgcgtgacagcagggggagtggtttacatggcttaccgcactggtgggcaaaagggcgatatctctctgatgaggttgaattaa

SEQ ID NO: 219582 - DNA, 579 bp, Klebsiella pneumoniae
atgatagggctattttcaaaacactggaccactaattttgacggcggagaaatccccccctggctgacaattagctcgggggcggttaacagcgcagcaactggtccgtggggcggacttacgctgacgagaccggaaacgacggggagtaaacttgttttcggtagcgcgatcgctagtagcaaagaaactggcattgaactggattgtattgttaacggttttacgacgggaaaggggacatttattgccggatttttctctgatacggacggctggtttttgcgaacgagcggtgatatttgctacctggtattccgtaaggggggagttgaaaccacaaaaaacgtgtaccttcaatttaccggatggtcaaagatgtacccactgaaactcgaatgggatattcgtaataagcgcctgaatgtattcaggggtgagggcgcagcgtatctttccttagaccatcttgatgttggcaatgccatcggtactcgccccactgtggggtggctaaccagttccgttggcgagcaaaatacagtggcttccctctcaatcaccagacattttatgtga

SEQ ID NO: 219583 - DNA, 900 bp, Klebsiella pneumoniae
atgacattcagaattacagcaaatgtatttccggccgtatctggtttaccaaccctggggcagtcattttctgacttgcttgttgatgggtctctgtccttgcttgacaaggggagttttccagctgtgctggggttgattccgggcgctaatctagggaatctggcaacggaatatgcgtcaaaacaaacgagtaaccccgtcaacgcctatttgaaaaatatttcccctgataatttcccgacagctacaacggattttacgcaatactttaaggcatcactgaccgcacgtggtgggctgcatattttgccgacaatagggctgaactcatcaaaagcgattggtcttgctatccgcactttgccagacgcagcgacgaccgcaatcctgtcaacgacaaaaaacatttatatcgacatctgggcgaggattacgcgattgccggttgttaattctggaggtcccgcaacgtggaaaaaaattaatattcacgcgttcgcaattgatggagacaccagtacgtcacgggcaaatttggcatcgatgcaattcgacctgaccgccccggcattaccagcggcgcaggttccggccggggcagggcagctgctgtccgcagaatatctgcacagtggcctagggttgaatgaggtcaggatgctggcatctgccatgagttgcaatccatctgacgcgacgcagtatcgcccgacgattccgttctcaattctggaggggaactacaacggctatgggatcataatttacggcagttatatggaggacctgacaacatcggggcgcacagctgatcaagtagcggcaatacgcaagaaagattttgacgctgcctttgccatgggcgggcgattctataacgattcctggacggtatag

SEQ ID NO: 219584 - DNA, 396 bp, Klebsiella pneumoniae
atgctgtttcatgcaaaagaaatcgccgcgctacagccgccagtcgaaacgcgggatatcaatactttctacggcggcataaatacggtaattgactacatcctgagccagaatccgcgtgcccgcattctcgttatcggcttttatgaaaacgaactgcggccacaggtttctcagatgcagttaaaatctgcgcagttgtgggagtaccagatcgtgaagctgtgggagaagacaggctggagccagcagttactgactggtacggatggcgcagggaagacaataacccagtactggatgccggacaatttacatccgcataaagattccaccggtcaggcaaacacattgctggcgaacattctggaaatggaaatcagatctaccaggtag

SEQ ID NO: 219585 - DNA, 573 bp, Klebsiella pneumoniae
atgatatcaagccagccactgaacgcaatgcagattaagcttatgatcgcagtgaaatcgccttcgcctgctcttcggtggcgtacccaaagttgcgaattcgcccgaccataccgtcagtgtctgcaccggtggcgctgtagccagcggtatagcgggtgccgatacggatgcgtaagtgacgcctgccatgcctggcattttgccagacgcattaacggcgcttgtgatcgccagaacgcctttgctctagtttttcccgctacctgctgccgggttgcgcccgtacccaacatcctgcggcatcgctccacaacctcagtggtcattacccggcgccgtccacctactctcccctgctccctcgctgcggctaaaccggcgcgggtacgctcgacgatcagctcgcgctccatttctgccagggcgctgcccctggaaacggcggtgacgtgctatacgtctcatcaccatttgaggctaaggtgtatcgctattttgtgccggaagattattctccggatcagcaattcacgagttttgatgtgctgctgtcgactctggtgtaattaa

SEQ ID NO: 219586 - DNA, 759 bp, Klebsiella pneumoniae
atgtatttagttaaaagttgcaataaaaagcaccatcccaacacatcaggaacaataagaattggttctttaaccgagtatagagatttagaaaacaagcaggttgaagacagagaggagggtttttatagaataaatttcgaccttaaagataaatggataagtatcgacttattcaaccatttgaacaactcacacctcagccattttcgcggatatgttaaatctctttcaatgaaggggggtgatggagcgagtgttcttgttgattaccaagctaattacgagtgggtaaacttaaatagatttatattttgcataactaaagcagaacgagttgaagacgcacaagatatatttagtggttacgatgatagctggtcagttgattataaaaaaatagcatggatgaaaaaagcaatggaaaaaaacgttttacaaaaggttaaggagctaatttcttcaggggagatgatttttggtagtggttataataacccaagtaagataacagtacgttcttatactcaagatataatttatcaaacgagagacttgtatttaggaaataaagacatagatgccatgtctgaaactttgatatcattatttgaaaatgtgaaatttatcaagcctgttgaatttaaaaaagaaaaagaagtaaggtttgtttttgattttttttatgacggtgacatcgtgttccctcaagttaatagtctaattgtgcctgctgctgggattacagagttattttaa

SEQ ID NO: 219587 - DNA, 417 bp, Klebsiella pneumoniae; identical to SEQ ID NO: 15292

SEQ ID NO: 219588 - DNA, 240 bp, Klebsiella pneumoniae
atgccgcgaaactcagatatcgaaatagcctggcgtcaggcaattgtcattgagcctaatggccgtcgcaccgtgacaacgtccggttttatccgggaactcgcaatagttaactggatatggtcaccgcgccaggctaaccagtggatagagcactatgtgacgacattccgggatgtctcaacgcaggaaggcgatgagcgcacgttccagttatacaacccaaacggagggctataa

SEQ ID NO: 219589 - DNA, 372 bp, Klebsiella pneumoniae
atgagcgcacgttccagttatacaacccaaacggagggctataacgtgggatttccgtcgccagctgctgactatgttgaacggcgtctgaccgttgattcactctgcggtaccggccccaatactcggatagtacaaacagaaaccggctatgccgtagtggattgctccgtaaaaccaaagcaaggagataccgttttaattcaatacggcggcggcactgattttgcaaaaattatgggccgggcatttattacacgagacggtgaagcgctggaaggtgagtccctggatgatgttacagttgtcggggtagtgacattcgttatcaatcggacagggaaggatgatgatgattgtccagtgttgtga

SEQ ID NO: 219590 - DNA, 258 bp, Klebsiella pneumoniae
atgaccacgttcactgtagaagttcgtgaaggtatcgttgcctggcttaaaaagagtactcgccctgagatagtcttggatctgccatcagtgccggccccaggcgataagctatggctgaagaggatgcgaggcgcgcatattgttgaaacggaaagatgcatgatcgtggagtcgtgccgtgtttcatgtctgcgaccgactgtgcgtctggtgttgatatttggtatttcagataatcacggacgagatgaataa

SEQ ID NO: 219591 - DNA, 924 bp, Klebsiella pneumoniae
atgaaagttagacgaattggcatatcgctgacaaataaaaataaaacgattcgcttttctgattttatcaattatatgcttgctgccagcggagaaagagcaggttttgaaaatggtgaaaggttttttttgtttcatgaagatgagagttttttttccggagtagtcttaacttttaaggaccagagaagagattgtcgtgcaagatttcaaaatggtcagtttacaatacataccgctgatattcttaatgatgaaaaactaatagacttcaacttttttgcgattaaaaaaagtacaatgaaggggttgtatgattattatcacaactcatgtagcatctgggttttgtatgcgttaatgcgaaataaattcagattattaaaagccgataaagtttctgaatatgtgcaaaataacttggctttaggaagggagaaagctgagaataaagcaaaaaaaatatattcaggtaggttttccacacagatattgatcgatgatagagatatccctaccgtattggcagagtatgcgaaagttaaaaaaattgaaatgtcctttgatgctcaacaatttgcaattgggcatgccgttgcattacaaaggagttctagagaagttaaggttgcatttaatattgtagatagcgaacagtcgaatatagcaaggttaactcagggtgtagtagagttggcgggtaatgttggtttcaaaaaaggtagtgctagcactgtagataatgatgatgttgaaagaactatctcacttttaaactgtcctaagtttttaggtgaatgtgattttgacaatgtggctcatagaatcgatggcttaactgtcggaaactttcatgagaatgctatacttacagagcttaaaaatgaaatagaagagggggagtatcgtgtgctctttaattaa

SEQ ID NO: 219592 - DNA, 594 bp, Klebsiella pneumoniae
gtgtgctctttaattaaaaaaatagcgcaatttcctttgacaagcattacaacacaaatgctatcaattttcttattctcattggctgttgttggtgttttaacttattgccatattaaattcggcctaagcattactttaggtgatgacacttctttttttaattattatgagtcaaaagtaagaggctatcttttttctggatttatttctgtaggttcgtttcttctatccttacatacttttgttatagtaaatcttaaagataagttatttgactctcctatctacaaacaaaattacatagactttaaaagccaatatattaaagggttctctagtgataatataatttcttctgagtattatgcgccattgaacgttctatcagttttccttaatgtatcaatctggttatcaatcttgacagctgtaatacaatttacgcttggattttataataatacatatactgctctgttttgtatgtatctggctcttttaactatccttttccttcttaactgcttaatacttattcgctgtaatatcaaggtttggttaaatcttgatactaataaaaaagcaaactaa

SEQ ID NO: 219593 - DNA, 369 bp, Klebsiella pneumoniae
atgagggaagcatttttagaaatagagtcagtttggacaaattcactgaagttattgaaccattcttgtttgtgtgctgcttatagctctttagatggaatgatttttttccatttttggtacagaataataaaggatattaaagttaactatatatcaagaatggttcaagctaacgacaatggtgtcattgaagcgattgttgaaaatgcaaaaaaaatgccttccataagcatagggttgaacgataaaaaagttaatgacgaaaatagcagcgcacctgatttaagctttttgaatgtctccttgtccactaacgataattatgcctttgccgactttgtgaaattagtaaatcatgctcaatga

SEQ ID NO: 219594 - DNA, 3027 bp, Klebsiella pneumoniae
atgaccgctaattatcccgccagcattctgccacccaacgccaccgccgtggagcgggccatcgacagagccagcgccgcagcgctggaaaggttgcctgtatatctgattcgttgggttaaagatccggacagttgcccgctggcgctgctgccgtggctggcgtgggaatatcaggttgatacctggaatattaactggtcagaacaaaagaaacgcgatgcgatcaagcgcgcccactacatacaccgccatcgcggtacggtcgcggccgtccgtcatgccctggtggacagtccttttgggacggatattgttgaatggttcaaccagaacccgaaaggggatccgtatacctttcgcctgaacgtttatcagaatgatttaccggtgacggaatacgaccagcaggatctaaaactggcggtgctgcgcgccaggaatctgcgcagctggttttccgttcatgtatttggccgacttcagggaacctcgtatgcggccggttacatgtacgccacggagaaaatcacgccgcgctttgtcccgttgcaggtggttttatcccgctacgagctgaatctggcccccggggacgcggaaacggtcacggtgacaattctccctgaatacgcggaagataaaacctttacggtaaccacgtcggataaaacaatcgcgactgcccgaattgtcaacggcgctattctggttacgggcgtgaagcggggcacctgttcggtcaccgttacgacgactaatggcgtcagtgcggtgatcagtgtgaaagtggtcgcggtgatgaagttcatcacccgcatcgacagtgcaaccaggccaatattctttgctcatatggacgagggtttcacggttgactatggcgacggcatcgacagccgggactaccgtttcgatcccgccagtgaagcttcaggttgggttattcctacacgtgaattagtacagggaaaggaatacaccatcacggttaagaacacggaaaccgcctgtctgcgcagccgtttatctaactattcttcgaaactgaaccctgttgtggaattgattagtgttacaggggaaagaggtcatctttcagggttcgctttggataccaccggattaatggctattcgtcccggagcatttgacgatttgccaaacgtgaataactgcaaaaatatttttaccaactgctcgtcgcttacaggtatcccggcatcgttgttttctcgcatgaagatagcggatttttcagacgcattcagagggtgtacatcgcttactgaggttccatcggggctatttgcaaaccagcccgatgcgatcgacttctcatcggtatttgcaggctgcaccggcctgatcagtatcggcaataatctgttccacagctgtgtatctgcggtgaatttcagttacgcgtttgatggttgctcaatgcttgcaaatatcggcacgggaatatttacaggatgcggttcagcagggacattctcttatagcttcagggcgtgtaaaaatcttcttgtcttgcctgctgatatgtttgcggatgttccgggcggcgcattcaccggcgtattccagaattgcacggcactgacggcaattcccgccaacctgtttaaaacatgttctgaagcgaatcattttggcggtgcattcactggctgttcgcagcttctttctgttcctgccggtctgtttgctggtctgtcgaaagtgacctatttcggcacggtcttttctggttgcagttcgctgaaaacggtcggcgcgggtttatttgccgggtgcagccaggcgcagacattcgcctctgcattttacagctgccgctctcttgaaactgtagcgaaagatattttcagcggctgcgtagaggtgacgacctttgccagtacgttttatgggtgcagcagcctgacagcgctcccgtcctttactgactgcgcgaaagtcaccactttctcatacgcttttgctaactgtggatcgctcacgaaaattgatgctgatgcttttgctgagaaagcgctggtaacgacattcacatacgcttttgtaaactgtacttcgctggtttctgtggggaacggcgcatttcggggatgtagcgcgttaaccagcctgggctatacgttttcaggttgccgcgctttggtttctctcgcgggagatatgtttgccggttgcgccaaagtgacagccgtcgatttcttattcgacaagtgctccgcgctggttgaactgccaaaagagctattcagcgacatggtgtccttgaaaggcatgggatcgactttccgggattgtactgcactcatctcgctaccatccggcctgcttgatggttgcatcaatctcacttcgttaacgctgacattctcgggctgcacctcactggcgttattgcctggcgatttgctgaaaaacaacattcttctgtccggcgccggatcgacgttttacggttgcacctcactggtaaatattccgccgacgctgttcgcgtcctgctctcttattacctcgtttggcgccacgttccagaataccggcgtggaggaaataccggaaaacctgttcagcggcaacccgctggtgacctcttacggccagactttcaggggctgtaaaaacctgcgctcagtgccagccggtctttttgccgccagcataagtgccacggtattcacgaatgtcttttcggaatgcagtgcgctggaagtcgtcggggcgggattactcaacaccacggcggtaacgacggtgggttatctgtttgacggctgcgcgtcattacacagcgacgttaacacgatatttaatcttgcgagttacccggagattgtcaccacaacggcaatattcaggagctgcgcattactcgccggcaaaggcctggtatttatgggcaaagtgccgaacgtcaccgcgcactattacgcgttttatgcctgtgcgggcctggacgattacgacgatttacccggcaactggataacgaacaaactatga

SEQ ID NO: 219595 - DNA, 1611 bp, Klebsiella pneumoniae
atgattattttcgatgaaaaaagacacttgtacgaggccttattaaggcataattacttccctaaccaaaaaggttctatatccgaaataccaccatgtttcacgtcaagaacattcacaccagaaattgccgagataattaccaatacgccttcagaaaaacgcccactaggatatgattgcgttgagtactcttcaactagatataacaatttccctagagtgttatcattaattcaccctagaccatactcactactggctaagcacttgtataattcttgggaagaaataaaagttattaaagaaaacccgaacagcatgattaagccagaaatgcaccctgatgggcgtatctttatcatgaactatgaagaggccgaaactaaaactctaagagaattaaatgatggatttggaagaagatttaaagttaacactgatatatccggttgttacaacaacatatactcacactcaataccctgggcagtcttagggattaacaccgccaagaattcactaacaaaacgccccaagaatcaagagaaacattggagcgatcaactggattttttgcaaaggcacgcccgcaggaatgagacacatggagttccagttggcccagcgacttcaagcattgtctgtgaaataatcctaagctctgttgataagatattaaatgaaagaggctttgtttttagaaggtacattgatgattatacttgctattgcaaaacacatgaagaagctaggttctttttgcatgtattaggtgttgagctttctaaacttaagctttcattgaatttgcataaaacaaagataactgcgctcccaagcactttaaacgatgattggatttcattgctaaacataaactcaccctcaaagaaatatttccgaaatccagaccttgaccgtttgactttgtctgaggtcatcagtttcttagattatgctgtacaactcaatataaccaatggcaatggaagcattttgaaatttgcaatatcattgataataaacaaaattgatgacttaactatcaatgaaacctatgattatattttgaatttgtgttggcattacccaattttgattccatacctggagacattgcactctaagatagacattgatgataaaatcaaacttaaattaaacgaaattttaaggatgtgcgcagaaaacaaatattccgacgggatggcatggattctatattttttcttaaaatacgacattgcaattgaagaagatattattgataggatattcaccaatggcgactgtctgagcttatgtattttagacaaaattggaacttatgaggaaaaaatccaaaatttaacaaaagacattcttgcgcaagattatctatatgacattgacaaatactgggtgttattttaccagcgcttttatgctggcaaaagtgaaaatccatataaaaatgacagttgttttaaaataatgaaagactatgatgttaatttcatgccaaataatgatgaactaacaaaagctgaaacttattgtcacttattaaataatccgttccttgaacccggtgatgaagtaatcagttttgagaactatttttcgtaa

SEQ ID NO: 219596 - DNA, 150 bp, Klebsiella pneumoniae
atggagagtataaaggagggggaattaaaaacaaagcattttaccaggaataatctgcaaatttacactggggcacgaaaaaataagatggcgaaaaaagacgcgcgaaataaagcaggccgcctggcggacggcttgccctcaggataa

SEQ ID NO: 219597 - DNA, 345 bp, Klebsiella pneumoniae
atgtctttactcgcacaactggaccagcgtatccgtcatcatggcggattaattgtctcctgccagccggtgccgggcagtccgctggataatcccgctatcgtcgcggcaatggcgctggcggctgagcaggcgggagcggtagcgctgcgcatcgaaggcctggccaacctgcaggccgttcgtccgttagtgacagtgcccgttattgggttgatcaaacgcgatttgcccgatagcccggtgcgtattacgccatggctggaagatatcgacgcgctggcgcagggcggagcggatattattgctattgacggcacccagcgtcagtgtcggcgctattag

SEQ ID NO: 219598 - DNA, 597 bp, Klebsiella pneumoniae
atgggaaaaaatatccgctggattatcgtcctgttattatttttagtatatatgataaattatctggaccgggtggcattatccattacggtcccgatgattgaaaaggaccttgcacttaacgctgaacaattcggcattattttcggcagctttttcttcggctacgcggtatttaattttattggcggtttggccgtggataagtttggcgcaacgctggtaatgggcctggcggtcggtctgtggtcgctgttttgcggcttaaccgcggtagccaccggcttttattccatgctggtgctgcgggtgcttttcgggatggcggaaggcccgatctgcgcatcggcgaacaagatgatcaacggctggtttcctaaaaagcaagcggctaccgccgtcggctttctcagcgcaggctctccgctgggcggcgcggtcgccggccccatcgtcggttacctggccctggcattcggctggcgcccggcttttatgattattttcgctatcggtattgtatggatgatagcgtggtttttcattgccgctaattcgcccgaaaagcacaaaaaaagtcagccaggaagaacttaa

SEQ ID NO: 219599 - DNA, 1017 bp, Klebsiella pneumoniae
atgagaagcgtcgtcgtcaaagagccaggccaactgaacattgaatcacgtccggttccagttccgggcgcccatgaagtacgggtgaaaattgcttttgccgggatctgtggttccgatgtacacatctatcacggccacaaccctttcgcgaaatatccccgcgtcatcggccatgaattctatggcatcatcgacgccgtcggcgagcaggtatctccggcacgcatcggcgagcgtgtcgcggtggaccccgttgtcagctgcggccattgttatccttgctcggtaggaaggccgaatgtctgtacgcagctccaggtcataggagttcaccgcgacgggggatttagcgactatgcctgcgtgccggcgaaaaatgcctggcgcatccccgaggctatcagcgaccgtcaggcaacgatggttgagccttttaccatcgcggcaaatattaccgcccagctgcagcccacggcgcaagatattgccctggtttacggcgctggcccgatggggctgacaatcattcaggcgctaaagggggtatatggcgttaagcaggtgatcgtcgtggatcgcattgccgaacgtctgcagatggcccgggaaaacggcgccgatctgacgctcgataacactgaccagccgctcgcggaacagctggcgcagcggcagcttgcccccacgctggtcattgatgccgcctgccacccggcgatcctgcaggaagccattctcctcgcctcccccgccgcccgcatcggtatactcggtttctccggcgaggcctcgaccctcactcagcaaagcatcaccagtaaagaaatttctattttctcctcccggctgaacagcgggcgttttccgctggtcatcgactggatggagaaaggccttattcgtccggaggcgttaatcacccattgtatgccgctggagcaggtgaaagaggccatggagatttttgctaacgaccgtaagacctgctgcaaagtgctgctgcagctgggttaa

SEQ ID NO: 219600 - DNA, 2340 bp, Klebsiella pneumoniae
atgaagcaaattcgtatgctggcgcagtattatgtcgacctgatgatgaagctgggtctggtccgcttttcgatgctgttggctcttgcgctggtggtgctggccatcgtggtacagatggcggttaccatggtgctgcatggccaggttgaaagtatcgacgttatccgctctatcttctttggcctgctgatcacgccttgggcggtctactttctctcggtggtggtggagcagctcgaagagtcccgtcagcgtctttcgcggctggtggacaagctggaggagatgcgtgagcgcgatctaaagttgaacgtccaactgaaagataacatcgcgcagttgaatcaggagattggcgaacgtgaaaaagcggaagccgagcgcgaaaccaccctcgagcagttgaagattgagatgaaagagcgtgaagagacgcagatccagctcgaacagcaatcctcctttctgcgctctttccttgatgcttccccggacctggtcttctatcgcaatgaggataaggagttttcaggctgtaaccgggcgatggagctgctgactggcaaaagcgagaaacagctgatccacctcaaaccgcaggacgtctatagcgaagaggcggcggaaaaggtactggagaccgacgagaaggtgttccgccataatgtatcgctgacctatgagcagtggctggactatcccgatggccgcaaagcgtgctttgaaatccgcaaggtcccctactacgatcgcgtcggtaagcgtcgcggcctgatgggcttcggccgcgatatcaccgaacgtaaacgctatcaggacgctcttgagcgcgccagccgggataaaaccacctttatttccaccatcagtcatgagctgcgtaccccgctaaacgggatcgtcgggctgagccgaattttgctggataccgaactgaccagcgagcaggaaaaatacctgaaaactatccatgtctcggcggtgacgctggggaatatcttcaatgatattatcgacatggacaaaatggagcgccgcaaggtgcagctcgataaccagccggtggacttcacaagcttccttgccgaccttgaaaacctatccggcctgcaggcacagcaaaaggggctgcgctttgtgctggagccgagcctgccgctgccgcataaggtaatcacggatgggacccgcctgcggcagatcctgtggaatcttatcagcaacgccgtgaagtttaccccgcagggcggaggggtgaacgtccgcgtgcgctatgacgaaggcgatatcctgcacttcgaagtggaagactccggaattggtattcctgaagcggaacaggacaaaattttcgccatgtattaccaggtcaaagacagccacggcggcaaaccggccaccggaaccgggattggtctcgccgtctcgcgtcgcctggcgcgtaatatgggcggtgatatcagcgttaccagccagccgggtaaaggggcgacctttacgcttaccgtccatgcgcccgccattgcggaagaagtggaagatacgctggcggaagacgacatgccattaccggcgctcaacgtgctgctggttgaggacattgagctcaacgttattgtggcccgttcagtgctggaaaaactgggtaacagcgttgatgtggcgatgaccgggaaagccgcgctggagatgtttgagccaggcgaatatgaccttgtgctgttggatattcagttaccggacatgaccggactggatatttcccgggaactgaaacagcgctttgccgctgacgagctaccgccgctggtcgccctgaccgccaacgtgctgaagaataaaaaagagtatctcgacgccgggatggacgatgtgttgagtaagccgctatcggtgccagcgctaacggccatgatcaagaaattctgggatgcaccggatgaggaagcgcaggaagcgccggcggccgatctgcataaagccgacgcggtgctggataccgatatgctggagcaatatatcgagctggtgggaccgaagcttatcaacgatggtctcgcggtgtttgagaagatgatgccgggctacatgtccgttctggagtctaatctgaccgcccgcgaccaaaaagggattgtcgaagaggggcataagatcaaaggggcggccggttctatcggactgcgccacatccagcagctgggccagcagatccagactccggatctgcctgcctggtctgataatgtcgctgaatgggttgaagagatgaaatccgagtggcaaaacgatgtagcggtactgaaggcgtgggtggcgaaagccagcaaaaaatga

SEQ ID NO: 219601 - DNA, 261 bp, Klebsiella pneumoniae
atggcgcgaaggctggcaagactgggagataaaacgacatacggctatgtggcaagcgctacgtcatcgatcatagacggcaaaaaactggcgctgaatggcgacagggcgtggtgtaacaagtgcaaagggatgttcgggattgtcggcacggcgcgtgggtggtctgaggattcgctctttgtcggtaacggcgaccgtgtggcgtgtaaatgcgcgaacaatcaggtgattgccacttcggatttgtttgatgaatga

SEQ ID NO: 219602 - DNA, 3366 bp, Klebsiella pneumoniae
atgaaatctgcaaacaataagttaacgattattgcagacgtattgctgctcctgctttttgcggctgtattgggttttattatctggcgttttggtgatctttttggattaaccggggataaaaataagttttatatatggctggctggcataatgtcgtttatttttctgcgggcatcctggtatttttcccgtttataccgggttcgcagggaacggcggcagtctgaggaacagggggaatacccggaaaaagaaattcgttatgaacctgggcaaagaacatctttgtattctgaactattttttcatcttcgcgaccgttacggtctgttctggcagcgtcaggtccgtctgctgctggtgacgggcgagcctgagcaggtggaagccatcgcgccggggctgacagagcagcgctggcaggaaggcgaccatacggtgttgatatatggcggcaaggcgtcggcagagccggataccaccctgctggcctccctgaaaaaactgcgccgcttccgcccgctggacggtattatctggccgctgacggagaaacagagttcccagacggcgcaactggataagggctggcgcgaactgggtaatggtggaaaattgcttggctttcaggctccgctgtatctgtggcaggtctgtgatgacggaggttatcaggccgggcgcacactacaaagcgtcggctgcctgctgccggagcgaagcacaccggaacaactggctacacaactggaagcacagaccccgcaactgacggaacagggaatgtcgcagttgctgaccaataaccggcacgattttctgttgcgtcttgcccacacacttacagagcgcggcatcgctcactggcaaaccgtcctgaagcccttgctggcaggcggcgcattcccttctctgcacctgcgcggcctgatgttcagccctccactggccgccgtgccggaagcggctccccacgcgtggctgtcatcgctggtgtgggcgggcgttactggcgacaatgcaaaaggccgcaccgtgggctttccgtggctgcgcaccgcgctgatggcctgcttctgcgtgctggcgatatggtggaccggaatgatgacctcgttctttgccaaccgcgccctgattcaggaaaccgggacgcacacagcgcgggccatcaatacccgactgccgctggcagagcaactggttgcgctgcacaccttgcagggcgagctcgagcgtctgcagtatcgtatccgccacggtacgccgtggtatcagcgtttcggtctggagcgtaatgctcagttgctgaacacggcgttccccggctatgcgcaggcggcaaaccgactggtacgcgatgtagcggtcgcccacctgcagcagcaactgaacgcctttgtcgccctgtctccgaacagtccgcaacgcaccgcaacgggagaactgcgttataagcaactgaaggcgctgctgatgacgtcccgtcccgaaaaagccgacgccgcctttttcagtaccacgctgaaggcagataacctgcgctatgcagatgtaacggaaggtacccggcaaagcgtgctgccgtcgctgctgaccttctggatggcgaatctgccggagcatccacagtggaaaatcgccccgcagccggaactggtcggcgcggtacgcaaaattctgctgcgccagattggggtgcgcaatgcggaaaataccctctatcagaacgtcctgaaacaggtctgccgcaactacgccgatatgacgctggcggatatgaccggcgacacgcaggccggctcgttgtttggtactgagcaaacggtgccgggaatgttcacccgccaggcatgggaaggtcaggttaaggaggccatagagcaggtggcgacggcccgacgtgaggaaatcgactgggtactcagcgaccgtcgacaggacgcttccgccgatatttcgccggaagccctgcgtacccgcctgatggaacgttacttcaccgacttcgccggaagctggctgacattcctcaatagcattcgctggaagaaagaggactcgctgtccggcgtgctggaccaactgacgctgatggccgatgcccgccagtcgccgctgattgcgctcacggatacggtggcatggcaggcggcggcaggaagggaaagccgtagtctgtcagactcgctgacacaatcagcaaaagagttgtttagcggtaaagaaaaaacaccgcagaacacccgtgccgcccgtgaagaagaagcaccaacgggaccgatggacaaaacctttgccccgctgctgcggctgaccggtgataaagccggaggcactggcgacagccagctcagtctgcaaacttacctcacccgcgtgacccgcgtgcgcctcaagctgcaacaggtcaccaacgccccggacccgcaggagatgacgcagcagctggcgcagacggtattgcagggcaaaaccgtcgacctcaccgatacccgagattatggccgtctgatagccgccagtctgggcgaggaatggagcggcttcggccagtcgctgtttgttcgtccggtggagcaggcgtggcggcaggtgctgacgcccgcagcggacagtctgaaccggcagtggcagcgggccattgtcagccactggaatcaggatttcgccgggcgttatccgtttaagaacactccgaacgacgcctctctccccctgctggctaaatatctgcgcgatgacggacgtataagtcagtttatcgctaccaaccttgcaggcgttctggaacgcgaaggtcgttattgggtggctgacaccatgaacacgcagggactgacggtcaacccggcgtttttacgcgccctgaatcgcctgcgcgatgtggccgacacagcctttgccagcggcgatgccggggtacattttgaactgatggcaaaaccggcacgtgacgtgatgaaaacgcatctggtgattgacggccagcaactggaatatttcaaccagaaagaacgctggcagcgtttcagctggccggatgagcagtggcagcccggcgcatcgctgagctggaccagtacgcagaatatggaacgtattctggccgacttccggggaagctggagctttattcgtctgctggaacaggcgcaggtcacacagctggacagcagcagctttatgctgcagtggcaagcgccggacggtctgccgctgcattacctgatgcgcgtcgaacagggtaaagggccgttggcgctgctggcgttgaaaaacttccgcctgccgggacaggtgtttctgaccgggaaagccataagtgatgcagaagaatacagggacaacgcagatgagtga

SEQ ID NO: 219603 - DNA, 372 bp, Klebsiella pneumoniae
atgctgaaatcattattgacaggattgttctttatatattttctagcaggcaatgcatatgccgaggattataatgatattttctggggcatgttaaaaaaagaaaatcaggagattgtttttgtccgttgcgacagtccgctattaaaaatgaaaatagtcagaaccgcagatgctaatcaagaaaatatagaaaaggcgtaccagacgtttaatcagagtaaaggccagtcgatgtatttttcgtttatcggaaacgtcaaagataccgggaatggcaattatgtatttaatatgtatgacgtgatggagacgaaaacggggcgctgtaatctgacagatgcgctcaataactggaatgtgtcacagtga

SEQ ID NO: 219604 - DNA, 2379 bp, Klebsiella pneumoniae
atgagtagcgtgaaatcgttgttgttcagccataaccaccacctgctttcggtgaagggatgtgaagccgggcttgatgtgctggccttcgagggcgatgaagccctgagccagccgttccgctaccgtattgaattcaccagcgcagaccatgccatcagcaaagagatgatgctgatgaaggcagcctccctgacgctgcaggcgccggtggctcagggcttcggcatcaatgttcagcaacccgtgcgggttatccagggcgtggtgacggggtttgaacggctcagtacctccagggatgaaacgcactacgcgctgacgcttcagccgcgcctggcgctgcttaaccgctcgcaccagaacgccatttaccaggaccagtccgttccgcagattgtggaaaaaatcctccgcgagcgccacggcctgcgcggtcaggattttctgttctcgctgacaaaaacgtatccgcgccgcgagcaggtgatgcagtacggcgaggatgacctgcgctttatcacccggctgctgggtgaggtggggatctggtttcgctttaccgccgacacgcggctgcacatcgacgtcgctgagttctgcgacagtcagcagggctatgagaaggggctgacgttgccttcggttccgccgtcagggcagcagtcggccggggtggacgcggtgtgggagatggcatgccgccaccgcgtcgtggagcagcaggtcagtacccgcgactacaactaccgcgaggcgacggcggacatgaacgcgcaggtggatgtcacccgcggggagaccaccacctttggtgaggcttaccactggggagataactacctgaccgcggggaatgtccatgaccgccatccggcgccggagtccggggcgttttacgcccgtcttcgtcatgagcgttatctgaacggccagacccggatgcaggccaccaccagctgcccgacgctctgcccgggacaggtgctgaaggtcaccggcggagaggaggtggccagggagtttgctgatggcgtgctcgtcacggcgatgcacagccacgcccggcgcgatgccgactttgcggtggagtttgccggcataccggacagcccggacgtcggctaccggcctgagcccggcgcgcgtccggtgatggccgggacgctgccggcccgcgtgaccagcacccgggaaaacgacatctacgggcatatcgacaaacacggacgctaccgggtgaatatgttgtttgatcgggcgcgctgggaaaccgggttcgagagcctgtgggtccgtcagtcgcggccgtatgccggagacacttacggcctgcacctgccgctgctggcggggacggaggtggcgattggctttgaggatggtaaccccgaccggccgtatatcgcgggcgtgctgcacgactcggcgcacggcgaccacgtcaccattcgcaatgacaaacgtaacgtcctgcgcaccccggccaacaacaaaatccgcctcgacgatgagcgcgggaaagaacatatcaaggtcagcacggagtacggcggtaaaagccagctcaatctcgggcatctggtggatgctgaaaagcagctgcgcggcgaaggctttgagctgagaaccgacagttggggagctatccgggcacagaagggtatttttatcagcgctgacgggcaggtgcaggctcaggggcaggtgctggcgatggagccggcggtcagtttgctgaaaggtgcggtgaatcagataaccgaatggggcaggattgcccagattcatcataatttttcaccagacgctgattcactgagagagtttgttaacggtgccagtaacctgaaagaagcggctttattgatggttgctcccaaaggggttgcttctgttacccctgatactgcgctaatgcacagtggtaaaggcctctacctgcaaagtctgggagaggttaatattgcaaccgcgcagcgccactcagtaaacgccagtaaagcgatttcgctactttcacaacaggaagggatccggctggtctcggcgaaaggaccactggaagtagaatcacacgcagacacactctctcttacgtcactgaaagacgtcacggttcagtcaacacaaggtcacctgcagctaacggcaaaaaacgggatcactattgcatgtggcggcgcttacatccagttgacacctgagggagaaattaaggttcatggccctggactgttaagcctaaaagggcagcacaacatggaaggacctgcgagccaggatttcccgttgcctgaactaccatcatcggtctgcaaagattgtctgaaacgggcacaggaaatcgctcagggctttgttccaagggaggtgtaa

SEQ ID NO: 219605 - DNA, 1185 bp, Klebsiella pneumoniae
atggcgtgcctggcgatgaataacacgccgggagcgatccttgccgcgctgctggcttttgacaccaccagccgccattcgaacctggcgatgatcgactggatcgccgattttctcgccgcccgcggcgtggcgtcccgccgcttttatgacccgtcgggcggtaaggccaatctctacgcccggctggggccgtccggcggcggtggggtgatgctctcgggccacaccgacgtggtcccggtggacggccaggcctggagcgttccgcctttcagcctgaccgagcgcgatggccgctactatggccgcggcagcgccgatatgaaggggtttctcgcctgcgtgctggcggcagtggatgactttctggcggcgccgctgcgcatgccgctgcatctggccttctcctatgacgaagaggtcggctgtctcggcgtgcgcagcctggtggattttctgcaggcctcgccggagaaaccggcgctgtgcctcatcggcgagccgacagagatgcagccggtgttcggtcataaaggcaaactggccatgcgctgctgcatcgaggggcaggcctgccattcggcctacgccccgcagggggtgaatgccatccgctacgcggccaggctgatcaaccacctggatcggctgggcgtgcgtctggcccggcagcaggacagccgcttttcgccgcccttcagcacgctgcaggtgggcaccattcagggtggggccgcgctgaacattgttccgcagtcctgccgctttgattttgagatccgctacctgccggggatgcgtcccgaagcggtcaccgaggcgctggcggcctacgcccatcgccagctgctgccggagatgcgccgggtaggcagcgggagcgacatccagttccagctgttaagccactatccgccgctgctcagcgatccgcagtccgacttcgcccgctggctggcgcagtggtgcggcagcgaccgcttctccaccgtggcgttcggcaccgaaggagggctgttcgatgagatgggcgtcgcgaccctggtctgcggaccgggcagcatggcccagggccataaggccgatgagtacatcagcatcgcgcagaccgagcgctgtatgacgatgctgagacagctttgcgcgtggatgcgtgccgaaccggcggaaccgctcacctga

SEQ ID NO: 219606 - DNA, 471 bp, Klebsiella pneumoniae
gtgaacaccgacggcaatatcatcgacttcgtggtgtttggcattctgcatggcctggccaccaagtggtatctggtgccggtggtggcggctatctggttcgcggtctactatgccatcttccgcttcgccatcacccgcttcaatctgaaaacgccgggccgcgacatcgacactgccgccagcgtggagaaagccgtagccggtaccatcggcaaatccgggtataacgtaccggcgattctggcggcgctcggcggcgcagagaacattgtttcgctggataactgcattacccgtctgcgcctgtcggtgcacgatatgagcaaagtggacgccgccgcgctgaaagcccatcgcgccatcggggtggtacagctcaaccagcataatctgcaggtggttattggcccgcaggtacagtcggtaaaagatgagatggccacgctgatgaataccgtgcaggcctga

SEQ ID NO: 219607 - DNA, 723 bp, Klebsiella pneumoniae; identical to SEQ ID NO: 103972

SEQ ID NO: 219608 - DNA, 1359 bp, Klebsiella pneumoniae; identical to SEQ ID NO: 143598

SEQ ID NO: 219609 - DNA, 588 bp, Klebsiella pneumoniae; identical to SEQ ID NO: 143599

SEQ ID NO: 219610 - DNA, 615 bp, Klebsiella pneumoniae; identical to SEQ ID NO: 128200

SEQ ID NO: 219611 - DNA, 939 bp, Klebsiella pneumoniae; identical to SEQ ID NO: 103902

SEQ ID NO: 219612 - DNA, 375 bp, Klebsiella pneumoniae; identical to SEQ ID NO: 103903

SEQ ID NO: 219613 - DNA, 582 bp, Klebsiella pneumoniae; identical to SEQ ID NO: 103904

SEQ ID NO: 219614 - DNA, 690 bp, Klebsiella pneumoniae; identical to SEQ ID NO: 103905

SEQ ID NO: 219615 - DNA, 597 bp, Klebsiella pneumoniae; identical to SEQ ID NO: 103906

SEQ ID NO: 219616 - DNA, 369 bp, Klebsiella pneumoniae; identical to SEQ ID NO: 103907

SEQ ID NO: 219617 - DNA, 762 bp, Klebsiella pneumoniae; identical to SEQ ID NO: 143810

SEQ ID NO: 219618 - DNA, 1770 bp, Klebsiella pneumoniae; identical to SEQ ID NO: 103909

SEQ ID NO: 219619 - DNA, 1242 bp, Klebsiella pneumoniae
atgaaccgacaatcctggctgctcaatctcagcctgctgaaaactcacccggcgtttcgcgccgtttttatcgctcgctttatctctattctgtcgcttggcctgctgggcgtggccattccggtgcagatccagatgatgacccattcgacctggcaggtcgggctgtcggtgacgctgaccggggcgtcgatgtttgttggtctgatggtggggggcgtgctggctgaccgctatgaacgtaaacgcctgatcctgctggcgcgcggcacctgcggcgtgggctttgtcggcctgtgtctgaacgccctgctgccggagccgtcgctggcggcgatctacctgctggggatctgggacgggttcttcgcctcgttgggggtgaccgcgctgctggcggcgaccccggcgctggtgggacgggaaaacctgatgcaggccggggccatcactatgttgacggtgcgcctgggctcggtgatttcgccgatgatcggcggcctgctgctggccaccggcggcgtggcgtggaacttcggcctggcggcggcggggacctttatcaccaccttaaccctgctgcgtctgccgcagctgccgccgcctccgcagccgcgcgagcatccgctgcgctccctgctggcggggctgaccttcctctgccggagcccgcttatcggcgggattgcgctgcttggcggtctgctgaccatggccagcgcggtgcgggtgctctatccggcgctggccgggagctggcagatgtcggccggacagattggcctgctgtacgccgctattccgctcggtgcggcgctgggggcgttgaccagcggccagctggcccagacggtgcggccgggcgcgctgatgctggcgacgacggtgggatcgtttgtcgccattgcgctgttcagcctgatgccgcactgggcattgggcgcgctgtgcctggcgctgtttggctggctgagcgctattagctcgctgctgcagtacaccctgattcagacccagacgccggaacatatgctcgggcggattaacggtctgtggaccgcccagaacgtcaccggcgacgccatcggcgcggcgctgctcggcggcttaggggcggtgatgacgccggcggcatccgccagcgccagcggctgggcgctggcgcttgtcggtgtgctgctggttgggctgctacgcgagctgcgccgtttccagcgcccggaaattgtcaacgaaagttaa

SEQ ID NO: 219620 - DNA, 1017 bp, Klebsiella pneumoniae
atgactgtccgtaaaaatccggctggcggctggatttgtgagctctacccaaacggtgcaaaaggcaaacgtatcagaaagaaattcgccactaaaggtgaggcactggcatttgaacagtacaccattcaaaacccgtggcaggaagaacaggaagacaggcgtacgttaaaagaactggttgattcatggtatagcgctcatggcattacgctgaaagacggcttgaaacgtcagttagccatgcaccatgcttttgattgtatgggcgaaccactcgcacgcgatttcgatgcgcagatgttttcccgctatcgagaaaaacggttaaaaggtgagtatgcccgttcaaacagggtgaaagaggtatcgcctcgcacgcttaatcttgagctggcctacttccgggcggtattcaatgagctaaatcgcctcggagaatggaagggtgagaacccgctgaaaaatatgcgcccattccgcacagaagaaatggaaatggcctggctaactcacgaccagatttcgcaactgctcggagagtgtaaaaggcatgaccaccctgatttagaacccgtggtaagaatctgtctcgccactggtgcacggtggtctgaggctgagagtctgagaaaaagccagctcgcgaaatacaaaatcacgtacaccaacacgaaaggcagaaaaaaccgcaccgtcccaatcagcaaagaactctatgagtctctgcctgagaataaaaaaggccggttgtttagtgattgttatggcgcgttccggtcagctctggaaagaacaggcatcgaactaccggcaggacagcttacccacgttttgcgccacaccttcgccagccactttatgatgaatggtggtaatattttggtcttgcagcgcgtactcggccataccgacataaaaatgacgatgcgatatgctcactttgcccctgaccatttagaggatgccgttaaactcaatccactggcgacgagtggcgataaaatggcggtataa

SEQ ID NO: 219621 - DNA, 573 bp, Klebsiella pneumoniae; identical to SEQ ID NO: 193711

SEQ ID NO: 219622 - DNA, 510 bp, Klebsiella pneumoniae
atgtttgattttcagatttccaaacatccgcactatgacgaagcgtgccgcgctttcgcgcagcgtcataacatggcgaagctggccgagcgtgcgggtatgaacgttcaaacgttacgtaacaagctcaacccggaacagcctcaccagtttacgccgcctgaattgtggctactgactgacctgaccgaagactcaaccctcgttgatggttttttggcgcagattcattgcctgccatgcgtgccggttaatgagcttgctaaagacaaattgcagtcttatgtcatgcgagcaatgcgtgaactcggcgaactggcgagcggtgcggtatctgatgaacatctgacctctgcccgtaagcacaacatgattgaaagcgttaatgctggcattcgcatgttgtcgttgtcggcgctggcgctgcatgcgcgtctacaggctaatccagctatgacaagcgttgtcgacaccatgagcggcctaggtgcctcattcggtctgatgtga

SEQ ID NO: 219623 - DNA, 732 bp, Klebsiella pneumoniae
atggataccgtaatagcatttttatctctggcgctctttattgcttttatcgtggggttaatcaagccgtcgctggttcgaatgccgaaccgtaagcgctccagtgcggtttatctcggtagctgtctggcgctgggcgttattggctcaatcttatggccgactgaaaaaagtcagcctgttgcaaaaactgacgtaccggcggttaaagcggaaccggctacaccaacgtttgagtacgcagataaaaccctcaaagaatatcgcaacgagccaaaagaaacccggcacgatatcgttaaaggctatgttggcttcaaaggtgtaccggcaacctctgctgatgccttttatgcctgcatgagtgagtacacttttactaaacatgatgcgttaaagctaggtgatgtgctggggtggtgtttcaacgacttcgagaaagatccacaatctctgaataataaaatcaaccttgacgcatttcagggtaattttagcggttgggatggctcttatcgcccgttagagaagctgataaaagccagcatgaatgatgattcctcttataaacatgtttcaacggtctaccatctgattttgaataaagacccgcatgccgttgtaaaaacaacgtttcgcggcacgaacgcttatggtggtgtagtcaaacagaccgtaacggcacgcgtcaacgtgcgaacgggtgaggtcgattcgatactcgacaattaa

SEQ ID NO: 219624 - DNA, 936 bp, Klebsiella pneumoniae; identical to SEQ ID NO: 193710

SEQ ID NO: 219625 - DNA, 552 bp, Klebsiella pneumoniae
atggatctgtggaatggaccactaccggcggacgttacagaaaaaatgctggttgatgttatggcagacattatgaaagtctctttgcctgagcatgaagaaatcgaatctcctggcccgttagcgcctggtgcgctgcgatctgttgggggtcatactattaagaagcacgctggtaaaagcgatgctgagttggtcggccgatttgtgtgggattcaggatgcaacgtaagtagcggatttaatcacggcataagttacgcagaggccctcatcgctaaggcgcttctgtctaacctggacaaggtctatacttggtatacaggtgaaaaaagtgctattgctgatttacctgatgatgtagacgacgacaaagacctgcttataatctacgagaacaattttaacgtaggcaggagtttcaaacgtaaaaaaatgggcgaaccggcagttcttgtcaagaaggtggtgattctattacgtaaaattgacgaaggtacggcacctatcaatggtcgatctgattttatcctcacagcgtatccggcatag

SEQ ID NO: 219626 - DNA, 762 bp, Klebsiella pneumoniae; identical to SEQ ID NO: 193708

SEQ ID NO: 219627 - DNA, 1686 bp, Klebsiella pneumoniae; identical to SEQ ID NO: 193707

SEQ ID NO: 219628 - DNA, 762 bp, Klebsiella pneumoniae; identical to SEQ ID NO: 193706

SEQ ID NO: 219629 - DNA, 1080 bp, Klebsiella pneumoniae; identical to SEQ ID NO: 193705

SEQ ID NO: 219630 - DNA, 1194 bp, Klebsiella pneumoniae
atgggacttggagccagcattgtgtcgagggaattgtctggaggaagaatcttgtctagtttttatgagcttgctgtacttggagagattgacgaaactgttttgggtgatttggagaaagccttgagggatatgctccatccttttggcctcgaattggggaaagaggttgcatggagtgtttgtcccaagcagtttatccctgaacaaacgaactctgctgctgcgattttttttggtgccccagatgtatcacctgccaatgtttctgatttattgcataaaggtataccgatacttcctgtagtgtctgatattaaaaaagtgcatgaagaaataccagatgttttgaggcctattaattgcttggattatagtgtacatggcccagaaagaactgcgacagccctgttggaatgtgtggggctcttaccacgacaacggcgggtgtttgtgagttatcggagagatgaagcaaaacaggttgcacttcagttgtttgatgcattgtccgctcgtttattcgatgttttcttagatactcatgatattgctttaggggaggactttcaggcgatgctttggcatcgtttatgtgattctgatgtgttaatcatgcttgatacgcctacttattttgagagcagatggactaatgcggaatttgggagggccttatctaaaggaattgctgtattgcgtgtaggatggcctgatgcaacaccttctcctagaacagcaactgcaagtagagttgaattactcgctaatgaatttgacgagaacacaggatttttgtctcagcaagctattgagagaatatgtgttcagttagaaacggttagaagccaaagccacgcgataagaaacctaaatcttgttagtaacatacggaatgcggtcactcaaatccaaggagaagtattgggggttggtgcgcataacgctatttttatccgccttcctggggaaaaagaagttattgtttatcctactgtgggcgttcctacttctgtaacccttcatgacgcgtcaattaattccagtaaaaagtctgtagcagttgtatacgatcctgtggggctacattctcgttggttagggcatttggagtggcttggaagcgagatacatagcgtacgatgggttaagtcttttgaagcggcttggcgatttgctgattgggaggcttga

SEQ ID NO: 219631 - DNA, 564 bp, Klebsiella pneumoniae
atgagtacaatttttctttctgctagtgttcccttagtggatcgtggtacataccatgaaacagctaatccttttttaattcagtgtgcggtcagagaattagttatagctgttataagagaacataggatagtgtggggagggcatcctgctattaccccaatgatttggaatatctgtgaagatatgggagttgaatatgcccgatcagttattctctatcaaagccgatatttcgaagattggtttccgaatgaaaacgaaaaatttgataatgttgtttatgtcgatgcggttaataatgatagagaacaaagccttcttgaaatgagaaatgctatgctttcgagaaccgatctggatgctgctgtcttcattgggggaatggatggttcagaggaagaatttaaaatttttaaaaattttcacccaaatgcaaaagttttaccagtagctgctactggtggtgcagcaaagttattggcagatggaatatctgggatgattaaaacagatttatatacggttgactttgcaaacatgtttttttccgaattattataa

SEQ ID NO: 219632 - DNA, 975 bp, Klebsiella pneumoniae
atggtgaaggtaagacatgaagcatttaagtattattttcattttatgaatgagagaatggagattttttggcgaaaatttaatcaagaaaattctccatggacagatgataatatattggctttgaataaattcactaatgtatatcgggcgtgtgatagagtgagtcagtatttgataaaaaatgtaatatacacacatcataattatgatgagagagatatattgcttagaatattgatttttaaagtttttaatagaatagatacatgggaatacttagagaatcatcttggtaatatatcttgctctaacttcaatgtagattatatggctaaaattttagctaaaagaatagctgtaactcctatattcaattctgcataccttatgacagggagtcacaatgagtataatcactatgtttctaaacatgaacgatggttaagaatgatagatgaaatatttatcaaaggaaagcttcttgaacgaataattaaagcaaagaatatgaatgaggtttttttaattcttagagagtgcccatttattggtgattttttagcttaccagtatgctattgattttaactatagtgatgtcatcgattttgatgaaaatagttttgtcatggcaggaattggtgctattcgaggaataaaaaaatgctttattgataacggtggttacagtaatgaggatttaataaaatatacgtacgataacatcgaatattataggggttattatggagaaaataattttaaaaatttattaggaagggagcctaagcttattgatctgcaaaactgtttttgcgaaacagataagtatttaagagtcaaaatgccagaattaaatttagggaatataaggataaaacaaaaatataaaaaaagtttgtctaatatatcctatttcttccctcccaaatggaatttaaacgataaggttctcgaatatggttaccgttga

SEQ ID NO: 219633 - DNA, 1020 bp, Klebsiella pneumoniae
atggttaccgttgagttttctggaataaatagttttcttacaggtatggctaagattttattagagcatggagttgagcgtacaactagaggaaaaacctgctgggaactccctgaacctattgtaattaaaattactaatccactttctcgatgggtaacaattcctgatagaaattggaatgttttcctcccatatgcagaatcattatggttagcgttagggcgaaacgatttagagttaattcagttttatttaaatagaatggaagatttttctgatgatagaaaatttatgcggggaggatatggtcctagatttcgatgtttcaatggaaatgctttagattataagaaaggagaaagtgaagatattactaaatttcaaatgttagaagttgaccaatttcactatattagtgagaagtttaagcaagatccttatactcgtcaagggataataacaattggagatcctgccaaagattgcttcgaaattgatggaggaataaagcaaacaaaagatcttccttgcacaagattgttacaatttatgagacaacccaaaagtaatagattgaatctaacagtatatatgcgttcgaatgattttatatggggtgctagtgcagttaatatttttaactatacgttcatgcaggaatatttctcgaagattctggggttagaaatcggttcttattaccatattgctaataatattcattattatgatattcatagagaacttgtagagcggttggctgcaatatctgatgtagttgatgattattttgcctatccgaaaagttttaattccttagaaggatttgatgaaaaagtaaataacttgggtaagtgggaacaaaaaatacgattaggtgaaatatcatatctgcaagattttggagacgatttttttaacgattgggctaaagtgattttttccaaaacaaataaactccctgttgtttttgttaatccaattttaaatcagataatatccgataaacctatttaa

SEQ ID NO: 219634 - DNA, 615 bp, Klebsiella pneumoniae
atgaaacactttacttataaaattgaccatgattttggtttagctccaaatcctttttggggttattgtactcttgctatctgcaaatcaagtataagaagaaacagaaatttaaacattggtagttgggtgtttggtacgggtagcgtaaaattaaaaaatttgcataagttaatttatgctatgagagtagatgaaacgttaacttttaatgaatactggaatgatccaagattttcacataaaaaacctattttaagtggaagcttaccacagttatatggtgataatgtgtaccaccaagatccaactaccggaatatggattcaggaagattcagcgcattcacttgccaatggtttagttaatcaaaaacaccttgaccgagacattagtggaaaaaacgttttaatatctcaaaacttttattattttggtgatcatgcagttgacatacctcaagatctaattgaatcgacatgcacaaacagtagagacaagcagtttgtcgaagaagaaccagccatacaacttctattatggctggaacaagaaggttataataaaaactatctttatggaaatcctataagttggaaacaacatgttaaatag

SEQ ID NO: 219635 - DNA, 504 bp, Klebsiella pneumoniae
atggaacagaaggaagccaaaatgagtaacgtaaaaaacatttttattagccatcatggcaaagatgatgaacatgtccaaagattaaaaactcgattaaaagatgatgggtatgatgtcagaaatagttccgttgatagcacaaaacaccaagacgtcaggccatctgataaagaaatagctaaagacttaagtgacggtattaattgggctggaacttttatctgtttggttggagaacaaactcattcaaggagctgggtaaactatgaaattgaagaagcatataaacaagggaaacctattgttggcatttatatgcatggctgtgccaactccgtagagttacctgagaatcttgaaaaatatggtaactacgtaataggatggaactcattagataaattaggtgatgttttagatggaaagccgatacctcgtgaaaatccagatggtacattaaaaacgccaaaatttgatgttgtgagagtgagttgtaattaa

SEQ ID NO: 219636 - DNA, 291 bp, Klebsiella pneumoniae
atgacagaaacgcagatacgctcgataaccgaagatatcatacagatattactaaagaaaaatgctgattatggcggagcaagctttgatttgggtttgaacggtaatatggtacatctatgggataaggtaaggcgttatcgaaccttagtagaaaaacataataaaggagagtcaccaaattttgaatcaattgaggataccctaaaggacattattgggtatgcaattattggtcaaattattttaagtaatgaaaaaaatggaacagaaggaagccaaaatgagtaa

SEQ ID NO: 219637 - DNA, 549 bp, Klebsiella pneumoniae
atggctactaccccaatccaaacacacccgttacttgctgttcccttcaatgccgccacggatttcaccgtccttgccagccactgcgaaaacttcgccgaaaccctgtttgaaaacgacgaccccacgctgaaaatggcgttctgcggcacactcaacgccgctctgacattgctccagcccacgctgttagaacccgtcccgccccatcttgttgaaagcctgaccgtcgataccctcccggctaattcccccgagtttggaccggaatgcaccgagctttgtagctactgcctcaccctgacgcagacgctggcggagcagggattttcttctgaaaaggagaaacagttgagttacctgctgtacgacctgatcaactacttcgcggcgaaaacggggtgtaatctccctcctgctctatgctgtcatttacagtgccctttgcttcgcaacctgaaagaagcacctgttatcaggacggttgatccctttaccggtgcagacctctgcaaacaccgggtcgcagaacatcgcggcggaggctaa

SEQ ID NO: 219638 - DNA, 507 bp, Klebsiella pneumoniae
atgaaggcgctggctaaaaaagcgggcggtagttttaaaacggaggatgaccgcattcatattgtgcagcggttcagccgccatttacgctcgctgaatatccagatccagcgggtggagcagatcaaggtccgccatatcgtatgctatattcaggcgcgtctggcgcaggagattggtaaacggacgctacaaaatgaaatggccgcgcttcgtggcgtgctgcaacaggctggacgtaagcaggtggcagagcatgagcggctgaccaataaaccactagggctggccggcgcatcccgtcacggcaccaaccgggccatcacgccggagcattatcagaaggtactggaaaccgcccgtgacagagacgcagggctggcggcgacgctggaactggcgcgactgatggggttacgctcgcagaaggcggtacagtgttgtcagtcattaaaaacgtggaaacaggcactggagcgcggtgaaacccgactgacggtggtgtga

SEQ ID NO: 219639 - DNA, 171 bp, Klebsiella pneumoniae; identical to SEQ ID NO: 135108

SEQ ID NO: 219640 - DNA, 396 bp, Klebsiella pneumoniae; identical to SEQ ID NO: 135109

SEQ ID NO: 219641 - DNA, 930 bp, Klebsiella pneumoniae
atgataagttcagaaatattaaataaagttgatgccttgttagttaagtttagtgaggattttaatcaaattatagaaaaagcagaacagtggatgaaagtatctcttaacagtgatgatactgatagagtttttgtgttcaactttactgttgaagaatttaatatgataagagatctggcagatgcctctgtcagtgttgatgaaattacaaatagtatgtttcatttatttaatgaaaagctgctaagttgccttgatactatgaaatcaaaattaaatgaggtttttgcttctcaggtggatgatttgtttactgaccttatcgataatataaatgccgcgaaaagtacaaccggtatgaattatttgttggaggaaatcagattggcaaataccgaggttaaagagaatatacgaactgtatgcgagtggttttcccttaaaaaatccgtagatttcgaaagtatcgagttagataaattaattcgattagcagagcgttgcttcaaacaaattaatagttgtgatattgaaattcatgttgaatcgcacttgaatcataaaattgatggcggtcaattatatgcgcttgtgttttgtatccttaattgttttaataactcatataaatattcaagtgaaaatagagatatatatgttgaaatcactggtgaagagagcaagtgtttttccattaaaatacttaatgagataagtaatagcacgttgcagtatctgcagaatggagggattgatcttttgataagtaagttagcagatgctgacaataatgatttactaacaaaagaaggtggttcagggttatacaaatcacttcatgggttgaaaactgtttcaagtaaatataatttgcagccaatgattgttaatgataagttctgtgtagaggttacatatgggtattga

SEQ ID NO: 219642 - DNA, 459 bp, Klebsiella pneumoniae; identical to SEQ ID NO: 144339

SEQ ID NO: 219643 - DNA, 1173 bp, Klebsiella pneumoniae
gtgaaaattttaatagttgatgataatgctgcaagatgtgaagaagttaaggctcttttacaagaagaactaggaattggcgagcctgatatttatacagcatataacacacaatcggctaaaactttgatgagaagtattagattcgatttcttgattttagatgtggttttgccaaagagagatgagccaccatgtgctgaatttggccttgccctattaaatgatattaagaaaaggcctacaattaaaaagcctggtaaaattgttggtattacagcccaatttgaagatcttgagtcttttagaacacaatttgattctcattgtgaagtattaatcgaagcatctactcgctcaaaagattggaaaggtaagattttacaagctgttaaatttgaaaactcgaaacttatatcgaagtatactactgaaagaaatgtcacctgcttatccgttcacggaataagaaccagaggcgagtggcagcaaaaattcaagaaaattgtagagtccaatgttgacacggtcagttttgaaagctacaaatatggatactttactgtattgtcttttatgataccattcttaagacagataaaagtcaattcattcagtaaagaactaaaaaggataaatcttcaaggtaaagaaatttttatattttgccatagctttgggacatatattactgttaatgctatctccaaattattgtccgaaggaactacagtcaatatcaagatgctggttttatctggtagcgttcttccatcaaactatgattttcataagataatgactttgacagatatgaagttgataaacgattgtggctgtgatgatagaattcttcttctttctgaagggcttgtaccaaatacaggtatggcaggaagggtaggattctatgggcttaataatgcaaggtttgtaaatagattttttaaaggtggacatagtcattattttgatgaaggtagtggattcatggaaaaatattggctgcctctattctatggcgattccaatatagaagtgatagatcagagatgtgacagtattgttacctctggtattattgagaaagttacatctgggcttgggaaagttaagggtataatatatctcacagccttgtttttttgtttttattatttttgcatgaaatga

SEQ ID NO: 219644 - DNA, 333 bp, Klebsiella pneumoniae; identical to SEQ ID NO: 193565

SEQ ID NO: 219645 - DNA, 1242 bp, Klebsiella pneumoniae; identical to SEQ ID NO: 193564

SEQ ID NO: 219646 - DNA, 606 bp, Klebsiella pneumoniae; identical to SEQ ID NO: 193563

SEQ ID NO: 219647 - DNA, 684 bp, Klebsiella pneumoniae; identical to SEQ ID NO: 193562

SEQ ID NO: 219648 - DNA, 846 bp, Klebsiella pneumoniae; identical to SEQ ID NO: 193561

SEQ ID NO: 219649 - DNA, 567 bp, Klebsiella pneumoniae
atgcgcaacaaacggccagcagcccgtaatattggaatcgatattgaccaacaggttattgatgtatggcgcggcggggatattccctgcgaactcattcaggatgacgctatagcgtatctcagtacgtttccgtatcagggtagtgaactggtttacgccgacccaccctatgttcatagcacgcgtaaacgtagcaaaatctatcgtcatgaatattcagatgacgatcatcgccggttgctgcaagtgcttgccaggttgccctgcatggtcatgatatccggttacggaaatcctatctatgacgaaatgctgagcggatggcgctgcgagcgatttaacgccaagactcatacgagcgtgcgtgaagaatgcgtatggatgaactttgatgttcctgacaggttgcatgacgcgcgatacatgggcagcagttatcgggaaagacagactctggcccgcagacgcactcggctttatgatcgcatagaacgaatggaacccgcagagcgcaacgaactgatcaactggctgaacgcaacttatggactggagactgtatga

SEQ ID NO: 219650 - DNA, 1365 bp, Klebsiella pneumoniae; identical to SEQ ID NO: 193559

SEQ ID NO: 219651 - DNA, 246 bp, Klebsiella pneumoniae
atgatccagataattattgagaaatgcggagatagcccagtattcaaaataccagaagcaattatggaaaaagttggcttcagtatcggcgatgctattgatattgaagccaaaaatggctgtatcattattggcccagcggaactggttaaatattcccttgaaaatcttattgagggcatttctgaggttaatcttcacaacagagttgacttcaggctgccaataggcaaagagttgctctga

SEQ ID NO: 219652 - DNA, 1581 bp, Klebsiella pneumoniae
atgaacgcctactcgctatcacgtctgtttatcgcctggctcacctgcctcgcgacactgttattcgctcctctgctgccggcagtagaggcggaaaaagcgccgccggcagcagccgaagacaacacgctatcgattcatatcgacgatatgctacggccatggagaggcgatttgcctggcatgatcgaccgtcgtaccattcgggtattaaccacctacagcaagaccttcttttttattgataaaggcacccagcgcggggcgacgcacgacatttttatcgcgctggaaaacgagctgaataaacagctagcgaaggataaaaagctcaaacagcgccacctgaagctgcatatcgtttttgtgccggtcagtcgggacaatctctttatcgcgcttaatgaaggtaaaggcgatattgcggctgccaatctgactatcacgccctcgcgggaagcacaggtcgatttcgcccagccgctctacagcaacgtgaaagaattactgatctccggcccggcttcaccgaaggtcgacagcctggagcaactctctggtcaaaccgtctttgttcgccgctcctccagctattacgacagcctgcaagcgctgaacgcccgatttgccggtgagtcgcgcccaccggtgatactggaggcggcgccggaagcgctggaggatgaagatctgctggaaatgctcaacgccgggctaattccgctgatcgtcgtcgatcagcataaagcgttgttctggaaacaggtgtttccaaaaattcaggtccatgacaacgtggtgctgcgcgacggcggcgacattgcctgggcggtacgcaaagacagcccgcagctgctgacggtactgaacaacttcgtcaaaaagaatcgccagggcaccacgctgggcaatactctcctgctgcgttacctgaaaaatgctaaatatgtcaaaaatgccgcagcgaataaggaacgacgcaaattcctcgcgatggtagatgtcttccgcaagtacggcgatcgttacgacgtcgactggctgctgatggcggcccagggataccaggagtcgcggctgaatcagtcggtacggagccacgtcggcgccatcggcgttatgcaggtgatgcccagcactggaaaagagctgaaggtgggcgatattaaacagctggatcccaatatccatgccggcgtgaaatacatgcgctggatgatggatcggtactatgccgatgagcccatgacccggctcgataaagcgctgtttacctttgcctcctataacgcgggtccggcgcgtatcgcccgcctgcgcaccatgactaaacagcgaggatttgacccgaacgtctggttcggtaacgtcgaaaatatggcggcagaaaaaattggcgccgagacggtaacctacgtcagcaatatctataagtattacatcgcctatcggctgatcgtcgatgacatggcccgcaaacagaaagcgacggccgtaccgcggcaggagccggtagcgcagccagccaaaccgcagcccagcgtggcgacagccgccaccgctcaggtgcccgtcatctga

SEQ ID NO: 219653 - DNA, 2259 bp, Klebsiella pneumoniae
atgaaatacacgtctcacttcccgctggggatcgtcattcctctgctcgcctgtagcgtgccgctgcaggcggcagagaacatgaccgaacaatcgacgcctgacgagagcgccgccactgccgaaaatcacgaggagacgatggtcataaccgccgccaggcagaacctgcaggcgccgggcgtgtcgaccatcaccgcagaagagatccgcaaacatccccccgcccgcgatgtgtcggagttaattcgtacgcagcccggggtaaacctgaccggcaactccaccagcgggcagcgcggcaacaaccggcaaattgatatccgtggcatggggcccgagaatacgctggtgctggtcgatggtaaaccggtgaccagccgtaactcggtgcggtatggctggcgcggcgatcgtgactcccgcggcgataccagttgggtgccagcggagatgatcgatcatatcgatgtgatccgcggcccggcggcggcgcgctatggtaatggcgcgatgggcggggtcgtcaacatcgtgaccaaaccgaccacgcgagaatggcacgggtcgtggaatacctatatgaatgctccgcagcaccgtaaagaaggggcgacgaaacgtactaactttagcctcaatggtccgctgtcggacagtgtcagcttcaatctctggggtaatctgagtaaaacccaggccgatgcacaggatattaacgccgggcatgaagcggaacgtaccggttcctacgccggttcttatcccgccggacgtgaaggggtggtgaacaaagatattcacagtaagctgcgctgggagtttgccccgatgcaggccctggagtttgaggccggttacagccgccagggtaatctctatgctggcgacacacaaaacaccaataccagtacgctggtgaagagtatgtacgggaaagagaccaaccgtctctaccggcaaacttacggcgtaacatggaccggcggctgggataatggcgtgaccagcaacagctatgcccagtacgaacacacccgtaactcgcgaatggatgaagggctggcgggcggtacggaagggatcttctccagtagcgagttttcagatatcgatctggccgatgtcctgctacatagtgaagtgaatattccgtttacgctgggggtcgatcagaatctgacgctggggacagaatggaatcagcagcggatgaaagatggcgtatcgacaacccaggcgctctcttacggcactatcgatggcgtatcggctaccggtcgtagcccgtactccagcgccgagatcttctcgctgtttaccgaagataatatggcgctaacggacagcaccatgctgacacccgctctgcgcttcgatcatcacagcatcgtcggcaataactggagtccctcactgaacctgtcccaagagctgacggacgactggacgctgaagctgggcattgcccgtgcttacaaggcgcctaacctctaccagttgaacccgaactatattctctacagcaacggtcaaggctgttacgccagtagttccgcctgctatctgatggggaatagcgatctgaaaccggagaccagcgttaataaagagattggtcttgagtacaagcatgatggctatcaggcggggatcacctggttccgtaacgactatcacaataagattgagtcagggtatgcggcggtgggtaccgccagcaacggcaccaccaatatctatcagtgggaaaacgtaccaaaggcgttagtggaaggcctggaaggaacgctgaatctgccggtgggggagacggttaactggagcaataacctgacctggatgctgcagagcaagaataagacgaccggcgaccggctgtcagtgatcccgcagtttaccctgaactcgactttgagctggcaggttcgtgaagatctctccctgcagagcacctttacctggtatggccgacagaaaccaaaacgcttcaattataagggcgaggcggtcagcggcagcgaactaaacgaagtcagcccatacagcattgtcggcctcagtgcgacctgggatgtgaacaaaaatctgagcttcaccagcgggatagataacctgtttgatatccgccactaccgggcagggaatgcgcaaacgaccggcaacgcgacgacgggagcttatctgtatggcgcgggtgccgagacctataacgagtcggggcggaccttctttatgagcgttaatactcatttctga

SEQ ID NO: 219654 - DNA, 1761 bp, Klebsiella pneumoniae
atgacacgcttacttaagacaatcttgcccatcatcctctgcgccctcttcgggttatcgttcgcttcacccacgcaggctgtcgccagtctgccgatcgttcttcccgcgctgacatgcgatgcgctaagcgctaccgacttcagcgcggccgttggcgcaaaggtcactatcaatcacactgaaatgcagacctccgcgcagggaagctggtgcaaggtgagcgccactatcgcccctgagattggcgtgcagattgccctgccgactcaacgctggagtcaacgttttttgcaggtcggctgtggcggactgtgcgggagtattaacctgagtctgtcgaatgccagcggctgcctgccggcaatgaacggcgagtttgtggtggcagcaaccgatatggggcaccatggcagtatgatggatgcgtcatgggccgaagatccgcaaaagcgcatcgattttgcctggcgcgccaaccacctgaccgccgtgctggccaaagcggtgatgcagacgctttaccgccagccgccaaagtatgcctactttatgggctgctcagacggcggtcgcgaagcattgatggaagcgcagcgctttccgcaggattttgacggtatcagcgctggcgcgccagcggcctttttccagtttcagaactccttcttccacggctggaatgtggccgccaatcagcgcccggacggtaccgctatcctgctgaaaaatcgccttcctctgattcaccaggccgtgctggctcactgcccgacgctttccggcgtgcaggatggtatcctgcaaaatccgtatgcctgtcagttctctgagtcatggctcccccgctgtcctgccgatgctcgggaccgttctacctgcctgacgcaggaagagatcgaggtggtgaaaaagctctaccgcggggcttacgacagccacggcgcccagttcgtcgcgggcggtctgccgctgggttccgagctacgctggccggtgcccgagacgccgaccggccactcaatgtcggaaatgatggtactaccggctctgcaatccgtgctcctgccaggagaaaaacagaagatccaatcgatgcgggatttcccgcttaaccagcagaattttgacgccgtcgcccaactggcgccgctctataacgcggcaaataccaatcttcatgcctatcaacagcgcggcggcaagcttatcctctggcacggtctggccgatgactccgtcagtccggccttttctatcgcctattatcgcggcgtagaagcagagatgggccatgccgcaacggataccttcctgcggttattcctgctgcctggggtagcccattgcggtaatggcgaaggttacgatcaaattgatctccttactccgctgatgcgctggaccgaggaaggtatcgcgccgcaggagatcatggccggcaaacgggcaacagccgctgccgacctgccgccgatgacagaaaaaccagatgcgcaaacgcagtttcacggcgtgcagaaagtcagtcagccttacgctgacgccgctccagctgttatcgcgactcgtccggtgtatcccttcccggctattgcccgttataacgggcgcggcgacgtgaatgacggcgaaaattatcatgcagagcaaactaccgcctttggtcatctgcagctggcaaaacccgccagcgactatattggccctgataatcaaaaaaattatcaggttcgccacggcacactcactgttcaataa

SEQ ID NO: 219655 - DNA, 1236 bp, Klebsiella pneumoniae
atggcgctggaaggctattttcttttccagggagatcgtaccgtctgtggcggtaaaattatcaccggtgctgaagacaccgaatttttcgggcgatcacaggcgcgggaaagcgataaagtgacctgcggaaaacatccggggatctaccgtatttgtggtggcatgggcgacatgtacgaagtaggcggtgtaaaccgccagctagcaggctccatcgaaagttacagctcctgcccgtgtcgggcgaaattcattccgcaagatttggataacacctacgaatataactgcaatgccggcctggctgccgaacgggagagggaagccagcaggaaaaaactgaatgaggcgaaggctaaagggcctcagccaatgccccttccggcgctgatttatgccacgcagagggcaatggatgactacggcgcaaaggacatgcaccacggtgatctgagcgaggaagcactgaaagagcgctttggtctgacggatgtctcggcgaaagtgaacccgtatacgctgacccttgtcccaccagcgcccgccagttcgtatggtgtattttatccgggcagcctgacgggaagtacgccggtcgtggtcagccgggaggaaagtgtccggctgatgtttgatgagttccggggacttgccaaggtattctccttccatggcccatataaaaacatcatcaccgaaatgattaatcatatgcaggggaacagcggcacatcgtacagcagcccattactggacagggcgctgaaagagcagatcctgaatgaccattcgagtgatagctcgttgttggggattaaaagggccttggatgatgctgttagctacgaatatggatttcttcctctcggtaaaaaggacgatttattcgacggaaagggcaactttaaggaagttaataaagctgttctacctaaatttgatcgtcagatcgataagactaacgggctggtgattaccgtccatgatacgtggtcgacgcatatcacgctcgagtcactggaggtgacgggcgacagctaccgggcgaaagtacactaccgggtacaggaccacttcgggcttgatgacgcggatatcctgaaccctgtttttcatcagggccgaattttccggatctggtttgtgctgcagcgctatgtgaaatacggctataggccgttcatcaccgagatgaatgcgaccgtggaaatcagcgggaggcggggtgaataa

SEQ ID NO: 219656 - DNA, 1527 bp, Klebsiella pneumoniae
atgagcaatgaaattcttgccaatcccgcgccagcggcggaaaaacatgttgtgcagcggctgcggccaaatgcggtaggccttggcggggtgctgtttatgactatcgccacggcagcgccgatcactgcgatgctgggcaatgtgccgatcgcggtgggtagtggtaatggtcagtttgcgcccgcggggtttatggtcgccacccttatccttgccctgtttgccatcggctatgcgcagatggccaggtttattaccgctaccggcgcattttatggctttatttcacacggccttgggcggatcgttggcatggcgtcaggagtgacggtgaccatgacctacattgtctttgaggctgcgctggtcgggatcttcgcctttttctgtgaggatttaatcaatacggtcttcagcgtacatatcccctggctcatcttagccttcgccatgctaatgactaccggagtgctgagctatttcgatatttcgctcacttcccgggtgctcggcctgtgcctggtactggaaatattgatcctcaccgccgtcgcggtggcggtgctgatccatggcggagggccacagggttttgtccccgagtcgatcaacccgctgaacgcctttaccccggcgaaaggggtggtcggcgccagtgccggaattggattattcttcgccttctggtcatgggtgggctttgagtcatcggcaatgtacggtgaagagtcgaagaacccgaaaaagatcattcccctggctaccctgctgggcgtgattggtatcggcgtgttctacgtgttcatttcgtggatggcgattgccggaacgggaccggagcaggctattgcccttgcgcaggatcctaaccgcgcaggagagattttctacggtccggctcgccagtatctgggggagtgggcggtcggggtgtttaagctgctggtgatcactggctcttttgcctgcgggatggcgtttcataactgcgcggcgcgctatctctacgcgctcgggcgggaaaatctgtttccgtttgccgggcgcacgttgggtcgttcacactcgcgccacggctccccccatgttgcctctacggtgcagaccgttatcgccacgctgattgtgttgctattctttatcaccggtaaagatccttacgcggatatttacaccctgctggcgctgttgggtacgatgggcattatgattgtccaggcgctttgcgcctttgcggtgatcgtttacttccacggcaataaagaaaatattggcaaaggacactggtttaaaacaggcgttgcgccgttgcttggggggatggggatgatctatatcgtctacctgttattcaaaaatatggcgtttgccgcgggcgctgccgccagctcctccttttatcatgccattccgtggatcgtgttggcctgcttctgctttggcgccgccatcgcggtctggttttacctctttgatgcgcaaaagtaccgggttatcggacgcattgtactgacggatgattga

SEQ ID NO: 219657 - DNA, 771 bp, Klebsiella pneumoniae
atgtcagattttatgaacaaacatgtgctggtgaccggcgggagtagtgggatcggtcttggcattgcactcggctttgcccgcgccggggcgaaggtgaccattaccgcccgcacaccatcgcgtatcgatagcgcgatcggccaggcggcggagcagggattaacgctacgcggtctgacctgcaacgtcagtcatgccgaagaggtaaaagcctgtgtggcagaagccgcacagcagtggggtggtctggatattgtctgctgcaacgcggggatttttccttcggcgccgctggcagacatgagcgaacagcagtgggatgaggtgcaggcgatcaacagtaaagggacttttttaactgtccaggcggcgctgccatggctgaaacgggcagagtatggtcgcatcatcctcacctcttcgattaccgggccggtaacgggctatccgggctgggctcactatgccgccagcaaagcggcccagctgggttttatgcgtagcgcggcgttggaactggccggcgacaacattaccgtcaatgccgtcctgccggggaatatcgtcacggaagggctgagggatatgggcgaggactatatcgccgggatggccagcgccgtgccgctcaaacgcctcggaacggtggaagatattgctgcggcagcgctgttcttcgcctcccgtcaggctggctacatcaccggccagtcgctaattgttgacggtgggcagatcctgcctgaatccgccgcgtgcctgaactga

SEQ ID NO: 219658 - DNA, 1032 bp, Klebsiella pneumoniae
atgtttaacgacgagtatttaacaacacttaccctgaagctgcggccgctcctgccccgctggggcctcagcgaaggcgcagagattggcctgctgacggtttcagaaaatgccacgtttctggtcagcgataagatgacgcagagaaagatcgtgctgcgagtgcatcgcccaaactacagctcagcggtggagatccattctgagctgatgtggctaaacgccctgcatgcccggggagatatcaacatcgccgtaccgcttgtactggatgatgggacctgtatcgccagcctcatcgacggcgaaacggtcacccacgtcgtgggattcacctttgttgcgggcagcgaacctgataccggtagccatctcaccggctggtaccatgccctgggacgggttgcgggagaactgcacaggcacagcgaaggctgggtaaaacccgagggttttcatcgcaaggtgtggaacaccgagacgattatcggacgtcatgcctggtggggcgactggcggaagatgacgcaactgagcgccgacgatattacgctgctggaggcggtggaggccacagtggtcgcaagactggaagcgtacggacagggcgccgaccgctatgggctggtgcactgcgacatgcggctggccaacctgttggtgaatgagaattcgctgacggtgattgattttgacgactgcggcatctgctggtttggctgggattttgccaccgccgtcagttttattgaagacgacccggcccttgcggactaccgcgctgcgtggcttgcgggctaccgtagcgtccgtcccttcagtcagcaggacgaagtgatgcttccggtgctggtgatgctgcgccgcttacagctgacggcctggctggccagccatagtgagacagccaccgcccgtcgctacagcccgcaatggggcgccatcaccgtacgcctggcccaggcgtttctcctccaggcgtcaccgcttagcgctaccgttaactgcaaggaacctgctgatgaacaataa

SEQ ID NO: 219659 - DNA, 1338 bp, Klebsiella pneumoniae
atgaacaataaaacccccattcttcaactgaaccgttttgacgcgctgaccggcgtggccgacgaaaacctgagccgacaaattgcccgtcgccacgccacccaggggaccggttcggtgctgttttatccacaaccgatcgtcatggcgtcggcctccggagcctggatggaggactccgccggcaaccgttatctggatatgtataacaacgtgccgggcgtggggcattgtcatccgcatattacccaggcgatggtgcgccaggccgggttactgaacaccaacacccgctatctgttcccggtactggagcagtacgcggacagcctgctggcgacgttccccgccgggctgtcgaatgtgatatttacctgcaccggcagcgagagcaacgacatcgccctgcggatggcccgctttatcagtggtcggcaggggatcatcgtcaccgagagtgcctatcacggcaatacaacggcggtgatggaggtctctccctccgggcacaaagaggccctcctgcccccgtgggtgcataccattcccgcccctgacctgcgcaggctgtcagcgggccagacgctgtctgacctcttcgccgccgacgttgagcgcgccatggacgagctggatgagcggggctacggctgcgcggcgctactggtggataccattttttccagcgacggcgttttcgccgatccgccgggatttctggctcaggcggtagcccgcgtacaggcccggggcggactgtttatcgccgatgaagtccagccgggctttggtcggacaggctctcatttctggggcttccagcgtcacagtgtgcaaccggatatcgtcacgctcggcaagccaatggggaacggttttcccatggccgcggtgatcacgcgtccggctattctgcaggcgttcagcgaaaagaccgagtacttcaacacctttggcggtaacccggtggctgccgccgtgggcctcgcggtactggaggtgattgaacaggaggccctgatgaacaacgcccagcgcaacggggactatctgcgtgccggactgcgccagctggcccaggatttcccggccatcgccgacattcgcggcgccggactgttcaacgccatcgagtttgcccggccagacagcggagagccggatccgcagctgacgagtcgcgttatctatcacctgaagcttgagggcgtgctgattggcgcggccggtcgctttggcaacagcctgaagatccgtccgccgctgtgcttcagtcgcgatgatgcagatttcttcctcgaacggctggcgaaagtcatgggccgcctgaacggatag

SEQ ID NO: 219660 - DNA, 783 bp, Klebsiella pneumoniae
atgtcgaagagaaaagaagaccgtcagcaacagatcctgcgcgaactggctgagaccccgaccctgcggattggggatatggcgcgcacccacggtgtctctaccgaaaccatccgtcgcgatctcgacgaacttacccgccggggcgtactgaaccgaacttacggcggtgcggtgcgggccatgaacagtgaaccgacggtcacggagcgccaccagctgtttaccgaagagcgcgagcgcatcgcccgggatgccgtccattgtatgcgcgagggcaaaatattcatgatcggctccggcgccaccacggtacatgttgcccgccggatggccagcgagctgcgggatatcacggtcatcacccacgccttcggcgtcgcaacggtgctgtcgatgaatccaaccatccgggtgatcgtcgctcccggggagtactgcgctaccgaaggggcaatgaccggtgcgcagacgcttcagttcctcagccagttcacggcggactatacgttactgggggccagcggtatcgccgccgatgggccaagcgaggcgttaatcgacagtggaacggtttaccgggcgatgatccagcgcgccgcgaagagcattgtcgtcgccgaccactcgaagttcgacctcacctatccctaccactacgcgggctggtcgggcatcagccgtttaattactgaccagcccctgcccgaccatctcgctactgtactcggccgggaaaaggtggtcgtggcgcgtggtcatgccgctcctgaacagcagtga

SEQ ID NO: 219661 - DNA, 1062 bp, Klebsiella pneumoniae
atgaacaaagaaacgattctgagccgtcagattttgacatatatgttgttgttaacgtttgttattattgccattgcaatactcggttcctacttattttatagtttcctgatttattacctgccgggtggaatgaacgaaggcagtgaagatgctatgacattccttgactggatgtggattctgatggcgtccgttaccagtctggtcgttgcacttttctttaccgtaaagctgtctgcaagaatattcaacccactgaatgacgtcgcatacagcctgaaacaaatctctcagggaaaccttagtgccagagcatttaacagcagttctaagttgggagagatgaataggctcgtcaatgactttaatgagatggctgaaaagttacagacgctggatgcgcagcgaaatttatggaatgctgcaattgctcatgaactccggacgccggtgactatcttacgtgggaggcttcagggactggttgatggcgttttcgaaccagaaccgtcgttattcaggaaccttcttaaacaaactgaaggtctgaccaacttaattgaggatctccgcgtcgtgagttcgtcaggaggcgctgggtactccttgatgctgagtgaagtcgatctcaaggccacgatttcaaatgcgcttgataccttttggccggactttgataaaaagcatttcaaaattgtcactgagattaaccatcagtattgcgtttgcgatcccttacgcattattcagtgcctcaccgttctttttgacaatgccttaaaatattccacatcacaaacgctgttaataaagaatggtattgcaggaaacgataattttattatcgttcaggaccaaggacctggaattcctgaagaactccagaagtccttattccagccttttcagcgaggagaatacgccaaaaatattaatccagagggttgtggcttagggttgtcggtagttaaagccattatgtgcgcccacggcggagacgttagctatagtttaacaccagaaaatggctcacttttcaaactctcatggcctgtttaa

SEQ ID NO: 219662 - DNA, 261 bp, Klebsiella pneumoniae
gtgactgcctatcaaacaaagaaagaagcgcttaaaggccgtggccccaaaaatccgcgtccagctagtttgaacattgcagccgctaggattgtgaagcttgagaacgaaatcgaagagctgaaggaagagaaccggatgtacaaacaacagtttgtgatctggcaatacaatgcatacaaacatggaatgaaggagcatcaacttaatgcgcagttgacgaagattgaccgggagagaactgatggtgaaaaacgttaa

SEQ ID NO: 219663 - DNA, 2034 bp, Klebsiella pneumoniae
atggctgagattttccagttcaagccaaaggctattctgacggcagcagaaaaccttggagcattcatagccaagtgccgagatcaactgactgtattcggatccgaactcaattgggatgctcctgtgtggccaaacataactgtgttcgccaagttgggcgttactactcgcaaaccaaaaccccaagagatgcaagatccagagttcatcgatttcgctaaagcttatttccgttaccagcaggggcatcatcccacggggacaaaaaatgaaagtaaggccctccgagcggttgaggcgtctttgcttcaagtaaacgggagtgcaaatattgatggcctgtcaattactgtgcttgatgaagcagctgaattggcaaggcagcactactcagatggctcagcatatagttgcggccgtgagattgagcggctggctaagtttgtagttgaaaaccagcttgtaccaaacgctatacaagattgggtcaatccaattcagcgtgctagtgataagaataaaacaggcagagaggcgaagaaaaatagagaggagaaactgccctgtgatattgctctcaatgcgctggccgaaatttttgccactaatccaattaatgagagggatatattcacatcatcggtgtttgcgatgctgatgtcagcaccatcacgcattactgaagttttggctctacctgcggattgcgaggtatttgaaactgatcgcgaaggtatagaacgttatggctggcgtttctttgccgggaaaggttacgagggtgatataaagtggataccaagcgttatggtcgaagtagccaaaactgccatcgccagagtgaaaactctatcacagaatgcccgaagcctagccaagtggattgagaataaccctaacaagttttaccgtcatattgactgtcctgatgttgctgatgataagccattaacgatggaggagtcttgtatagctctcggtcttgcttgtgaatccaaaaagcaatgtcattcttctctttataatcgaggactagtccaaaaagatggtgtgcacacgctaaatagtttgtggcagcatactttggcgcgtttgcctgatagttttccgtggttcgataaagacaaaggtattatgtacagtaatgctttgtttgcactgaatgctaatcagtttcatggaaaccgaggctgcctgccggttgaattgcacaaaccaacccataatttttttaacaatgatcttacgcctcgtgaggccattgaaggaaaacatgccagtatctttgatcgccatggttatcgtactgaaaatggagagcgggtcaaattgacctcgcatcaggctcgacacctgctcaacaccattgcccagcgtggaggactgtcaaacttggaaattgccaagtggtctggacgggcagacgtgaagcagaatcgaacctacaaccacatgactgaatacgaactggttggcatggctgaacgccttgatcccacaaaagcgctatttgggcctgttggcgaagtggcaaagcatctgcccgtgactatgcaggagttgaataccttagagcatgccgcagtccatgtgacggagtatggctactgtgtgcatgattacaccatgagtccttgtgagaagttccgagattgcgtcaactgtactgagcaggtttgtatcaagggcgatgatacagaaaaatcagaccgaattaaaaagcggctggtgaagtcggaacgattattttcgcttgctgaaacggctgtggcaagcggcgagatgggggctgaccgctggtatcagtaccataagaagaccgttaccaggcttcgggaactagtcgccattttagaagatccaaacattgaaaatggtacccagattaagctcttgggcaatgatttcagccagcttcgccgtgttgtcgcaaagacttctattgaggccatcgagcaaaaaggcaaagaaagtgaagaagctgtgatgttagataatttgacaactttgttaggggggggccttggctaa

SEQ ID NO: 219664 - DNA, 1560 bp, Klebsiella pneumoniae
atgatgaataacatcttaccagcattgcctaccgagaaaatacctgcaaaatcaaatggatactttttcacgttgcatgaagctatgtggagattagataaaaacaacaatatttcggttggtatgatacatgaccttctggatcctgagactctgagtgggtttcttcataccctgtcattttatgccaggaacctgtccgcggcatacacgagacatattttcctgtgtttcttagacatgattcgtgcaactaaagctactcgtattgacgatatcatgttgattggatataggtcttctttggatgcggctcatgagcatgagttagcctgcgttagtgttttactgcgaaagtggcacaagctgggctatcccggtgttagcaagaacgtggcgtgtttgctggagggatggaggttaaagggggggcgtaagggggatgcggttaagcgattggatcctctaaaggggcctttgacggataatgaacttcaagcgtttaacgaggcggttgtacgagcttatgaaaagagcttaattaccatcgcggagttggctatggctcttagcgtcagtcatacagggcgtcgttcaatccagatctctcagctgcgcgtggttgatattctctgcggagaaaatgaaaagggtgaacccttctatgtgttgaatgtgccgcgagccaagcaacgtaacagcttttttcgcgaaagcttcaagccctatgcgatgactctcgaactatgggcagtcctgagtgctcaggcaaggaatgctgttactctggttgagaatcgtctcgggattgaattgcaggaagctgaccggcagcagatccctctgtttcctgatcttgatgtgctagcgaccatccaatccccttatgaattctaccaactgcttgccactgacaaactccacatcgccgcttcagtgataactaaaacactccatttaatcgtagaagaatcagatatccggtcagaacgtactggtgatctattgcatatcaattctcgccgctttcggtataccacgggcacacgggctgcccgtgaaggttttggcgagttggtaatagcggaactgcttgaccatacggacacccaaaacgcaggtgtttatatcaagaatatacccgagcatgtgaaaatgctggatgaggcggttggttttcaattggcgccatacgctcaggcatttgtcggggtacttgtagattcagagagggatgcacatcgaggtgacgacccaaccagccgtattcggaccgaaataggtcaaggtgttggaacttgtggcgaacatggcttttgtggcgccaatgtacctattccttgctacacctgcatgcattttcagccatggctggatggcccgcatgaagatgtctatcagggcttgcttaatgagcgtgagcgggtgaaagagataactggcgacatccagattgctgccgtgcttgatcgtagcatcatcgcggtggcagatgtgattatgcgttgcgctaaacgtcgtgaagagcttggtaaagagggattaattaccaatggctga

SEQ ID NO: 219665 - DNA, 1191 bp, Klebsiella pneumoniae; identical to SEQ ID NO: 193571

SEQ ID NO: 219666 - DNA, 1263 bp, Klebsiella pneumoniae
atgcctgtcgatttaaaacgtattcccccgcctgcccaacggcctcgagcaccggcgtggtgggtttggttgctgtttttgctgtgttggctggcagcgggcacctgctgggccattatgagcaataaagataaactccaaataaacaccgcggatttttggcaaacggcgttgatattaccggcattactctggcttattctgctggcgttgcgtatcgcctggtataaagggttacagtcaatggctgatggctgggataacgatcgtgaacagatttggagtcgtgaaatccagagagggcggcgccacctggcaatcctgggcgtaagcttacacaccgcattacgtctccctgatgatcaggacggtaaggggcagagagaggcattacgaaacaataccccggctttaaaaacgcagccttcctggtggagtgacgaaggtatacgacatagtcggctgttgcgtatcggcgacgaaacgcccgaacagttggttaagcgcatcatgagcaatacgttgaatgagctgacttctgtactggcatctgttcctgcagagataccgctgtcattaatcatagagagcgacggcagtatgcccgtcagcgagatacagtcgatctggcgccagtgtttggcgaacagtcacatccggcaaccggtgacgtatctggaaggcaaaggactgcagatgatagaccactggctggatcagccgatgacagagccatccctgatgctgattgtggcgctacaggttgctcccaaacaggttgagggaacggcagaaacggtggttagcctgttgcttgccagtcctcaggtcgcggcggatcttatgccactggcgcttctccaccgaccagagcaggtgaaggggataagccacgaggcgtttcattatgcctttgcgcgcgcgtttgactgggccgcgttacccgcggaggccgtgcctgccggttggttggtgggtatcaagatgaactatcatcagcccatcgcaacgggattgatcgcgttgtcgagcccgatcaatatcggtcgtgatttctacaacctggacagtagcctgggttatccaggcgtcgcagcaccctgggtcgcgatcgctggagcaatcctgcggtgcggtgacgataaatctcaactcattgtaagtggtgacggttttgccgaccaaccattatgggccacggtgatcaccccattaccactatcatcagagcttcaccaggccaggcccgttcgcgctgcctga

SEQ ID NO: 219667 - DNA, 264 bp, Klebsiella pneumoniae
atgaaaggaattattcgtacaggcgatacgcataccgggggcgggaaagtgctccgtggttccagtaatatgaaatttggtggtatcggcgtggcgcggctgggcgatcccgtcagttgtccgatcaaaggccatggtccgacggtgattgccgaagggcatcctacttttagcgatcatggcataccggttgcgttccatggccaccgttgtgcttgtggttgtgtattgctgtcgagcctgccacaagccagggtgcgctaa

SEQ ID NO: 219668 - DNA, 978 bp, Klebsiella pneumoniae
atgcgtaaatttttaatcggcttttttattttcttctcagggatagcagcggggcagtctaatttagaagattttaatcattcgccgaagtgggtggattcggctgggcaaataaatcctgatccgggtttgatgaagtattttcagagtatgaaatttgtctgtcataacgcgtctggatttacacctgaagaaaataagagtgctgcaaaggcgttcagtgaactggttcagtatacttctgagggagatcaaataaagggtttctggaacagtcctgaacataagcaaaaacgtgaaggactgcttgcaacagcaataaaagccggaagctggaaggccgcatatgtaaatagtgtctgggcaataaaatacccgagtgcggagactccgatagaggttgcttccaccaaactccacgaactcgtttctcggggcatccctattgctgcctacaaatatgcgtcgtatttgtttggtcgagacgatgaaacaatgtactacttgtatgctgaagccatcaagcgtggcagtccacaggccatgtcagcagtagggggaactattgttgtcagggttcaggaattgcacccattaggtaagcagttgctggcatgtgcggtagggcaaggttatgcagaggcttatgatcatcttgggttgcttgccgatatggaaggcaggagagtagatgcctatcgtttgtgggaaaaaggcattaatgaaggatgtgaaggctgcatcaaaaaaatgagtaatctggctaaagttcggcatggttattctgcggatgtgccgatgatggaattgatgcccgaactcacgaggattaaagaattcaatgaaaataatttcttctatcaattgactgaattgccagatttctatcgtcgtctgccggatgaactgattttccatctaaacgattccgaacttttaagtctgcttaagctggagaaactttctcgcgcgttataa

SEQ ID NO: 219669 - DNA, 1065 bp, Klebsiella pneumoniae
atgaaagggataacgacatggatagtgctgggcagcctgctgctgtcaggctgtgaccagaaaagcatccacaaggatgtgccggtgaacccgctgaccgatattaacacccgcctggcgtttacctgcaaacaccagatcattcctgaggcgtctgctgaaaccgatgtcctgtttaaatatgcccgctggctgcaaaaaaataacctgattaaccgggataaaacggtggatgcggaaattgcgcgactgtatcgcatcgcggcggaaaacgggcattacaaagccagtattaacctgcagaacggtgcgctgcgcgggcgctttgcgctgagcagccatgaacgtctgcgcctgagtcagcaactgattgatgcgaaggtggccgccggctactactttattgccatctatctggagcacggtgcggcaggactggcgcaggacccggagatggcgctgcgttactatcgtaaggcggcagatgaagggaatccccaggcgcaggcgtatgtgggggataaactcgctccgattgatattgcgccggatatatcccgtcagatgcgtcgctgtgctgctgaacagggagagagagaggtatccagtgatctgggtgttaacctgaaaaataataagcgatttcagcaggcaactgaggcattccagttgggtgtggcagcgggagattcaggctccgccagtttccttgaacatggatttgcaggcccggaactgaccgacaggttgttctatctggcactggagaaagacccggagcgtgcccgtcgttatgagcagataggtgctgtgctggcgaaatactcatgggcccatcctgtcgtcccggaaatcaacgatatcgtgccgctgccgccggccccgctgccggagtgggacggcaagctgaagtggctggaggaatgggaggcaaatatcccgccgccagtgcctgatgcagcgctgatagagaaactggcgaaagcgaaacagctgaacccggcgacgggcaggccgctgccgacgtcaccggactttgagaaggacagcgtggcggctccgtaa

SEQ ID NO: 219670 - DNA, 1011 bp, Klebsiella pneumoniae
atggcaaatatacttcgctcaatacctatgctattagtgattggttttaatctattgctagccatcctgtttagtttgatctatgccaggaagcatccggaaactgatctattcatcatcataacatttactggtatgttatcaatttccacatatattataagtttctactctgtttcgacctttgcaactaaggagaaaaagaaaataaaaggtgtctttaccagacgaagaggtaaactaaaaagaattattacagactcgatggtactaatcttggttttttttgtttcaggctcgatagtattttcagggagtgatttgaattatggtcttgctctcttagccatttcaacaggctattttactttcttgcttgttaattattattttttgtgtatgtcaagagtaaaagaaaagatagtcaaaataataaataaaatcctttttattgtgttctcgattatattgtttttttctaagatgattgcaaatggttttgttaaagagttttttgatgttgatatcgctaaagttccttatattagttggtcattctcgattttgtttgccattccattttttttgattacttcccacgtggggtgtatgattttagaaggtacaacagatttattccggacaagaaaaattaaagtgcctccgatgatccattattcgatattttgtttatcttgcgttttttttagcattagttatatttcttatttgggtagcgcaggttggttatttaatgctgtgaccaaaaaggtttattcttatgataccagaagctcttttcgatgcaataataagtactggacgattccagagttagggaaagatgcgaggtatctcgctgaaacatctgatagttaccgtgttatctatattagaggaaataatattaatgtggaagttgtaaaatgtaaaaaaaacgaaggatatatcctttttcccattgaaaatgctaacgatatattaaaaaagcaggttccaaagggaggctga

SEQ ID NO: 219671 - DNA, 1617 bp, Klebsiella pneumoniae
atgaagtatcctgtcgctttgacatgcggcgcgctgtggttagccagcgtatcttctctggcctgggcggctgacgtaccgccgggcacggtactggcggaaaaacagctgttagtgcgccatatcaaagatgaacccgcctcgttagatcccgccaaagcggtgggcctgccggaaatccaggtgatccgcgatctgtttgaaggtttagtcaatcaggatgcgaaaggcaacctggttccaggcgtagcgacccgctggcagagcaacgataaccgcgtctggacctttaccctgcgtgataatgcccgctggtccgacggcacgccggttactgccgaagatttcgtctatagctggcagcgtctggtggatccgaaaaccacttcgccgttcgcctggttcgcggcgctggcggggatcgctaacgcgcagaacattattgacggcaaagccgcgccggagaccctgggagtcaccgccgtcgacgcccacaccctgcgggtgcagctggataaaccactgccgtggttcagcaacctgaccgccagctttgccttctatccggtgcaaaaggcgaatgtcgacagcggggcgaactggacgcggcccggcagcctggtgggcaacggcgcctatgttctgaaagaccgcgtggtcaatgagaagctggtggtggtgccgaacacgcactactgggataacgccaaaacggtgatccagcaggtcacctttgtgccgattaaccaggagtccgccgccaccaagcgctatcttgcaggggatatcgatatcaccgagtctttcccgaaaaatatgtaccagaaactgctgaaggatattccggggcaggtgtataccccgccgcagctgggtacctactattacgctttcaatacccaaaaggggccgacggcggatgagcgggtacgcctggcgctgagcatgaccatcgatcgccgggtgatggcggagaaagtattggggaccggggaaaaaccggcctggcgcttcacgccggacgtgacggcgggcttcaccccccagccgtcacagtttgagagcatgagtcaggctgagcttaatgcccaggcgaaagccctgctggctgccgctggctatggcccgaatcgtccgctgaagctgacgctgctgtataacacctctgagaaccaccagaaaattgccatcgcggtggcgtcgatgtggaagaaaaacctcggcgtggaagtgaagctgcagaaccaggagtggaaaacctatatcgacagccgtaacaccggcaatttcgacgtgatccgcgcttcgtgggtaggggactacaacgagccgtccaccttcctgtcgctgctgacctccacccacagcggaaatatctcgcgctttaacgatccggcgtacgacaaaatcctcgcccaggcggcggtagagaattcggccaaagcgcgtaacgacgattacaacgcggcagaaaagatcattatggtcaaagcgccgatcgcgccgatctaccagtacactaacggccgattgattaagccgtggctgaaaggctacccgatcaccaacccggaagatgtggcctacagccgtaccatgtatatcgtgaagcactaa

SEQ ID NO: 219672 - DNA, 1017 bp, Klebsiella pneumoniae
atgagaaaaatacttctttttttatccctactatgctgttgtagcgaggtaattgccaaatgcgattattctggttccgctggacaagcaatgtttaacataagtcctaaaatcgcaacagacccaacaattccggtgggtacagtcctctatactaaaaaagtcggtaccggacattataaaacatttgagtgcagcaaaataatgggagaccagtatattgttgaatcaacagcaccggaagttaccggcgtcacgggtataaggggcaaaccagtctatgaaaccggcatagatggaattggctttcagttttcagatcttctgagcagcaaaaatggttctattaatcctgctgttgctcaatctacaatcgtacctattttagaatcgaatgaagattataaatttatgacggtatggttaattaaaacaaagcaggtcatcgatacatccggcaccagtacaaacccggtatttaaattctcagcaggtaacttaagcaccaacccaagggcagctgaccgccttttgttaacagcaaccctgaagttcaagactatttcatataaagatacctcttgcgatatttcagtatcagggcctagccaaatcaccctgaataaaattgaaaaaaacacattaatgtccatttctcgaggaggtacaactccatcacaaaaaactatcaaaatggatgtgacttgcccacaaggttcagttggcaacaagctttactactggtttaaccctgttaatggcaccagttctgccggggatgggatcatcgataacatgataactggaaccgaagccgcaaataacgttggcgttatcttcaaaattgacaacaagcctataatattttacgacgccgaaacttatagcttcgccaaggcacaggcatcacaaaactttaccttcaccgccgactattatcgcatgagtgacaatagcgctgaagtctcttccggtcatgtaaaagctatgcttgaagttgtcatacaggaagagtaa

SEQ ID NO: 219673 - DNA, 351 bp, Klebsiella pneumoniae
atgcaccaattaactgtatttgaaatggaagaaatttctggcggtgcgctgaccgatactcttaccgatatcgtcacctgggccgcaaaagaagttggcgctatcgcactgggcgcctctctgggcgctatttttggtacagcgtacgccggacgttggggtggcgtaagtggcggtatcttcggtatcggctcaatcggccagggtgtagggatgatcgccggggttattctcggtggcgtttgctttggtattgcagcgggtatcgttggctgggatatgactctggattatgctcagggcgtaatggatgctatttatgacggcaccctgaacttctggagcaactaa

SEQ ID NO: 219674 - DNA, 1287 bp, Klebsiella pneumoniae
atgttaaaaaaaatctatcgcaaggaagcgattgagtataaaaagcatcactggaaaggaaaggcactgctgctcgcagggcttccagcatggcttgttgcattactctcttttgcttttcttgcgatcctgatagccaccacagtattttgctcctttacccagagaatcgacgttcagggagaggtcattactctacctcactctgtcaacgtttatgccccgcagcaaggctttgttatctcccaatatgtaaaagtcggcgatattgtgaccaaaggccagccgttatatgagatcgacatttcccggaacaccacaacgggtaatgttagtgcggtacaaatagaggtcattaatgaaaagatcgcaaatgctgaagatatcatttcaaaactgaatcataataaagaagaaacaaccatttctttagagaagcagttaaaaacaatcaatgattcgttaaaagaaactaatcgcatgttggctaacgcccaggctggattaaagaaaatgcatgataatctatccagctatgataagtatttaagtgacggactgattaccaaagaccaatataactatcaacactctttgtattttcaacaacaaagcacttaccagtctctggtgagtcagaaaatgcaactggaatcgcaggtcactcagctcaatagtgataaaattacaaaaatagctgattttgacaatcaaatctcgtcacaagaaaaccagattaatgattataaaaatcaactggttgaatcaaacgcaaacggtaacattattattaaagcaacgactgaaggccgtattgaatcattgaccgtcactaaaggccaaatggttgataaaggcagcagtctagcacagataaaacctaccggtgatatagagtattatcttattttatggttacctaacaatagtataccttatgtaaaacctggggatgaaattaacattcgttatgctgcattcccatcagataaatttggtcaattcccgggaaaaatactttcaatatcttctgttcccacatctcgacaagaaatgtctgagtataccaatgttacgaacggcacaaaccagcaggaactggcgctctataagaccattgtgaaaattgaaaacaaaacctttgaatataatggtaaaacgctttcgctttcaaatggcctcaaggctcaagctgttgtattcctggaagagcgtccgctctatatgtggatgtttacccctgtgtataagataactcaaagcattactgggccgatccatgactaa

SEQ ID NO: 219675 - DNA, 1047 bp, Klebsiella pneumoniae
ttgcattggttagttcgtctacgcctggcctggcgccaaatcaccactggatttccttcacgtgcgaggctggcagcgcgcgatgcgcttgctacggcactggcctgcctgctggcatggttactggcggtatggctgttaggacatgagcatcctacgtttgccatcgtcagcgccgtggtatgtcttgctccgggtgtacccagtcacctgaaacaggccagaaatctggttattggctgtacgttcggtatcgtgatgggggagttgatgtggcagctccccgatactcatccactggtgcggatgagcattggtatgttcttcgctattttgttgggcgccgccatcggcccggctccggtggtccccatccaggctggagtatcggtggctctggttcttgccatggggcctgaaagcgcgggcggtacacgtttagtggacgttctgctgggagcctctgtcggattattattcagccaggtgctctttacgtctaatccattcagcgacattgggcgttcaacctccgacttcctgcgtcagattggtaatggactggatcgaatgctacgagcctgtgaggtgcaaagcagtaagggagcagaggccgctttgagtcagctttcagaggctcaggccgctctggccgctcttcgcgccgctgtagctgaagcacaggtcagtaaacgctggtcactacggggtcggctaaacgccgggcggcttgccaccgtcacacagcgttacgaccgccatgcaatccgggtatacgcgacttcccttttattagcggaaagtctcagccgggccatgtcacacacccatactccaccaccaactgtcgtgatgacgtattgtcagtggttgtcggatagctgcatggtactagcccgtcaatccgccgttgttgcgcttaaagaaagtgacccacaggcttgtatgggaacaccacctcagtccaccgctgaccagcgccatgaactaccgccagaatggctcacggtagaagataatgcacggcaactggagcatgcctattag

SEQ ID NO: 219676 - DNA, 510 bp, Klebsiella pneumoniae
atgactctgcatggaaggtttgtcatcaacgatgcgcatgactcgccgttatcgtttgctggggctggaacatttttagcgttttctggcgatggtatttatcgcaatcgaggggcttgtgacatgaagccgaccgcaggcccggttccggcgggtaaatactggattgttaatcgtcctgaaggtggactccgatcgcacgttaatgccggtgttcgggatcgttacaaccaggtcatgaatggtgcgacgttcaggcacaggcgggatgattggggaatcgacgatgacacatggaatgagggggttaaacgcggtaacttccgtttgcatcctggcgcgctatcaaaagggggtatcactctgctacatgcttcagattttgccatgttgcacaatgcgttactaaaaacaccgcaggtggatgttccttgtatgagtaaactcaaggcatacggcacaattgaggtgatcttgaccctccatctccggacagcttttgtatcttaa

SEQ ID NO: 219677 - DNA, 837 bp, Klebsiella pneumoniae
atggtcagccggaccatgggcgtgtcgcgtgcgcaactgtcactgcggattaaccgttctgccgactggcaggacaggcgctgtaaccggcgtaatgaagaagcagacgcagaaatactgtcggctatcctcaacattatcagcgatatgccgagttatggttatcgacgcgtgtggggcatcctgcgcaagcaacgtcgcacagagggacagccacctgtgaatgccaaacggctttacaggataatgagcgagcataacctgttgttgttgcatcacaaaccagagcgaccgaagcgtgaacataagggcaagatagcggtggcagaaagcgatatgcgctggtgttcagatggcttcgagttcggctgcgacaacggcgaaaaactgcgggtaacgttcgcgctggactgctgcgaccgtgaggccatagactgggcagcaagcacgggaggctatgacagttcgaccgtgcaggatgtgatgctgaggtcggtggaaaagcgcttcggcgacaggctaccggaaacaccagtgcagtggctgacggataacggttcagcgtataccgcgtatgaaacgcggaggttcgcgagagagctgaatctggagccctgcacaacagcggtgagcagcccgcagagtaatggcatggccgaacggttcgtgaaaacgatgaaagaagactatatcgcgttcatgccaaaaccggatgtgagaacagcactgcgaaaccttgcagtagcgttcacgcattacaatgaaaaccacccgcacagcgcgctgggatatcactccccgagggaataccggcggcagcggacatcgttaacttaa

SEQ ID NO: 219678 - DNA, 138 bp, Klebsiella pneumoniae; identical to SEQ ID NO: 188186

SEQ ID NO: 219679 - DNA, 279 bp, Klebsiella pneumoniae; identical to SEQ ID NO: 181689

SEQ ID NO: 219680 - DNA, 426 bp, Klebsiella pneumoniae
atgagcaacattaccatctatcacaacccggcctgcggcacttcacgcaacacgctggagatgatccgtaacagcggtaacgaaccgaccattatttattatctcgatacgccaccgacccgtgatgagctgattaaacttatttcagatatgggaattacggtgcgtgcattgctgcgtaagaatgttgagccttatgaacacctgggccttgatgaagagaaattcagtgatgagcagttgattgattttatgcttcaacatccgatcctgattaatcggccggtagtcgttacgccgcttggcactcgtctttgccgcccttcagaaatagtgctggatattctacctgaaggtcagaaaggagcgtttaccaaagaggacggcgaaaaggtcattgacgaaacggggaagcgggttaagtaa

SEQ ID NO: 219681 - DNA, 1368 bp, Klebsiella pneumoniae
atggctggacaaatcagcctgcacctcctgctgaggcaggaaaacatatttacaaaatcatatatgatggggtctgagatgcttttggcagggagtatatttttactgacgctggtactggtgatctggcaacccagcggcctgagtattggctggagcgcgagtatcggggctgtgctggcgctgggaaccggtgtcatccatatcgctgatattcccgttgtctggaatatcgtctggaacgcgacagcggcatttattgcggtcatcatcatcagcctgctgctcgatgagtccggcttctttgaatgggccgcactgcacgtctcccgctggggtaacggacgtggccgcctgctgttcacctggatagtcttgctcggtgccgctgttgctgctttgttcgccaatgatggcgccgcgctgatcctgacgccgattgtgattgcgatgctgctcgcactggggttcagccagggcacgacactggcctttgtcatggctgcaggatttattgcagatacggccagcctgccactcattgtttctaacctggtgaatatcgtctcggcggacttcttcgatctgggctttacgcagtacgcctccgttatgatccccgtggatgcggcagcgattgcggccacgctgatcatgctgcatctcttcttccgcagggatattccggcaacgtatgacgtttcgctgctgaagacgcctgccagtgtgataaaggatgcggcaacgttcagggcgggctggattgtcctgttattgctgcttgtcggtttcttcgttctggagccgctggggatccctgtcagcgcgatagcagctgctggcgcagcagtactgtttatcgtggcgaaaagaggtcatggcatcaacacagggaaagtcctgcgcagtgcgccatggcagatcgtgattttttcgctgggcatgtacctggtggtctatggcctgcgcaatgccgggctcacggagtatctgtctggtgtactgaacctgctggcagaaaaggggttatgggcagcaacgttcggcaccggcttcctgaccgcgttcctgtcgtcggtgatgaacaatatgccgacggtgctgattggcgcgctgtcgattgacgggagtacggcgactggcgtcgtcaaagaggcaatgatttatgccaacgtgattggctgcgatttaggcccgaaaatcaccccgattggcagtctggcaaccctgctttggctgcatgtgcttgcccagaaaaatataacgatcacctggggttattacttccgcacgggcattatcatgtctctgcccgtgctgtttgtcactctggccgcgctggcgttgcggctttccatcactttgtaa

SEQ ID NO: 219682 - DNA, 321 bp, Klebsiella pneumoniae; identical to SEQ ID NO: 181692

SEQ ID NO: 219683 - DNA, 699 bp, Klebsiella pneumoniae; identical to SEQ ID NO: 181693

SEQ ID NO: 219684 - DNA, 306 bp, Klebsiella pneumoniae; identical to SEQ ID NO: 102371

SEQ ID NO: 219685 - DNA, 1206 bp, Klebsiella pneumoniae; identical to SEQ ID NO: 120241

SEQ ID NO: 219686 - DNA, 1143 bp, Klebsiella pneumoniae
atggcagctagaccgcgtacccataaaatcactattccaaacctatattgcaaacttgataaacgtaccggaaaggtttactggcaatacaaacacccgatatctggtcgttttcacagcctcggcacagacgaagctgaagcaaagcaggtggcaagtgaagcaaatactattattgcagagcagcgaaccaggcagatccttggtattaacgagcgcctagctcgcatgaaaggaaaccgcacggatattacagtttcttcatggctcgacaaatatgaattggtgcaggaggaaagattgaaacacaacgagctgcgcccaaactcttttcgacagaaagctaaaccaatccgtctttttcgggaacattgtggaatgcaatatctaaaagatattacagcacttgatatttccgaaataacagatgctgttaaggcagagggtcataacaggatggctcaagttgtacgcatggtactaatagatgtttttaaggaggctcaacatgctggtcacgttccgccaggatacaaccctgcccaagcaacgaaacagccacgaaacaagataagccgacaaaggctatctctggaggaatggaaggctatttatacatccgccgaacaacaacaaccttatttacaatgtggaatgttgcttgccattgtaacagggcaacgcctaggagatatttgcaatatgaagttttcggatgtatgggatgatatgctgcatattgagcaggagaaaacaggaactcgattagccattcccctttctctcagaaatgaagcgttaaatattactctgagtgatgttatttcaaaatgtagagatgctgtggtgagtaaataccttgttcattttcgccatagcacctcacaggctagtcgtggtgaccaagtgtcagccaagacacttacttcaacgttcaagaaagcacgggataaaagcggtctaacctgggaagagggaacagctccgactttccatgaacagagatctctttccgagcgcttgtatcgtgagcaagggatagacacccagaaactattgggccacaaaacaatgaaaatgactgacagatacaatgatgaccgcggtaaagagtggatcattgttggtaaaaaagcagtatga

SEQ ID NO: 219687 - DNA, 306 bp, Klebsiella pneumoniae
atgactatagccatcgatcgacttaaagaggtgacaagggactttggtcgcaggcatatcgcctaccagatggccagagaactgctggagatttatagcggtaacggcccggttgtctggaatgtgttgagcgatttccctcctgaggtgaatggcaaatatcttgtcattaccagctacggggatattcggaccgcctgctatgactgcgaatcaggggaatggagggcttcagatggcaccattaccggagttatcaaatggatggagttgccagccgcccagcaggaggtgaagggtgagtaa

SEQ ID NO: 219688 - DNA, 180 bp, Klebsiella pneumoniae
atgatggcggaacgttggaaaatttatctcactattgcattcatcggcttgggagctacgccgataagcatggtagcggcaaagattgacgtgcctgtttgggcgcttattgccgggcactgcggcgcgattatagcaggatttatttgcgcagaacttggaaggggagccaaccaatga

SEQ ID NO: 219689 - DNA, 342 bp, Klebsiella pneumoniae
atgactgatatcaccgaactggcgcagagcctgaaagcggcagcgatcgatgccaaagagctagccattatcgcccggtattcgaaaggccgtgcggcggcggagaaattttacgccctggctaacccaaacaatgtcatcgcgctggtagaggcgctggagaaggcgcagcagcgcatcgccgagctggagtcccgcaccgtgaagctacctaagttcaaaatgctcgaagactatctcgcagaggtagccattgaagagagaaaacagattttggtcggcgtgaaactggagtttcatcgtgcgctgaccgacgccggcatcaaggtggaggatgaatga

SEQ ID NO: 219690 - DNA, 393 bp, Klebsiella pneumoniae
atgaacataaaagagatcgggaacgtgtttcactgtgattgcggattttcctggcatcgcggtaaaaacggtaaccataactgcgctgatggtttgcgtgaaaaggtacggcaactggcggcggagaatatggcgctgaagaacgccattacagaccatagtcattcggttcacttctgcgaggtttgcggaaaggatgatccgtgcagcactgacgatgtttgttatgcgctgaaaaatatccccgccaccgatcgcatcgtagccgaagccgaggcgcgcggagttgagaaggccatcgcccacctggagaagaagttcagcaatatcggcgtgcagatcatgaatttgcagtggctggcagactcgctgcgcgagggggacggcaaatga

SEQ ID NO: 219691 - DNA, 135 bp, Klebsiella pneumoniae
atgaaaattgatcctgagaattacagcaaatataccctgcgtcggttcgccgccctgttagatgtgatctgctgggtgctgattgccgtagtaaccgttggtatctgcatgtttattgaatggtggacagcatga

SEQ ID NO: 219692 - DNA, 786 bp, Klebsiella pneumoniae
atggctaaagactcaaaggttgtatacggcgccagtggaaaaacgaacgttttgacgttcgaacctgaaaacctgcacctggttaccgacaaaacgcacccgctttacgatgagcgtatccacctgcctatcagcgaggcaatggtgctgaacatcatggaccagggcgttcttgagccgattatcgtctggaaagacccggagacagggcagtcttgtgtagtcgatggtcgccagcgtgtgcgccatacactggaagccaacaagcgactgttgaaagagggtaaagaaccgttactggttccagcagtcgctaaacgtggctccgccgttcgcatggcgcaggcgatggtaagtgctaacgaaatccgccaggcagatactccgctgggccgagcaaagaaaatggctgatgcgctggagcgtgggcacgacgaggacgatttagcgctgatgtttggcgtgagtgtccagaccgtacgcgcaacactgtcactgctggatgccacccaggctgttcgcgatgcagtggagtccggaacggtcaccgttaccctggcgcgtcagttggcatcgcttaaacccgaagagcagcgggagaaggtatatgaaatcgaagcggcaactgctggcacaaccggccatgaaaaagcccggcggcagcgtcagatcctcggtgatgtaaagcctcgcctgaaaacccgcaaagaaatcacaaaagccctggaatctgccgagggtgagtatgcgagcgcactccgttgggtgcttggggaggcggtatga

SEQ ID NO: 219693 - DNA, 300 bp, Klebsiella pneumoniae
atggctaagacagcaaaacaactgattaaacaggcgtacgaaatagccaaaactatgccaccagaacatgcagcaataatcaaggaactggctaccgtcctcgatgtttcgaatgtagctctgcgccagacgcgcaccgaacgtgacgaccttctcgcagaggtcaaatcctgggcgaaggagtgtgatcgtctgaccgagcgacacaccaagaagcgcacaaatctgcatgtcctcgaagcaatgcgcgacttgaaagcaatttgccccaccagcttccgtaacgtggaggctctctga

SEQ ID NO: 219694 - DNA, 924 bp, Klebsiella pneumoniae
atgaacttcttcaaaaatgctcttatttaccggctctctcgcgatattaccatcgtggaagaacacaccatcgcggatctggcagacaagcttgaaccattccgtttctctccttgcgggagtcaggatatggctaaatccggttgggtatctccccttggacagtattctgaccagctatttcattttgttagcggtcagcttctgctcgtgatccgccgggaagagaaaattatcccacgcccaaccattaccgatgagctcaacaagaaaatttctaagcttgaatcagaacaggcgcgacgtctgaaaaagactgaaaaggatgctctacgcgatgaggttttacatagtcttctccccagggctttctcacggaacatcatcacgcgaatctgggtgaataccaccgatcacctggtcatagtcgatgcctccagtgcgcgcagtgctgaagatgccctggcactcctgcgcaagaccctgggatctcttcccgtcgttcctttgacaatggaagagcctgtcgagctaacgatgactgaatgggttcgttcaggcagcgcgcctaatggttttaatctgggtgatgaagcagaaattaaagctgttttggaggccggaggtattggacgcttcaagaaacaagacctcgtaagtgacgaaattcatacccacatcgaagctggaaaggttgtcactaaattattcctcgattggcaggatcgtattcgctttaccctttgtgacgacgtatccattaagcgtattaaattcgctgatgagctcgtatctcaaaatgatgatatcgatcgtgaggatgtagcacagcggttcgatgcagatttcattctcatgacaggtgaaatgagtactctgatttctgatttgaccaaagctctcggcggcgaagctaagcgataa

SEQ ID NO: 219695 - DNA, 657 bp, Klebsiella pneumoniae
atgaaaatgaatgaacgcatcagggctcgacgaaaagaactgaaactaacccaagcggttttagccaaattagtaggcgtgaatcgtgtaactgttactgggtgggaatcaggcgactatgaacctggaggatctaaccttcaggcgctggctactgcgttaaaaacaaaccctcagtggattataagcggccagggtgaatcagatgctgaagaggcggcttacaaaccaacagaacggtttggcgtgaaaagaatacccgtcctatcttgggtccaagctggagagtggactgagagcggagctcccgtgactgaaagcgatgtttccgaatggatttatactacagctaacctttgtgatgaaggatttgctctcaaggtccgtggggactcaatgaccaacccgaatggagctcccagcatccccgaaggatcaatcgttgtcgttgaccctgattacggtagtttatttgaggttaacggtaagatagttgtcgcgcaggtgatgggatctgccgaggctacactcaaaaagtttgtaatcgatgggcctataaaatacctggtccccctgaacccaaattaccgagtccttgaagtaaacggaaattgcaagattgtcggagtcgttcgccaggttgtaactgacttataa

SEQ ID NO: 219696 - DNA, 198 bp, Klebsiella pneumoniae
atgaaaaaagaagacgtgatctcttactttggcacggtcggcaacgtagcaaaggctttaggcatctcacacgcatctgtatccggctggggcgagattattccaaaaggtagagcgtttgaaattcaggcactaacagaggagcaactgaaagttaatcccgaactttatacaaagcctaatcaaacagcagcttaa

SEQ ID NO: 219697 - DNA, 468 bp, Klebsiella pneumoniae
atggtagaacaaaagcaaagtttgaaagatgtagtcaaggctatgtgtaagtccatacatggtgggcgtgaggctatggctggcgcgctaggcatgaccttaacgcagttcaataacaacctttacgagaaaaacggctgtcgtttcttcgaagtcagcgagcttgaagcgatggaagacatttccaacacgtcgttactggctgattaccacgctcgccgccgtggtgccctgctggtggatgtgccgcacctggaagagctggatcgcgtggacctgtttagtcgcgcaatgcgtacctcagcagctagagggcaggtggatcagattatcgaacaggcgcttgaagacggggttatcgaaagacatgaagctgaagaaatcatggtgcatcaccgccgccacctggcagctcgggaagaagagattgccgcaattatcacgttattttcacgcaaaaagaagtga

SEQ ID NO: 219698 - DNA, 915 bp, Klebsiella pneumoniae
atgagcctgttaatgccatcaaggccgatagtcatcaatcctgaccttgcctatagcatcggcctgaatgaagccattgcgctgcagcagcttaactactggctgcaggagactaactcagggctggagcgtgacggcgtacgctggatctacaacacgacagagcaatggctggagcaattcccgttctggtctgaatccactctgaagcggaccttcacccggctgaagagcctgggcgtgcttaaagttgagcagctgaacaagtcccaacgcgacatgacgaactactacacgatcaactacgagagtgagcttttagatgaggtcaaagtgaccaaatcgaagaagtcaaaatgcgccgttccatcaggtcaaaatgacacgatggaagaggtcattgtgaaacgctccaccgggtcaaaacgaaccgctgtcatcaggtcaaattggcacgatgatcttacagagaatacaacagagagtactacagagattacaggtaaagactcttgtccggttgcgctgcaaccagaccagaccgatccggcagaactcgttctggatcatttcaatcgggtaaccaactcgacctatggcaaggggggacgaaccaaaacgacgctgggttatatccggggacgcctggctgaagattacagccctgaagacctgatgctggtggttgactacctgaacgcgaaatgggctcaggatccgaagatgagcgactacctgcggcccaaaacgctgtttgctcccgagaactgcgtcgagtatttcgacaaggccaaaaaatgggaagcagccgggcgcccagcctggactggaggaaagtgggttaaacaagacacggcgttcaagtccagttattccgacgtggattattcagtcccagcggggttccgttcatga

SEQ ID NO: 219699 - DNA, 810 bp, Klebsiella pneumoniae
atgagcaagccatttctgaaatgggctggtggaaagtatacccagctggctgacctgttcgtgcatatcccggcagggaaacgtctgatagagccattcgtgggtggtgggtcggtattcctgaacagtgaaaagcacgtagattacctgctggcggacgttaatccggacctgattaatctgtatcagatgttagcggtggtgccggatgaagtggaattgaaggcccgctggatgttcgagcacatgcggtcaccagatggctatgagctgatccgttccgagttcaacgcacagacgctggatgctactgaacgcgcagctgcattcctgtatctcaaccggcattgcttcaatggcctgatgcgctacaaccaggcgaacaagttcaatgtgggctggggaggctacaaggccccgtattacccgatggatgagatgaaagccttcgcggctatggcgcataactgcgtattcatggccgctgactatcgccgaactatcagcctggcagggaaaggggatgtggtttactgcgatccgccttacgaaccgatgccgggaacaaccggattcaccgcctacgccgctggtggttttagctgggagaaccaggtggacctggcgaagcaatgcgtatctgcctttcaccgtggtgctcgggtagtgatttccaactcatccgcaccgaaggttctcgacctgtaccgggagcatggttttaacctgcaattcatcaacgcgcgccgttcgatctcctgcaaaagcagtacgcgggaagtcgcaaaagacgttgtagcgatcctttaa

SEQ ID NO: 219700 - DNA, 378 bp, Klebsiella pneumoniae
atgaaactgactttaccatttccaccaagcgtaaatagttactggcgtgctccgagcaagggaccgctgaaaggcaggcatcttgtaagcgagacagggcgcaagttccagcaggcagcgagagcggcgattattgagcaactgcgggccgttccccggccatcctctgatctggctgaggttcacatagtgttgtatccgccggatcagcgccgtcgggatatcgataactacaacaaagcgctgttcgatgccctgactctaacaggcgtctgggaagacgacagtcaggttaagcgcatgctggtggagtgggggaacatcgtgaagaaagggaaagtagaaatcaccatccgacgttttcgtgcagttgcctga

SEQ ID NO: 219701 - DNA, 333 bp, Klebsiella pneumoniae
atgcagcagattacaaatcatcaaatacctcttaatggcacaagcccatcagatttaaatactctgaaaggtattatcgaatccaatgcgggtgtgttcgacgagcatctccttactagttttggtggtgatgcgcgatactcagtcattgatggttcttttaaaatcacaatgattgctgaaggcttttttgaatatacagctgagataaatttctacgctgggtgcgcagacatggacgacaccagcactatcaatgggactatggagtttgaaatcgaaggtgacaatatcatcatcgacttggatgaaactgtctgggacgtcagataa

SEQ ID NO: 219702 - DNA, 870 bp, Klebsiella pneumoniae
atgccctccagcacgaccctgcaacacgcgatcgagaacatcactatctggcgcaaaggcgaacagcgtgcgccgcataagccactgttgctgctgtacgtcctctcacagtaccagcgcggccatgcgcggatgttcgactacgcctcggagatacgcgatgagctgcatagcctgctggaacgctttggcccgcagcgccgccagtaccggccggatatgcccttctggcgcctgaaaggcgacggcttctgggagctgcacaacagcgaccagtgttcaacccagggcaaccgacagccgcccggcaaagagctggagctctgtcacgtcgccggcggcttcgatgagccgcattttgcgttactcaacaaaaataagaggctgatcaataccctcgcccatcagatcctcgaggcgcatttcccggagagtattcaggaagaactggctgaagagatgggatttgatctgcagcagatccgtaaagagcgcgacccgcattttcgccagcaggtgctgcgcgcctataactatgagtgcgcgatctgcggcttcaatatgcgccatgataatacctccgtcgccctggaagcggcccatatcaaatggaagcagcacggcggcccatgtgaaatccctaacggcctggcgctctgcgcgattcaccataaggcctttgataaaggatccattggtctggatgaggatatgcgcatccaggtttcgccggcggtgaacggcgggggcatcgttggcaggctgttctgggattttgatggtaagacgattaccttgccgcaggggaaagaatgctatccgcaggaagggtttgtggcatggcaccggcgggaggtgttcaggggatga

SEQ ID NO: 219703 - DNA, 1296 bp, Klebsiella pneumoniae
atgaaagcttacacgctaagtcttattgcactggcgctaacctcttcactggcgcaagccgcaacagccgatctggtgctggataaagtcgtaacgctgaaccgccatggtatccgcccacagatggatacggcaaaaatccaggcaatgtcgccagaaactttcccccattttcagggcaaagatggcgagctgaccatgcacggctacgctgccgtcacacgcatgggagattatttgcgggattacctgcagcaacgccagttccttaaaaaagatagctgcctcaatgccgacgatatttttgtccgcaccagcgccaaacagcgcacccgtatgacagcttacgccctgatcgatacactgtttcccggatgtggcgtcaaagtcagctcacccgccagcaaaaaagatacactgtttaaacccattgataatggcgtcgctccgctagatgtcgccagggccagcaacagcgtcttacaaaagatgggtggcagcctggaggcggcaaaacagcgttatgccggtgacatagcagcgatgcaaaaaatcgttgaccccaactgtaaaggtgatcaatgcacctactccagcggtgaatggtcgattaagaacctgaaggatcgcaatattgagctggaagggcctctattctggggtaacgagttgggtgaaaccttccgcctgcaatatgccgaaggactgccactggaacaggttgcgtttggccacgtcaaaaatactgacgacctgacacggctcaacaaactgcatcagattaagttcgatctaatacttcatgacccgtatatcgccgcccgcgctggctcacaactactgagccagatcctctatacgctggaaaaggggtctggtttccacgaccccaacgccagcccagagattgccgccagcgcgccggatgcacggatggtcatgtatttcggccatgactccaacctgacgccactgcaaaccctgctcaatgtctcctggcatctgaagggctacccgaaagatgatacgccgcccggaagcacgctgatgtttgaacgttatcgggatagcaaaacgcatcagacgtatataggccttacctttatgacgcaaagcctggatcaaatgcgtcggctggagccgctaaatgtgaagaatccaccgctgcaacaaaagcttaatctgcactgtaaaaacagtccggacggctggctgtgcccgatagatgaatttgccgcgcagattaatagccgtctcgataagactgcgatgattgcgcagaactacgcggaatag

SEQ ID NO: 219704 - DNA, 1146 bp, Klebsiella pneumoniae
atgcagaagcgtattattgcaggattaatcacaggtttaattacagcgaatagccaagccgttaccctttatgcaaataaagaacaaggagccaagcttgatcttactggttcgttacgcatgatgttagaaaatagttctaaacgcggcaggacagatggcgatagcgattcaaaattaaaagatcagggtacacgtatcgggctgaagtttaaacgtggtctgggcgatcagttcgagagcgacagctggatgaagaatctgagcgccatcgcctatttcgaatatggcggagatactcaggcagcagaagataattttcattttgacaacagacaatcttatggggggctgagttacaaaggtattggtgaactagattttggtagagtgaaatcccccttcgattatgttcatcagtctgattatagctatgaatatggcagcagcggggcactttattttggcggagggaaaatagctcgtgttggtggcggagataataattttatcaagcgagaatccaatactatacgttttatgtctgaacgctggcatggtctaaaagtggcaacatcctataccatgcagactggaacaaatatcaatgatatcgataacgcttgggcgatggcgctactttacgactcaccctgggatctgacattaaatgccggtatcgcccaacagactaccaatggttcaaccgatgccaacgtcaaaagcgggtacacagacgtgaaagcggacaaagaaaatatatggggtatagggatgaagtacaacatcccacaaattaatctctcactggctctggactatggtggttatcaaatcaagaacggtaataaaggtagcggcaaaggttataccgcttatcaggacaccatcaatgtcgatcttttcggagctggcgctaagtggacctgggataaatggggtatctacggagtctatggactgcgcgatggcgatgcggcggctgacaattatcaggaaacccgcactatttttggcaccgattataccttcaacaaacaattcatcctgtggctggagtactgcaacatgaccgtcgattccgatgatgcggacgatcggtacagtgacgacaaaattgctcttggcgcacggtattatttctga

SEQ ID NO: 219705 - DNA, 591 bp, Klebsiella pneumoniae; identical to SEQ ID NO: 138849

SEQ ID NO: 219706 - DNA, 507 bp, Klebsiella pneumoniae
atgtactttcttttaggttcctcacgaatatttataagcttacttgtctgtacctatagaattcccctatacatccaatatgctaaaggttttgttatgaacagaaaaaaaatattttttctgctacctgccctttttcttgcttttcagcagtcagcgcaggccgcccatgcagattatgaaaataaagacttccctttatcaaactgtgactccttgacgataaagcagaagaaaacagattgctatgtcgattatgctgtgagccatcatttttttactgggggaaattcatttatggtgttaatggttccggcccaattgaagatggttttgccaaagcgtatcagacaagtccgaacgaagaaaaaattgctaacagttatgctgccgcccaaatacgcaacaaacacgttaaagaaggaattgctctttatcaggaaaatttcaaaaaatttggcgattttgactcaggttataatgcgctggtttatctacgcgctttag

SEQ ID NO: 219707 - DNA, 540 bp, Klebsiella pneumoniae; identical to SEQ ID NO: 138799

SEQ ID NO: 219708 - DNA, 1476 bp, Klebsiella pneumoniae
atgaactcgaagctaacgtcgcaggtcgttcaatctcacctgatgcaaagctgttttgaccagcaatcttcatctgccgagggttgtgcccgcccgtcaaaggaaaccgcgatgatcgtgacgctggaccaactccgtccttacgagttcaatcccagggttatgcgcaaccccaactatgacgatatcaaagcgtcgatccgccagcgcggtctggacacgccgccacctatcacccgtcgccccgatcaggactattacatcattgccaacggcggtaatacccgcttgtcaatcctcaatgagctatggcaagaaactcatgatgagcggttttggcgtattcattgcctttaccgaccgtggggtgggacgtctaaacagcttatgcatggagaactgcgatgtctgatcggtcatctggcagagaacgatcttcacggtaaattgagttttattgagcgggcgctggggatcagtaaagcgcgagagttgtaccagcacgttgagcaatatcaactctcgcagcgggaactggcggaacgcctgaggaaagatggctacccgatcaaccagtcacaaatcagccgcatggaacagactctggaatatctgcacccctatattcctcaagtactgtatgccgggctggggcgtccacaaatagaaaaactactttccatgcggactgcggcgctacgaatctgggaacaacatgccaccgatgatttgggttcatttgaaaatatcttttcctcggcgctatcgctgttcaatgatcagcctgaagagttctgcttcgaacttgtacaggatgagctattaggactactgagtcaggcgctgaacgttgattacaatctgctgatgctggatctggatccttccgagcagaagcgcctggccttactcggccccactcaggaatcgccgctttatatacagaaagaggcctccgcagcacgttctactgtatacagacgtaaaccgagttccaaaagaaaaacggttctctctgcgccagactcgcctctgggttccacactaatgtgtgaaagcaacgatcccatcatggatatctggtgtatttcacccctaattgattcaacccaggcattgcaagcgctaagaaaccaagttgcgcgagaactggcggagtgttgtggcatcgacggtaagatatttcctgataacaatgtagacgatgccgactataaacttagcgcgattacaacagccccagatgtatattcccaaactcaagcccgcgcctgcagagctctattgatgacactcaatggggttcccctaacagcagatctggccgctactctagatccgatactacttatccgacgcgaacagaatagattcgtgttcagcgatcagttccttattaaagcattccggttaattcgcatcgttcgtcggcttatggaattacaacaggacgcaaaaaatgataccaacgattaa

SEQ ID NO: 219709 - DNA, 1068 bp, Klebsiella pneumoniae
atgaaaaaagcagtgataattatggcgggcggcctgctgtgcagttctctgacaatggcggctgagaaggccgactgggataaagtactggaacaagcaaaacaagaaggcaacgtgacttttcatgtctggtacctgcaatcacagtggcgaattttcgtgcaggaatttgaaaaacaatacggcattaaagtacgtattccggaaggcagactcgacggcaatgttaataagttgctggcggaagcgggcaaaaagaaaggcagactcgacgttatcgccatgtctgtaacacagttgccggtgatgatgggattgaaagcgctagcaaagattgacgatttacctggctatgatgacgccgttcatcagattcagaacgtcgatactcagggttatgccgtggcgttctggggtaatcagaccggttttgcctatgatccgaaacagattggcaatcaggcactgccgcagacactggatcaattacaaagctttattaacgcaaatccaaagaggttcggctataacgacccaaataacggtggcgcgggggaagcttttatccagagaatcgtcaccattacgggcggtgattttaacagcaaaacggacagcattgacccaacggtagtgaaacgctggcagaaaggatggctgtggtttgccgctaaccgcgacaatataacactgacagcctccggcgctgacagcctgactcgcctgaacgatggcgagttgatgctgattcccatctgggaagaccatctagttgggctgcaaaaaactggagccattaccccaaggctgaaattttacgtgccggagtttgggatgcccggtggcggcaacatcgcggcgattgccgccaacagcccacatccggcggcatcacggctgttcctaaactggctgatcctgccatcaacccagaaggcaatgaatcaagcgtttggttcaactcccctgaagaaactgagcggtccggacaccgcagtacaattttacggtaaagcctacagcagacagcttaggagagtcttcgtccatgaagttatgacgcagtaa

SEQ ID NO: 219710 - DNA, 837 bp, Klebsiella pneumoniae
atgagccacactgccaatggtcgtcgggtggtgacgatttcgctgatctttttcatggttgccaacctcatctggctgggaatgccgttcggtatggcgatcctttggtcgctggttgacgcggcccatccgtggagctacccggatatcttcccgccggtgttgtcgttcagccgctggctgctggtatgggaaaaaacctcgcttgcagaggctctattgaacagctacaccatcgcacctacggtagcggtcgccagccttctgctgtcgctccccaccgcgtatgccttcgggcgcatgacctttcgtggtaaggcggtggcggagatgctgacgctgatcccactggtgatgccgggaatgctgatcgggattttcttcagcgccatgctgctcaatctcaatatcgacaatgcttttatcagcattgttatcggccatacggtactgacgctaccctattcgattcgcattatgtcggcagggtttaaggctgtaccgcaggatctgatcgatgccagtcgtgacttaggctctggtgtgtggggcactttcagcaacgcctacctgccgctgctgaaaccgagcttgctggcggcgctgattttttgtctggtgcgaagccttgaggaattcagcatctcatacgtactgggcgcaccggattttatcaccgtcccgaccattctttactctttccttggctactccttcgtccgcccggatgcggcagtggtgtcgatgattctggtgatccccaacgtcatcctgatggctatcatcgagaagttgctgaaagggaattatctgtcgcagtcaacggggaaagcctga

SEQ ID NO: 219711 - DNA, 867 bp, Klebsiella pneumoniae
atgaaaaactggcgcaacgagctattcgcctggctgttgatgctcagcgggctgggcaccattctgctgctgatgggatccactttttatgtggtgatcgcccagagtctgggctggtttaacctcgaaggcgatagtcatttctctctagagtactggcgcaacatgctgcaggacgaggtactgcaaagcgccctgttctactccgtaaaagtatcactgctgggggcattcggttcggtaattttcgcgtatccactagcgctgtggctacgtaaaccgatggtcggtaaagcagggattatcgcggtactgcgtgcgccgatgtttatccccggtctggtggcggcgtttctgttcgtcaatatcgtggcttatcacggcatcatcaacgagctgctgctggcgctgggcattatcagtgagccgctgcggatgcagaacgatgatttcggctggggtgtcgttatcctgcaaatctggaagaacctgcccttagccctgatcctggtcggcggcgcggtcaacgctattcgtaacgacgtgctggacaccgccagcaacctcggtgctaaccgctggcgcagctttaccggcgtcgtggtgccgctgacgctgcccgccgtacaggtgacgctgattctggtgtttatcggcgcgttgggagatttcgccttcttctcagtggccgggccgcgcaacacctactcgctgtcacgcctgatgcaggccaccgccatggaatacggcgagtggaatagcgcggcggtaattgcagtgatcattatggtcacggcggccatctgcacgctgctgatcgccctgcttatcaccccattcgcaacccgcaaaggagagctcaaatga

SEQ ID NO: 219712 - DNA, 1068 bp, Klebsiella pneumoniae; identical to SEQ ID NO: 138794

SEQ ID NO: 219713 - DNA, 831 bp, Klebsiella pneumoniae; identical to SEQ ID NO: 137971

SEQ ID NO: 219714 - DNA, 1113 bp, Klebsiella pneumoniae
atggattcccaatctgaatgccttgaacttcgtggttcacagcgcctgctactggaactgatccgcaggcacgcgccggtgacgcgtgccgaactggcgcgattgtctggattgacggcgggagcgatcacccagcagtgtcgggaactgatgttcttaggtctggtggttgaaggagaacgtaataccggccagcgcggtcagccatcgctgccattgcgtcttaatcctggaggaggctgtgccataggattgtcgtttagtcccggcttcatcgatatgacagtcgtcgatctcagcggtcgccagttgttgtcactttccgaagcgcaccttgaaaatcagccgttgtccgccacactcgtgcagatcaaaaccttggtggagcagacgctgaaaaagcgccagctccagcacgcgcgtattctcggcattggctatgcggtgccgggctttctgaaagccgatggacgcaaacgccactgcgtgccctctttggagagctggcgcgatgcggatttacagcagacatttgctgacaatctgccgtggccgacgtgggtggagaataatgccaacgcagctgcggtaggtgagctatacagtggtgaatggaatgcgtacagcgatctgacctttatcgatcttggctacggtattggcgcagggattatctccgggcataaaatgctgcgcggcgggttctgcaatgctggtgaagttggaatggcgtttccatcaggtacgccgcgaccctcatataaggatctgcttgccacactggatcgcgaagggtttactgaaaaccagctgccggagttgatcgccgagcagcatccactgctggaaagctggtttgaacgctgtagaggtcaggtggagcagactgtgtttggctgtgtacagtgggtggacccgcagataattgtgcttggtggagtgatgccaaaaccgattatcagccgactggtggaggagctgaaccagcggctagaaactcgtttcgatcctaaccgtccgcgagtgaggttggctgcgtcttcaatgggagtgcagagcgcatcaaggggggcggcgatgatcccgttgtatcaggtgataaatgaggggtga

SEQ ID NO: 219715 - DNA, 1680 bp, Klebsiella pneumoniae
atgtcacttattcaaaacccgatattacgcggctttaatgccgaccccagtattattcgcgtcgaggatacgtactatattgccaactcgacgtttgagtggttcccgggcgtgcgtttacatgagtcgaaagacctgaaaaactggaacctgctgccttcgccgctctccaccaccaccctgctggatatgaagggcaacccctcctccggcggcatttgggcgccggcgctctcctgggccgacgggcaattctggttggtgtataccgatgtgaaggtcaccgaaggcgcctttaaagacatgaccaactacctgaccacggcgaaggatattcggggcccgtggagcgacccgatcaagctgaacggcgtcgggtttgacgcctcgctgttccatgacgacgatggccggaaatatatcgtccagcaaacctgggatcaccgggagtaccatcaccccttcgatggcattaccttaacggagttggataccaagacgctgaagttaatgccggaaaccgcgcgcaccatctaccgcggcaccgcagtggcgctggtcgaggggccacacctctataaactgaacggctactactatctgtttgccgcccagggcggcaccgtgtttacccaccaggaggtggtggcgcggtcgaaaaccctcgaggccgacagcttcgaaaccgagccgggcgacgtgttcttaaccaacgtcgataccccggacagctacatccagaaacagggccatggcgcgctggtctccactccggaaggcgaatggtattacgcctcgctctgcgcccggccgtggaatcgcccgggggaatccatctacgacccgcgcggctggtcaactctcggccgggaaaccgcgatccagaaagtatactgggacgatgagggctggccgcgtattgaaggcggtcacggcgggaaaaccttcgtcgaagggccaaaagacgccatcttcaccgaaagcgccagcgataatagccagcaggatgactttacctcgccagcgctcgacccgaactggaataccctgcgggtgccgtttacggccaaaatgggcaccaccggcgacggcaaattaaccttaatcggccagggttcgttagccaatacgcatgacctgtcgctgattgcccgccgctggcaggctttctattttgacgccgcggtgaaggtgaaattcgagcccttcagctaccagcagatggccggattaacgaattactataacgaccgccactggagctttgtcttcctgacctggaatgaaattaacggcaaggtcatcgaagtcggcgaaaataaccgcggaaaatacacgtcgtacctgaaggataacgccatcaaggtgccggacggcgtggaatacgtctggttccggaccaaggtccgcaagcagacctacagctatgaatacagcttcgatggcgtgtcgttcaccgagatcccggtcctgctggatgccgcggtactgtccgatgactatgtgttgcagagctacggcgggttctttaccggggcgttcgtcggcctggcggcggtagactacgccgggtacggcacccaggctgagttttatcagttcgagtatcaggagctgggcgatgcgttagcggccgatgggagctacagctgggaggctggcgagacgcgggataagtaa

SEQ ID NO: 219716 - DNA, 1455 bp, Klebsiella pneumoniae
atgagtaaaaacataatgcacagtcggcatgatgaatatcataaattaacccgtggtgaacgaattggttatggcatgggcgactttgcgcaaaacctggttttcggcacaattgggggttttctggctttgcatatgctgacggtaaataccatcagcacggcaacggcaggctttatttttctttttgtccgtatcattaatgtgttttgggatccgatggtcggaacctacgtggataaacgaacctcaaaagcagggaaatatcgcccctggctgttacgagccggcgtgccgctggtgatcctgtcggcattactgttcgcgccaatccctggggtgaaaggttcggtggctttcgcctttattatttatctggcgctggacctggtttattccttagtcaatattccctatggctcgctgaatgcgtcgctgacccgcgacccggaatcgatcgataagctgaccagtacccgtatgatgctggccaacagcgccaacctgctggtctataccctgttcccgatgtttgtgcagatggcggcgccgaaagatcgcagcctgaaagacaccggcttttttggccttgagctgaatctcggcaactataccgatccgtcagcgaactacgcctggtttggcgtgtacgccatctatatgatcatcggcgcggtggccctgtttatctgctacaaatgcaccaaagaacgcgtggtcgcgaccgccgagcagaccgccaacgtcaaaactaccgaccttttccacgagctcagacataaccgtccgctggttattctcggcatgttctttatgctggcctttaccttcatgttcttcatgaacaccgttaacggcttcttcaaccagttcgtcgtcggccactccgaatggatgggcgccgtgggcctcgtcgcgtctattcccggcatcgccttcccggtgttctggccgaaactgaaaaaaatctttggtaaaaaaggcttcttccatctgttcctcgccatgttcatcgtcggcgaactgctgacctacgcctggtcccgcgaagggatgcacgacgccctgtggctggcctacatcgccacctttattaaacagtggggcttaacctccgccaccggctttatgtgggcgctggtaccggaagttatcgcgtacggcgaattaaaatcgggcaaacgcaatgccgccattatcaatgccattatgggactcttcttcaagatcggcttcaccatcggcggcgctatcccgctgtggctgctggcggtgtatggatttaatgaaagcggcgccgtgcagagcgccagcgccatcgacgggatcattatgaccgcggtgtggatcccaattgcgctggccgctatttcgatggtgatcatgcaggtttatccgatctccgataaacatgtgaccgacatcaaccgtcagctggatgagatccgcgtgtag

SEQ ID NO: 219717 - DNA, 861 bp, Klebsiella pneumoniae
atgggcagcgttgctgaacagatgaatgcgggccgaccggttcagctcccgctcgtgatgaaggcgggcataaaatgcgccggattccgtttccggctccgggctggcgtcatcacctgcgtcacgataaggtgcggcgtagcggtaatgctccccggtggtgaccgcatcactgcgcacgctgaccgtcgcatccatcggcgtggcggcggtccggtagttgtaatcccgcgtggcaacggtgccggtggcgatgttgtgccaggtccgcacatcccagaccgactctgccgcgccgtcaaacaggcccgatggttcgctgtagggcaggcgtacatcaaactgatagttcagctggctgtcggcaaaaatgtacgtatccagctcacgggtgtcatccatctccgtacgccagtaaatccccacctcagacagaatgcgccggatgaactgcaaatccgtttcccgccactgggtgataatttcacgcggcgggtaggtgcgctccagccggaattcaaaatcagcgccctccagcccgtgcttgcgcagcacctgctccaccacctccggcacggactggttctgaaagacggcgcactgccgggtgtatcccagcagcgccaggcgcgaactgagcgtgagccggtagtgagactggtcctgagaggtggacagccattccaggcgggtcaccatgccgtggacatttttgccgccacgcatccggaaggtggcatatttcatcagcacctgttccggtggaatgtccgcctgcggggaggtaaactcaatgtcccaccggaagggctcgctcagggcttcgctgccgcgaaagcgcagaacatccggcttcactga

SEQ ID NO: 219718 - DNA, 525 bp, Klebsiella pneumoniae
atggcaacagtaacccgccggagggcgctgacgcttattgcctgcggtctactcgcaggctgcggcctgacgcagaccgtcacggacggtacggtcagcatcacgaaatccatcttctacaaaaaaattaaaacgctgcatctggattttaccccgcgcacggccattaacgccgatggcgcacagacgccgctggcaaccatggtgcgggtttatcagctcagggatcgtaaagcggttgatgccgccgattaccagacgctgctgcgcagggccgatacggtacttaaggacgacgtactggtgtcaaaggagctgctggtgatgcccaatggcagcgtgacgctcaatatgcccatggatgaggacgctcagttcgtggcggtggtggggctgtttaaccggccggatcagaaggacaaccgctggcgtctggtactgacccgtgacgacctcgacccggacaacccccgcacgattgaactgggtgatggctggcttggccttgtgccggtaaaggagtga

SEQ ID NO: 219719 - DNA, 1083 bp, Klebsiella pneumoniae
atggcgcgagaatcacagccagcacgtaccgggctgacgctggcccttaacaaggatatctggcgggccaatttttatcgtttctgccagctactggaacaggaaaatccggacgttcctaaactgggcaccaccagccatccgggcgacgatccggtacgattcagaccctggcctggtatgggtttcccggtcagtaccctgaaagcagtggagactgacgaagaccatccgacattacccccaacggttcgcacgacatttctaggggtgtatggcgtggactcgcctctgccgacgtcctggctggacgatattgcgcagcgccgcgaaggacacgaggcggttacctcattcctggacattttcagccaccggatcaccactcagtattaccggatctggcgaaaatacgcgtatccggcgaccttcgaggccggtggccgtgatgccacatcacagtgtctgctgggactggtgggactcggtataccaggcacagcggaacgggtggcaacgccggtttcccgttttctggccctgctgggcaccatgcgattacccacccgtaatgccgaaggtatccgggccctggtgagcctgttggcaccgaatacccgggcaattatcaccgaacccgatccggttaaggtccatattgataaccgcagtgggctgggtaccggaaaccgcatccgtctttcgcagcgggccacgctgggtaaaacggccagggaagcatgcagtcgggtactggtgacgctggaaacggaagatccgggcgaagcggaaggctggttacccggtgctgtcctccataccgatttgctggtcctgctgcgcgtctatcttggctaccgcagtgacgcccgactgcgcctcacggtacccgtgcggttattgcctgagcctcgcgttggcaaaggcaggcgtattcagttgggccgaaccggtttgctggggctgaaagcaggaaaactcagcaataacagggagagtctgactgtcagcctgggctgctatgaagggttgcaaagctctgttttacctcctgctgaagacgggcattaccgcttcgactaa

SEQ ID NO: 219720 - DNA, 1770 bp, Klebsiella pneumoniae
atggatgatttgaccctgcgctattacgaagcagagatgcgctacctgcgtgaagccggtaaagagtttgcccgggctcatccggatcgtgcagcgatgcttaatctggataaacccggcgcccgcgatccttatgtggaacgcctgttcgaaggctttgccttcctgatgggccgtttgcgtgaaaagctggatgatgatctgccggaactgactgaaggactggtgagtctgctgtggccgcactatatgcggactatcccgtcgctggccatcgtcgagttctcgcctgactggcatagtctgcgtcaggccgaaatgctggcggaaggcttttccgttctgtcacgtcctgtcgggccgcataaaaccgcctgtcagtaccggacgacccgcgatgtgccgctacaaccgctgcaccttgcggacgccagcctgcacacggaaaccgatggccgttctgctatccgcctgcgcttcgaatgccctgaaaaagtggactggcgtaaagccgggatcgacaaggtcgccatattcctcaacgcagagagtccggttagctctgcgctgcatctggcaatgacccggcgtgtacatgccatgtatgcgcgtcatgccgggacgcatactgaacgtcatcagtttgatggctggtgcaaacccatgggctttgacgacaatgacggcctgtggaagaaagccgatacggccttcagtggttaccagctgctgctggagtatttcagcttccgtccgaagtttatatttgttgagctgcgcggtctcgacaccatcgggctcactgcggccagcacctggtttgaaatcgacattgtgctcagtgaagcatggtcatccgatctgccttttgagacagaaaacttccggctgcactgtgcgccggtcatcaatctctttaccctggaagccgacccgctgacgcttaacccgctggaaaacgaatacctgctcaggccgctgcgtcttcaggatggacacaccgagatttacagcgtcgataacatccatggtgcggtgaagaatggtaaacacccctatgtgccgttcaccagcttccggcaccggggcggtatgatgcgccacgatgcccctgagcgttatttccatacccgcgtgaaacgcggtccctctggcctgtatgacacctggttaattctcgggggccgctcgttcgaactggagcagctgtccgataaaccggagtccctctcgatgcgaataaccggtaccaacggtcagcttccacgtaaggcactggaaagtaccctgctggacagggtggtcaaaacaggcaaagtgcccgtcagagtactgaacgtcaccgcaccgacgatgccactatatcccccggcaaacgatcgttttcactggcgggggatgagccacctcggctcaaactttctcagcatgatggacaatccggaggtactgcggggcacgctggcgctgtatgactggaccgacgatgaaatgaaccgccgtcggcttgaagcaatcgtcgccgtgaagcacaccctgatccgtcgttttgagaagggttttatgctccggggcgtggacattgaggtcacgctgaatatggacaatttttcaggcgagggcgacgtgaatctcttcggggaaatgctgcaccggttcttcgcgctctatgccgatattcacctctttaaccagctcacgctggtgctgcaaccgacagggaaacgactgagatggcgcgagaatcacagccagcacgtaccgggctga

SEQ ID NO: 219721 - DNA, 1608 bp, Klebsiella pneumoniae
atgagttcaccggaagatctgttaaccgcctgcgccaccagccaggaagaaaggcagcgcctcacctcccgggcaaatgatgccctgtcgctctgggataactggctgcatccgttcacctccgggcctgaaaccggggacgatcccgcatacgatgataattttctgctgatgcgtgaagagatcaataagatatcgggtaccgattcagcgcggttgtgcgagctggcccggaagtgtctttgcgaatgcgccaaagacattcgtgtggtgacctggtacgtgcaggcccgactcagccgcgacggtgaaaaagggttgtccgagggcttactgcttcttgtcgcgatgctgacccgctacgggcaggcctgtcatccccggcgccccgccgcccggaaagctgcgctggagtggttgaacagtgcaaaagtgattgatgcactgctgttatggcccgaggtggacagtaatgatgccggtctgacggctggcgctataagcctgcttgcatccacagtggcagactggccggaagccgagaaaccgtcttttgcaggcctttgtaccgctcttgaaaaccgcctggcacgttcgggtggcatggaagtgctggtcccccagaacagcagtgctcaggagcaggggcatgaaccagcccattcggattcaccgcaactgtcagccgtgaaatctggccgcgatttactcgacaaggcaaagttactttcccgctggctgagcgaacaatctcagggttggctggcttctcaccggctgataaagaccgtacggtgggatacggtcaatcagatccccccactcgacagtagcggtcgcacccgcctggtaccgccgaaacccgagtatcgcgctcaacttaagcggctgtatctacagaaaaactggaccgaactggttgagcaggccagccagatgtattgcgaaggggtcaatcatttctggttcgatcttcagtggtacctttggcaggggctcagccatgccggttacccctgggatacctggacagactccgtcctgtgcgatctgcggctgttgcttaaacgcctcccgggccttgaagggctggcatggaatgacggtaccccctttgctgacgaagtcaccaccgcctggattgctgaaaaagtgaatgaagaatgcctgatgtacggcgatgaactcgctaccgtcgttaatggtcaggctgatgatgtgctgctccttgagtcggaagccatggaaaagggcgacacggatggtcccgaagcggcgcttacatggctccagtcccgaccggggatggacactccgcgccatcgctggctaatacgcctgctgatggcccgggtggcagagcagtatggccgaaacgaaatggcgcttcatttgcttggcgaactgaccatctgtgcgccacagctgacgctgggagattgggaacccggtctgttgtttgaaatccaggcccgtcgcctgaaactgctacgtatgaaagccggtcgcagcgaatctgataaaacccgtctgatgcctgagatggagtctttaattgccggacttattgccattgacccggcccgtgccatggtgctctgtggctaa

SEQ ID NO: 219722 - DNA, 150 bp, Klebsiella pneumoniae
atgggcgcattgttcacccttgccgcttctgtctccacggccatcagtcagcaggaggaggggaaccatggattctggaacgcggtcctgccggtgctgttctggccctgctctgagaacagtgaatggggcaagcagggaaacctgtga

SEQ ID NO: 219723 - DNA, 3372 bp, Klebsiella pneumoniae
atgactaaggtaaaagtcaaaacactcatcggctccgttgtcactgtcgctttttttatgacggtcatcgtggcatttttgttatatgcctttccggaaaacgtagcttcggccacgggattcggtccctatgacggccagcgcatactcacattctgcgccatactggttgccgcgttgtttttactcggctggctgacagagaaggcttttgacatcgccggtaaatccggattgtatttccactggggacagaaaaagtctcagattaccgctccggtgacgaacaccatcgccagtgaagacgacgacgaacaacctgtcttcagcgaagaggcggtgtccgagcacctgcggtttcgctatgggcaccgctggcagcgtaaggtgcgactcctgctggtgatgggtaatccggatgacgtccagaaagcggccccgggcctgtgtcatgacctctggcaggaaggcgacggcaatgtgctgatttatggcggtgatgcgcagtcacttccggataagatcttcctttcaaaactgaagcgtctgcgatctggccagccggttgatggcatcattcaggtgatgagtacctcagccctcccgacggatagcgaacgggatgccttcttgcgttgccgccagaaagccgaccacctgttaggctggcaggcgcctgtctggctgtggctgactgataaggcagcgggtgctcagcaggacgcggaaacggctgcgacaggggtcatcttcgggccggaaggcaccgtaaaagaggctggtaaggcattgactacgctgtctcagcaccttcaaaaagccggtatggcgcagatactgagtaatccgacgcatgatggcctgctgcagttatcctcccgcctgagacatgaactaaaaaccagtctgaccgttttgctcagcggactgatgcagggatctgcggcctggcgtttacgcggtgtcatgttcagtcctgaaccggctgttgccggaacggtgccgaacacgcgcctcgacacgccgacctggaaagccgtcattgatgacagcgatgccgtcagaggcaggaaactgggcttcaactggctgaagatgctgcggttaatcctgctttccctgatagtcctgtggggggccggtacactgctgtccctcgtcgttaaccgtacccagatttatcaggcgcaggagacggccaggcaggcagcggatactgcaaaaccactggctgaacgcctgcgcagccagctcgtactccagcaagccattgcccgtctacaacatcatgaggctaccggtgctccgtggtacacccgatttggtcttaatcaggacagtgacacgctggccgcactctggcccctgtatgcgaaaaacaacgcacagctgatgagggatgccacagcagatcatctgaaacaacaactgaatgcctttgtgcaacttcctccggccagtgacgcccggatgcagggaacgcaacggacctacgatgtcctgaaagcttacctgatgatgaccagaccggacaaagccgatgaaggatggttggcgaaaaatgtactaataacctggccgaaacgccagaatgtggcggatgggacatggcaggaaattgcccctaaattactgggtttttatgcgcagaacctcccgacacatccggaatggaaaattaagcctgacgctgaattaatcagtacggtccgtcagatcctgctcaagcagattggccagcggaacgctgaggccggactgtaccaggacatgcttaagcgcgtggccagtaactggcctgatttaacacttgctgatatgaccggtgataccgatgcttcaacggtattcagcactgacgaaatcgtcccaggaatgtttacgcgccaggcctgggaagagcaggtacaggatgcaattaacgaggtcgttaagacacgacgtgatgaaatcgactgggtcctgacggataaaacgcaccaggcaggaagtgatatctccccggaggcgttgaaggcccgcctgacagaacggtattttaccgattttggtaatgcctggctgaacatggtcaacagcattcagtggcaggaagccacgtctctttctgaagcaattgcccagctcagtctgatcggcgatgtccgtcagtctccgcttgtggccttaatgaatacgctggcctggcagggaaaaacaggagagaagggtgaggcactggctgattcgatagtggattcagcgaaaaaactggttggtcggaaaaaatatacccgacagttcattgagcaagcgcaggggccgaaaggtccactggaggacgtttttgtaccactgacgggatttatggaaggtaaagagggcactggtagcaacggtaacctcagtttccagtcctggctggcccgcgttacccaggtgcggctgaagcttcagcaggtcaccagcgccccggatccgcaagcgatgtcgcagatgctggcacagaccgtattccagggtaaagccatcgacctgacggacacccgcgattacggcagtctggttgcggcaagcctggggcaggagtggaacggatttggtcagtcgttgtttgtgcaaccgctggatctggcctggcggcaggtccttgccccggcagcgggtagtctcaatacccgctggcaatcgaccattgtcgaacagtggaataaggcctttgcggggcggtatccgtttaaggccaccggcagcgatgcctccctgccgttactggctcagttcctgcgtagcgactcgggtcgaatcactaacttcctgaaaactaatcttggcgggatcctccaccaggagggaaatcgctgggtcgttgatccttccgcaagtcaggggatggttgtcagtccggatttcctccgggcgattaatcagctggcagagttgtctgatatcgtgttctctcagggcgatgcaggtattcacttcgaactgatggcgcgtccttcaaaggatgttgccagagtgcaattgaccctcgatgagcagaacctggactacttcaatcagatggaaagctggcaaagcttcacctggccggggaatagctactatccaggcgtatcattgagctggcgtagtgtaaacagtggtatgcaactctacgccagtcaccagggtaactggggcttcattcgcctgctggacaaagccctgctcactcctcttgatgccagccggacgcaactggtatggatcaccccggatggcaatcctctgaagtttgtgatgcgtagcgaactcggcagtggtcctcttgaattactgaagttgcaggggttcacgctgcccaacgctatttttaatgttgccgctggcgcagaagcgatccagtaa

SEQ ID NO: 219724 - DNA, 1209 bp, Klebsiella pneumoniae
atgcccgtctggctggatgccatccctgaaaaggctcctaaggtagcgcgtcccggcaccggtcgttggctactattcctcgcgtttgtcatgctggtgggcatagcgctcacgctatggtgctggacgtcagagcgaaccggatttgtcttctggttcaccgcgctgggcctcccgttttgcacctgggggcttattttcggcttacgccggtttgcctacaaagccgaacaggtaggggccgagtcccgtaatgtcgagcgagaagcgcttattgacagtgaaattctgcgcggtcaacgctgtgcctggatcctcggtacgcacatccaggctccggccggaaacaaagccgatgacctgctgaaggcaatgaaagtcgcagctcccgttatcgacttctcttgcccacgaggatgtgacaaaccggtcagatacgcggcattaccagaatatcagacagatttaacgaaggccctgaaagcagtggttaataaactgaccacgcgtgtagaggggatagttaagccgctttcgcccgagctgccatgctggctgatgctggactgtgataacgatctgtatcccctgattgaagagcagcttaaagccgagctctcactcaagacgggcaggatttttcgcctgatggccggaaaagggctgggggcgtttgatgcctggctggacaagcgatgggacagcccgggcattctggttgccatcacgctgtcgttaccggcgtctccccgggaagaagatgctgatgctgtatcaatggtggtattgagcaaccgcaaagccaatgcctggccggatgcgctccgcctccatcgccccgaaaggggaacagaaacaacgctcacaaagacgctcacccgggcgctgctctggtcgaagaccctgcccaatgaactcaaaggaagctggatctccggtcccacattgacgtcgggcagcggctggaataatgcctgcgaagagagcgaagtggaatttagtctttcagaagacaattccagtatcgatcccgtgctgggatataccggccatgctgctccatggctggccatcacgcttgctaatgctgacgttgaacaacgaggcccccaagttatcgccgcacaacccgacgctgataaggacgacatctggatcgctgtcatcaccaaagaagaagttcgcaaggaaacgcctaagaatgactaa

SEQ ID NO: 219725 - DNA, 264 bp, Klebsiella pneumoniae
atgcttcagattatccgcaaaggcgataaaaccactcacggcggctcggtcctgaccgcttccgaaacgatgaaattcggtggtatcggtgttgcccgtaaaggcgacaaagtgtcctgcccggttccgggacatggccctacaactatcatagaaggcaattctgattatcttgatcatggtatcccggttgcctttcacggtcacaaatgtgcctgtggttgcacattgatcagttcatttgccgctgcaaaggttgcctga

SEQ ID NO: 219726 - DNA, 543 bp, Klebsiella pneumoniae
atggatccattaattcctcatatgcataatgtgtttttatttgcatttttgctttgtttatcaaattttacacaggcatccgagcaaacaagcccagaaaacatcgtgtacaatttttataagtcatatttgaaagaagaatcatcggacaacggtcgatttctcagccaatatgtttctgatgagttaatgaaaagcattaacgactcaatgatgtgtaattatgattctgatgattcagtgtcggcagaagaactcgaaggaaaatgttcacaaaagcgcgaatgcaagcagtttaaagggcgttatatttgtaactggcatggtgcttgggttgatactgatgttgattattttacaaaatcacaagatgtttatccttcatggaaagcaagtataagtacctttgatgtatatcagaaagagaatgactcttcagtcaacgttattttaggagcaggttccgagcctaaagttaaatttaatgttgtgctagaaaaaattgataggaagtggaaaaacaccagcgtaacggaacaataa

SEQ ID NO: 219727 - DNA, 1620 bp, Klebsiella pneumoniae
gtggccacccgggactacaactactgtgaagcgctacaacctcaggacagtgccgaaagcattttcagcaaggaggggatcaccaccggggaaacctaccattacgcggaacccttcctgacagcaggtgacgctgaaagcgcagagtccggggcatacttcgcccgtctgcgtcacgaacgcattctgaacgcccagtatcacgtcaccgggcattcctccagccctcatctggctcccggtcaggtactggaaacggacggcacgttacccgatgccgtcagggaaggtatcgtcatcaccacggtgcgttccagcggttcacgtaaaagtagtttttctctgacgtttgagggaatcccctacagcgaaactgtctgctggcgcccggcactgctcagtcgcccggtgatatccggctcgcttccggcacgggtggaaagcacacagaaaggtgatacgtactcctggctcgacccggagggccgctatcgtgtgaaactggactttgaccgcaacagtaccgaacagggctatgcgtatctgtggctgcggctggcgaaaccctatgccggtgatacgtacggattccactcaccgcttatcgacggaacggaagtggccgtcgtatttgacggtggagacccggatcgtccctacatcgcttatgccctgcatgattcagagcatccggaccatgttaccagcgagaatcatacgcggaacgtgtggcgcacaccggcgaacaataagctgcggatggaggataagcgccaggaagagcatatcaagctcgcaacggaatatggcaaaacgcagctgaacatggggcatctggtcaacagccagcgtgaaaagcgcggggccggttttgaactgcgtacggacgagcatggcgcagtccgtgcggcaaaagggctgttcctgacggcggatgaacaggccaaagcccaggggccggtactggaaatggcccctgccattaatcagattaaccaggcgaacagccagatgcaggccctgaacagcgccgccgaagccgccggagccctgatctgcgacatcaatacccagataaatattgtgaccgacaaaatcaaagacctccagtctgcggtcctgctggggagtgcgccgcagggggtggcactgacctcaggcgaacaccttcagctcagcagcacccgtaacaccatgatcaatgcaggccagcatcttgatatcggtgcgatgaaaaatctgtcggtaacggtggaaaaagcccttggtctgtttgtgcataaagagggggctaagctcgttgccaaccaggggaacatcgaaattcaggctcagcacaacacgatgtccctgttttctgaaaaacagctgacggtgaccagcagtgaagatgaaattattatcagcaccccggaaacgctgacgctgaacggcggcggatcttacctgaggctgagtaagaacggcattgaacatggctcatcaggtgagttcattatgaagacgtctgactatctggtaccaggatcgggcgcaaatctccccaacgaaacacccaatttcagcctgacggatatcactcaggaaagcaaaatcagcagcaaatctttcaatgactaa

SEQ ID NO: 219728 - DNA, 528 bp, Klebsiella pneumoniae
atgcatcatttttatgaactggcttatagatgtacctatttttcattaaacgcgataaacgaagcctatgaaagaaccgtcgatgagttgtcggaaaccggatcgacaccgcctgtcaaaaatctccaggcgctcaatctccagaagatgattcatgcggttgggttgttttcaatttttgaagctcatttacagcgggggttgggtgccaaaaacggttacagagaagcagagttaatacttgaacaagtaggggaagttgcattgaaggaggatttccataattgttatcttgctatcaacgccttaaaacatggtgatggagcaagttataggctcttgctaggtaaaattagctcattaccttttgtggtggaaacaccaaatgtacctgttttcgaagagggtgatgtgtccggcattgatgggctggtgaaagttgatgatgcctttatcgaatattgtcttaaattaattgaaaaagtctctgcttgcatttcaacccatcgccctgatttcatgctttga

SEQ ID NO: 219729 - DNA, 561 bp, Klebsiella pneumoniae
atggatttttctgaaattcaaagcaatacatggattttcagtattggcagtattttgttggtttttattgggtggaaggtcgtttatcataatgcaaagaaaatagcgaccaggtccgaaagtaaagctttggttgaccatgtacttaaactaagcaatgaatcagttgatattgctattaaatactggtcatctaaagatgatgcggatgatgatttcattatgacctccagagcatttacaatttcctttggttcaaaaatgtcgcaagttcttaatttcataggcaatttggaacggagagatatctgtattgattatgccttggctgcaagtttccaggatgatgcaactttgtctgttgaaaacaaaaaaaacatgaccatggaagaaaaacatgaaaaatgccaattgattgttgattcatctttaaaattcattggaaatttgtatagtgaatttgaaaaaacgcaccctccatactccaaagttaagtatttcccttattatttagagcattttgaaccttattgccattattgttcgaagtcgtacgattaa

SEQ ID NO: 219730 - DNA, 336 bp, Klebsiella pneumoniae
atgtcatacattaatgttgcaaaagaattctccagaactccttttggcagagatgagcatgacggcccaaacaatgggacacgctttcgtaaggagaggctattacctgagttacggaagaatcaagggcgtgaggctgttgttaccgttgatttcaatggcatagctttggtaattggctcatctttctttgaggaagcttttggcggtttagttcgcatcgagcattataataaagaagagttgctgagaaaattaaaaatcatagccagaaccccaatttatgaaattcagattaagaaatttatttctgaagctgatactgaaaacaggtaa

SEQ ID NO: 219731 - DNA, 930 bp, Klebsiella pneumoniae
atgtcaaatattgaaaaagcacccttaaaattttgtataaatgatgaagcttctcggagcaaatcactaagttttattgggaatgttatcaacaaattgcatttcagtactgacccattaacaattgatttgtctgatgtaaaatttgcaagtgcagctgcttccgtgcttctttttgctgtaatcaacagagcatattttgtacttgaaggtaaggccatacctcgtatcattcaaccaaaaaaggatgataaccctgaggggtacaggtggatagtgagtactggtttagcaaaagcattgcttgctaacaatttggacaaacttaatgctcttgtggctcaaaagcgttacttccaatcctctgttgatccggaggaggctcttgcaacaacgatgcagatgcttaaagagaaagcgttattagacatcgatcaagaaacgatgctgatgatggggattaacgaggcaatgctaaacgttaagaaccatgcttatgaaaccccagaacttcagatcattaccgaaatgatgggaggcaaacgatggtggcaatgttcctggtttgatcctaaaggtgacagagttgtattcattatctgtgacttaggtatgggaatagccacgtcttacacgaacgaaaaactggatagcacaacacagtttgtactcgaacagaaccaggtggtcgaggcattaacctcaggtaactcgcgctacagaaagcccggcaggggtaatggctcggaggacatcaagaggccagtcgctatggcaaaaacaaggcacgaaaaactgatggttttcactcagagttcactatatgtgctagattctgaaactaaggggaaagatccggttatgtctacacttaaaccgagtatacctggtacaataatacattggacgttagcaccgaagcgaggttga

SEQ ID NO: 219732 - DNA, 327 bp, Klebsiella pneumoniae
atgacgtgggcgcaggccgccgcgtgggtatgggggcatgacggcgggaaagagctgccggctgatattaatgctggccagcgaatagaggcagcagccgctgagctgggttttgatgttcagcacgagcccgatgaacaattgctgattctcttccggccggatgaagaaacccacagcttctatggcaaagaccgtgcagcaggcgctttacggtttcttcgttctgagctggcttacgttgccacaatgcaccccgatacgctggatgactggaacaaaactggtttaatgtcactctgcctgctggacggcgaaaaactgtaa

SEQ ID NO: 219733 - DNA, 795 bp, Klebsiella pneumoniae; identical to SEQ ID NO: 136345

SEQ ID NO: 219734 - DNA, 174 bp, Klebsiella pneumoniae
atgaaaaaggaacacgtgaaacccgttcttctgagcgctgctcaggttgcggcattaaaagccatccaggagcaggaacgccagaaatccgggtttggtatcgcaccatcaatccatgatgtggcgagaaaaatatttgatgttgggctatccagaatagaggtaagccagtga

SEQ ID NO: 219735 - DNA, 165 bp, Klebsiella pneumoniae
atgttttataagcaatttatagcctttatgaacaccatgtataccttgagggcaaattctttaaaacgcatccattcatttcacgttgtgcatcccctcgatttcattaccatcatttcattacttgcaatgattattgtgattattgcgttttttatcatgtga

SEQ ID NO: 219736 - DNA, 1764 bp, Klebsiella pneumoniae
atgaagaatgcaccaaaccttaaaaagcagccggcggatctcatggaggagtcaattatctttgccggcgctgatgcctggacgttcgccaaagcatggcaggaaatgaacccgattggcgacacggtgccgccggttgtgctggataaaaagcagctggcggagctggagaatatccgcattgtggatgatggccggctctatgcccgggtttgccgtggcgggcatctgaccgaacggcagataaccattctcgctacaaagctggcggtggccggcgtggagcgcgcgcaattctactctgaaggttatcagcttctggaggactggacgccacagctgccgcgcctcaaagccgatgcggaagccggcaaaagcatggtgatcggcaaaccgctgacggatgtaaaccttcgcgacctggctgataacgaaaaggcgctcatactggccgcgcgttacaccggtattgcgatccatgaaaacagcgaaggcgtgtacgtctaccgtgccggcatctgggagaaaacgtctttgctcgagctgagccgcgaaatggtggctatctacaacgagaacaaaactaacttcagcaagcgcgcgatcaacaacgttatcgacgccctgaaaatcgttatcccggtaatgggggagccgcagcgcagcctgatcccctttgcaaacggcgtctacgatatggaaaccggcattttctccgaacacagccaggacaactggctaaccaatcataacggcgtgacctacacgccagcggtaccaagcgaaaaccttcgtgaccacgcgccgaacttccataaatggctaagttacgcatcagatagagacgcaattaagatgcagcgcatcgctgcagcgctctttatggtgctggcgaaccggtacgactggcagctgttcctcgagataaccggtgagggcggtagcgggaaaagtgtctttacccatatcgctacgatgctggccggtgcgcataacaccgccagcgggaacatggcggcgctcgacagcgcgcgcgggcgggcgcagttcgtcgggaaaagcatgataacgcttcctgatcagcccaaatattcaggagagggtaccgggataaaagcgataaccggcggggatgccgtggagatcgacccgaaacacgagcaccagtacaccgccgttttgcgggcggtggttgtggccacgaacaacacgccgatgattttcaccgaacgtgccggcggcgtttctcggcgacgcgtaattttccagtttaaccggcgcgtcagcgaggaggataaagatcccgacctggcagaaaagatatccgctgaaattccggtggtggttcgtcggctgctggcgaactttgcgaacccggaaaaagcgcgggcgctgctgctggagcaacggaacagcgaagaagcactggaggtgaagcagaaaacggatccgctttatgccttctgcgcgcatcttgagcggctggctgattgtgcgggaatgatggtaggaaaccgcaatccgcctcactatccgcgaatttatctctatcacgcttacctggcattcctggaggccaacggtttcgacaagccgctgacgctgaataaattcgcagaggggatggaaagcgcgatgagggagtttaatcacgagtaccgtaaggaacggagagcccgtggcatggtgaccaacgttgaactttcagagagtgcggaagactggttacctcagacgcatcctgtagccggtcataaagaatga

SEQ ID NO: 219737 - DNA, 204 bp, Klebsiella pneumoniae
atgaccgctgtttataatctggtgcgctgtagcgatggtaaaaccgtattcagttttccggccggcggccgctatctggtggacacgtcgaacgggttgcagtctatgcgccccctcatggacgacgagatctttttcacggtggagagtgccgcgcgctttctgaagaaaattggttatcaggtaatcccgccagcggcgtga

SEQ ID NO: 219738 - DNA, 216 bp, Klebsiella pneumoniae
atgaaaaagcctactcaaagcgaatccattgccatgctgacgaccagcgcagtccaggcgctggaatacagccgtcaggcgcttgccgttctcgatatgtggattgataccctgccgccggatgatgaaatggaaagctttcgtgtcgcggcggttcacagcctggtcagtcaggcatcggaatatctggtgaaagtcagggaggtcaggccatga

SEQ ID NO: 219739 - DNA, 876 bp, Klebsiella pneumoniae
atgtttaacctccagaccctgacagctaaagcccgtgagctgcgcggcaacgtggtaaaagccactaccacgaaaggcacccgcaccatgacccccgtttacgaacgggaagagcagcgcaaactgcgcgagcgcatccagcagacccagccggactgggttttactctggtgggatattgcgaccgttaccggctggcgtaccagtgacgtgtgcaacttccgttactcgtgcatcaactgggaaaccggcattgcaacaatcatcgtagcgaagcagaccaaagcagcagaagccagagcgacccgaaaggggatcgagattgttcgccagcatcgtaaggacgctgcccggcttgctggcgatcacattgggtacatgcactgggatagcgtgacctgcgacgatctggccgccggtatgacggaagaagaacaggcgatcgtgtttgagctggtggcaaaggctgaggttaagcatgataccaaacagctgccgccgggcatcatcaaacgactgcgtgaacgcatggagcgcaatcttatcggtgacgacctggtattttcacgcagccagattgaaagtaaccgttgccagtctctggaaggtagcgtgagccgccagacaatctggaagaaactgcacaacgtaatggtgtggtttacccgcgtagtaaacacgcgtctgcgcctgagcgcctattccagccgcaaaattgccgccttcaatctcatgtccgccggcggcgaacagggcttgctggtcgcctctgaaatgctcggccacagtaacccggctatcacccggacttatctccagctggggagcaaggccgcggctatccagacacgcctcgctatggaggtgaatgcatga

SEQ ID NO: 219740 - DNA, 246 bp, Klebsiella pneumoniae
atggctactaccccaacccaaaaactgcccaaattcacctggcttttcctcggtacgccgaaaggccggacctgcactcccgttgttatccgcatcgttgccgacagtgagcaagaagcccgcgagttttattcccgctgggatcttatctttgccgccaaaattcgctctgaatgttcgctttatcaatacagcagcggcgcgtttgaactggatgttgcgaaattgggaggtagccatgtttaa

SEQ ID NO: 219741 - DNA, 597 bp, Klebsiella pneumoniae
atgcgagaaaacatcctcaacatgccccataatcttcgccgacaacgtgtggtcactgctgagcaggctgcaatggctatggctggcgtgtacagttgttcacgcttagatgagttgaaagctaaattccctcctgagatctacaacattgcttccagttacttgaggataattttgagtgctgtaaacgcagaagaactacatcccaagagaacatggtctagctcacctggcggagatatcactggagctgatttttattccaatgatatttggccttgggctgttaaagaaatatcagctacagatagttggtttggatgtgatccagatagctctagcgaaaagcaccagcctttacgaagcgtgtggggcgagtttgctggtaaagatacagcgttaaaactgatcgctggaatggctattgcgcttgaaaaatcaggtggcaaatatgttcgcggtaaaaatttgaacaaatccgaagttgctagaagtgcttcaagaagcatattggagcatggcgatggcatcgatgtgacagataaggcattgactatgctaattaatgaagctctgaacacatacgcttccaaatag

SEQ ID NO: 219742 - DNA, 1215 bp, Klebsiella pneumoniae
atgaaactaaacgcccggcaggtggacaccgccaaacctaaagataagccttacaagctggctgatggtggtggtttgtatctcctgattaaacctaatggcggcaaatactggcggctcaagtatcgtgtagccggcaaagagaagctgttagcgctgggtgtgtatcctgaagtcacattggccgatgctcgggcaaaacgtgaagaagccaaaaggggtatcgctgggggtatcgatcctatggaagcgaaacgggaagagaagatcgcccgtgaaacgcagttaaacaacaccttcaaagatattgcccttgagtggcacagcagcaaactaaaaaaatggtctgctgggtatgcttcagacatcctggaggctttcaacaaagatgtgttcccttacattggcaaaaaaccaatagccgatatcaaaccgcttgaactgttgaatgtgctgcggcgcattgaggggcgcggcgctacagaaaaggccaaaaaagttaggcagcgcttcggggaagtttttcgttacgcaatagtcaccgggcgtgctgagtataaccccgctccggatctcaccagcgccatgcaagggcatgagtccaatcattatcctttcctcacaccgaaagaattgcctgatttcttcaaggcgttgtcaggatatacaggaagcgcgttagtagttttggctgctcgtctgctgattatcaccggcttgcgtaccggcgaactccgcggggcattttgggatgaaatcaatatcagtaaggcggtttgggaaataccagcctcacgcatgaaaatgcgtcgccctcatgtggtaccgttgtccaggcaagctcttacgcttattggccagctccaagagctaacaggcaattacccgcttatgttccctggccgtaacgatccgcgaaaaacaatgagtgaagccagcataaaccaagtctttaagcgtattggctatgacggaaaagtcaccgggcacggtttccggtacaccatgagtaccatcctgcacgaacagggctacaacaccgcgtggatagaaacgcagctggcacacgtcgacaaaaactctattcgaggaacgtacaaccacgctcagtacatagacggccggcgagaaatgcttcagtggtatgccgactatatggaagcgttggataacggtgaaaatgtagtgcatggaacattcgggaaaagcgcttaa

SEQ ID NO: 219743 - DNA, 960 bp, Klebsiella pneumoniae
gtgaacttcttttctttctgccgccgcggtgcgctgaccggcatgctgttgcttttaggaattacctcagcccaggcggcggactggccgcgccaggtcaccgacagctacgggacgcataccctgccgagtcagccgctgcgcattgtctccaccagcgtgacgcttaccggttcgctgctggcgattgacgctccggtggtcgccagcggcgcgaccacgccgaacaaccgcgtcgccgatagccagggctttctgcgccagtggagcgaggttgccaaagcccgcaagctggcgcggctgtacatcggcgaaccaagcgccgaagcggtggccgcccagatgccggatctgatcctggtgagcgcgaccggtggcgactccgcactgccgctgtacgatcagcttaaaaccatcgccccgacgctggtcatcaactatgacgataaaagctggcaaaccctgctcacccagctggggcagatcaccggtcatgaacaacaggccagcgcgcgcattgccgacttcaataaacagctcgtttcgttaaaagaaaaaatgaaactgccgccgcagccggtgaccgccctggtctataccgccgccgcgcacagcgccaatatctggacgccggaatcggctcaggggcagatgctcgaacagctgggctttagcctggcgacgctgccgggcggcctgcccgccagccatagccagggtaaacgccacgatatcgtgcagctgggcggggagaacctcgcggccggtctgaacggccagagcctgttcctgttcgccggcgaccagaaagatgcggatgccatctacgccaacccgctgctggcgcatctcccggcggtcgcaggcaaacgcgtctacccgctgggcaccgagaccttccgccttgactactacagcgctctgctggtgctccagcgtctctccagcctgttcggctaa

SEQ ID NO: 219744 - DNA, 648 bp, Klebsiella pneumoniae
atgcagcaggctggaacaggtatgctggggttgctacaccgattgaagcttatttgcgcacaccctgcagttgtcaatccagagccgcgttttcgtgataactcacccaagcttaactggttgctgaaaatactcgcagaaataaaaagcactacgaaagataaagtcattatttttactgagcttcgagacttacagcgtgaacttcagcatgcgatccatcaaaagtttggtatccgccctgtcattattaacggtgataccagcactaaaagtaatagtcagaatagccgccagaggctgatcgatgatttccaggttcatcctggatttggggtgattattctctctacggttgcagtcggtttcggtgttaacgtacagaaagccaatcatgttattcatttcactcgttgctggaacccagccaaagaagatcaagcaacagatcgggcgtaccggattgggcaaattaaagatgtgtatgtttattatccgacggtgagggatcccgaaatcaccacatttgaagaaactctggatgaccttctgctgcggcggcgttcattagcaagagatatgctgtgtgcaactcctgacttgagtggcgctggttttgaggacattttgaaaggggcgttggactga

SEQ ID NO: 219745 - DNA, 924 bp, Klebsiella pneumoniae
gtggcaaagcaaaagttcaaaatcaccaactggcccacctacaataaagccctcatcaaccgtggctccataactttctggctggatgatgaagctattcaggcctggtatgagtcagcaacaccttcttcacgaggcagacctcagcgctattctgaccttgccatcacgactgtgctggtcattaaacgcgtattcaggctgaccctgcgcgctgcgcagggctttattgattccattttttctctgatgaacgttccgctacgctgcccggattacagctgtgtcagcaggcgggcaaagtcggttaatgtcagtttcaaaacgcccacccggggtgaaatcgcacacctggtaattgattccaccgggctgaaggtcttcggtgaaggcgagtgtaaagtcaaaaagcatggccaggaacgccgtcgtatatggcgaaagttgcatctggcagttgacagcaacacacatgaaatcatctgtgcagacctgtcgctgaacaatgtgacggactcagaagccttcccgggtcttatccggcagactcacagaaaaatcagggcagcatcggcagacggcgcttacgacacccggctctgtcacgatgaactgcggcgtaagaaaatcagcgcgcttatcccaccccgaaaaggcgcgggttactggcccggtgaatatgcagaccgtaaccgtgcagtggctaatcagcgaatgaccgggagtaatgcgcggtggaaatggacaacagattacaaccgtcgctcgatagcggaaacggcgatgtaccgggtaaaacagctgttcgggggttcactgacgctgcgtgactacgatggtcaggttgcggaggctatggccctggtacgagcgctgaacaaaatgacgaaagcaggtatgcctgaaagcgtgcgtattgcctga

SEQ ID NO: 219746 - DNA, 1887 bp, Klebsiella pneumoniae
gtgattgactttatctccgacgatcaaattatttcgacgtacggcaacaaaatagctcaaaattctgacataagaagctttactaaaggaactatatctcaaatacgtaagcatttttcatcctccaaggaatttagagcgtttcctcaaagatttaataggttattcaattgcttagaaaatgcagaaggatgggatgaaacaagagttgaattattagatagttttatatcaacggaaaaagggaagcagattgttaaaagcttcattgaagaaaatcgggatactttctttaaggaagaaaaagagaatttaactcgtaggttaaacaatgaaacctctaaattaactgaggtaatagcagaacttaataataagaaagaatctcttgaactcgaaataagaaaaaaaacgcgcgaacgtaatgatattgagataaataacacagactcactcccaggacttactgaagaagctcagaaaaaacttgatatacaattatcagaacaaagaaataaactagaaagtttaaattcggatatcacaataaaagaagagagactctctaagctaataaatctagaaaaacttactacagaaatagatgatctcgaaaaagatcgcgacagagctcgtgatagaatgaaacgcatgcaggagcaagttgaagaggtagcctcaaaattaaaagaaagcaatgaggctctaacgagtcgcttggtaaagcttaaacctgatgttgatgctctctgtggtgttagaccgaaaagcaactctaaaaaaagagattttaatgtcactattagaaagcaacaaaataatatcgagacagaagatttacgtgaagagattatagatagtgtactggatgctttaaataaacaaggccgcaaaacagattattcaactgcggccaatattttaacaactatttctcaaacgcaatttactctgtttagcggactacctggaacaggtaaaacatcccttgctaaaatgcttgggaactgtttaggccttcataatcgtttattgaacattccagtagcaagaggctggtcatcatttagggatgttctcggtttctataatgctttatcccagtcatttacctcttcatcaacaggtctctatgaattccttattcacttacataacgaaaagatgagtaatgtggaatctgcggctgcaataattcttttagatgaatttaacttgtctcaaccagaacattattttagcccgttcctagaaatggcagatcctgaatctcaacgtacccttgctaccgggaatcctgacgagccatacttattagttcctgagtatcttagattcctaggtactataaaccaagatgaaacggtacagacgctgacacctagattattagatagagctgccattatcaactttgatgactttgaacataattatgatgttgtcattaaagagtctgaagttaaatcaaatatactaatggaagcaatatctgggaatgattttataaaagcatttcagccaacaagtttagaaatcccgcaagatgttgaacaaacattattatcaataataagtgttttacgtgatgatagattggaatttggcattccaattattgtttcgtacagaaaaataaaggccataagatattattataatatcgcaggtcctttgatgtctatggagagccgatacttagcattggactatgcagtatctcaacatatattacctctactaaatggttatgggcaaggtttcggtaaaaggttagaagcattgttaaatatcctcccagaggaaatggaaagatcttgtcgtttacttaaaagaagtatcaatcatggaagtcaaaatctctttgggtatgggaataatttatga

SEQ ID NO: 219747 - DNA, 1812 bp, Klebsiella pneumoniae
atgattgattgttatgtaaacatttataatgataatgatgaattcagaataccactaacagacagtggtagttatgaggttagggaaaatgacaagctcgttttccacttaattataagtgagcatgacctgctaactcttggtgagccagttatggtaatcggcgatatcccaacaaagtttttaaaaaatgaaaactccccacatggggagtgtcattttgtaacttgcgaaccatcatattctcattcatcacgttacttctttaacttttttggtgaaagcgaggttacaatttattttgaaaaatccgaggggaaaactctaacatttaggttcaatattttagctagaaaagaaaatgcaaagttagctgaagaaatgttggggtttataagcgataatgttgatgatgctgtagccatttgtttttccagaagcaaaaacggaggtggctttaatagtgatgaagaacataagtttagcaagtatgatgctgtgatttatgctgtgaactatttatcaagaacattaccttcttttattaatgacaaaaaaacccactggaaacagaaggtcattttgtcgcaaaatgggcaaccaacggggcctgattctgtatattgggcacttacgaatttagataaattatctccctctacagcggagaattataatatatactttaacaatcgtggctatcattttgatgaacaacccaaggaagtgctaattgatgacacgaatgtctatgagaatatagtcataaacttattcttgtacaatgctgataagttcttatatgctttaacaaaacattattcagagttcgcaagtaaagaggttggctactctgatactgaatatgttcgctttgatcatacaatgacaaaatatgcgaagatagctttaaaaatgcgaataaaggaaattgaagaaaatcatgccttagtgaagaaattgatgtttttttataaaaaaataattaactctaagattaacccaaacatcattcctaaaataacagcatttgtagcaaaaaaaggacattatagagaagcgtttagattaataaatattgcgaacttatcatcagcacctgcttttgatgacactaattttttattcgggttgaaaaacctgtctattgtttatgaaataactagccttatcatgctccataagagtatctccgaaattttcggagtaagtttaagccttcaatcataccgagagcattctgaaaccaatgggttcggtggggtagcggttaacaggccaaccggagcagtcaataatcactttatgttctctggagacactttccaggtggagcttttatatgagccaaagatttttccaatggcaagctcaacacgtccaggcgatttgatcgataccagcaattcctatgccacatctctatatggaaaacatcatttctgtcctgactttgtaattaaaatacattcaaaaaaatggaaaaaatcattaacactaatccttgattctaaatataaagatgcaagaaatgtacgggattacgatattcctaaactagtaccacgctatctctttaatattcattctctatcaaacgacaactcagtaacaccaattgacttgctgattgttttattcccacacgacaaagcaggaacattagtaaaaaccgtttcttctaagcatttcatcactggatctcatccagtattacctcaagcacttggaacaatatacacaccacttaataatgggctagatgacaagttaaaaagcttagtgcaatattataatcttaaaatgatgtag

SEQ ID NO: 219748 - DNA, 1674 bp, Klebsiella pneumoniae
ttgacaagagatgatgtttgtatgcttcggaagataaccctcatcgaaagtgattattacttaagttacctaaatattaatgcccacaattattcgtcttcgaatttttgtgatggcaagttcttgtcattcatgaaagagaatttcaatatcacaaaactcccctatgggatcaaactggttgatttaatcatcagtggggctaaaacagatgagttgtttgtaaaattaccagttgaatacttcaacaaatggaaaaactatcctgttctcgggttcaatgaagaggatagcaatagtgaaacaacaagcaatgcaaaatttttcaacctaaagatgttaccgattgagtcgtcaaatctgaatgattttttgcatccttatgatactgttctaaaaacccccttccttaatagatacaaatcagaacacccctttgctttagaggttaaagaacatgcgaacgggcgaaaatttagaccatatgaatcatatttggcttattggcgatcatacgttatttttgaaactgtccagaactgtaaatttatagatcgatatttagatagtgaaagaggaattgctttctttaaaaagaccttcttttgcttaaatgagttttgggttaaaaattatagtgatacttttaatagaatagcgctgtacaaatctttcatgaccagaattagattggctaacaatacagaatgttttacaggtggtgaaatatcggaatttattttgagccactgtaaatcttcgattttagatcttcaatctgatatgacccttttacttaaaattcattcaacatggaaacgaaaatataacacatcaacaataaccagttatgtacaggctattgagttattaaagaaagacatttattatttatttgaatggctttgctatacggggatgagtgaaacagaggtaatcgaaaaatggtcttattctgaaaatgatcgagaaatgagagagtggtcagaattgaaaggtgttctcgattttgaagaattgaaattttcgtcatcatttataaaatatgttcctcattattcaaagagtcttgagcatcagatccctagttgtaggtatactcaaatatatgattacctcaagtcatttgggagtttcagtccctggattagaggtttttatgatctacataaatcgattaacaacaaaacacatatccagttaattcagtctagagttattgacaacttactacttatttcaataagaacggaaatagtcatccgggaaatatttagttctatatctaacgaaccaagtccagatgacttaaggacgatatttctaggattgccaaaatttattcaggatgatataagtgcctctgtttttaatagaatttcagataatgcaaattggaaattgacaaaattaaatgaacgctcagaggatattttttctaaacttagctcttgtaatacagggaagaattggtctaatgaacaaaaatatttttttgaacagatttttaagtttatcacatcaaggaattactttgcgcatcattattataaagatgaagagttgaatgaccaagtaaacagtctagctagagatgtacttgtctcttgcttgaattcattgttatacatttcagctttagctacacaagtcattgcatggcggaaaaagtaa

SEQ ID NO: 219749 - DNA, 795 bp, Klebsiella pneumoniae
atgattaaattcccgactaaaaagcgcgttgatttgtataaaaatgctgtcagttctgagcaattacatctggatctggctgcggctcaggagttcatgttcgatgcctgggaaactgatgacctggacgtggtgctgaaactcatcagaaaagctatcaagaaatccccgctctgtgctgacgcatactcattctactgcgagatttctcaagaacctcctgagtcaaaaatcgggaatctggagacggctttgtacgcagccagcattgctctgggcgaggattttcaggagttcgcaggacgtttctggggatttgtcgaaacacgtccatatatgagagcaaaagcagctttggctgatgccttatgggagtccggtaatttctacccagccatgactcattgccgcgaaatgctcaagctcaacccgaacgacaaccaaggcattcgccatttattaactggttattatctcgagctggaaatggtggacgagctgaccttactattgaatgattattcagaagatgtgtgcccgtgtcttcaatattcacgcgccctcctcgcctatcggcagtcatctccagatgccgatgatatcgctaaaactgcgattgactctaacagatacattcccggcttgttatcgaagtgcagattgcagcctaagtttaacagtggatatattacgttaggtggattagatgaagccattgattttgtgaataataatataaagccttggctcagaactccaggggctataaaatggttgaataacttcatagagtaa

SEQ ID NO: 219750 - DNA, 1359 bp, Klebsiella pneumoniae
atgttggtgaccatgtcagataaagagattcatcgcttaccagtgatacaggctgtttgtgaaaagcgtctacgccgtcgcgatgcagcgtcacagcttggcatctcagaacgtcaggcgcaacggcttatcaatcgttaccggatttcaggtgctgaaggacttgtcagccgcaaacgtggccagcccagcaaccgcaggttgaccgaatctctcaaactacgcgtgctcagactgatacgtgaaaactacagcgattttggacccacgctggccgctgaaaaactcagagagcgccatgatatccggctttcaatcgagaccgtccgcaactggatgacgtctgaaggactctgggttccgcatgctcgccgcaagtcacgggtttatcaaccccgacatcggcgtgattgcctgggtgaacttatccagatcgacggctcccaccatgactggtttgaaggccgtgcgccaaaatgctgccttctggtatttatcgatgatgccaccggccgtctgatgcatctgcggttcagcgagtcagaaacagcctttgactacatgctggcaacccgggaatacattgagcagcatgggaagccggtatcgctgtacagtgataaacacgcaatatttcgcgtcagtggtccggagaaccgcaataccaccgttacccagttcggacgtgtcctctatgacctggcaatcgagcttatttgtgccaacagctctgaagctaaaggccgcgtggaacgtgcgaatcagacacttcaggatcggctgatcaaggaaatgcgtctggacggtattaccgacattgaagccgcgaatgcctggcttgccactttcatcgttgactttaaccgccggttttcacgaccggcaaggttcccgaaagatttgcatcgtccggtgcaggaaagccccgatgaattaagagacatctttgcctggcatgatgttcgtaccgtgtcgaaatcactgaccttccagtacgataagatcctttatctcattgacccaacagaagaaaatagccgtcttgccggtgaaaaaattaaagtactggattatcccgatggcaccctcgccttccactatgggcatcgtagccttaagtgccaggcatttgataagctggcctgtgtcgaccaggggcagattgttgataacaaacgtctcggaacagtactcagactggctcaggtaaagcaggatgagcgggaaagcgaaggcaaacgggaacgaagcaaaaaatcgcccagccgtaaggctcaggtgcgcgtccaggaacagctccgggctattaatcccgttctggcagacccgagcttgtttgtagcaagttcaaagcgatag

SEQ ID NO: 219751 - DNA, 483 bp, Klebsiella pneumoniae; identical to SEQ ID NO: 216767

SEQ ID NO: 219752 - DNA, 267 bp, Klebsiella pneumoniae; identical to SEQ ID NO: 180192

SEQ ID NO: 219753 - DNA, 1356 bp, Klebsiella pneumoniae
atgaaaaagacccgctataccgaagaacagatagcatttgcgctgaaacaggccgaaaccggcaatcgggtggagaaagtctgcagaaagatgggcatctctgaagccacattttacaactggaagaaaaagtttggcggcatgggcgtgacagagctgcgccgcctgcgccagcttgaggaagaaaatcagcgtctgaaacgtctggtggcccctaatgcttttacgtcggaatttcggactctcgtcatctcacttgtcagagataaatatccggatttcggccccacttttgcctgtgagaaattacgggagctccatgagctggctttgtcggccgaaactttgcgcaagtggatggttgaggaaggtttatggcgtgagcgccgccgaaaaactgcccgcatttatcagcgtcggcaacggcgcccatgctatggcgaacttatccagattgatggttctccgcatgactggtttgaagagcgagggcctcgctgtacattaattgtctttattgatgacgccaccagtgcacttatggcgctccgcttcgctccttcagaaacgacccgcgcttacatggaaacgttacgtgattatctcgacaaatatgggcgtccccttgccctgtattctgacagacacagtattttccgcgtgaataatccggaacgtgaaggcgagctgacgcaatttacccgtgcaattaaaactcttgggatcgagccaattcacgctaacagccctcaggctaaaggccgggttgagcgtgccaatcagacgttacaggacagactggttaaagaattacgtcttcgcaatatcagtgatatcgaaacagctaacctgtggttgtctgagtttgtgaaagattacaactctcgcttcgcttcgatcccccgtgaaaatggtaacgcccacagggagattcttcattctccggaagaacttaactacatactcagttatcagtcccctcgtgtgctttccaagaatctgacctttcagtataaaacgagtgcatatcagatccgttcagaagggcaggtataccgtctcaggcatgcgattgtcacggtttgcgagaactttaacggtgaaataacggtgcttcatgaaagtcggtcgttgggttacgagaaatatgtcgatgggcctgaaccaataccgcttgatgatgaaaagagcgtacatgagcgtgtggataatgcaaggtttggtttgcgatcaaaatattacgtaaaacctgctgctgaccatccctggatgacacggagaacgcagagtaaagatgatgtgaagccgccaacgttacccagaaagaaagtaggcccggatacgaccccaaaatag

SEQ ID NO: 219754 - DNA, 1083 bp, Klebsiella pneumoniae; identical to SEQ ID NO: 162165

SEQ ID NO: 219755 - DNA, 894 bp, Klebsiella pneumoniae; identical to SEQ ID NO: 149258

SEQ ID NO: 219756 - DNA, 573 bp, Klebsiella pneumoniae; identical to SEQ ID NO: 149259

SEQ ID NO: 219757 - DNA, 312 bp, Klebsiella pneumoniae; identical to SEQ ID NO: 149260

SEQ ID NO: 219758 - DNA, 567 bp, Klebsiella pneumoniae
atgaccacccttacgctacagcaggcctttgaggcctgtcagaagaacgaaaccgcctggctgaactgtaaagccgaactggcggccgcagagcaggaatatcaggaacaggtgctggccggggatgagcgtattccgggcagaatgcagacactgcgcgatattatcgatgtcaaaaaatgggagataaatcaggccgccgggcgctatatccgcgcccatgaagcggtgcagcgcatcagtatccgcaaccggctgaatgactttatgcaggcgcacgggacagagctggccgccacgcttgccccggagctgatgggactcagccagcagcccgcactcctgaccggccatgcgctcgaccgttcggcgcattacctgcgcgaagcgctgtccgtgtggctgagtaccggtgaagaaattaattatgccgcagaagacagcgatattttaacggccatcggattcaggcctgacgcggcttcgcgggtggataatcaggaaaaatacacccccgcacagagcctgatttatgcccgcctgcgcgcggaactggccagtaagtag

SEQ ID NO: 219759 - DNA, 267 bp, Klebsiella pneumoniae
atgcacaccgctttttcttccccgtcttctgcccctgccgcgccgctgatgccggtttctgatgccgttcaggagcgctttatccgcctgcccgaagtgatgcatctgtgcggactgtcccgctccacgatttacgacctcatcagccgggaggctttcccgaaacaaatctccctcggcgggaaaaacgtggcgtgggcgcagtcggaaatcaccgggtggatggccgaccgtatcgctgaacgcaaccggggctatgacgcatga

SEQ ID NO: 219760 - DNA, 195 bp, Klebsiella pneumoniae
atggctacgaccctcactccgtcacacccgcagtttgtctttgtgtttgccgccgttcgtcgcgcagaccgtcagccccgtatctgtatgctccgcgccgtcgccggggatgaacacgccgcacgtctttccctcgttcgcgattacatcctctcgtttgccggtcgtctgccggtggcggaggtgcgcgcatga

SEQ ID NO: 219761 - DNA, 228 bp, Klebsiella pneumoniae
atgaaacagcccgccatcaccgtcaaagacctcgaatgcctggagcacctgcgtaacgtcggccagttcgtcggtgagctgatgcaggtgcaggactgtacttccctgcgtcgtgatccggcccagcagttacagctcacctccgtgatttacctcatgaccgcccagctcgacagcgtggtcgagcgctgcaaccaccgctggttcaccggggagggcaacgtatga

SEQ ID NO: 219762 - DNA, 321 bp, Klebsiella pneumoniae
atgaaaatgcctctgccgcctgtattgcgtgccgccctgtatcgccgcgctgtggcctgtgcctggctgaccctgtgcgaacgtcagcaccgctatcctcacctcaccctcgacgcgctggaaagcgccatcgccgccgagctggagggcttctacctgcgtcagcacggcgaggaaaaaggccgtctgattgcctgtgcattactggaagatttgatggaggccgggccgctgaaagccgccccgtcgctgtccttcctcgggctcgccgtgatggatgagctctgcgcccgccatatcacatcgcctgtactgcactga

SEQ ID NO: 219763 - DNA, 1644 bp, Klebsiella pneumoniae
atggtggcgctgtcgtccgtgaaccttctttctctggcgagcctggcccgtcagaaacacccggcctgtcagattatcctcgccgctgaccgtgacctgaacggcgacggccagaacaaagccaccgcggccgctcaggcctgtgagggcgttgtcgccctgccgccggtgttcggtgactggaatgatgcggtgatgctgaagggggaggacgccacgcggaaagccatttatgacgccatccgcccaccggcacaaagcccgtttgacaccatgagcgaggcggaatttaccgccatgggcgccagcgacaaggcctggcgggtgcatgaacattacggcgaagcgctggccgtcgatgcgaacggccagctcctgtcccgctatgaaaacggcatctggaaaaatatcccggccgccactttttcacggagtgtggctgatttattccagcgcatacgcgccccgttctcgtcggggagaatcacctctgtggtggagacgcttaagctgattattccgcagcaggaggcaccggcacgccgtctgattggttttcgcaacggcgtactcgacacccagagcggtctgttcagcccgcacagcaaatcacactggctgcgcaccctgtgcgacgtggatttcaccccgccggtagaaggggaaacgctggaaacccatgcgcctaacttctggcgctggctcgaccgggcggccagccacaacccgacaaaacgcgacgtgattctggctgcgctgtttatggtgctggcgaaccgctacgactggcagctctttctcgaagtgaccggccccggcggcagcgggaaaagtattctcgccgaaatcgccacgatgctggccggagaggataacgccacatcagccgatatcgacacgctggaagacccccgtaagcgtgcctccctgattggcttctcgctcattcgtctgccagaccaggagaaatggagcggggacggtgccgggctcaaggccatcaccggcggtgatgcggtctccgttgacccgaaataccagaatccgtactcgacacatattccggcggtgattctggccgtgaacaataacccgatgcgctttaccgaccgcagcggcggcgtgtcacgtcgccgggtaatcatccacttcccggagcagatagccccggaagaacgcgacccgcagctcagggacaaaatcgcccgcgagctggccgtgattgtgcgccagttgatgcagcagttcagcgacccgatgagcgcccgcgccctgctccagtcgcagcagaactccgacgaggcgctcagtattaaacgcgacgctgacccgacgtttgatttttgcggctatctggaaatgttgccgcagaccaacgggatgtttattggcaatgccagtatcatcccgcgtaattaccgtaaatatctctatcacgcgtatctggcctatatggaggccaacggctacaggaacgtgctcagcctgaaaatgttcgggctggggctgcccatgatgctgaaagagtacgggatgaactatgagaagcggcacacaaagcaggggatacaaaccaacctgtcgctgaaagaagaaagctacggcgactggctgccgaagtgcgacgaacccaccgcgacttaa

SEQ ID NO: 219764 - DNA, 717 bp, Klebsiella pneumoniae
atgaacgcgactctgttttccaatcataatttatcacgtagcgatatatccgttcgttatgtctttcaaaagatgttttccccaaaaggtacgctcgtcgccgtagagtgcctgagtcgtttcgatagcctgtctatctctccagaaaacttcttccgctatgccaatacgggattgcgcgagagcatattcatggagcaactggcgcttattgaaaaacataaacagtggtttaataaaaacggcatctctgcaacaatcaatgttgatgaccatatactcaacatattgctaagaccagagattaaaaacctcgttggccacattggctgcgttcactttgaggtaacagaaaactcgaataaattattgaacaatgctcttgcaacctggagcgatccgcgaagtacgacgctctggctcgatgattttggctcaggcaatgcgggtattagcgcgattcgaggctaccattttgattatgtcaaaatcgataaagacttcttctggcatttaatgcaaaaagattctggccgaccattgatggatgcgctgatcacctttctttcccgtaaccaccataatgtgattattgaaggcgtagaaagcgaagcgcacaagaaatggttacagggcatggagtggtttgctattcagggacactactggaaggaagtcagtattgaacaactggtcaaagaagatatcaaggtttaa

SEQ ID NO: 219765 - DNA, 585 bp, Klebsiella pneumoniae
ttgaaaaacacattgctttatactgacgacaatatcatcgggcactcaatccatgattatatgattgataacaaaaaaaacatcaccactcttaacttccaggatattgttaaggggaccagcgcgccatcaaccactaccattattgtcaacactatccataaggatatctctgcagccacaacggtcgcattgcttaataccctgcgcaagcgtcttacgcactgcgctttgctggttttaattgtaaaaagtgacctctccagactgttccgggagctgctttatattgataatatattgattttgaatgaaaaatcttctttatcagatttctcagccatcatcaacagacctttgaccgccgatgtctgccagcggttatgtacccggcgtaagctaaccgctagggagcttcaggttctggagctaatcattgcctgtaacaacaataaaagaatcgcattactcctcgatattgatcacaaaacggtacacagtcataaggtacatattatgaagaaactggggatgaataactcacggataatgaataaaaggatagtcaatatgtatcggtgctaa

SEQ ID NO: 219766 - DNA, 711 bp, Klebsiella pneumoniae
atgtctgaaggagtttctaaaaattccagatatgaaatcattgcaattctgagagatgaactcaggattcaatctaaattgtacttctattgtaatgatataaaacaccagtcaaccctaaaaaaaatagaaggaaattttttctatataaaaccatctacctctcatccaggccttcctaaagagagcattttttattttatcatccacagcccattaggaaaaatagaattcacaaccaacaatcgaatcactgacaaaagcaattcaaacaatcttctatgcttcattatccctgaatcattatcaatactacaacgaaggacatcaccaagaattaacgttaggtacgaaagccagttttattgctctggaagatacagaagtggcactatttataaatatcacttgaatgatatatctgaaggtggttgctcgtttatatccctggaacctttgcatagttttattagaaatggaaataaacttgaaaattcagtgttaaatcttggggagtacggacaaatccttgttaatttaaagataaaacatacatccgaggaaaataatcgcaaacaatgtgatgcaacaagcttcagagtatcttgcatgttttattacgaaagtgaagaaaaaaaagagaagatagaaaaaataattgtcaaattgataattgatagaaaaataataaacaggcgaagcctagtttaa

SEQ ID NO: 219767 - DNA, 1779 bp, Klebsiella pneumoniae
atgccacggagacaaatactcagtagtgaagaaaaagaacgcttgttgattgtgccagatgatgacgtatttcagacgcgcatgtgctttctgagtgaacatgacctcgcgctcattaataaacaccgcaggccagctaaccgtctgggctttgcagttttactctgttatttgcgaggaccagggtttcctcccgacaaaagtatttcacctcacgactgtgttgtcttcaggctggcggctcatttgaaagtccagtctgatttgtgggccgagtatgcatcaagagaggtcacccgctgggaacatctggctgaactctaccgctacctggaattatccccttttaaccgggcgctgcaaaaaacctgtattcgccacctttatccccacgccatgcggacagacagaggttttttacttgcggaggaaatgctctcctggctccacaataataaggttattttcccctctgttgaagtgatcgaacgaaccctggccgaagcaacaacacttgccgacagggcggttttttctgcgcttaccgcgcagcttgaaccagggcataaagcggcactggaccgtctgttggtatctgagggtgagcaaccttcacggctggcctggctgctccagcctccgggaaaaattaatggtaaaaatgtcctgcaacatatcgaccggttaaatgcgattgagtcgctggcactccctgacggcattgcactttccgttcaccagaaccgactcctgaaactcgcacgcgaaggcaggaaaatgagtagccgggatctggcaagattcacggatgttcgccgttatgcctcgctggtttgtatcatatcggaggccagatccaccctgactgacgaagttattgatctgcacgagcgtattctgagtagtctgttcagcagggcaaaacgtactcaggccgagcggctccagcaaacgggaaagctgattcagagtaaactgaagcaatacgttaccgtcggacaggcattacttaacgccagagagtccggggaagatccctgggccgcaatagaagacgtccttccctggcaggaattcatcaacagcgtggaagagacgcggttcctgtcacgtaaggacaacttcgacccgttgcatctgatcacagaaaaatacagtacgctgcgtaaatacgccccccggatgctgtccgtgttgcagttcagggctgcacccgccgcaatgcagctcagtgacgcattggataccgtcagagatatgtatagaaaacaactccgaaaagtaccgccttccgcgccaatcgggttcatcccggaaagctggagaaaggttgtgatcacccccaccggcattgaccgaaaatattacgaattttgcgtgctgaatgaactgaaaggagccttacgttcaggtgacatctgggtaaaggggtcacgccgctacaggaatttcgatgattatctgatcccgtcagacgattttgaaaaatcactccgggataaccagttaccccttgctgttccggccgattgccatgaatacatcaagagccgtttgacgcttcttgcatcgcgtctggaagaagttaacgcgatagcgctggccggtgatttacccgatgttgatatttcggataaaggcgtgaaaattaccccgctggataacagtgtcccttcagcagcatccccttttggcgatctggtttatggcatgctccctcaccctaaaagggggccgcttggaaaacggaaaatatcctacgttaagcctgttttttga

SEQ ID NO: 219768 - DNA, 723 bp, Klebsiella pneumoniae
atgggtacacgttttgtagtaaactttgattatcgtaccaaaaatgatgacattcagttttcacaaatagttgaacactttgcatttatcatagcgcaacttaataagttatttcaggtggaaaagaattggtatgaaacgggttattccagaaaacaagctctaaatcagatagcttttcagaatggaggtatcacagataacactcgtttgaaatgggagcgccgatataaaaaaaatatgccgatgtttgtagatagcgtttgggatgccaatgatgatgagcatagctgtggcatctcttatagaaaaatgttttacgaagaaaaaaatagggtttccgtggagttaagtttagttgtaactaatgatgaaaattcattgctccgatttataacgctcttatcacatttggctttattttttgattgttcacatataagcatcgattcaaatggatacaatctgttcgggcgaaacgtattccctgacagactggctgtaggttggatgttatacatcccccacatagtcttaactgaattaattccagaagcagccagagttgtgccggtaatggatggcgacaatcagaaaggcaccattattgtgtctactgaggaaatattcgatggaaacaataaagaacacataggtaaagctaacgacattgaaattaagcttctggatcttggcttattgccacttatgaccgagctttaa

SEQ ID NO: 219769 - DNA, 771 bp, Klebsiella pneumoniae
atggttatgtttccaccagtagttaccgggggaatggggggcgcggctaccggaagcgtcggtgtggcaggtggctcaaccggaacagcaacatttcccggagcaggaagcacccatggcggctgggaagaagaggatatgtcttatcctggctcaggtagtgggtcgcgtcaggggaccggagggtttgactatcaaggaaaaccttatgatccgatgcttaatgaccccatggcggtcagtgcagagacgcacggtgatttctgggaagatgatatagattactccgaaacggtcagttacgaaggtgtagacacgaaagcgggggcacaggcgaagacggatgaaaagacctgtgataactgcccgcctgagggcaaggtgatgccgatggtgagacgctgttcgcgctggagtgcggtaacgattagctaccagacgagaatatgtggcacgtactataatccagaaactaaacagatacaggaatttaagtattgtggtgtatcgtttgatggctggaaagataagctttgtcagttctgggaggcgaaggcgagatatgatcagtttttcagggctgatggtacaaaaaaagagtggtggcgaggggataacagtgcaattaatcaagccgggcgtcatcaagctgttgcgacagttaatcaacctttaaaagtagtttggatttttatgcagccaatgagttgctactatttttcaaaaatcttcataagatttaaagatattgttgtcagatgggagccttga

SEQ ID NO: 219770 - DNA, 345 bp, Klebsiella pneumoniae
atgctgaagctgtctgaagagcagtgtgccggtgtggaaaaaatggaagatgatgattttgttcgcgataccgcgcaaagactgaagaggaaatttccggagattaacgaaccggatgaaacattccatgttcgcctgagaaaagcactggattatgccaatacccttccgttgaaagaaaagaatgtgaagcgagattttttgtttctggaggcattttggcccggtttttatctgaagcccgaagtggataaatggctgagaacgccgaatggttattcagttgatcagcgggttgaagattatatgcatgtgatgataaaccgggaaaggaggggactctga

SEQ ID NO: 219771 - DNA, 504 bp, Klebsiella pneumoniae
atgaaaagcaccagttttagtctcgcggcacaacacctgatttactcaacaaaagtgacattatatgccctggtggatggactgcaatatgagcggtatttcggtgagggcctgtccgttccacaacccgacgccatgcctctgttcgatacctggccggattcccgcattgcttttgctggcccctggataattcagatgagctgtgcaatggatatcagtgaaaagctgtgtcatctggaaactgctctgccctctgtttcctggatattgtcgtcttctgcactcacggaacaggtggtgcatctgaagaacaatatggatgttgggctgccggatggtcggtctgctttgctgcgtttccaggatccacgcgttcaggttcgtctggcaacgatgctgaacgacctgcaacaccagaagctgacaggtttaatgcaggaatggctgacaagagtggacgggaaagtctggtcatttaaacaaagggaattcatatgctga

SEQ ID NO: 219772 - DNA, 555 bp, Klebsiella pneumoniae
atggtgcgggtttatcagctcagggatcgtaaagcggttgatgccgccgattaccagacgctgctgcgcagggccgatacggtacttaaggacgatgtgctggcatcaaaagcgctgctggtcatgcccaatggcagcgtgacgctcaatatgcccatggatgaggacgctcagtttgtggcggtggtggggctgtttgcccgcaccggtccgctgagcctgaaggccagcgaaggcccggtggagatgcaggcgcagaacgccagcctgcagctgtttgcagagaagaagctgatgctgagctcagcgggtgacatcttgtttgtcgggaagaagcgcatcacgctgattggcggcgggagttacctgaagctagaggcgggaaaggtcgagtacggtacgacggcgatgtacctgcgcagggtgaagcggacgatggctgcgggagcggcttcaataccggttaaggcgagcacggggggcggtatttgcctcagttgtctgatgaaggcggcaatgaatggcgacacttttgttataaggggcgagtcatga

SEQ ID NO: 219773 - DNA, 744 bp, Klebsiella pneumoniae
atggagttcagtgataatcaggttaatatgctaaaaaaggtatctgctgaaaattacatcagtgaaattaccgaacattgcgagattatgtttccactgttaattcccttgcaaaggaaggatgattttcgttcctgtattcaacagagcattgttcttgcaaaaaaagccggttacacccaacgaggaccggttcgcctttatattgatatgatgattatacttggttctgatttcgggaaggaaccgctttttcagtcattgaaaattaaagatcaaaaagttctcccgcaaatagaaaggagtgtaaaactttatacattactgaatgattatattgcgaaagtttatggtgaaagcggatgcttttttaagaaaagctttgaaatgtttaaagattttagtgctaaagactttcccgttaaaataagttccagtaatgcaggggtgcacgaattattaaggggtatatatccgcagcggtatgattttgcaggttacaacgctattaataatttaattgctgttttggatggggcttgtgaaaaatataaaattaagcggcttaatcatcgattatatttagctctcattatgtttttatttggttgctcatttgaacaggatatttttcgtggacatcttattactgaaccattaatgaaatattttaataacgacgatatcagcggccacaatattattgtgtcgtcttacgcctcttttcaggttaatcatggttag

SEQ ID NO: 219774 - DNA, 615 bp, Klebsiella pneumoniae
atgcgatttcgaaacgtttatggtgcattatttatagtaattattttgatagtcgtgggagggttgtatatgcatagagattattatcaaatggcagttttagttagtgcggataatgagagtagtcctgagtggcctaataaacgcaagtggtttgatgcgagaaaatggcttgaaacatcacaatatattaaaattgatgatttttatgtgcttaatgaaagatatatcccaatcgatgttttggatgattttggaataacgcgtaggctacaggattctataaaggaatcgataaacattgaacctgctttatcatctctaaatgacatagatgcaattgttttttttgatttaatgaaagataatctatcttacgagtatttaaggacggaatttaataatcaaacattgaaaccaacagaagattattttttgatcttttttacttatgcaaatcaaacgtatgaagtagagttgttaagaacaccatataataatgggtttatatttatggccaatggtagtctggttcataaagctggttactggcattcaacatctccggctggatactcttatagagattacattgcaggtaagcctgttaaataa

SEQ ID NO: 219775 - DNA, 1320 bp, Klebsiella pneumoniae
atggctgaaatagcatctttggaccccacaaccatgtcgaattgcaccggtgaggtaggtgaacctgctaccagatgtaaccaggaatttagtcaccggataaaacttgtccctgttgatggagcgtcggtgtccctcagggggattccttggtctgttcattttgaggaagagaaatacaacaaacagggcatgacggatgcggaaggtaaaacagaacgaattaagacatcacagcctaaaaagttctttgcgcttgttggaaaattagctgagggataccggaaacgtgggggcagttttggttcattaaaggagatagaagagagaaagatatccttggtaacggcacctaaatatcctgaaaaagaaactccttattgcagtggatatgattacatcactgtggtgggggccagaacggcaccaagggactggcgctggcagggtggatttggcctaacggaagagagcaaaggcaatcaatatcggtttattaattgtgggttacgccagttgcgggattttctgcaatccagtaaggaggattattctgtacagcgtattatggtcgtgtttcagcagggatatagtgagtatgatattagcaaaataaatgaatattctgaaaagcaaaactcccgagttatttatgtaagaaataaagatgaattggtttcatttctcaggcagcgtaaaacaaaaaaaaggctcataaagaaaatggtgtttttctgtcatggtatcattaatattgcttcttttcattatgccggggataataaagacgcgggtgagttttccataggtgatattaacaatatctatgagtctgtttttgactatgatgcagaaataacaacctatgcctgtcgtgccgggatctcggtggatggtaatgatatggccgggaaagatgctgggcaaaagcaaagtccggcacagaaaatggctgatgcgtgggatgtaacagtaagcgcttttgagatgcgctcaagttatgttggtgtttatggtacaggaacggaaataaagaatgcagaaaactatgataaagttatccagcaatatgaaacagaaatggatgagtattataaagaaatagccagaggtaataaaaaggctaaacaacctgaacgtccggagaactacgatgaaataaaaagaagaaatacagatattaaagagcgaagcaaaaatgagaaatatggtggccctattgctcctaatggagcgtggcgttttcctacaacaggtgatactccatctggattgaaaaaaggactacaactatatcaacctttagagtggaaaaaataa

SEQ ID NO: 219776 - DNA, 555 bp, Klebsiella pneumoniae
atgacagaaccgcattacgcattacgggaatttgcactactcagagaagaatatgaaactctgaatttatatgccttggtggatggtattcagtttgatcgtttctttgatgagccgcttaaggaaggtaaggatattcgctctcttttcattttaccggaagacaggattctcgcttttgccggaccatggttgctggatgtgtcaaaactatcaagggagtatttagtgaaaatcagccagctggaagaaaaataccctgcggtatcatggattatcagtgagcaaccttttgtaaaactggcccggcatctggaatctggcctgatggtttcactgccttcgaaagataaagggttgtttcgtttctacgatagccgggttttgaaaatactccctgaacttttgtcgccggagcagtttgcacggttgatgaaatattctctgcgatggttttttctcagtgagggcgaaattaactgttatcagtgcggtgccggagtgttagagcatcgtattattggaaataatgagctaggcagggaagtattataa

SEQ ID NO: 219777 - DNA, 396 bp, Klebsiella pneumoniae
atgggcaatatgacggcgctggccggggagaggcttgggctctttgcccgcaccggccagctgagtctgaaatccggagaagggccagcggaggtgcaggcgcagaatgccagcctgcggctgtttgcggagaagaagctgacgctgagctcggcgagtgatatttcgtttgccggaaaaaaacgcatcacgctgattggtgggggtagttacctgcggcttgaggccgggaaggtggagtatggtacgacagcgtcgtatatacggaaggcgaaaaggacgatggctgcgggtgcggcgagtatgccactaccattcagggaaaaaggattatgcctgagctgtctgatggatgcagcaatgaacgggacgcctgttgtattgaggggaaattaa

SEQ ID NO: 219778 - DNA, 837 bp, Klebsiella pneumoniae
gtgaataaaaaactattatggatttacatcctctttgttttatcatttagcgctcgcatccaggttagtgaggcaaaggatgtatgggtttttgataaagtctccagttctactgtcttaggaatgacggatgcggacagggttcgcaatctgacaacgcagtttcgacaggtcgagatcgtcactgattcaaacattctcaccattcataattccctactggaaaaagggaaaatctgctctatcgacttcgtcagaataaataaaacattgctttcttatttttactctaaagatacggtggcaatgtataaggcactattttcacaggaaggaatgcctctgacggatgacattattgtcctgacatctcttaggcctggtgaagaatgtcccgaaccgtacagtgaactcatagaggctaaggggaatttgtttttctctgaacaagactatgtggtgttcatgaagaaaaaaaaagggaatgtaacttcggggaataaagataaaattgaattttggcaatactgtaaagacgctgcggaaggcgcggcctacgatggaagaagtaaatatagctgtcagtttagtcataaatctatagctgaagtgtattccaatattcgtgcgctcagtcattatcagcatgcgttaaaggaaaagttgccgagtaaaaatattaaataccctgttgatggaggatatatcatttatcaatggactgatcgcaacaagctagagataataattgaacaaaaaaatgagtctgtccgctatttcgttaagtctaaaaataatagtgctgaagtagtaatcgaatcggatacacaatattag

SEQ ID NO: 219779 - DNA, 1863 bp, Klebsiella pneumoniae
atggatgatatggaaaagttcatcaccaatcccggaggggcaggagaggatgcgccggtgtatctgacctggaaagacgatgccccactatctgacaagagcgataccggaataacagcaggcggtcgaaaaacaaaggcgccggggatcctgacgcttgcaaatgtacccggagttgatgctgaggggaatacgctgaccagtaacaaggatgcggcatactatcagataagaccagaaggtggctggctggccgctgccagtgttcagaaagtgtcgcagtatgcgcttggtgagctcggatttgtcacactgaataaggcttcggaaagttttgacctgattgatgggatcaaacaaccgaataacgtggtgaagggtattctggagcagttatataaagcagcagaagaggaaacccgcaccactcacgcgctgaacaaatataactaccagcgtctgctggcgttgatagacagtaaccaggacgggcattaccaggagcaggagtatcttcaggcggtacataatatctcttaccgcgaccgcttataccgtgtaattgcgaaacacgccagtgaatggtactacggtaaggatgacccgctctggaagacatacctcgatacgttaaccagggatgcgccattgtggaagacgtatctggaaacgtttctggataagatgacatggatgaaagcggtgtctgaaaagggcgttgcgctggggccggagccgtggcatgtgcatccggtggtgtttttagatgctgtatcaaacgatcagaaattgattatatttccgcttaaagtcaaaccgaagaatgatattaatggagtctggaaaaattattactgggctgcatctttaagtgacagcaatgcctctcaggccatatttggtcgaaatcgaagcggagggagtcgtaaacatgctgctcgtgatttgtataccgatccttcgacagaaattgttgctgtttgtgacggaacagtaaaaagcattacagcttattatatgggaacatcacaaataacaatcgagcataaaacgaatgataacagacgtttttttgcacgttatggagaggttgatcctaatagtattactgttaatgtaggggataaagtgagtcaaggtagtataatagctaaaacaggtttaatgatttcttcagaaacaaacaggcatcccagcattatagcggggcagactgtttatatgctacattttgaatactatcctggaaatgagtctgaatcgcctccaaacaatacattagatctcccttacagaagacgaaatgacttacgtgatccgttggaaatattgcgcgaaggttacgagaacactttcagtgaaaatgtcaaaaatggaaaccggattgatataaaccagttacaggtttcagatgaaggaaaagcgtttatcaaaggatgggagtcatttaagtcaaaaccttataatgattcagagggctattgcaccattggttatggtcacttaattgcaaggcgcaagtgtgaggatatcgttctgtcagacgaattcaaagacggcatcacgcgtgcccgcgctgatgaactttttgaagaaagactgcccacatatgtaaatgaacttaagagttcagtaacggtgaatctctatcagtacgagtttgatgcgttggtaagccttttgttcaatctcggttcattacgcaaagcacctttactcaaatcgaaacttaatagcggagattatgctggtgcagcggacgaattcctcgatattaccaatgacggtaccactggcctggtgacacgccgtaggaaagagtgggatttattcaataataatatttatgattcttctcattga

SEQ ID NO: 219780 - DNA, 1872 bp, Klebsiella pneumoniae
atgactcaggaagacattattaccccgattgccacggttgccacccgtcaatgtatgatcacctctccctggtttgtgcagaatacagaatactcaccgatgccggcgacctataagccgctggtaaacggggaagaggcgtttgctgccgtttatcatgccatcatgaatgcacagaaaacggtggatattatttgctggggatttcagccttcgatgtactttatccgtgatggtcagtcgttgtgtatcggcgaattactttgcaagattgcggaaacaaaaaaagtccaggtgcgtattctgggctgggaaatgccctgtaatgccgcaggtgtgggaggagaggccaatttaccggggaagggagtcattcgttataaggaccggcaaggccagagtactacggatgaacgttatgcctatgaccgacaatggttccgtcagtattctctgtcaggggaatggtccgatcatcagttaaaaaagggacaggcggggatagcggaaattgctgccgcacccatagcgcaacgacaagaaaaattaagctcactttctcctttgtttgtcgggcgtgggtttaatttcctggagagagctgaaattgcctatcgcgctgcgaatatggcgcttgatccggatatcagcccttacacgatgcttactcttgcgggtaccgtgacccatcatcaaaaaacggtgctggttgactacgaactgccggagtctacggttggttttgttatgggtcacaacatgcttgatgagtactgggatacggataaacattcagcactgtttcgcccgggcaacaatatggatccccgcttaggcgctaacggtaagctgccgcggcaggatatttccagtcgggtaaccggcccgattctggagcatctgcatcataattttgccatggcgtgggagaaggaaaccggtcaggatctgctgactatccgtgatagcgtgtccatcgcgaaaaagctgaaactgcgtgcgctacacggcacgccggtgatggcgcaactgttgcgcactcaggcgcaggcaggaaagcatgatattgaaacgctttatctgcaggccgtaaataatgcaacgcagtttatctatatcgaaaatcagtattttcgctggccgccgctggcagagttaattaatcaggttgcggaaagacagagtaaagtggggcgagaactgcatctgtttgttgtgactaacgtaaccgatgaaggcattggggcgggtacggtgaatacccagcggatgcttgaggtgctgggtcaggcaaacattatccctgaagtgactaaactgcgtaaggtcggacaactcagcaacgcaacgttcggtggttctgtgggttatatcgaccccggagatatcaataaacgtaaccgcgagatgagtgagaaaattgctgattttaaaaagaaggccgatgaaattcagagcagtgaaatcctgccggaggaacgccccggactgaaggttcatatctgctcgctggtggctccggactcaccaccggaggaatgggtgccggtatatattcactcgaagctgatgattgtgaatgatgtatttaccacccacggttcagcgaatatcaacacgcgcagtatgcaggtggacagtgaaatgaatattgcccatgaatgggccagcgtgacgcgggatttacgacggcggttatggaatatgcatactaacggacgaggggggcaggatgatgcgaaggatgcttttaaggcctggggtgacctactggataaaaacgagagccatcaggattccaagaaagaacaacctgaggcttctctgattaagttttattataacaagtcaacgatgagcgatctggactga

SEQ ID NO: 219781 - DNA, 687 bp, Klebsiella pneumoniae
gtggcgaccggttactatctgaccgctatctatctggaacggggcgtcgcggggctgcagcaggatccggtgcttgccctgcgctattaccgcaaggcggcggatgagggcaatcctctggctcaggcatatgtggggtacaaactatccccagcaagaatggctccagaggttgccctacaaatgttgcgctgcgctgcggagcaaggggaaggggatgctgctaatgggttgggcaatatgttagctattgatggaaagtaccgggaagcagttgaagctttccagttgggtgtggcggctggtgatggaagttcagcaagatttttagcaaatgggtttaacggtcctataccttcggatgaactttactatctggcccagcagccagacccggagcgtgcccggcgctataaggtgatcagtaaaatactgagcaattactcctatgccagccccgttatcccggaaatcaatgatatcgtcccgctaccacccgcgctgctccctgagtgggacggcaaactgaaatggctggaggaatgggaggccaatatcccgccgtcagcgcctgatgcggcgctgatagagaaactggcgaaagcgaaacagctgaacccggcgacgggcaggccgctgccgacatcaccggactccgggaaatacaacgggtcagctggccagtaa

SEQ ID NO: 219782 - DNA, 2586 bp, Klebsiella pneumoniae
atgaactggcagcgcttcaacaaagtaagtagtttttcaggagaaaccagtggcatagtaaagaaaaattttattattaccgcggcgttgctgagcagtctctttctggcggcaatagtgaatcttttatatatcgcggataatcttaataataaagcagacgcgcgcagcagtttacttttgcaaaaagccctcactaaccggcaggaaaagatacgtgcaaatttaatggataatgccgactggggcgaagcgtataataatttgcacaagcaggtgaatgttaaatgggcatgggacagccagaaccttggtgaatcgctttacacgaattaccagtatgaaggcgtatttgttttgtctcccgccggggagacgcgttatagcgtcattgaaggaaatcttgtcagccagcctttcgagaaatggctcaaccggaacatcaccaaagaactttttaacgacctctcacaaagccagggtaaagccgtctcacgccttatgatgaccaacgggcaactcaccttactggcggcggcccggatcacgtcggaagacgatgaaagcatcacgccggtggcggaagatgcctcggtactgattttcgccgacgtgttaacgcccgttaaactggagaaaatgggcaacgaatacggcattcataatgcgcatacgttcggcagaatggagccacacctgaaagccgactaccgggaagctcagcttattttacccattgataatggcgatgttctgattgagtggcgaagcgacgatccgggcagagcgctgatgaaccgggagctgccgttaatcatcattctgatgttatcgaccattgcatttacctggttgatgcggcgtggtgcgttaatcaaagcgcaaattaatgacgaaaatgttttcctgcttgagcaaagccgacaagcgcttacggcaagtgaacgacgctttcgcgacgtcattgaagccaccaccgactggatttgggaagcggacagcgaggcacggctaacgtggttatccgaccgtttttccggcgttaccggtcatcattctgacgactggcttgggcggaacatgttggatttcatccacagcgacaaaatcctttttcatcactggctgctgaatccgcagacgagcagtaattacacgctcaaaaaggcccgctatttctcagctcagggccatcagcgttactgcaatgtggtggcgaagcgcgccattatggatgatggttctatgggctttcgcggtacggtgaccgatgtcactctggaagtggaggcgcaggagcgtgccgagtatttatcgcggcatgatgaattaaccggcctgccaaaccgggtcagaatgaaagagtttctggaaggtgagctgcgttctttacccgatccggatcatcccctggccatgatcagcctcgacctggataaattcaaaccggtaaatgatttattcggccacaatgcgggcgatgcgttactcaatgaagtcgccagccggttgcggtcctgtacccgtaaaatcgatctggttgcccggcagggcggagatgagtttatccttattctgccggatatttatgtgcgtaaagacatagagacgctctgccagcgcattgccagtgaaataagccggccttttatcgttaacggcaatgaagtgtatatcagcgtgagtatggggattgcactggcgcctcaggatgcaatgaacgcctgcgatctgattcggttatccgatatcgcattgtataaagcgaaaaataccggtcgcaataactgggtgttttacgaacccaacatgggcgagtacttaattcagcgccgggaaatggaaaaagagtttcgtgaagcgttatgcacagaccagtttcagctggtttatcagccccgttacgacattaaaacctcgcgtatcgctgctgtcgaagcactggttcgctggcagcatccgcgtctcggtttactgatgccggatcagttcatcccgcttgcggaagagacgggcctgatcgttgccatgagtgatgtggtgctggagaaagcctgtaaagatatggtgcatctctcgcccgatttggttatttcggtcaatatttcggcggtggagtttaatacccgtggcctggcgaaacgggtaaaggctgcgctgcaaaaatcggggcttaaaccgtcccggctggagttagaaattaccgaaaacgtgacgatttccaatccggatatcacgctggaaaccatgaagcagctgaaggatatcggcgtacgctttttgattgatgactttggaaccggctactcggcattaagctatctgaaacgctttccgttcgacggaataaagctggataaatcttatgtgttcgccatggaggaatcggaaaacgccaaaatcatcgttgagaatattatcggccttggcaaagcctattcgctggctgtcaccgctgaaggcgtggaaacggcggagcagttgaaaaggcttaaacaatatcactgtgacgaggcgcaagggtatttcatcgggaagcctgtcgcgcttgatgcgttaaatttagacgtggcatttagtgtgtga

SEQ ID NO: 219783 - DNA, 1014 bp, Klebsiella pneumoniae
atgtccaaattttctttatgcttcaaaattcatgcgttattttttgttattctattgccaatttcttcgagggcatatgtacttggtatcggtggtcaccctgaggggtttagaggtagtgatgaagaatatgttagcttgttaaaacaatataatatttcctcactaagaactgattacctttggcatgaggtcgaaattacaaaaggagaatataatcccgcaaacattaaaactgaatcagtaattaacctttctttcaaaaaaggtatatcagcgctccttattttgggctatggtaatgatttatatggtgccggaaagccgaagactaaagatgaaattattgcttactcaaaatatgcatcatggacagctgagcatttcaaaggacgagggtatatatatgaaatctggaatgagtggccccatagaacgaataaagatagctcaccaacaaatattgattctgcgatgagttatatcgctctagttaaatctgcatcatcagccattaaaaatgttgatcctactgcaaaagtaatagcgggtggctttaatccaatcgatggattagagaaagaatggggccaatatttagttaaatatggtattttaaattatgttgacggtctttctatccatccttatgcatattccagtaaaaggttagccttaccctcaaccaatttatctattgtcaggaatttccatgatatgcttatttcaaccaataaaggtttaagagaaattccattatatataacagaaattggatatccaacctatcgtggtaagccagagtttactgaggatgatgttgagtcttacgcaattgaatattttaaagttgcaagctcaatgccatttatcaaaggtatatggtggtacgatctcaaagatgatggtaatgataaaaataacaaagagcacaatttcggtatactcaaaaatgatctaactagaaaaaaagtcgctgacgtttttactaattccaaacttttaatgaaataa

SEQ ID NO: 219784 - DNA, 573 bp, Klebsiella pneumoniae; identical to SEQ ID NO: 59972

SEQ ID NO: 219785 - DNA, 405 bp, Klebsiella pneumoniae
atgagtgatgtaaaggcattcaacaattgcatgagtgtgttctggcgacagcatgaagccgaattctctcgctttctgacatcgaagacaggtgatagcgaaaaagcagcagacccggagaagacgaaggtgattatcgtgacgcttgccgaaacgacacctgtactggaagccgctaacctgcagcgggatctacgccgagctggcatcgagccgtgggcatgggtcgttaataacagcctggcagctgctcaaccgtcttcgcctttcctgaagatcagggcgaaccgcgagctgcctctcatctctgatgtggaagagcagtatgcaaagcgtattgcattaacagcgctacagagcgaagagccggttggtattgacctgctggaagaaatggcgaagtaa

SEQ ID NO: 219786 - DNA, 426 bp, Klebsiella pneumoniae; identical to SEQ ID NO: 59974

SEQ ID NO: 219787 - DNA, 735 bp, Klebsiella pneumoniae
atgcatcctatagtatttttaaattctataaaaaaagggaaatccaaaattacacgagagatgctcaggagaatttggtctgacccaggaaatgtttctgactctgttcttgatgttgttgcagaagaattttcgaataaatttgaagtttgtaatattaatactaaaaatagactgtatcacttttttgctcaaatatatcaagaagtaggccccactttcaatttgaatgaggggtttaattataggccacaagtacttataaataagtttgcatattatcgtaatcatcctcaagatgctcaaacggatggatatattccgggaagacaagtagcaaataaacagaatattgcgaacagagcatatggtggtcgagaggggaatgataatattgcaagtggagatggatggcgatatcgtggaagaggaatgaaacagttaacatttaagaataactatagatcttttacaaattatcacgaaagagtttggggagaacgtgttgattttgaatccaccccagatctcctagttgaaacggtttatgcggcaagatctgctttgtacttttgggatcagaataatttatttagtagcgctgctaatggcattagtagagctgtatcagactcaataacgcgaattgttaatctctatgataatcactatgaagatagacataataatttaataagatttctacaagagggtatttttgatgaaatattctaa

SEQ ID NO: 219788 - DNA, 858 bp, Klebsiella pneumoniae
atgaaatattctaaaatattgatgtttttatttgtctcttttgcaaggctatcatatgcagcagatttcaaattatcaccttctgacccagttgaagatgtcaaatatttttcattgcaagtaaaaaacgataatggaattaaaaatattgatgtgggactcgaaggtaactccagtaatgttacgataaaacaacactatattttttcctgtcaatggggagacgtttctggagttagattaagcatggattcaccttctattgatggagtgttattatttgataacatatatgcgctagatagcaaattaaatatagttttcgcaaagtcatatagtcgtatgagtaaaaaatgggttgaccctatcagcttaaatagtgctgtttgtaatcgtttaggtggtggtttaaaaaacgattcgataactaaaaaagactacattgtcgattttgagtctatacagcagggaccttttattttaaaaggagttaataatgttgctattaaatatgtaagagataattctttgaatcttattcgtgaggatacaagtggtgaagtcattatcgatgcgataaagaatcatgataatatggctccttccgtgcgcactgtcttttttatgaaacttaagtcagaaatgaatatcattagcctgataacgtgggggggcgtcgacgaaggtaattattataaaatatatggatatatatatgataaaaatggacgcatacatactaatgagatcttggataaagattctaatttatcaggatataatgcaaagaaaaatccatttaaatataagaacgcgaattctataaaacaatatttacttaaaagatatgattcctaa

SEQ ID NO: 219789 - DNA, 1200 bp, Klebsiella pneumoniae
gtgattactaacccggaaaccaccgccgcctcgccggatatggccattcctttcggcctcaagttcagcggctatgcccgctatggcgcccacttccagaccggcgaccagaaatatgtcggcgtcgacggctcctataacggcgcctcggcgatcggccgtctgggcaacgaaagcaacggcggcgaattcctgatcagcaaggccttcaaaagcgcgcagggggctatctgggatcttaacgtgatgttcgaccactggagcgacgaagttaacctgaagaaggcctacgtcggggtcaccaacgtgctggaatccaaccccaacgcctatatctgggccggccgcgacttccaccagcgtccgcaacaggggatcaacgactacttctggatgaaccacgacggccagggcgccggggtgaagaactttgatatcggcggcgtgcagttcgacgtggcggcggtctcgcaggtgaaatcctgcagcccggaagtgatggccgacgagaccaacccgtcgcgcatcacctgtaccggcagctccgacaccggcgacaacggccactacgcgctgaccaccaaaacccacaacatcaaggccgggccgatcgacgtcgaggtgtacgccaactacggctttgactcaaaggcggtggacagcgacgcgcgtctcgaagcctggcagggcgggctggtgctgagccacaccaacgacagcggggtaaacaaggtgatcctgcgctactccgacaactcggataacagcgtctacaacaaaaccgacgacctgaccacggtctacgccagcttcgagggcagccataagttcacccagcaggcgcagatcgaatacctgctggctttccacgactacgacaacggcaaagataataccgacaaccgcaaaaactacggcgccatcgtccggccgatgtacttctggaacgacgtgcactccacctggctggaagcgggctaccagcgcgtggattacgaccagggcggggataaccacggctggaagctgacgctgtcgcagaacatcgccatcggcatggggccggagttccgtccgatgctgcgcttctacgtgaccggcggccaggtggacaacgagcacaccgcgaaggtcaacaacaccaaagaccagcagctggattcgctgaacgtcggcgggatgtttgaagcgtggttctga

SEQ ID NO: 219790 - DNA, 279 bp, Klebsiella pneumoniae
gtggatgtggactggctgatcgccgagcgtcccggcaaggtaaaaaccttgaagcagcatccgcgcaagaacaaaacggccatcaacatcgaatatatgaaagccagcatccgtgccaaggtggagcacccgtttcgcatcatcaagcggctgttcggcttcgtgaaagccagatacaggggggggctgaaaaacgataaccaactggcgatgttattcaccctggccaacctgtttcgggtggaccaaatgatacgtcagtgggagagatctcagtaa

SEQ ID NO: 219791 - DNA, 303 bp, Klebsiella pneumoniae; identical to SEQ ID NO: 96991

SEQ ID NO: 219792 - DNA, 231 bp, Klebsiella pneumoniae
gtggcgcggctgcagtgccgcagcggcgagccctgcccgcaaagcggctactggcagccggcgtggcggccccgtgaagggatgagcgaacatgccatccgttacttccgcgagggagacatcatgccggtggagaaggtgaccttcgttcggccacgtccctggccgctgcgcgacagactggtcgtggaggagcaggagacggtgtggcgccgggtcggcgaggcataa

SEQ ID NO: 219793 - DNA, 231 bp, Klebsiella pneumoniae; identical to SEQ ID NO: 219792

SEQ ID NO: 219794 - DNA, 141 bp, Klebsiella pneumoniae; identical to SEQ ID NO: 36145

SEQ ID NO: 219795 - DNA, 834 bp, Klebsiella pneumoniae
gtgggtatgctttctgccgctcgtctgcggctttatcatttacttttcgatcagaaccgacgttccggccgccgctttgaagggctgtgcggacttttcgccctgctcagcgtactggtgatatttatcgagtcgggactgggcacgcaatatcacctgacattagatgaatggcatatttttgtctggctggagctgctggtgactgcggtctttaccctggaatacctgctgcgtatcgctacctggcccaatccgctccactatattttcagcttttgggggctgattgacctggcgacgattttaccgctgtatgtgatgtggctatggccggaaattagcctcaattatgtattcgcctggcgggcaatgcgggcgatccgcgcgctgcgtattctcaaactactgcgctttatgccttcgctcaacgtattctggcgagcgattgtcagcgcgcgccatcagctgatcctgttttattcgtttatcgccattgtgatggtgattttcggctcgttaatgtatctgattgaggggccggaatacggctttaccacgcttaacgcctcggtctattgggccatcgtgaccatcaccaccgtcggctacggagacatcacgccgcacacgccgttgggtcgcatcctggcctccattcttatcctgatcggctactccattattgccataccgaccggacttatcaccacgcatatgaccagcgccctgaatcgtcgacgacagcagcgcctgtgtccgcagtgtcagcagggcgaccatgacgataacgcccgtttctgccatgcctgcggtcatgccttgccgaagtaa

SEQ ID NO: 219796 - DNA, 648 bp, Klebsiella pneumoniae
atgttttcaataagccctgtatttttttgggctaacatttatgtacctgccgattttgaggattattgtgtgaataccctgaaaaaaaccgcattgctttctgtacttgccttatatattcctgtgtcgcaagccgcggctaaggaatacagtcttgatccacagcatacctcggttgtgatctcctggaaccatttcggcttctcaaaccctaccgcttatatctctgatgtttcagggaaactggcctttgataaagagaatccggagaaatcctcggtgaacgtcacgctgccagtgaaaaccattgacgctcacgtcaaggcgttaacggatgagtttttaggcaaagagtattttgatgttaaaacgtttcccgacgccactttccagagtaccaaagtggaaagcaaaggcgacaataaatatgatgtggaaggtaatttgaccattaaaggcatcaccaaaccggtggtcctgcatgccgtcctgaataagcaggatatgcacccaatggtgaaaaaagaggccattggatttgatgccaccggggtgataaaacgttcagactttaagcttgataaatatgtgccggcggtaagtgataacgtcaccatcacgttatccacggaagcctatgcaaaataa

SEQ ID NO: 219797 - DNA, 204 bp, Klebsiella pneumoniae
atgacgctttatccgtgtaatcctctgaagtctcaaggggatgcaattccgttaactcaaaatctcgccctgaatattcctgtcccaatgctacagaagctggacagagtaggttatgaactcgcgggacgttacaaattgggcggattatcagagcagcgcgtgagattgctggcattggctcacctgatagagcgggcttag

SEQ ID NO: 219798 - DNA, 177 bp, Klebsiella pneumoniae; identical to SEQ ID NO: 162763

SEQ ID NO: 219799 - DNA, 354 bp, Klebsiella pneumoniae
atgactaacaaagtcactgaagccgcttacaaggctcagattgccactttacaggctcagttaatgcaacgtcatacagtgactgccatcgacgctgtacagcctttctgtgaagctataggtatcaatcccgctgattacgttaaggccaccagcgctatgagtaaccagcataaagcgttctgtgacgggattctgaaagcagcttcttcaaaggtcacccgcttgcagcgtgatgcaactgtacgaatccttgaagcacagacaaaacgaaacaaagccataacagcagcctcagaagcggctgaagttgctcagtcgatgggagggctaaatgaatcaactcttcaatga

SEQ ID NO: 219800 - DNA, 522 bp, Klebsiella pneumoniae
atgaatagccctacacagaaacgaattgaaatcgaatcacatttcatccccaaaattaaagctgcactggaaaatatcgaagatgcaaaggatatttacaacgcagacagcctgaataaagatactcttattgctatcaagactaagcaactaatgtctcagccagtcgaagattatggattcagaatccgacaggttacacacccagcgatggtgcagaccattattcagagcatgatgaatgagggttatattgtgtatgagatgggcgctggatttatcaagtttgtacccttacagcaatcaccaaaacataacccgcttgctgagattgaaaaggcatgtaagaaaaccgctgagaaatttgttgattccggaatcactgagaaagcgaataaggtaaataatgccatccatgctcacaatgtattggtgaaacaggctgaagaggcgttatcgggaatcaaaccgtttgaatcctatctgtctgtgattgtagccgatgaggtgggtaatgactaa

SEQ ID NO: 219801 - DNA, 363 bp, Klebsiella pneumoniae
atgaacaaagttaaagctgttgttttcggagttatgatgtctgctgctataacagccaatgctgcaaatgaaaccactactgtaacaggtgaagtcggtaaagatgtcaaactataccttgagtccaatccgactacgggttacggctggatgattaaagaccttcctgacggattgattttcgtttctggaggatatgagcagtcaaaagactgtccgaaaggtgccgtagggtgcggtggtgaagaagtgcttcacttcattggtgaaaagaaaggggaaagcacactaaaactcatttacggtcagtcatttaacaaatcaagctggcaggaaaaagaagttaaagttgtgattaagtaa

SEQ ID NO: 219802 - DNA, 624 bp, Klebsiella pneumoniae
atgacttcacgtgtctacgcttacctcagagcttccaccactcagcaagacgcaacacgcgccaaaggtcagttggacgaattcgctacagccaacggtatgaccatttcaagctacttcacagagaatgaatcaggtgcatctctacaacgtcctgagttgttcagactgcttgagattgcacagaagggtgatgttcttttagtggagcaggtagaccgcctgagccgcttaaacgctgacgactggcaggcattacggcagaccatcagcagtaaagggattcgcgttgtagcgttagacttgccaacctcgcacatgttgttaaacactggcgacgagttcacagggcgtatgtttgaggcgcttaattcaatgatgctcgatatgctggctgcaatcgcccgtaaagactatacagaccgtaagcgtcgtcaggcacaggggattgtaaaggccaaggctgaaggtaagtttaaggggcgtccagaagacatggaacgaaatgagaagatagccaaactgctactggctggtatgtcgtacagtgacatcatggacacggtgaactgttcacgtgcgactgttgcaagggtgagtaagagtctcaaagaattagcttaa

SEQ ID NO: 219803 - DNA, 498 bp, Klebsiella pneumoniae
atggcaagttacgttgattcaaacttatccaaaggtgaagaggttatcgtgagggcacatgtctcatggttatcattccttattactattattgtttcgctgttctttcttttcattgcttttggtggattcatggcatcagcagcagcgaaagaaggggaagctcatccaaatagtgtaggctgggtctttctgtttctggggctgtttatgctgcttaatgttgttgttaaggttgcaacaacggaactcgcgctgaccaacaaacgtatcattgcgaaattcggttttattcgtcgctcaaccatcgagttgcgccttgaaaaggttgaaagtatcagtatcaatcaagggcttttagggcgcttgctgggttacggtacggttgttgtaaaaggaactggcggtacaggtacgccgattccatcaattaagaaacctcttgatttccgcagaattgttaacaatttcttagaagaaaaagaaacctcggcttaa

SEQ ID NO: 219804 - DNA, 1572 bp, Klebsiella pneumoniae
atgcgtcaagtaattacataccttcgtttcagcagtaagccacaagaacgtggtgactcaatacgccgccagaaaggtctatttgagagatggctgaaagataaccctgatgcaaaagttgtcgatgaattctcagatgaaggtgcatcggcatatcacggtcaccatctgaaaggcgattttggacgaatgcttcaaaacatacaggatggtaagtacctgtcagggcaaactgtcttacttgtcgaatcagaaacccgtcttaaccgacagaaagcacgtaataccgaaaaccttgtagacctcattacgggtaaaggtgttgatgtgatttgtctcgaatcaggcaaaatctacaccagcaccaatattgatgaccttgatacatctattcagttgaagatagccgcacacatcgcacatcagcaatcaaaagagaaatcaatcaaggtaagtgctgcatgggagcatagagcacagcttgcattagaaggcaaacagcaactgactaaaaatgtcccaggctggatagaccctgatactcgtaaacttaacgagcactcatcaaccgttgtgacaattttcgatttgctcctttctggtgaatctcttcacaacattgctcgttaccttcaggcaaacaacattaagtcattctctcgacgtgaaaaagcgaatggctttagtgttcactctgtccgtactatcttacgctctgagtcaaccgttggaacactggcagcatccaagcgtaatgaccgccccgctatccccaactactatgaaccagcgattgatgttgccacctttaataaggctcaggagattctgtcaaaaaatcgtgttggcagagcgccagccagtgacaatccaattactatcaacctatttaagggaatcattcgctgtcaatgcggtgcctcagtacatcccacaggtgtcaaggcaacctatcaaggtgtttaccgttgtaacaatgtccctgatggacgttgcaatgttcctaccattaaacgtaaaccctttgataaatggatgcttgataacatcattggcttccttgagaggtctgatggtaacaacaccgataaacgaaaagctgagattgagtatcaaatctcgttagtcaccagcaagctaaaaaaggcagccaccctgcttctcgaactggatgatgttacagagcttaaagaacaggtcaaagaactgaacattcaacgcattaacatgcaaagtgaattagacgacctcaatcagcgtgaaacattaagtgataagccgttgcatcacctatcggagattgatttgacgaccaaagcaggaagagtagaagcacaactcatactgtcaaaattcgtacaatccatcgagttacaacgtgaaatgataataatcacacttcgaaacggtgcggtcattggaaaatcaagagacttatcccctgcgttatcgcaggatttaatgaagcaagttgtatcatcctcatcacctagagacatcgacatgttcagcgtcattacatctgatgaagagttcaggaagtctggtaagccggttacaaaacgttcttag

SEQ ID NO: 219805 - DNA, 933 bp, Klebsiella pneumoniae
atgaccaaaatttacacgctcacgctggccccctcgctggatagcgccacgcaaaccccacagatctacccggaaggcaaacttcgctgcagcgcgccggtatttgaacctggcggcggcgggatcaacgtggcccgcgccgtgacctttctcggcggcaaagccaccgccattttcccggtcggtggcgctaccggcgagcatcttgccgccctgctggccgatgagcaggtgccggttgagaccgtcgaaacccgcgactggacgcggcaaaacctgcacgtccacgtggccgccagcggcgaacagtatcgcttcgttatgcccggcgcggcactgacggacgatgaattccgccgtctggaagagaaggttctgactatcgaacccggctctctgctggtggtcagcggcagcctgccgccaggtattagcgtcgataacctgatgcagctggtgaaaaatgcgcaacagcagggactgcgctgcatcattgacagttccggcgatgcgctggccgccgcgctggacgtcggcaatattgagctggtgaaaccgaaccagaaagagcttagcgccctcgtgcagcgcgatctcagccaacccgatgacgtgcgccttgccgctcagtcgttgatccagtccggtaaagtgcgccgggtggtggtctccctgggtccgcagggggcattaggcgtggacgccagcggcagcgttcaggtagtgccgccaccgatgaaaagccagagcaccgtcggcgctggcgacagcatggtgggcgccatgaccttgcgtctggcggaaaacgccagccttgaagacatggtacgctttggcgtcgccgccggtagcgccgcgaccatcaaccagggcacccgcctctgctcgcgggccaatacgcaaaaaatctatgattatctctgcgggcgttga

SEQ ID NO: 219806 - DNA, 1089 bp, Klebsiella pneumoniae
atgtataagaaaataagtggtttagtggtttcactgacggccgttttcgcctgtgccgcctgggcggaggtgcctgcgggctatcccgcggattatcaaaaaacgattgatgccgccgtaaaagagggcaaggtggtgatctattccacgaccgacaccaaagcggccgggccgttaattaagggatttgaagcgcaatacccgggcgtcaaagtcgaatataacgacatgaacagtactgagctgtataaccgctatatcagcgaacaggccgccgggggcggcagcagggatgtggtgtggagctcatcgatggataccgcgctgaaattagccaccgaatacgccgaacaatatgcctcgccggaggtgaagcaattacccgactgggcggtctggcagcagaaagcctatggcaccacctacgagccggtggtgtttatctataacaaacggctgatcccgcagaatgaggttccggattcgcataccgcgctggcaaaacttatcgccagccaggccgataaatttaaaggcaaagtcaccacctacgatatcgaaaaatcgggcctcggctttatgctggcggtacaggacagccaggccgacgcgaactattttgccgacctggcgaatatcgccaaaggcggcctgacggtgcagtcttccaccggcacaatgatggagcgcgtctcctccggcgaaaacctgatcggctataacattctgggctcttatgccgaagcgcgggcgaaaaacgatccctctttaggtattgcctatccgaaagattacgtgctggtgctctcccgcgtctcgtttattagccaggagagcgaacatcccaatgcggcgagattgtggctggattatgtcctgtcggaaaaaggccagcagatcctcgccagccaggcggatattccctctattcgtcgcgatattgcaggtaaaaatgatatcgacggcatgaccgcgctgctgggcaaagcgttaaaaccgatcccggtcaacgaaacgctgctcgattatttacagccgcaaaaacgtctgcagtttattaaacaatggcgcagcgccgccgcgaaataa

SEQ ID NO: 219807 - DNA, 1116 bp, Klebsiella pneumoniae
atgtttcgactttaccagtcacatgatttaatacgccaattaaatcctgaagactttcaatatattttgacaccagctggttcgctaagagaagcgtgtatacattacgacctctcctgtgaggcgaatggtcacagcctcgcttttggcctaccgaaggaaaaatacaactcatctccacataaaaggccatatgaacgaaggcaacgtagctatgcagatcctatctatgatgaggtagagcacaggctacaaattggctggcttgttggtgtggatatctccaggtgttggagcagtgacagaaatccattttacatcgacgacaatggcgatttaatttttacccctaccgcttcgtcataccatgcgtggtttaaggacgaaattatgaacgcctacaggcacacgattgccgatcgccaaggaaggaggccagctcccactcagcgtatacaacacaattataatggctcaagaatcgcaccagcgtcaaagacactaaacagtaagaccattggccgactgctagccgctggcggtatatataatggcaaccttgaaggattccatgaaacagcgttgcaactgggtggggatgcgcctgcaggttacgaccagattatgggcaataaaggattactcattgcaggagcctctttcgctgcaggattaacaatgggtagattgaatcctttaagtgagttagatgagttatcgagtctcagtaaaataccagccttcgaaagcccgtatgtgaagggcttcatctctgagaacggtacgttagtgaatgctgaatacgccgttatcgatccgaaaaaactcgcgacgtacgctttagattcaacacatcctacaggcggtcataaggctcgggtgtttgagtctgccctggggtacaacccaacgaatgcggatgtcttagcagcacgaattcagaagggcgtattatcggccccggcaacgattttgcagacaaacaactacggtcaaacaatggctgtagatatgccaattttaggcatcaatggtgaaacggcggtcatccgtacaggctggatgtatgaaacagatgcgctcgttcctcgcctgacaactatttacgttaaatag

SEQ ID NO: 219808 - DNA, 1242 bp, Klebsiella pneumoniae
atggatatcactcagttttcgcaaattaacccgccgcagcgcctgctgatggggccggggccgatcaatgccgacccgcgcgtgctgcgcgccatgtcgagccagctggttggccagtacgatccggcgatgacccactacatgaatgaagtcatggcgctctaccgcggcgtgtttcgcaccgaaaatcgctggacgatgttggtcgacggcacctcgcgcgccgggatcgaagcgattctgctgtcggcgatccgtcccggtgacaaggtgctggtgccggtgttcggccggtttggtcatctgctgtgcgagatcgcgcgtcgctgccgggcagaggtgcacaccatcgaggtgccgtggggtgaggtctttacgccggatcaggttgaggatgcgatcaagcgcgtgcggccgcgcctgctgctcaccgtgcagggcgatacctccaccaccatgctgcagccgctggcggagctgggggagatttgccgtcgtcacgatgtgctgttctataccgacgccaccgcgtcgctcggcggtaacccgctggaaaccgacgcctggcagctggacgcggtgtccgccgggatgcagaagtgcctgggcggtccttccggcacctcgcccatcaccctcagcccgcggatggaagaggtcatccgccgccgccgctgcattgagcaggggatccgcaccgatgcccatcacgatggcgtcgacgagatgatctactccaactatttcgatctcggcatggtgatggattactgggggccggagcgccttaaccaccataccgaagcgacctcggcgctgttcgccgcccgggagtgcgcgcgcctgatcctccaggagggactcgacaacggcatcgcccgccacaaactgcacggcgatgcgctgctgaagggcatccaggcgatggggctcgagacctttggcgacctgcggcacaaaatgaataacgtgctgggggtggtgatccccaacggggtcaacggcgatcaggtacgcaaactgatgctggaagatttcggcattgaaattggcacctcgtttggtccgctgcacggtaaagtctggcgcattggcaccatgggttataacgcgcgtaaagactgcgtgatgcagacgctcaacgcgctggaagcggtcctgaactacctcaggttcaccaccactcagggcgcggcgatgcaggcggcctgggatcactaccgcaccgaggccaccctatga

SEQ ID NO: 219809 - DNA, 918 bp, Klebsiella pneumoniae
atgtcatctttaaaatcgctacccattcttcgcaaccaggctccaggctttttccgctatgctttaggtaacctggtggttactgccctctatgacggatacgttactctggaccccatgtcactgtccgggattactgacgaagaacgtaaatccgatctggcaaggcaactattgccaaccagcggtgcgctggatacctcagtgaatgctttcctcattcataacggtgagcgcctcatccttattgatgcaggttcagcccacttcgcggggccaagtatggggcgcttactggacaacattgctgctgccggttacaagccagaagatgtagacaccattctgctgacgcatatgcatcctgaccatatcggtggcatcaccaatgataaaggtgaggctttatttgtgaacgcaaccgtctgggcacataaagatgatgctgatttctggctggataacgacctcgcagccacgcttgcagaagatcagcgtcctttctttaccattgctcaggacgcagcagcaccttatatcgcaagcgatcgctttaaaacttttattcaaggcgatgaccttattcctgatctggtcagcgttgtagacgctcgaggccatactccgggtcacactgcctttatggtgacatctgcgggtgacaagatgctgttttggggtgatatttctcacctgccatccattcaactaccacatccgggggcaacaattgaactggatgtgtatccggaaatggcgattgcttcacgtgaacgcgtgctggctgcgtcagcagaggaaggttatgtcattggtgccgctcatttaccgttcccgggcattggtcgcgtacgtaaagataccgctaccggttatgcatgggtatcagttgagtacgctgcgctgccagcactttga

SEQ ID NO: 219810 - DNA, 909 bp, Klebsiella pneumoniae
atgcagttgaatatgctggaagccatgaatatttacgtaaatgtggtagagcaagggagctttacccgcgcggcagatgcgcttgagttgcatcgtcctgcagttacccgcgccattcagaacctggagcatgatctgggcgttaagcttctgcatcgcaccacacggcaggtcagcatgacagatgaaggggaagagttttaccaacgctgcctctctctgttgagcgagctggatgacgtccgtcgattattttcgagcacccaacctccgaaaggacgcctgcgtcttgacattcctatcgccctcgcccgggcggtaatcatcccggctctaagagattttcaaaaccgttatccggatatcgagattattcttggtacgtcggatcgcaagattgatttaattgccgagcgcgtagactgcgttatccgtcttggtgagcttgatgactccagcttcgttgccaaacgactgggaacagcaggcatggtgacctgtgctgcgccgtcttatctggcgaagtacggcacaccacagacgatcgaagagctgatgacgtcccaccgcgcggtgaattttttcagtaaccatagtctgcagataatggagtggaagttcaccgtagacggtaatatcacgtcaataaaaatcccctccagcatactggtggacaattcagaggcgtttctgtcatgcgggctggcgggactcggcattctgcatggattgcggccctctctggcaccctttattgcgagcggcgagctgacagaaatcctcacagattttcctcctccaccaaaaccagtctcactgctttatccggatcgccgctatctggccccaaaggttcgcgtattcatcgactggctatccgaagtgtttggcccggatgtacaactctga

SEQ ID NO: 219811 - DNA, 912 bp, Klebsiella pneumoniae
atgtccgccggacgttcgtcagtggatattgcgctttacaccctgatacccgtcatggtcgtgatgatggtgatgatgaagtatctcgaatcagtgggcgtgctggcgaagctcgtaaatgtggtggtaccggtattgaagccatttggcctcaccgggctcagtctttttgccctgatacagctcaactttgtgagtttcgccgcccccgttgcgacgcttgccatgatggaaaaaaaaggcgcgtcagatcgtcatctggccgcaacgctggccatgttgtttgccatggggcaagccaacgcgctttatccgctggccccattgggactgcactggattacaacggtcctgctgtccatcgtggggggcttggccgctggggcggtaacgtggtatctgcctggccgccgtcttgcttcgaaagaggtgatttccacagacgatgcgcaggtgcacgccccgcaaaaagccggtttgctcagcatcatcaacggcgcagggggtgaatccatccgtctgtcgctgggagccgtgcctatgttgattctctcattgaccatagtgggcatcatcaaatcggtagggggcatttcgctgctggaacaggccctgtctcccgtaatgcaaacgctgaacattccggctgtgctgattatgccagcactggtcaaatgtctggcaggaggcacggcctatctgggcgtgacgactgaactgcttaagaacggccacatgagcgtggaaacgctgaatgcgtcagctggctggctgctgcagacctttgacctgccgggtgtgggaataatgctcggcgccggttttcgcgtggctcggattgcccactttgctattcccggcgcgctgcttggcattgcgctgagagggattttacacgcgattgtttactga

SEQ ID NO: 219812 - DNA, 1146 bp, Klebsiella pneumoniae
atgatgaatcctaaatatgcacctctttttgaaccctacacgctgaataacggcgttgaaattaaaaaccgcctgacggtcgcgccgctgacgatttatgactcaggtccggaaggcgagatgacagaaaccggacgttgcttctggaaagaccgatttaaaggctttggcctgtttattatgccgtttaccaacgttcatcccagcgcaattggctttgaatcgcctcaggccatcaccgacgcggatctgccaacgctcactgaatacgcagagatcgcgcatgaacagggagcgaaagccgttgtccagcttgcgcattccggttatcgcgccgataagtcaatgaccaaaggccatgacgtgattgcacctaccggcgacttatacggccgctttcgagcgatgactgatgcagaagtgcgcgagatgatcgcctgcttcgcaaacgcggcagagctggtgatgcgtgcaggttttgatggtgttgaaattcacggggccaacggctggcttattcagcagttcgtttcggcggccagcaatctgcgagatgatcactggggcggaacattggagaaacggtttaacttttcgctcggaattgttgatgccattgatgcggtgcgccgcaagcataatcgcccggactttattattggctaccgtttctcgccagaagaaccgggtgaaaatggcattaccatgaaagaaacgctggccctggtggatgcgttgcttacgcgtccgctccagtatctgcatatctccctgtgggatttttataagaaagcccgtcgtggcgctgacagcaacctgacgcgcatgcagatcgttcacgaccatatcaatggccgggtgccattcattggcgcaggtaacttatataccgccgatgacatgctggaggcctataagacgggctgggcggagtctgtcgccatcggtaagagcgtaatgctgaatccaaacctggtagagcttatccgcacaggtcgcgaatcagaaattgaaaccacatttgactgggataaagccgactattaccgctacacccctgccatgctgcagggcacgatggctggtacagatttttatccaccatcaaagcagaaaggtgtgcgctacaagactaaccattactga

SEQ ID NO: 219813 - DNA, 873 bp, Klebsiella pneumoniae
atgaaaccacttaatgttgccactaaaagcggaacagttctgaacggggtaatttttccggcacctgattccgataccgttgtcattgccattactggcgttcacggcaatttctattcgaaccccttttattacactctcggggatacgctgagtaccgctggtattgattttatttatgcccagacgcgtgatgcttttgggcagatggaaatcgtcaacgcaaaaaccggaaagaccgaagtcatcggttcatggaatgaagatttgacgaagtctgacgacgatgtcggtgcctggatcgattatgcggctcaggctggttacaaaaatatcattctggcgggccattctcttggcgctaataaggtcatctactatctgtctaagcatgccgatccgagggtaagtaagtttattctgctcagcccagcaaatatccgccatctgacctctcaggtttcagaaaaagaaaaaagcctcatcgcggaattcagagagagcggtcgcggccagacgctgctgccattcgactttattggctggcttccctgcgtcgcggataccgcctggcagtggctgtataccgatacgctcaataacgtacatgttgaagcgaacggcgatttctcgcaggtagaaaagataaggcacagcggtgccctgattatcggtacctatgatcgctttacctacggcaatccgtgcggttttctctgcaatatcaacgaccattttccaacgccggctgacaatgcgttaattttcattgatcgcacgggacatacctaccaacagaaagaaaaagaactggcagaagccatgctgaaactggccagtggctggcgtactgaaagcacagtaagaggataa

SEQ ID NO: 219814 - DNA, 369 bp, Klebsiella pneumoniae
atgccatttattatatcccgggtaaacatcccgctttcacacgaacaggaaatggcacttaaggccgggctgggccaggccatttcgcttgtgccgggtaaatctgaagcatcactgatgctggggtttgaagacgcgtatcacctgtatcttaacggtgacaatgctcaacctatggcttatatcactgtggctgtcttcagcaatcgttgccaccgtggttatgagcaactgagtatggccatttgccagattttccaccgggttctggagatagaccctgccaggatctttatcaattatgaggatatacctgcgtggagcgtggcaggcagggcattcattgacaagcggagcagtgctgaatga

SEQ ID NO: 219815 - DNA, 876 bp, Klebsiella pneumoniae
atgactgcagaaaaaaagctgactctcaccatctttacggacccaatgatgggcttatcttacgaaagtgagccctttttccgtaaactggaaacgcactttcagcagcagattcagttcaggtacgtcatgtccgggctggtgcgaaatgtctatgattttgtcgatcctgaagacttgaaggtgagtcaggaatacgctcttgaaaaatacatgttgcaactggcagcgatatataaaagcgaagaaaacattaccggcatgcctataaatatgacggattttcagctttttacgacggaatttaactcctccatcccgctgaatctggcctataaggcggcgcaattagcggacagcaataaagccgaccattttttatatcgcctgcgcttcgccaccgttgctgaatgcagaccgacaacgcgtttgaaggaaatactggcagtagtggctgataccggtatcaacgttaatgaattccttaagaactatcaggacggcagtgcacaagcggcgctggatgatgatttcaacctgcgccagtcgctggatgtgagggggctaccggcttacctttttgaatatgacggcaaaaaagtcatgattaacggcgtgatagggtatgaacagtttcataacatcattaaaaatctgtccgatggaaaagtctctgcacatcagccagaagtctctacgaatagcattcgggatttaattaatctgcatccgttaatatcgccaattgaaattaaagacgctttttccctgcgagatctctctgcagttaaggcactgatccagcccctactggattcagacgagatatcgataaagccggttcataacgggtggttcattcagcagaaaaaataa

SEQ ID NO: 219816 - DNA, 981 bp, Klebsiella pneumoniae
atgaaaaacaatcgtatctgtcaaatattagggatcgaaaaacccgttattcaggggccattatcgtggcttaccgacgcgcgtctggttgccgccgtgagtaacgctggtggtctgggtgtactcgggccaaacgcaggtttaacggcagaaaccgctgtttcgacacccgaagaaactgccgaaaagatgcgtgaagaaattcgtaaaaccaagcgactgacggaaaagccattcggggtaaaccttatccctaccccggaaaacgatatttggacaccgcctatcatgcaggtgatcaaggaagagggcgtcagggctgtggtttataccggttacggtgaaggtgccgttattccgggcctctttaacgaattaaaggaagcgggcattgcaatcatttaccgcgatatcaacccgacacctgaaaacacccgtctggcggaagaggctggtgccgatattatcgtcgcaaccggttttgacgagggggggactttacctgcaaccgcactgggaaccttttcgatcgtgccattgattgctgattccgtaaaaaacattccgatcatggctgcaggaggtattactgacaatcgcactgcaaaagcggcacacgcccttggtgctgaaggtgtgtttgccggatcggtcttcatcggtacggaagaaagccgcgtgccgcagtctgtcaaagataaaatcattgaagccaatggtcttgatttgctccttttccgtaccctgcctgattactatcgctcactcccgggtaaacttgccgagaagcttgttgcgatggacaaagcaggcgcaagtaatgaagagttgggtaaaacaatgggggggttacgtggcttgcgtatcggcatgcttgagggaaattcagatgaaggctacatcgcgctcggtacgggaatagggaacattcgctgcattaaaagcgtcgctgaggttgtgaatgagttaaccgtgagctaa

SEQ ID NO: 219817 - DNA, 1233 bp, Klebsiella pneumoniae
atgcacggctggacctcacgacagcgtaatgcggcgatagccagttttttaagctggacgctcgatgctttcgactttttcctgttagtttttttactgagcgatatcgcccactcgtttcatgtcgaccttgaggaggtcaccctggcgattctgctgactctggccgtgcggcctgtcggcgcgctaattttcggcagggcggcggagaagtttggtcgcaaaccaatcctgatgctcaatattgtgttcttctcggcttttgagctgctctccgccgccgcgccgtcgttgatgctgtttttcctgctgcgggtgctgtacggcgtggcgatgggcgggatctggggcgtggcctcttcgctggcgatggagacgatccccgaccgctcgcgcggcctgatgtccggcctgttccaggcgggataccccttcggctatttgctggcggccgtcgcctacgggctgctgtttgaacaactcggctggcgcgggatgtttgtcattggcgccgcgccggtgctgctgctgccgtttatctatttctgcgtcgaggagtctccggtttggcaggcggccaggcagaataaagagagtacggccctgctgccggtactgcgtagccactggaagctgtgcctgtacctggtggtgctgatggcggctttcaacttcttctcccacgggacgcaggatctttacccggtctttttgaaagttcagcacggcttcgagcctaaaacggtcagcatcatcgcggtctgctataacatcgcctcgatcattggtggagtgttcttcggttcgctgtcggagaagattggccgacgcaaagcgattatgatcgccgccctgctggcgctgccggtcattccactgtgggctttcgccagcggctcgctggcgctgggggcgggggcgttcctgatgcagtttatggtccagggggcctggggggtgatccccacctggctcaatgaactggtcccggccaacacccgggcggtgctgcccggcttcgtctaccagctgggtaatttgctggcttcggtgaatgccactctccaggcatcaatcgcccagcatcatgggcataactacggcctggcaatggccctggtggccgggacggtggcgattgtcattaccgtcctgaccttttttggtcgcgaaggccgggcgatccaatccgcaggagcgggacatcaccagccgctctccaccagccgttaa

SEQ ID NO: 219818 - DNA, 480 bp, Klebsiella pneumoniae
atgtctatacccgcacatttatggctggaagatgaaaatggctccccaattctcggcagttgtttgatgccactgcgcctgggttctatcgagttaaaatccttttctcatggggtaactattccggtagatccaaactggggaaaactaaccggtacgcggatccatcaacctgtaacgatcgtaaaagagttcgatcaaacaacaccgctcttgtacagagccgtctgcgaaggccgaacgatgaagaaggcgacaatcaagatgtaccgcattctggaaacaggtatcgaagccgaatatttcaatatcattctggaaaatgtcaaatttaccacggttgcaccatttctttctccgggtgggatgagtagtacccatctcgaaacactcgaattgcgttatgaggcgatcacctggaagtataccgaagggaatattatctatcgtgactcatggaatgaccggtgttgcgcctga

SEQ ID NO: 219819 - DNA, 537 bp, Klebsiella pneumoniae
atgaccgcttataaccggcgctttggcaaagcaccccggcatgactttgatgttcaccggccacttgaaactgatgatgatctgaccgcatttttcacatggcgggaaccgcgccgtgtttcaaaatccctgacggtgcagtatgacaaagtgctctatctgattgaagacaatgagttaagccgaagggctattggcaagtacattgaggtatggcattacccggatggccggaaagagctccggctaaacggggttgtccttccctactccacctatgatcgccttcagaaaatcgaccagggggctatcgtggacaacaagcgcctcgggcgtacacttgaatttatcaaactggtacaggacaaacgcgacaataaccggtcacaggctctccctgccggagatggcccctcgcgccgacgcaggaaacccacagggaagaaatcccagcgatctctggacgaagacgatatgctcaatgcgctgaagacattacaatcacgttctgacgagattttcggtacaaggaaatga

SEQ ID NO: 219820 - DNA, 633 bp, Klebsiella pneumoniae; identical to SEQ ID NO: 32308

SEQ ID NO: 219821 - DNA, 1404 bp, Klebsiella pneumoniae; identical to SEQ ID NO: 32307

SEQ ID NO: 219822 - DNA, 1533 bp, Klebsiella pneumoniae
atgcattcatacgaggaccggattcgggccgtcgaactctattaccggtacggaaagaaagcctccgttgtcgtcatggagctgggatatccttccacaaaacagctgggccgttgggttcggatttatgaagagaagggcgatttacccagggaattaaaaccaagagaacgctattcacgtacacagaaaattgctgctgttgagcattatcttactcacggtggttgcctgtcgtacactcgccgagccatcggctaccccagtaacgaaattctaaagcgctggattgaagagttttacccaaatgcgcgtcccctggtcattcgctcaggcacaagcaaatgcttcagcccggaagagaggtctcaggccgtccgggagctctgtaaccgacgtggaaccgcgcgtaaagttgcacaaagcataggcgtcagcgtcccggtcctgtacaaatggaagaaagaccttatcagtgacgaggcttatcaatccatgcgcaaacgaaaggcagcccctcaggataaaaatcaggatgctttactcggtgaaatccagcgtctcaggaagcaggtttatcagctgcagctcgaacgtgacatactgacaaaggcgaatgaactgataaaaaaagatctgggcgtcagctttctgaaactgaaaaacagggagaaaaccctgatagttgatgcccttaagaaaaagtaccccgttgctgagttgctaagcgttctgcaacttgcccgcagctgttatttttaccacaaagccagcaaacgtctgtacgataagtatgcggaaatacgcgtgatcatggccgatatctttgaggagaattaccgctgttacggctaccggcgccttcacgcgatgcttcgcagtaacaacagagttatttctgaaaaggttgtccgcagactgatggcagaagagcagctcgttgttaagcgcaccaggcgacgacgatataactcttactgtggcgaaatcggtccggcaccggaaaatttactcgcccgggattttagttcctgcaggccaaatgagaagtggctgaccgatattacggagttccagcttccggctggaaaagtctatctgtcgccggttatcgactgctttgatggccaggttgtaagctggtcgataggaacacgcccggacgcgacgctggtgaatacgatgctcgatgacgcactcgatacgctcagcgaacatgataaaccggtgatacacagcgatcgtggtggccattaccggtggccgggctggcttgagcgtatcaacacctccggacttataaggtccatgtcgcgcaaaggatgctcgtcggataatgctgcgtgtgaaggcttcttcgggcgtatcaaaaacgaaatgttctatggcagagactgggcgggtatcacgctggaaaaatttatctgcttcctggacaggtacatacgctggtataatgagaaacgtatcaagctatcattaggtgcaatgagtcctgtgaagtaccggcagcatcttgggatcacaacataa

SEQ ID NO: 219823 - DNA, 1455 bp, Klebsiella pneumoniae
atgtttgtcggttactttgttcatacacacacagtttatgaggttaagtgccgcgtgttcatactcacacaactcaatatcaaccaacggcagcgtttatgggcactgatggatactcacacgcgccagccgcttttatatccgttaatatatcttatagaccaacttgctttgcgttcatcagccacgcaatccgcctcacttcaagctctcaagtttttctatgaattctggcaccagaaacatggcgtgactttttgcttcagtttctattcctcgaaccacaatccattgattgccattgatgaacttatagcctttttccattatctggaaaatacgcatttatatgttccagcgttaaccataaggtctactacgcaggccacgcctcaacgtcgtacaaatattaggcatatacattcggttattcgttttatcagatatttgattaacacgtatatctcgccgagatatatagacggctcgcctaaagagctcacacgacttgccacgcagttaacgggacggttatcgatacataaagcggaattccgtactcttactcattctcgtcagattagcaatggcgcgacccataagcgctttcgaagtctgactgctgagatggtcatggctttttaccaaatcattacacccggttcaatttcaaagaaaaacccacttaatcccttccccgctggtgaaatccagctacgtaattttctgatatgcagattgcttttaaattatggattgcgtgtcagtgaattactgcttttggagtgtcattcgatcaaaccaaatctccgaggggatcagttcagcctgattgtgaccacagtagatgacgacgtttcggatcagcgaaaaagattgccttcattaaaaaatgtctatgcaaaccgggtgctggcattagataaactggactttcattttctaaatatatatatcaataaagtccgtcctcaagcctcccatagttttctgttcacttccacccaaagattacacccgccactgtcataccatgcagtttatgatatctttacccgtattgatgacattatgagtatgcagtatcctgaatacaaaaaagatgaatattatgatgcaattgaaagcatctcgcctcatataacgcggcatacttgggcttatttaacacttcaacgtatttatcgtgaaaaacttcaaaaaattaaggccaactcacacttggcagccatagacttttctatcgttggattgatggatgaagccaaggatgaattacggctacttggcggttggagtcgcaatagccatatgcctgatctttacgctaaaagatttctatctcagcaggctaacacggccaatcttcagcgaattgtgattgataatgagtccctgaaatcaaccttttcccatgtatgcaatgaatggagtgcatatgagtcgaatcaataa

SEQ ID NO: 219824 - DNA, 1551 bp, Klebsiella pneumoniae
atgagtcgaatcaataaacagctaaatgcatcgaacagcaaaatttatacgcctgtatttgttgagagtattttaaaagttaacataccagccagtatttatcttaaattggcagatcattttgatgacaaatatatcaactcaacaagtgacagttgggtattcgatttttcagggagccgctgctatgcccactttcgtcaggataaaatcagcaaccaaataatcaaatatatttgcttccattatgcatctgccaagtgtccagctcaggttcctgaggtactccatgcgtggtctttggcaactgatcattgcataaccaaatctgctttcacttttacggtgttgaaagattacctcgaaactcaggaaattaaacctcaatatttctactttatcatgttcggcctaaaaatcctctgtaccgaagcattccctggttttaccctcgaagattatgaagacctcgaattcatccctcgcccgcactcccatgactggggaatctatcaggaaattgatcatgttctggatcccctcgaaaaaaacatgatcagtaaaggcttgtttgaaatggctatggcgattcggtatggcgaaaactacagtctgaacaccattcgagatgcagtaattctgggactgacgtatgtcaccggtgcccgaccggtacaactggctaagctggcggtaaaagatttacgtattgatacccgaaactccgaaaccgggttaatacgatatagcttactccttccttacgcaaaacagcggcacgtaacgactgaacgtctttttttggcgattccagctgaaatcggcgcgttaattaggcactatatcgagcgagcgcgactaaaacctgatggcaagctatttgaatttagtcactctgcaccgtttaatgtgtccagggcaattaacaaggccatcctctgtttcagtccgccagattatcaggcaaccgtagcacgtggcgaagcggctttgccaaccattaccccgaccgacttgcgccacaacgtggggcattcactggctatgcaaggggtcagcgccgaggagattgcgcatattctgggacatagctcccttactgttgccaagtattacattctggcgacgcctgcactggcactgattcgagccaaagcattaggtatcaatcctgtatggcaaaacatggtggctatgatgttgactggtgaactgacctcttcaacgaaatggcaagaccagcgagtggtcggcatagtcggtgatcagttgcatgatgggattggtggttgctccagagatgatggcaaatgcccgttcagtgaagtacgctgctgctacggttgcctgtatttccgccccttttctgatggtgaccatcaggcggtgctggagagtgtagtaaaagaagtcgatgaattgatttccatttcagacagtgttggtaacgcccgcaatccacttatttccgtccatgaaaccacacaatttgaaattcaatccgtgattgctcgttgccgctttcatcaggaaaaaggcggtgtgcgatga

SEQ ID NO: 219825 - DNA, 2367 bp, Klebsiella pneumoniae
atgaaaaaacattttgcgcagtttcacgcctttatcaccgagcagcaaagctggtttgaacagcatctggcagcagacttcgagcagtcatgggatgatcctatctgggtctgcggcagcaatggaagtggttggttacgtggcaatggcaaaaatacattacgttttgatgaaatcggccgtaccaaaggtattgaggggcgtcatgcggtggcagaagactatgcccggtttatgaaagccctgctggtactggtgtatcggaggcgaaatcgtagtatatccccagcggtggctgtggcaacactcatgattttaaagcgctggtaccactcactatttgaggtgaccgggcaaacccacccagtgtatctaaccacaggggtaattcaacgatcgatggataacctcagtgcagcttcatctctaggggaccccaataccgccaattacaaaggacgctgtgtcagtctgcaaaaactggttaatcaccagtcattcacactggtgacattgcaatatgtatccgatgggcaatataccaatcaaacaaacctcactcgtaaagcccgggaaaccttggcgctgaaacagcaggccaagctgtctgataccactaccgatggtgaagatgcgttgattaccattcgcggatttctgaacatagttgcattaatccagcgggtggaaagtgatgctgagaaaatcgcgttaaattgcctgttgttattggttattaccggctttcgctccattgaagcgtttaatctcagacaggatgccctgtttaaacgccagattgatgatccggcaatctgtaaacggtttcaggacaaggggttacccgattattttcttggtatccgttatgttggtgtcaaaggtgctggggagcgaacgcattgggtagaaccgctggcagtaccgctggtcgagagtatattcagtaccgttaaaatgttgaccgcaccaatacgcagccatcttacctatctacgggcaaaatcttttgatgattacctgccacaggccatcagcaacatgcccggtgaacgagtcgaactggatgatgtggtgaagtacatcacccaaactacctcaagttttcggggccgggcaggacaacgggacaaaacatccaaagcccttagcaaaagaggtgtgctgcccgttaaagaaataccaggcccgaaaaacagcaaatctatcttttattccaagactgatctcaatcattacatcaagactgaatttggcctgacgaatgccaacgaaccctgtacacacgcctggatggaaaatggcaaacgctaccaagttaactacgaggacatgctatttctacacgagaagggttcgctggcattaaagcgcacactggctttgctggctacaccgatacccttcactaacacacttatgaataaattcttaggcaacgttgagcctgatggatcagtattcagcaaatatcaattactggaggaggatggcacctcgacgcggatgcgtacccacattccccggcacaacatcaatacctttcttgctattgcggatatctctgaccacttacaggcaatgttgatgggtcgagtagacatcacgcagaatcagcattatcaacatctggcgcttgcagaacggcgaaaagccgcctcgttggtgcccttacagccaatatcgacagcactaactgccgcgccctcttcgtcctccattgctacgccactggaaatcgtcaaacggaccggccaactggcgatcacggaacacatgactttggacaataccatcaaagccaacctgcatacttttgacgatcgggatgatgtagccaggtttgtcgaggtgtcatttgctaacggcctctttgaagatgttgctgccgcctttgaagaaatccgcgacgcagaaggaccagagcaagcctctgccatggtggcaagacatgccgtgctgtatccgctgaaatttggctcctgtatgcgggaagttaacctctggggatgtccttatcgactgaaatgccagagtgctgccttttgtgaacatttcacactgacaggccggatagatgagctaccaaatctgattgccaaaaaacaagcgttacagcaagcacattcaaagttgacacaacttacacaacatcagcctgactaccagaccagactggacgacatcgaaaaacggttacagcaactcgaggcaatacaagcacaatggcagcgtcgtgccaagactcaacaaatggttgctgcggagagtgtgttgtctggtggagtaatcaccgagggcaaagttcatacactggcccagctttttgcacttgaataccaacaattgatgcaggagaacgactga

SEQ ID NO: 219826 - DNA, 429 bp, Klebsiella pneumoniae
atgcgcggcaaggaactggacacactgatcgagcacgaattacaactgatgctggttgaaggctttgacaagtcccctatttccgccaaggccctgcatattcggctcaaggcaaaaggtatcgttaacggtggtttaagtacgctgagcagccttgagcgtaaacgcctaattgctgcatatgttgatcagcaacttggcccattgaatctacgcccaaaagaaaaacagcaatacgtcaaccgcaaaacccgtcaggctttgctggccagaaaccagcagttgcaggctgaagtaagtgaattgcgagaccaattagcgcaaaataccctttcgttgatagaaattgtcaaagcggtaaaaatcaattcggttataccggtggaaagcctgttggccaaccatgtgattcgggaactacataagtag

SEQ ID NO: 219827 - DNA, 558 bp, Klebsiella pneumoniae
atgaatagtcaagtatccaaccctgagtcgtacatattttctgcaataatccacattggcaaggataacttcaccagtaacgatgtagcaaaaattcttgtcgagcgattctcactccctaaaacttatctaaaggcaaaagcttttgcttataaccaaattcaatgcttggttaaaaaaggattattaaataaagtaagaaaatcaggcgtgtatcaatatttatattcagccacgccagggtttaatattgcaatggaaaatgtgaaattaattgaggcaacccaaaaaacctgcagtcaactttcaagtgctactagccatgaacacagcaatgtaaatattcaaataagatctcttattgaaaaatacagcagtgaattggaaaaagtgacaggagcaaaagaaatttatgacgaattgataattgccgtaccgagcagggaaaatgaattccggaaactttctcacgagcaagagaaaaaacatattaagataaatgaaaaaataaaaacattgattgggattgttaataacaatattacgataaggcagtga

SEQ ID NO: 219828 - DNA, 384 bp, Klebsiella pneumoniae
atggaacttggtcggtccggcatatttaaagaaattacgcggaatttccagagctctcgcccgttcagcatcataggtgctctctttacagaaaaagcgcatcacaaacgcggctcgggactcaatatccccttcaccgaacaccaggtcattgccgttctgaagtccgtcgaagccggacgcaccgtcaaagatgtatgccgcgaagccgtgatttctgaggcctcgtactacaactggaaagcgaagttcggcggtatggaagcctctgatatcaaaaagatgaaggacctagaagatgaaaaccgccggttgaaacagatgtttgcggacctgagtctcgagtgccgtgcattgaaagattttattgaaaaaaagctttaa

SEQ ID NO: 219829 - DNA, 366 bp, Klebsiella pneumoniae
atgcgtaaagcccagaccgaagaagtccgccgagacgatattaaccagattagaaacaatgagcggcaagctagacgtatctgcaataacttctgcagccatgacaaaggccagtgtcgtgccctggctgaaccccagtgcgagcagcattgcaatcacaatcggcgtcaggatcagcgtggcgccgtcattggcaaacaatgcagcaacagcggcaccgagcaagactatccaggtgaacagccgacggccacgtccgttaaagatggcagcacctgcatgcccatggcaaaagccttagaccgggcattgctctggataaaagcgttggcaacttgtctgcaaaaaggtgacagccccaactga

SEQ ID NO: 219830 - DNA, 1428 bp, Klebsiella pneumoniae
atgatatctgataacaaagtaacctatcacgaggttgacttcctgctgcccgcacagagatttaacattcatttttcctatgtttcccagaaggggctgccattcatccgggagtttgtgataagacttgttcatgtagcctcgatgagcaaagcacaaatagcaacctatttcggcctgacccaccgtgagacagaagaggcgatttccgatctagtgcagcgtggcgaactgacgctctcgtctgacggcagactgaccttaaccgacaaatcaaatggctatttttcagaggttggcgagataccgcacctttctactgttcaggacagtggtggtaccttatcctttgatttagccacatttagctgcttcagcaaccagactttccaggataactggaggggggggttaaccttaaaggttgatgacaacaatatttctcaaagtgagaaactggtggagaagcactttcagtaccagtttaatcaaatcctggataaaggttatctgtctcacctgcaggctcagggcggaaaagaacaaccttctatctatacagttaattctgttaataagctgcggcaaataccgctccgtttaacaacggaatttaaaatggataacgatggtaaggctgtcgagcgtgaagactatgaacagttaaacagttcggaatgtgttcatgagttaatggctgttgagatagctaggttatcacggcataacaataccatgagtatttttaaggccatggtatccattaacgatgaccttacgcttaagctgtttgactctaaagagaatcaacttaatccattatttatcaatgatatgcaggcattggaagaatactcagactctggcaggacgacttttttaggcccggtttattctaaaaacaactgggaaaagctgcagaaagctctggcaccggtgctcaatcagcgtatcagagacaaaaccgattatggcggtagcccgttcgtctgggtagctccatcagatccctactggtcaaagagcgtccgatttatctcaagcctgagcgattttcttaacaggtcggctacgaaggataagcggctgtataaaccggtgctgtatgtacccgtccaggatgcagctgatacccgggttgccagacagtggaagcatgaacttgggcaattccacgcgtgcgctaaagggctagtagaaggactgttagatggcaatgttgagatccttcatcttgagggggagttatctgccgttatctatcatatttctcaaccagaaacgctgcctgtgacgatgccattgggcttcattacaactaacaaagatgcagttaagattattggtgcgctgattagtgaatatatcaaaggcaccactggttttaataagcctcatgactgtggcgcaatttctgcaatggtttag

SEQ ID NO: 219831 - DNA, 4953 bp, Klebsiella pneumoniae
atgtgggatggtggcttacaagagcaggaagtgttggctatcgacaaaataaaggctgctttttcagccaacgaatctaagcctgacaagcctgtccgtggcggttcaattggcgagcagctacaaagctatggttttaccggcaatggaatgttcccctggaaaggttatgcaggttttcgatttgttgaggcaaaaaaagagggtgaattcgatttagttattgtcacacactgcaacgtgatcattgttgaactgaaagattggaaccatcaacctgtaaccgcgcgcggagatacttggtataagggtgacaagaacatggggcgctcgcccgtaagcgtgacccgtggcaaaaaattcatgctagacaacaaactcaagcgtctggcaaaccgttttacgaacaaaggctataccccgattgttcatttctttgttgtgatgaccggcaatgcggacttcagcgcgctgccggaggaacaacttcaccatacgatctcgttaaaagatttcctgaaattttccgatcgcagaacattcaataactacttcaaaccgcaccgaggttccgaagttcttaacaaggattttcctctttttgataatctgttcttggggcctcagacggcgccaaaagccctgagagttaatggctacgaggctaaggatatgattttcgaacaccctaaaaaggtgtatcgcgaatatttggcaaaatctgagatatcagcgaacagcgaagcgctactcagagtgtggaattttaagaatatcgcgggaacaaaagcgaataccccggaaggacgagctcagatcgtttcacgtgagcgcgaagtgttacagcacatcaatcaccagaaccgtgacctgtataaccactgtcttaggtctctgacgagtttccagaaagacgaggtcacggccgagtacagtgaagtatatgagcttccgccgggccatgtccggtttaatgagtttatcggaaaatatggtaaggccttttctgatatggatcgcttgaacgtggtgaaactgctcattgcgaagtttagtgatctccatgaaatgaaaatagcgcacagggatatagccgatcacagcctgtggatttcaccttcaaaagaagttgctctttcaaactttatttcggcttaccaccggccagccggaacggtcggtgattaccgtaagcttttatccgtaggtgcaatcgaggtaaaagacatgcttgatgaaggcgagcttacgccttttcagcaggatgttcatgccctgggccttgtggcctggcatttattaagcggtacgcgcatgtcgccaaagagtctggagaaagtacaggacagtatgctaaacagccaacactggtattcatatgtattactggatgccgttgctgcaaaatttacttccgcgacagaattttttgataccctgaaacaagccgaacctgctggcaaggctatcccaacgtttgatgatactgagcttgatccttaccggcatgctatcaatcactctcgtcagtaccgggaagacggtgactttctggtcgagacatccgacaaggaagtctatatctcgggtggaaggctcgtgaaggcctggcttaacgcgggggggcagggagacgatccgtcaattaacttccaggttctgaagtttttaaagcaggttgagcagctttctttagttaaaccaacgtatctacctgaaattcgtgaattcggtatcgcatcaaaatcatcaagtctctatatggtcacggatcaggtacatggagaaacctgggataaaatggtggtccccgatgatgaaaaaatagacctcattggtaaattcgtcgctgccgttgagcacttacacggtctgggtgtttctcacggggacatccatcctggcaatgtgatgcttgggacacagagtcgttcgcttttcctcatcgatatccccgatttttcaccgtccggtgacgaacctaaaaaccacagctacagccctgaatacatcgataattgtacttcctttgaacgcgacaactatgcagtgatgaaaatgtcctgcgagttgttaggcttgtcatgggggcaggaatcagacattcatcagagtattgcgtatgccatccgagcagagttggaagacttggtttttgggtttaaggatttagggcggtttaaaaaagcgatagacagtaataatctggcctcagaacaagccctgatagagataacagcaggaaacgccgatgagataatctctgtcctgcctgataacgggcatctgtatgtcaaagttgagccaaatcctaaagtgcaagctgaagtaaaagtgactttcacagggataggtggcagtttcactgcagtgttccacaaagagcagaaaacactaattcatggatttaggccatgggctcgcacatccattcgtaagcaggatattgatgaaagtcaattcgaaattggtaccggcatcaggattactcccggcagtccgcaggatatgtcggcgttgacagttttgcttaatgaagaagaatcttttgggcgggcaatcgagttgatcgccgcgtctgaagacgttcaggaacaggatccgcttacgcttcagctaaaagatgcctttgcaagactggataagcaggcgcttgagcctgctttaaaagaagtgctggaaatcccgacggtgaagctgtggcgcgccattctggatactgaaacagaatcatatccaaacattgaaatcagcggggaggtggtcccggttgcagatgctcatggagagcttcttctcccttactctgcagacgttgacccacttggcgctttcagaagtagtgatgaagtcgaagccttacaggtcgatcaggatggtgttgagcgatttataggtgaggtgtcacttaagaagtcggagctcaaagagatccgcctggtcaaagtgcgttccgcagcctacaggctgaaggattctgatattgtcttcttccgtacaaggcaggatcgggcatcttatcagaaacgtaaacgcgcattggaacgtctcctagaacgagaaagtgtggtgcctgacttaattgacctgttcgacccatcctgcaaacagatggctcaaaattatggtatcactctcagcgatgacgattttgccagatatgaccgtgaagatcagcacggaaacaagatcagtctgaatgaacagcaaagaaaggcgtttaacaaactggtcaacaatggccctctttccctcctgcaggggccgccgggaaccggtaaaaccgagttcatcgcggcctttgtccactatctgatcgaaaagcagaataccaaacgcattttactggtcagccagtcacacgaggctgtaaatacagcggccgagcgcatcagaaagcactgttcccggcttggtacagagctggacgttgtcaggttcagcaacagggaagggaccgtttcccctggcctgaaagatgtgtattcaaacgcgatcacaacggagaagcgtgaactatttaatgctgaaattaagtaccgtgttgaagcgttgagtgaagccattggtctggagccggggtttatttcgggagttgtacttgcggaactcagattgttcaggcaaatcgatcaccttgagaaattgctctatcaagttaacgatttaacggattcaaaagagatcggtgaactgaaagatattgcagccgaactcgattttgccatccgctccaggctgagtcaggagtatgggattaacctggataaagacgcgaaggtctctgcagcaaaagatattctaatttccaggctgtgtacggattatggcgtcagaccggatgaggcacgacgggtaaaggcattagctaaaatatcccgtgatatgcaggatgctatgtcaggagagcgagtgaatctggacgagttttattcgcgttcaaggcagttagtggctggcacatgtgttggtattggacaggggcacattggcattcaggagaatatctacgactgggtgatcattgatgaagcagcacgctcaattgcaagtgagctggcgattgcaatgcagtcggcccgacgcatcctgttggtgggtgaccacctgcagcttcccccgttgtactcggatgcccacaaggcggcattagcgaggaagctgggtatcaataactcccgcactgaaattgacgaggtattacgaagtgactttgcccgtgccttcaactctgcttatggtgcgcaggcgagtgcagctctgctgacccagtaccgtatggctccaccgattggtgatctcgtatcgaagacgttctatgacaggaagcttctgaatggagaacgggcaattccggatgtctatcagcacgcgccagaagcgttatgtagcgtcgtaacctggcttgatactgctaatctgggccaccgggcacatcatcttgaagatcgcggaacaagcatttacaaccgatgtgaagctgacgagattatttctgttcttaaacaggtgtcagagaatgaagaatttgtcgctcagctttcaaagctcgttaacaaagatgaagccgctatcggcgtgatatgtatgtatgccgaacaaaagcggttgctccgtcagaaattcaatcaggaaatctggagcgagggatttaaggacattgttaaaattgacactgttgacagttatcagggtaaggaaaaccggatcatcatcctgtcactgacgcgttcggataagcagcatagcccaggtttcttacgagctccaaatcgtataaatgttgcgatgtcacgcgcaatggatcgcctgttgattgtgggtaatgccgatatctggaagggaaacaataaagaactaccattaggctcagttgtaagttatatggctgaacgaggtcaggaagctggatacaggttcctctccgctcagcagggaggcaaaaagaaatga

SEQ ID NO: 219832 - DNA, 393 bp, Klebsiella pneumoniae
atgtgtttgaacatttggttgggtctgagaatcctgagcaataacatgtgtaccgagctattgctttacacttcctggcccaggaaagacagccttatggttaaagttcgttcttcacctgcctgggagttgctcattcttgaggttggcaccattgctacacgctggattaacaccggagagcccattaaaacttggcgcggcatcatggcactctcgggaatgtttcggcttggagagatatacgctggcaatcagctagcacaatcacttttctataaggctgatacgacccggattgataagcagttggcgttagaggtgattgagttttcacagctcctttccgctttagtctcttttctagtctacgcggtgggtaatgaggattag

SEQ ID NO: 219833 - DNA, 714 bp, Klebsiella pneumoniae
atgttgtccggttatgcgctctggcctgatgtgttaagacgtgatgcatttccgcagcaagaagatcagtttgtctaccggttgctggtcagggcattaatcaaacagggccagattacctcagccttgccctggcttcctatgctggataagtacaatttggcggatgcaaatcagaaaatcctcgaagtacttgcaacccgccctgtcctaccttccgagcaggcctggcttgatacactctctgcggatgatcggacaaggttcaccaacctgacatcggaaaaacggcagcctgatgtcaccattcatgagtggattgcgaccgatccggcaagtccggccaggtattacctggtggtgaatgaatatgcacgaaagggcaagtataacgaggctgtaaacgctgcgaaggcatccgggatacagtcagtacgtaaccacaccgttgatatcctgctcaattatgatgccatcgagcccgcaggcgaacttgaacagacaaacctgagtgcagacagctttatgtcgctgaaagcctctcaggcacgccataccccgcaaacagcccaggcatcgttgtctgctggcctgacccgtctgtcagaagtgaagggatccatctccggattctatgcagcgtcagacctgctctgtgcatcgtctgttgtggctgataaatcgtttaggcatgccctttatcaatatgattaa

SEQ ID NO: 219834 - DNA, 423 bp, Klebsiella pneumoniae
atgattaacagtgaaaagctcatctacagagccaataccgggagaaaattgttcagcctgtgcctgatagaagcaggacagacggcacaagggctggatatgttgcaagcaatcgtcgatccggcaattcgtctgccggctctgacagcttttatgcttaaaatgtcggcttctgacgatgctaagttgttgtcacgtgcacaatccatggcatggacgacctttgaaaccctgaatgcctaccgacgtagcgactatgctgctgaacttttttacgccagcgcacaccttaacggccatgtgcaggccctcaccgaagtaagcaaactgatttatgcaccgaacgcgaacgatgatgatgcctcccgggcacaaaagtcaaagaatgcggccacactaacctcccgtgattatgccatttaa

SEQ ID NO: 219835 - DNA, 1062 bp, Klebsiella pneumoniae
atggcacatgataataatcgattcgaatactatcaggggagggatgtgcctttactttataatacattgttggaaaaagaagagagacgaacgggtataccttttaccgattattttcagtctgaatggaatagtacattcgaataccagccttctacagcaacaaatgttgattacttctttagcggtgatcgatatagatctaccggcaaattttatacacaagcgagccatcgtggtcgttccgcatatttaagaacaatagagctggccaaagaatttttcggcatgccggattcttacgcgggacatttatcgataccagcactacctatcgaacctgcgtatatagagcttcgccctcaaaaacctaaatggttacctgtttggagtggtaacgactctcctaatgaagataatttaatcagctatgttaaagaaggattatccaacttttcacaaacagatgacagtaatgaccttttagctttttcattacccatcaagattgatgacaataactggattgatttgactgttgcaaaagtgatcactgaaattgagttaacgcctgacatgcagataatggagcgttccggttgtttggctattggtaatcttctggataaggagctatcttatgagtttggtgagagtcagatgcccaaagttcctacactggctggcacttcgtatccagttatgagatatgggcactggcactccgatctcgaatcacgagggttctatattcccaaatgtcccattgataataaaaagattgtcggttcatcttccgatggtttgtttagttactctatcgatggatctcaagttggtttttcatcgttctggtataacgattggcaacctattcatcccaaaggaattcgttctttttgtggatcttataccgtagtcagcaaggaaagaattgaggaatggcatcgctcaagtggagcagagcgtaagagctgttacttgtgcaaagccattgtgcttacagctgaagataactttaggaaatttaatgtacaagagattgagttttttatacgttga

SEQ ID NO: 219836 - DNA, 1047 bp, Klebsiella pneumoniae
atgttgatgcaacatgtcggagtaggctattttgggtattaccgagcaactgcttatgcgatgaaacactcccttatgcccgagattgcgaagttaagaatgaaggccctgaacttctgggataagcatggtatccgtgccgcagctgatgcttttggcgtatcaacacgaacgctctactggtggcgccagttgcttcgcaccggtggtcctcaggcgcttattccaagaagcaaagcccccctggttcgccgttcaaggcactggcaccctgatgtgatcaaggaaatcaggcgcctgagaactgagctacccaatctcggcaaagagcagatttttgtcaggctgaaggcatggtgtgaactgcgacattttacctgtcccagtacatcaaccattggaaggatcattgccggagcgcacgataaaatgcggatggttcccgttcgcctcagtgccagaggcaaagtcaggttgataaaaaaacgctcagtgaagcccagaaggcctaaacagtaccgcccggtaaaaacaggcgaactcatagggatggacgcgattgaactcaggatgggggacctacgccgctatatcattaccatgatcgacgagcacagcgactatgcgctggccctggcggtcccttcactcaacagcgatattaccagccatttcttcagcaaggccacaaagctctttcctgtcgctatcagacaagttgtcactgacaacggtaaggagttcctcggtaactttgataaaacgctacaggaagcctcgattaaacacatctggacctatccgtacacaccgaaaatgaatgcgacctgtgagcgatttaaccggacacttagagaacaatttattgaattcaatgaattgttgctttttgaggacctgaatttgtttaatcaaagaatggctgaatatctggtgctgtataacagcaaaaggccacataaatcactcgaactgatgacgccagtggactatattttacgtgagagtaaaaattgcaatatgtggtggacccatacacagtgttga

SEQ ID NO: 219837 - DNA, 864 bp, Klebsiella pneumoniae
gtggccagaaagcaatcagccccgcgtctcgagtttgaggcggcggcgatctatgaatatcccgaacatcttcgcccgtggctggaggcgctgccgaagctgccgggcgtctatcagtttcacggcgacagcgacacgatgccgctctatatcggtaagagcgtcaacctccgcagccgggtgttatcccacctgcgcacccctgaagaggccgcgatgctgcgtcagtcgcggcgtatcacctggcagcgcaccgctggcgagctgggagcgctgctgctggaggcgcggttgattaaagagcagcagccgctgtttaacaagcggctacggcgtaacaagcagctctgcgcctggctacttgcggacgaccggccgcagattgtctatgcccgtgaggttgatttctcgcaccagcagcatctctatggcctgttcgccaaccggcgggcggcgctgcagatgctgcagagcctcgctgacgaacagcgcctctgttatggcctgcttggtctggaaccactcagccgcggccgcgcctgctttcgctccgcgctgggccgctgcgccggggcctgctgtggaaaggagagcgtggaggcgcacagagagcgcctgctggcgcagatgagcagactgcagctggtgtgctggccgtgggcggggcccgtggcgctggaggagcgcggcccggacatgacgcagtatcacgtcattcataactggctgtggctgggcgccgttgaatcgctcgaccaggcggcggagttgacccgtctgcccgccggatttgaccaggatggttacaagatcctctgtaagcctttgctcagcggagactatccgctgcatccgcttggctga

SEQ ID NO: 219838 - DNA, 483 bp, Klebsiella pneumoniae; identical to SEQ ID NO: 134951

SEQ ID NO: 219839 - DNA, 558 bp, Klebsiella pneumoniae
gtgacgaaaacgttcgagctgatcgccgattatctccaactggacacccgcgggctggacgcttacgacctggcggtgcccgggccgattatgcaggaggtggcgcagtatctggcgtcgctaagcggaaaagcggtggtgattaatatttttgccggccatgccgaccgcagtctctcgcagacgcagctggcggaactgctcgacaaactgctggcacgccatccggggagcgcggctattctgctcgatcaccggcgcgagatccgcatcccgctgccgccggaggtggtgattaacccatttaacacgttacaccatgcgatggcgctgatcgcccaggcggagctgattatctccccggacacctcggtggtgcacatggcggcggcgtggaacaaaccgctgatcgcggtctataaggacgttctgcttaataaccggctgtgggccccgggctatgacaacgccaggcagatcattgttaaatgcgggaaggtccatcagcatcgcgggctagtggatagaattatagcggcgctaccggagacgctgtga

SEQ ID NO: 219840 - DNA, 1185 bp, Klebsiella pneumoniae
atgtcttctgtgatctcctctaccggccgccgccccgcgctgctgattgccggtatcctgctcattgccaccaccctgcgcgtggtctttaccggcgcggcgccgctgctggacgcgattcgtagcgactatggcctgaccaccgcgcagaccgggctgctcactaccctgccgctgctggcctttggccttgtctcgccgctggcggcaggggttgcccgccggttcggcatggaacgcagcctgctgctggcgatgctgctgatctgcgccggcattaccctgcgctccctgccctccgctgcgctgctgtttatcggcacggcggtaatcggctgcggcattgcgctgggtaacgtgctgctgcccgggctgattaaacgggatttctcgcaacatgtcgcgcggatgaccggcgcctattccctgacgatgggcggcgcggcggcgcttggttcggcgctggtggtccccgtggcgatggccggattcggctggcgcggggcgctgctgctgctgatggtcttcccgctactggcgctcctcagctggctgccgcagtcccggcgccgggcggagacgccattgaccggctcaggcgctatgcataaccgggggatctggcggtcggcgctggcctggcaggtgacgctgttcctcggcatcaactcgctggtctattacgtgattatcggctggctgccgtcgattctgcagagtatgggctatagcgaagcgcaggccggctcgctgcatggtctgctgcagctggcgaccgccgcgcccggcctggcgataccgctgatcctgcatcggctgcgcgaccagcgcgggatcgcggtgctggtcgccctgatgtgcgccatcagcgccgccgggctgtggctgttgcctgagctggcgatcggctggacgctgctgttcggctttggctccggagccaccatgatcctcggcctgacgtttatcggcctgcgcgccagctcggcgcatcaggccgcggcgctgtcagggatggcgcagagcgtcggctatctgctggccgcctgcgggccgccgctgatgggcaggatccatgatgccaatggcgactggcatattccgctgctggcggtggcgctgatttcgctggtgatggcggtctgcggcgcgctcgccggacgtgaccgggaaattcacccctga

SEQ ID NO: 219841 - DNA, 1281 bp, Klebsiella pneumoniae
atgactgaacataccactagctactatgccgccagcgccaacaagtatgaaccgttcccgacgctggagggatccatcaactgtgacgtctgcgtcgtcggcggcggctacaccggcctctcgtctgccctgcatctggccgaaatgggctacgacgtggtggtgctggaaggggcgcgcatcggcttcggcgccagcggccgcaacggcggtcagctggtcaactcctatagccgcgatatcgacgtcattgaaaagaactacggcccggatgcggcaaaaatgctcggcagcatgatgttcgaaggcggcgatatcatccgcgaacgcatccagcggtatcagatccagtgcgattaccgcccgggcggcctgttcgtggcgatgaaccataaacagctggaaaccctggaagagcagaaagccaactgggagcgctacggcaacacccagctggagctgctggacagagaggccattcgtcgcgaagtggacagcgaccgctacgtcggcgccctgctcgaccacagcggcggccatattcacccgctgaaccttgccatcggcgaagcggatgccattcgcctgaacggcggccgggtgtatgagcagtcgccggtcacccgcatccagcacaccagcccggcggtggtcagcaccgcgcgcggccaggtcaccgcgcgctacgtgatcgtcgccggcaacgcctatctcggcgataaactggagccggagctggcgaaacgcagcatgccgtgcggcacccaggtggtcactaccgctccgctgtcggaagaggtcgcccgctcgctgatcccgaaaaactactgtgtggaagactgtaactacctgctggactactaccgtctgaccggcgacaaccgtctgctgtacggcggcggcgtggtctacggcgcgcgcgatccggacgacgtggagcggctgattatgccgaaactgctgaaaaccttcccgcagctgcagggggtgaagattgactaccgctggacgggcaacttcctgctaaccctgtcgcggatgccgcagttcgggcgtctcgataacaatatttactacatgcagggctacagcggccacggcgtgacctgtacccaccttgccggacgcttgatttcagagctgctgcgcggcgacgccgagcgtttcgacgccttcgccaaactgccgcactacccgttcccgggcggccgcagcctgcgcattccttttaccgccatgggcgccgcctactacagcctgcgcgaccgccttggggtttaa

SEQ ID NO: 219842 - DNA, 1125 bp, Klebsiella pneumoniae
atgagcaatttgagccctgacttcaccctgccgattaacttttgcgctaatccgcaggatgcctggaccattccggcccgtttttataccgacagccaggcgtttgagcacgagaaagagcgcatcttcgccaatagctggatttgcgtcgcccacggcagcgaggtcgcccggccgaacgattacattacccgggagatcatcggcgaaaatatcgttatcgtccgcggccgcgacaacattctgcgcgccttctataacgtctgcccacaccgcggccaccagctactgagcggcgagggcaaagccaaaaacgtgattacctgcccctatcacgcctgggccttcaagctggacggcaatctcgcccacgcccgcaactgcgaaaacgtggcgaatttcgatagcgaaaaggcaacgctggtgccggttcgcctggaagagtatgccggttttgtgtttatcaatatgaatccggaagcggagagtgtggaaacgcagctaccggggctgcaggacaaagtgctggaagcctgtccggacgtgcatgatctgaaactggcggcgcgctttaccaccctcaccccggcgaactggaaaaatatcgtcgataactatctggaatgttaccactgcggtccggcgcacccgggcttctcggattccgtccaggttgaccgctactggcacaccatgcacggcaaatggacgctgcagtatggcttcgccaaaccgtccgagcagtcgtttaaattcgaagagggtaccgacgccgcgtttcacggtttctggctgtggccgtgcaccatgttcaacgtcacgccgatcaagggcatgatgaccgttatctatgaattcccggtggatgaagagaccactctgcagaattacgacatctatttcaccaacgaagagctgactgacgatcagaaagcgctgattgagtggtatcgcgacgtgttccgcccggaagatttacgcctggtggaaagcgtgcagaaggggctgaagtcccgcggctatcgcggccaggggcgcattatggcggataacagcggcagcggtatctccgagcacgggatcgcgcatttccacaatctggtcgcccaggtgttccagccgtaa

SEQ ID NO: 219843 - DNA, 876 bp, Klebsiella pneumoniae
atggtgcaggaatcccgctgcgtcaaaggttctatattacttaatcatcgtctcgaaaaagaatatgttgaagatgatttccatattttttatagcctgcaagggcgagacgccctcagatatcagtacgacagctcaggtagtggcgtccctgacagtatcaaagatattgccgggcaactacaggccgctaaatacctctattccagtgtgcttggccttcgctttccgttacagcaaaagatctatgctcaggccaggcaaatcaatgtctatgtgctgcaactgccgaaaggaaatggtttggccttcgatcgcgtggcggcagaaacgatgagtgacggcaggcagctgccttgcggtttaaagtttgtattgaatgccgcgctggaaccggcgcgtaacattacgccagctcatgaatttttccatctttatcagtatggctatgccgtttttaaacaaaaatggtatctggagggaatggcgcgatggatagagaacagctttaaagcgcctgagaaaaatacccggcggctctctccgcttcctcattgcgacagtaattttacccggggttataacgccgcgaattactgggcgagctttgcgcaagcacattttgctgatgtcgctatccccgccgcagcacagcgttttcgttacagcgacggttcgccagttttaatagcgcaggaagtaaaggggggagcaatgctagcgccgttttttaatcagttggcgcagggcagcgcggcacagtcgcggcagttaaatcaggcgaacatccgctggtctgaagctcagcagcgcagtccgcaatttaatgaggcgatctgtcaggcgttggccgccatggtggcagagaaaaaatag

SEQ ID NO: 219844 - DNA, 3135 bp, Klebsiella pneumoniae
atggcattgagcgatttattacaacaggcttgctttcagtgcaaaccattaaaaacgaccgcattgcctgctgattatcctgggtgggtcatcttttttagcgtcagtgacggtaagcagcgtgcgcatgtccatgtttcgacagcagccagctttgatcaagcctggctagccggggccagagcgctgcaggagtggcgtaaaaagcaagataatgaaacccaatggttacgaattgatattgtcgatagcgtagaacagctaacgtgggaaactctattaaagaaactcaatatcaccaaacgcaattattttcgcttcggtatctcttttgatacacaatttacgcaagcgatccttgaacaggaaattgcggcgaatgctttactttatgatggggacaatggcgtagcggcgccaaatgacatcaatctggaaaattatggtcaacgccgatttaagcgcagtttgaactggccgagcgaacctcagcagatactatggcggtttaaaacgcgttcagtattctgcgatcgtaacggcgctaaactcatcgaacatactggccgcagttccggctaccgcgttatcggtgatgaatggcaaaaaaattatctgcccgaggttattaaaaaggggagcgattatctggctcgtcaggtcaaaaaagacggactctattattacggatggtttccctgctttgaccgtcctgtgcgatcctataatgctttacgccatgccagctcaacctattcgctgattgaggggtgggaggcgactaagcagccgcaccttcgtcaggcgatcgatcgggcgattgcttacctggtcaataaccttatttctgttcgtacgcttgctgatggacgacaggctgcgtttctttgtgatgtcgaaaatgaaattaaacttggcggtaatgccgtcagtattctggcgctggtgaaatacaccgaaacgacgggcgatcgacaatatctggacttgttgtcgcaactggccactggaattgcatttatgcaggacgcgcaaagtggtgagtttgttcatgtccttaacagccacgacctctcattgaaagccaaacatcgcatcatctattacgacggtgaggcggcttttgccttaatgcgcttgtatagcttgacgttggcgccgcagtggctggttatggtggagaaagcatttgaatacttcattcgacaaaaacactggcagcatcacgatcactggttgagctattgcgttaacgaattaacgcgttttcgcccggaggagcgttatttccgcttcgggctggacaacgtgcgcgatcatctggatttcgtgctgcaacgggtaacaacctatccaacgctactggagttaatgatggcggcggcggaaatgattgcgcgcctggaggcctctaccacacagcgccatttgctcgacgactttgataaagacaaattttaccaggcgctggaggcgcgggcgcgttatttactggatggtttcttctggccagagctggcgatgttttttaaaaatcctgcgcgtatcgttaatagtttctttattcgtcaccatagctatcgtgttcgaattgatgatgtagagcactatctgtcaggttatatcgcttatcagaagtattttcaggcagccagaaaacgtcagcaatcgccaatcgcggcgccgcccgcgcctcggggaacgaccctttttttgttagagaatctgcgcgacgtggggaatggtattgaggttgcggctacccggcgagcaaggctgtttgttgaacatttacacaccgtcccgtggcttatcaccgccgtctggaacccagaccttaacgatgcggtaaaagcgttgaaggcgcggggagcgttgccggaagcggtgccggtttataacctctacaatgcattagcgtcgtgcctgagtgcggggaagatcgtcccgcttcccgggctgaaaggggaggttgagcttcgtcagacagttgtgccgaaagcagaggcgccaatcggtaaaaataattatcaattacgcccgcaggggcaattggtggaagattacgtcgatagcgcaggaaacgtgttgctgcgtaaatattttgatatcaagaaagcgaatctgcagattatccgcatggatgtcgctttgccgggcggggaggtcaaatcctttaaccaacaggaagcgtttttctcctggatgctggaaatgatgctgcccgcagcgggcaactggcattttatcgtcgataaaaacaaagcgtggaaagattttgtctgttcgcaaccggcacagcggatgaactgcacggttagcgcggtcatccactctcatcatcaattgctaaacggcgggataaaagcttcttaccgtcatttactggaacaaccgcaactggtggatcggttaatcgtactcaccgacgaacaatggcaagatttacagcaagaggggatccccggcgctcgccttgtggtcattcccaaccatatggatgacagcaaaattccggttaacccgcaaaaggagccctcagaaacggtcatttacctggcgcgttattcagaagaaaagcagcatctgacgctgttcaacgcattccgtaaagtgtccgcacaacgtcccgatgcgcggctccatacttatggcgtcggcccgcttcgccgtaaacttagcgaccaggttaaggcgtggggattagaagacgtgataaaaatcaacggatttacctcggatattgctgccgttcatcgacacgcttgctgtacggtcctctgttcaaatcaggaggggcaatctctgtcggcggtcgaggccatggtctacggcacgccgttaattagttttgctattaaatatgggccgcgcgatattctgcaggaccgccaggccgggattctggtgccttacggcgacgaagaggcgttggccgcggccttagttcgggttatttccgataaggcgctacaaaaagagatgcaggccgccgctatgcgcaatgcgcgccgttattacgctaccgcgatagccgggcgctgggaaagctggttacagcacaatgagcagcgaatgaaggagcaggaggagaagccactcaatgtggcttcgctcaaacaacgtgtcgtgtaa

SEQ ID NO: 219845 - DNA, 1221 bp, Klebsiella pneumoniae
atgaataagcccactgctgcgattttcccgttggtaaaggaactcgatccggttgctgcgatggctgataacgagcgtgatgaggccgagctggttaaatcgcgccgcctaatcgctttactggcgctactgctggtggtcacaggcgtttgggcgtggtttgccacgcttgatgaagtatccaccgggaccggaaaagtgatccccagctcgcgcgaacaggtgttgcaaacgctcgatggcgggatcttaactgagctgaacgttcgcgaaggcagccgtgtcgccgcgggccaggtggtcgcacgattggatccgacccgcagtgaatccaatgttggcgaaagtcaggcaaaatatcgcgcgtcattagccgcaagcattcgcctgaccgccgaggtgaacaaccaaccgctgatttttccaccatcgctgaaggcctggccggggctactggcggaagaaactcgcctctatcacagtcgcagggagcagctaacgaagtctatgcggcaactggagcagtcgttatcgctggtcaatagtgagctggcgataaatgaaaagctggctaagaccggtgcggccagtaatgttgaagtgcttcgtttacgccagcaggctgccgatattgagctaaagaaaattgacctcaacactcgctactatgttgatgcccgcgagcagttgtcaaaagccaatgcggatgtcgccagccttgccgaagtgattaagggccgggcagattcagtggctcgattgaccgtgcgctcaccggtgcaggggatcgtcaaaaatatcaaagtgaataccatcggcggggttatcgcgcctaacggtgaactgatggatatcgtccccattgatggtcgattgttgatcgaagcgcggatttctccgcgcgatattgcatttattcatcccgatcagaaggcgctggtgaaaattaccgcctatgattatgccatctatggcgccctcaatggtgttgtcgaaacgatatctcccgacacgattcaggacgaggcaaaacctgatgtttactattatcgggtgtttatccgtaccgatcataactatctggaaaataaacgcggtaagcgttttttaataggtccagggatgatcgctacggttgatattaaaaccggagagaagacagttatggattatttggtgaaaccatttaatagggcaaaagaagcgctgagagaaaggtaa

SEQ ID NO: 219846 - DNA, 2148 bp, Klebsiella pneumoniae
atgagcgaacaaccccagcgcagcgatattccgcatttacaggattgggctaacgctatggcttttgtcgccagccattatcggcaaagttactcaccggggacgcttcatgccgcggcggagtgggcgacgcaaaaaacgctgcctgatgcgcttaaacatttatgccgtcatgccggattgcattgccaatttcttaatggcaatgaccggaaaatgtcggcctggcggctgccgcttgtggtacagctcaaagatggccagattggcattattgaaagcttcgatctacataactcagtcgggatccgttttgtcaaagagctcacattactaagccactgtccgcttgactccttgttagatgaaattgaattcactgtggcttttcgtccggcctcgccggagaaagatattagaactgaaagctacctcacacgcttccagccggattggttacgtaagatcgttttaaaagattggcgtccctatacacatgtcatgctggcgtcgctggcgatcaatattttggcattagccggtatcctcttttccatgcaggtatatgatcgggtaattccggcccaatcctatcccacgttatatgtcttgtttagcggcgtattaattgccgcagtgttcaatttcgttctgaaaattactcgcggtcacgtgaccgacctgctgggaaaacgtggggatattcgtatctccgatcgcgtatttggtcacgcattacggctgaaaaataccgcggtgccgcgctcgacgggcagctttatttcccagattcgcgagctagagcaggtacgggaaatgatgacctcgaccatgatgacggtcattgccgatttaccttttttcctgctttttcagcttgtgctatttatcgtctcgccatggctgagttggatcgcgcctgttgcgactatcctgatgctgttaccgggattgttactgcagaaaaaactggctgagctggcaaataaaaatcagcatgaaagcacgctacgcaacgccattttggtggaaagcattcagggcctgccggatataaaaatgatgcaggcagaaagtcgctttctgcaacaatggaacagctatgtggcgattactgcggaatcgggagttcaaacccgaaaagtcactcatgggctggtgagctggggcatgtcgatccagaacctgttgtatgccaccgtagtggccgttggggcgccgctggtgattaatggcgacatcacgaccggcgccatggtggcggcatcgatgctgtccagtcgaatggttgctccgatgacggcgctctgcggggtactggctcgctggcagcaggtgaaagtagctaaagcaagcctggataatttaatggcgctgccggtagaaggagggctggatgagccgcggatccatcgagcggttctgcacggtaattatgaatttcgcaacgccgagtttcgttacggcaaagacaatggccccgcaccgctgcgaattaaacagctttctatcaaagccggggaaaaaatagctgttctggggcgcattggcgccgggaaatcaacgcttttgcaggcaatgatgggtaatgttgagttgacgtcaggcgaactaaggcttgacgatctttcgctgccgcaaatcgatctggcggatattcgccgtaatgccacgctactgacgcaggaggctcggttatttcatgggacattaagggaaaatgtgaccctgggacggcctatggcgagcgatgatgaactggtgaaagtgctggagctgtgcggtgcgctggagtttgtcaacaaactgcctatggggcttgaacatctggtgatggagggagggcttgggctttccggcgggcagcggcagtcactgctgctggctcgagcgctcatccgcgatcccaatattattctgctggatgaacccacctcattctttgatgaacgaacagaaaaagcgtttgtcgagcagctggcccgttgggcaggagagcgtacgttaatcatcgccactcacaaagcggcggtgctcaatatcgtcgatcgtatactggttattcaggacgggcagctggcgctggataagcctaaagcgacggtatttgagcaagaaaaagcgcgtgctcaggtggtgaacatatga

SEQ ID NO: 219847 - DNA, 1437 bp, Klebsiella pneumoniae
atgcgtctatttcaaaaaaaagggatggtcagcgtttacagctgcagcactattttcctgtcaatctgcgtggtattaacggttgacgcagaggagctttcttttccgcccaccagcatcagcacccagaggttaaacgatactcagcaggtcgccggatatagcgaagagcttatcaaccctgaaagtcatcttgccggtccactggatattgctaccgcagtaaaatcagcagtcaattggcatcctgctatcaatcaacaggtgagtaaacttcaggagcaggtgcaaaaagtggatgtagcgaaagccaaatattatccgcaggttaatgcgggtatgaataatgggtacagtaacacctactctgattctggatattccccctcattagttgtctctgtttcgcaaatgctgtacgactttggcaaagtctccagttcggtgagagcggcggacgctgccgttgcccaacagcaggcgatggtcatgcttaatatcgatcaggtggctcatgataccgcgggtgcagtggtacagctgcagggttatcaaaagctcgtgaaaatagcccaggcccaggtcgattcgttaaagcatattggcgatcttattcgccagcgcaacgacgccggggcgacatcgctttctgatgttgtgcagacggatacccgcgttgagggtgcgcaggcgacgcttatccagtatcaggcagcgcttgagcgctggaaggcaacgctggcgacgtatcttggtctcggaagtattacctccgtaaccgaaagcgtaccgcaggctatggatgccgcctgcgccgttagtaaaattgattatcgaaccgtaccagcggtgctcgccgctttggcccaggctacacaggcacaagcccaggtagataatgccaccgcgcaaatgttgcctacaatctcgctggaacctcaggtaacgcattacctcaatgataattacgccaacagcgcggtattaaataaaacgcagtattcggcatgggtcaaagtagaaatgccgatctaccagggcggcgcgctaacggcttcccgcgaagcggcgcagcaaacgctgtctgcggcgaatgccgggatcagaaacgcacaactcgatgccagccagaagttgagcgcctcccgcgacgaggcggtaaacctgaaacaatctatcgccatccagcgccgccagcaattgcttggcgaacaaacccgcgccctgtatcaggatcaatatttacagctcggcacgcgtccgttactcgacctgcttaacgtcgatcaggaaatttatcaggcgcaatttaatcaggtattaactgaagcgcaactgcgaaatctggaactggactgtctgttcagtacagggaaaatgcgcgccgtttttgctctggataaccaaagaattcagggcgtggagattcgaccatga

SEQ ID NO: 219848 - DNA, 3159 bp, Klebsiella pneumoniae
ttgtctggagattcagggggccagtctaattcggattctgacagcgactctgactcggacagcgattcggactccgacagcgattcggactccgacagcgactcggattctgacagcgactcggattctgacagcgactcggattctgacagcgactctgactcggacagcgactccgactcggacagcgactccgactcggacagcgactccgattcggacagcgactcggattcggacagtgattcggattccgttgaggcaatacctgataccaatagttctgaggttgtgcagcagtacggcaatcttaatggtactgaaggcaatctctcgcaactggttggcgtctcgctgctgagcacgattaatgtgtcgctgttgtctggcagtagcttccgcttcaacgtggacaacaacacaacagaggatatgacggttgatgtcagcggcgtgtctctgctttcaacggctgggctgttaacgtcgatagtcaatctgctgggggctggaaatacgctgacagccgatctgtcggtgattgatatcgcgactggacgcgtagttgctatcgacgcgggaagcgtgagtattagcgcaacgttgcttggtgggttggtctatagcggaacagcttcctttgagaatctgcctgctggtagctatgcgctggcgatatcctcaccaaattccgatggagttctggtgagcctgatcaacacgctcgcaggtgcaggagtagccacctttgtagaagcaacggtaaccgattcgctcggttatagcggaagtaccgttacaggcaatgtgctggagggatcggataacggcgatatggccgatagcggtaccgaccttacggtaacgtcggtaacggccaccactgctgcaggtgagactttctcagtgaatggcggcaccatatcggtaacgggtgcttacggcgtactgactattaacgctgacggcagctatagctaccaggcatcaggtaaggccgggtcggcaggtaatgcggatgtatttacctataccattacggatggtaatgggctgcaatcaaccaccaccctgactatcaatatcggtcaggaggtcgagaccgcccaggctaatccggatacgcaggcttattacgtcggcaacgtcgaagataatcttgatatccaggggggcaatgtcgttcaggtggcgggcctgtcgctactgaataccgtgaatgtcgcgcttccgaccaatggctttaagtttgttgtggctgaagggactgaacaggatgtgacgttaggcgtttcggggtccactgcccttagcatcgcgctaggcgccgttaccctggatctcattctgatcaataccgacactaaccagatagtcggcgttattaaggatggaattacagcaacgccgacaggtttccttggattaagccttgaatacgcgggaggaggggaatttgaaagaattggcgccggtaactatatggttgttatttcgtcgccgactactgaaggattgattggttcgatactgaatctgaatttgggcaccagcattagtatggaggtgacagattcgactaaatacgtgacggggaatgttctgcacaccgatagcgatggcgatgttggcgatacaggtaatgaaattaccgtaagcagcattcagtttggatcgcagatcgaaacagtcactgccggcggcgtcacgattaacggtacatacggtactctgataatcaagtctgacggtagttatagttaccatgctaatggaacaacaggggtgggtcagagtgatgtcttcacctacacgataacggatgggctgggtcatacatcgtcgactacgctgacgatgaacattgagtcaacgccaccggtagcggttgatgatatcgcctccctgtcggcggcaacggcaatgcagtcggtaacctggacgcaaagcgtcagcaatcttgcagtgccaaacacggcagtagcggctaatgcgacatcggcggcgaaagtcaccagtcagaactttaccatcgctgaaggccgggaggtggataacgcttctatcaagctcaatttgagcgggaccagtagctcgacattactgaatggcgatctcttgggaactgtaactctggtccatcatgtgatggttggcggagtgatgacagatgtcaccgtctggacggggcctttgagtatggcactagatgacatcgccatcttcggctcgacggcggatacggatactgtgacgctgaacatggttaacggcggcatcccggtacaactggcggcaggtgattatactctgagtattagtcatacgatgcatgccggcacggcgatgtcctacaacctgtcagcgagcgtagcaggaacagagatccttaccgatgcgcatctgacggtcgggcaatctgtggcagggaatattctcgacggttccgatgcgaatggaacaccagacacgcttggttcgctgcatagcggctttacgataagtggcgaaaacaatctgggtatcgcgaccaactggaccttccattctgatggcacagtaactaacgatacgggaaccagcgcatctaatggaaatgcggtgctgtatggtgaatacgggatcctgaccattaatgggcaaggtggttacacctatcagttgaacgggggtgtgaataccgatgcaataacgtctaaggagacatttacttatacccttatcagtagtgatggcggcagttcgacggcgaatctgacgatcgatctgcacccgcagatcgccggcagcgtcaatgacgatagcgttcatagtaccgcttacgatgacaccttcagcatgggtgtgggagccgatacgctggtttacaacctgctggcggatgacaacaccggaggcaacggtagcgatatctggagcgatttctcggtcgcccagggagatcatatcgatgtttcggcgctgttggtcggctggaatggttccagcgatacgttgggtaactatattactctgagttatgtcggcggaaacaccgtggtgtctattgatcgcgatggaacgggtggaaacacccatcaacctgcgacgttgattacgctacagggggtccatatcaattcgctcgatgagctaattgataccaataactcgaactaa

SEQ ID NO: 219849 - DNA, 3345 bp, Klebsiella pneumoniae
atgaaaaatataaatatcacagcaaaagatacaggtgtgaaatacaccgtcgatggcaatcaagttaacttaaacacgcagtcagttgttgtgttgcatattaagcgagaggacatcagttccttctccaggcaaggtaatgatcttgttctaaaaataaacgacggcagtactcttacgctgaaagacttttttgtgaatgatgccaatgggcatcatagcgatttagttttacaagatgacgatagtggggctctgtggtggcttgaaggggcaggaaccagcgatgcccattattctctcatcagtgatatctcaggattattagctgcaggcagttctggtggcagcattgctccatgggtaatggccggggcggctttgcttggtataggggcgatgattgcaggatcttccgataaagatcattcgtcgcattctccgaacgatgatactgattctgatgcggacagtgattcggattctgactcagacagcgataccgaccctggcggcagcgaaagtgatgccgatgccgattctgatacagactccgacagcgattcggattccgacagcgattctgactcggacagcgattctgactcggacagcgactcggattctgacagcgactcggactccgacagcgactcggactccgacagcgactccgactctgacagtgattccgactctgacagtgattcggactctgacagcgactctgactcggacagtgattcggattctgacagcgattcggattctgacagtgattccgattctgacagcgactcggattcggacagcgactctgactctgactccgattcggacagcgattcggattccgacagtgattcggactctgacagcgactcggattccgacagtgactccgattcggacagcgattccgactctgacggcgattcggattccgacagcgatagcgactctgacagcgactccgactccgacagtgactccgattcggacagcgattccgactccgacagcgattcggattccgacagcgattcggactctgacagtgactcggattctgacagcgattccgactccgacagtgattcggactctgacagcgactccgattcggacagcgactctgactcggacagtgattccgactctgacagcgattcggactccgacagtgattcggattcggacagcgactccgattctgactccgactcggacagcgattccgactctgacagcgactcggactccgactccgactccgattccgacagcgactcggactccgacagcgactctgactctgacagcgactctgactcggacagcgactcggattctgacagcgattccgactctgactcggacagcgactcggattctgacagcgattccgactctgacagcgactcggactccgacagcgattccgactctgacagtgactccgactccgacagcgattcggacagtgactccgattcggacagcgattcggattctgacagcgactcggattctgacagcgactcggattctgacagtgattcggactctgacagcgattcggattctgactccgactccgactcggattctgacagcgactcggatgctgacagcgattcggactctgacagcgattcggactccgacagcgactcggactctgacagcgactccgattctgacagcgactctgactcggacagcgattcggattccgacagtgactccgactctgacagtgattccgactctgacagcgactctgacagtgattccgactctgacagcgactctgactcggacagcgattcggatgctgacagtgattcggactctgacagcgattcggactccgacagtgattcggattcggactccgactccgactctgacagcgattcggattctgacagcgactctgactctgacagcgactcggacagcgattccgattctgacagcgactccgactctgattccgacagcgattcggattccgacagtgattccgatgctgacagcgattcggactccgacagcgactcggattctgacagcgactcggactctgacagcgattcggattctgacagtgattcggactctgacagcgactcggattctgacagtgattcagactctgacagcgattccgactccgacagcgactcggactctgactccgattccgattcggataccgaaccgcaggcaaataatgatacccatacggcggctatcgataccgtagagggcaaccttaacaacgtgaccggaaccgcaagccagctgcttggtgtctccttactcaatacggtggatgtctccctgctggcggcgaactccacgaagttctcggttagtgaaggaacaactgaggatgtgacgatagctgtcactggttcaacgttgctgagtctgcagtcagtactggcactggtggggcaactggtgggcggcgcttcatccattactgccgatctgtcgatagtgaataccgacaccggtgaggtggtgcagattattccggatgccgtgagcctgacgccgtctctggcgctgctcaatctggtttactccggcagcgcgaccttcagcgacctgccggccgggaactacgcggtggtggtttcttcaccgcaggcttccggcggtctggccgcagtggttgatgaactggcgtcagcaaatctgctgtcggttgcccaggcgacaatcacggattctacgcagtacacctcgacggcaattgccggcaatgtgctggttgcggatgcagggggtgatgtagcagacaccggtgatggcattacggtaagcaaaatcgcctccagcgtgcagaccacgccgcttgatgtgacggctgcaggtgttgtgataaatggtctttacggtcagctgacgatccatacggacggcagctatacctacaaggcgactggcgatgcggatgctgttggccaggccgatatctttacctacacgatagtggatgcggatggtgatacggcaacggctacgctgacgattaatatcgtggcaggaagtgatatcggtgagtcggatgctgatgcagattccgacagcgactccgattctgacagcgactctgactccgacagcgattcggattctgacagcgactctgactcggacagcgattcggactctgacagtgactccgattctgacagtgattcggactctgacagtgattccgactctgacagcgattcgtggatttgcccctatatttccagacacctgttatcacttaacccattactggcccgctgccgcagatattcccgtggcgagcgataa

SEQ ID NO: 219850 - DNA, 270 bp, Klebsiella pneumoniae
atgaatttcttgcatacacgaatgcatctcaacgccggtgatacggttgttgttgactgctctcatcagtgcaacgttttactgatgactgattcaaattttaacaactaccgcagccggagggggtaccagcatcacggtggcggcggtttctttgagaaactgcctgcacacttgcatgtaccacactcggggtactggaatgtcacccttgatttaggaggtggatcggcgtccgtacgccattcaattaccgtcattccagcatag

SEQ ID NO: 219851 - DNA, 753 bp, Klebsiella pneumoniae
atgacttctaaaaatgtagcaaatgtaggttcaattgtcactgataaaaccattgacagccagtcactgcttgaaatggtaaatcaggcgcgtaagcaatgcggtgaaaaagaggttcgtaacaatgtcttcatggatcgcattaaagacgagcttgagggggagttttacaagatttttgtaaaaccctctggcggtatcggaggtcgcccggtagaggtggcagagatgagtatcaagcaagctcttcgcgtggccgcgcgcgagtcaaaagccgttcgccgctcgctggttgataagctggaagacatgcaggttatccagaacccaaccacaagcaattctggtcttcctgagtaccggcttgccaaagcggagcaattgaaggctcaggcgttggagaaaaacatcgcatcggcccgcgagttgatgtcaatgttcccgcgccttggcgaatcagctaaccaggtgatcgttgccacgcttgttaacccgctactcggacacgaagttgtaccgctgccggtgattgaagagcattacgcaacggccggagaggtggcggcgcagatcggttgcactgcaaacaaggttggccgcgtggcaaacaaacataacctgaaaactgagcagtacggcaagttctttctggataagtcgaaacactcagacaagcaagttgaggctttccgttacaacgcagaaggggttcaggctcttcgccacctgattcacggtgctgatgtggcataa

SEQ ID NO: 219852 - DNA, 456 bp, Klebsiella pneumoniae
atggtcattggggtaatgactaacggaataaacaacaacttacgtgaaaaaaaggtcaggatcttctctttgcgcggcgcccatcttatagcaatgttcgcccgcactccggtcgctaaagagttccgccgctgggtgctggatattctggatcgcgaagtggttcattcgccgattgcgaagcagttcagtgatgatgagctttgctctctggcatggttatggcgagcaagtgacatcatgcttacagcttgtgagagtattactccattgctgaaggtggccgagcatcggcaggccgggcgctttcacacaatcggtcaggagttgccgcggacaattaacaaggcaagggcgctcattagccgcgagacggcgcatatcgagtttcacccatggaaggatgacaactggagcagggtattaccacacctgagacaggagatgttgcagtga

SEQ ID NO: 219853 - DNA, 459 bp, Klebsiella pneumoniae
atgcttgaaccgatatcagctatctatgatggtaaagctgatctgttaaataaacaaatcgcacccgttgtagacaaatttgaacgcggttatttgtacgttctaagactcagtaatgggtatacgaaaataggcatttcagccgacccaactctgcgcctgaaaagcctgaagcgcggacttcgatcaactggcattgagtttgacaagttatggttaagcatttctcacattaactacaagaataatgaaaaagaggcactagcctttcttgctgataagaaaaaggatggtgagtttttcaaggtttcgtttaaagaagccatttcagttgttaagacgctttcagttaaaacgtcttattccctcaaggagatagaagataaagaggctaaaatggtgagatttaataactggctgaatgatatccatggattgccgcgccaacaacaaagctaa

SEQ ID NO: 219854 - DNA, 357 bp, Klebsiella pneumoniae
atggccgaaaaacaagtaaaagactatgacaagttcaacctccgcttccctgatggtatgcgtgatgccatagctgagagagccaagcgtaatggccgctccatgaactctgagattgtccagatccttcaggatgcgctggagacagaaaagctgatagctgaaaccgacattgtcgattttgactcaacccaggcggctctggattcaaaatccaccccagaggaaaaggctgcgtttcttgccgaacttgagaaaagagatccctttaccgctgcaattcttcgtgagggagaggaacataacagaaggcttgctgcaatccttgggaagcgcatgggttactcaaatgagtaa

SEQ ID NO: 219855 - DNA, 435 bp, Klebsiella pneumoniae
atgactttttctttggactacgacgttagcgaactgttcgttaatagtgagagcatggaaaatgtagtgaaggttaacaggcttaaagttcgagagatagcattaaaaaaatacaagtacgtcaaagatatagaagactctggcggcaataaacatgctgctgaattggatgtacaagatgccgtggtggagctattaaccaaaatcgggttatctgagcataaagccatggtggagcttttcaactctgtacttttagaagagacgctggcccttaccatgctggacgctgataaaaagcaatctcaatttgaagagaaaattaaattaattgaggatgaagccaaagattcggcgacaatgacgacggcgatctcatggataattgccgccgctgtagtattagtgtttgcggggtttctgttttcaaggtaa

SEQ ID NO: 219856 - DNA, 363 bp, Klebsiella pneumoniae
atgtcttcggtagccaattggtcatacacggcaacagcgacactctggcggcgcatacgcgatgctgacggtagcgataccgacggcggaggtcagccttacgggtgggaagcgccgatcgctatcctctgcgactaccagggtggtctctctgcaaaaatcggtgaccttggccgggagatcgtggttaaaaacacgatatggagtgagtacgcaacggcgcgggagggagattacatcctgattggcgcgtcaactgatgcggctccgccggatgaggccgatgagattcggcagatcgtccagttcgcagatacgttcgagcgactggcagacgatttcgcacttataacgggagtctga

SEQ ID NO: 219857 - DNA, 468 bp, Klebsiella pneumoniae
atggctgcattaaaaccggaagtgaaagccgccatcgttcaaatgcttgcgtgctatgacagcctgtcgattgttgtcgaggctatccaaaaggattacgggataaaggtcaccccgcaacaagtcgaatcgcacgacccaacgaaggtcagcggcaaaggtttggctaaaaaatgggtcgacctgttcaacgctactcgcgaccgcttcctcaacgagatatgcgacatcccgatcgccaacaaggcatatcgtctccgtgcacttgaccggatgatgactcgcgccgagggaatgaaaaacatggcgctggctgcctcgctgatggagcaagctgccaaagaggttggcgacgcgtatagcaacaaacagaaggtcgagcacaccagcccagacggcagcatgtcaccgagaccgacgacaattcgcctggtaggagttgacccagccaatggaaagccaagttga

SEQ ID NO: 219858 - DNA, 687 bp, Klebsiella pneumoniae
atgtgcgcctacgggcgggatactcactttttagcaggatattccaatatggcggatatagaagaaaaaaggccatacccgccagttaacttcatcgactccgacaactggcagccatacaccaggctgatacccgccaacgaagtgcgtgagtggataatccggcaaatcatcagcgataccggcagcatccataaccctgaccacgaacacctgttagaggctgatctctgcttcatgtgggcatccgattcgtttgcgaagaaagggcgacatgtcctcggccaagccgagcaggtaatgctccgcgcaggtggctggcagaaggccagaatggagcagcagatgcatgaatggttcgggcgaatcccgaagttcatcatcacgctggcagctgactactgctcgcaatgcagcgacattgagttctgcgcactggtagagcatgagctttaccacattgcccatgccaccgatgatttcggtgcgccaaggttcaacaaagagaccgggcagccagtgcttacactgcgcggtcatgacgtagaagagtttgttggcgtggttcgccgatacggagcgagcgccgacgtgcaagagctagtggacgcagccaatcaacctgcagaggtggcaaaaattaacatcgccagagcgtgcggaacgtgcatgctgaaactggcttaa

SEQ ID NO: 219859 - DNA, 483 bp, Klebsiella pneumoniae
gtgaaaaatctcgaaatccatttctattacgatgagtcatctccaagctatttgagaaacagagtgactcgcaactccaaatcaaaagcagatatgcctgccggaactaggaaccataccgggcattatcaagtgatgctgaatggcgaaagattacaggtgcatcgaattgtgtatgaactgttctttggtgctatccctgacggaatgctcatcgatcatgcagatggaaacccaagtaataactctattgaaaaccttagattagcaacaagccagcaaaattctttcaataggaaagtgcagaacaaaaatcagccgctaccgaagggaatatctaagggatatggcggcaaatatgttgctcaggtgtgcattggtaattcaaaaataaggaagtcatcgacaaatattgatgaacttgcttcatggttagacgctaatcgaagaagtttgcatggagagtttaactgtaacggctaa

SEQ ID NO: 219860 - DNA, 465 bp, Klebsiella pneumoniae
atgagccgattaaccgcaatcatcagcgctgtggttatctgcctggtggcttgccttggatggctggcaagccactaccacgacaacgccaccgagttcaaaaggcagcgtgacaaagcgactgagcaactcagtctggcgaaagacaccattgctgacatgcaggtaaggcagagagacgtcgcagcgctcgatgccaaatacacgaaggaattgtccgatgcgaaaaaaaccattaacgatttgcgtcgggatgtcgattctggcgctaaacggctgcgcatcgccgcaacctgccctggagtgtcaaaagccacctccgccaccggcgtggatgatgcaggaacccccgaacttactccagacgctcgacggaattatttcgatcaccgggacggaatcgcaaccgctgacaaaatgattcgcggcatgcaggactacatcaaagagcagtgtcttaaatga

SEQ ID NO: 219861 - DNA, 192 bp, Klebsiella pneumoniae
atgactacaatcactatcaatacttatgaccctgaagcacgtttcaatatggacaaggacgaagccaagtctttctttgagttcgttgaaaagaaagccacagacgcagggtttaatgttcagtacgacagttgcaactatgtcgatgaagaaagtgagcgctttgttgaaaaatgctttgaggattattaa

SEQ ID NO: 219862 - DNA, 141 bp, Klebsiella pneumoniae
atgaaccacgacgttatcgaacgcatccgcgaacgctggctaaagcttcgcctctgccggcaccgcggcaccgtactggttgactacaaaatattacgcaatttcgtccgtatctataagcgcctgggagaagaagcatga

SEQ ID NO: 219863 - DNA, 669 bp, Klebsiella pneumoniae
atgagcatttatcaacgcattaacggcgctgactggcgcaatatctgggttgttggcgacctgcatgggtgccatacgctgctgatgaacgagctggaaaaggtcaattttgacccattgtgtgacctgctgatttcagtaggtgaccttatcgatcgcggggcggaaaacgtcgaatgccttgagctaatcacaatgccctggttcatggccgtgcgcggaaaccatgagcagatgatgcttgacggactatcttcctccgggaacgtgaatcactggctcgctaacggtggtggatggttctttaaccttgactacgacaaagagcgtctggctatcgcgttgacgcatttggttgcaggtttgccacttatcatcgaggtaatgaccgagggtaagagggtggtggtctgccatgctgactaccctcataacgaatatgcgtatgacaagcccgtcgatgcagaacaggtgatctggaatcgtgagagagtgagcgcggctcaggatgggattgtgaatgaaatatccggtgcggacctgtttatttttgggcacaccccggcacatcagccaagccagtacgccaatcagatgtatatcgacaccggggctgtattctgcggccgcctgaccttggtgcagatccagggtggtgcgcatgcgtaa

SEQ ID NO: 219864 - DNA, 468 bp, Klebsiella pneumoniae
gtgaagcaacaattctgccttatcaacgacaacgttaagcgtaacgtcgtcaacttcatccagtctctgcccgtcgaccaccgatcgccgctgattatcgaggcgcgcgaagagagccgcaccgacaaacagaatcgccttatgtggccacttttgaaagacctgagtgatcaggtgatttggcacggcgaaaagctggagcctgcggagtggaaagacctcatcaccgtactggtcagccagatgcaaaacccggagcgtgagcagaaatcagccccgggcatcaacggcggccgcgtctacttcggcgttcgcacctctcaatccagcaagcgctacatggttgaggtgatcgaggcgatttactggttcggcacagagcacaatgtgaagttcagcgagaagtccagcagtcggattgcatgggcccaggaatggagggcttcgcatgcacagtctgctcgctaa

SEQ ID NO: 219865 - DNA, 885 bp, Klebsiella pneumoniae
atgaccagcaaatttagcatcgaaaacagagagctgcttcagagaatcagtagcggcgaggctgttgtgggaattgattttggtaatctaatcgtcagggagctagctgcattcaggctggccgcaatggacagcgagtctgggtatttgcctctcgactacctgcagggacacaaagacggtctggaatgggccgcccaactggcagaagccaatcaccctgaaaccggagactggctttacgatgaccctatcgagctggcaaaagctattcgcaaaggtccagatatgcagccagcgcagccggtagaggacagcgagccggatcgcaatcctgtgctggcgtatgccgacagttatcgtgatatggcgaaacaaggcgttgagtcagtcccaatttggagcgtcattaccgacatagagcgaaacatagcgccgctctatcgccacgcgcagccagcgccggtagttgatgccgacgataatttctattcgtggtttgggagggaatgggctgagaattatcagcacaaccaatacaccacagcggctaagcaaatgctgggtgtgatggctgaatctgcgtggaaagctgggcgccgcgccgccatgctcgcagccgccccgcagtcacccggcagtgaccctgccaccgtgccgggtaaatggattccggtaagcgagcagatgcctgagaaaaatcagaacgtacttatctcggttaatttcgatagtgacttggtggagccgctaatctgcagcgcccgctacacaggaagcacgttccggcgcggcgacgttactgttaaaccggggaccgggattgaggaggccacccactggatgccgctgccagccgccccgcaggaggttagtgatgcctaa

SEQ ID NO: 219866 - DNA, 753 bp, Klebsiella pneumoniae
atgattcacttccacggagggccaatcacgccagatacctgtgcggtgaaagcgtggaagggacgccatgcgttcattagctttgcaaacgctgggcagttagcactggctagcgaggttactcagtcatttgctctggataacggcgcattcagtttctggacgaaaaaacgcgttgtggactggaacgagtattaccggttcgtcgagcgttgggctaatcacccgcggttctcattcgccattatcccggacgttatcggtggtagtagcgaagaaaacgatgcgctgatagcagagtggccacacggaaagttcattggggcgccagtgtggcacatgaacgaaccggacgagcggtttattcgtctctgcagcgagtttccgcgcgtggcaatcggcagtatgggggaatacgacgcaaagcggccgcgccgctgtgtggctcgcctgcgtgacttaatccggcatgttgtggatgagaacggctacccgatttgcaagctgcacggcctacgtatgctcaatgccgatattttccggcatataccgctgtcatcagctgatagcacaaacgtggcccgcaatatcggtatcgataaatcatggcagaaatcagcctatgcaccggccagcaaagaaaccagagccgctgtactcgttgagcgtatcgagtcaatgaacagcgccagcgcgctcaactataacgccgaacgcgatcgctttatgccgcaattggcatttgagatttag

SEQ ID NO: 219867 - DNA, 423 bp, Klebsiella pneumoniae
atgactatcacattacaggcagtaaacgagctcattcagtcgctggagtcagcgggcgagctttcgttcaaagagacaaaggttctggagctggcgaaagcgtttaagcacctggctgcggagaatgtggaggcaaaaaaaataatcagcgaatgccgggagtatttcatcgctggggtgatgaagcgtatcagaccaacgaatgaaggctacctgcatatgatttgcgacacgtttgcagacgaaacccccgccaccgatcgcatcgtagccgggattaaggctgatggggctaaagctgccggtgattatctgaaactggaagcacagcacatgccagtggttgaacgcctgatgatgcaggatgcggctgaaatttgctacgggactgccgcaagactgcgcgagggggccgacaaatga

SEQ ID NO: 219868 - DNA, 225 bp, Klebsiella pneumoniae
atgatttttctcaaattaacccaaaaatcaacggtagagcgccagggcaaatatggctgggagcctgaaacagtctacgagcctgtatttgttgccgcaggtcacatcgtcagcatgtttttcgctggcgtgacaattctgaaaatgacctccggagaacgcattgacgtgaaagagaccccggaagaaatcatcgccatgcttaccgaaggagcctccaaatga

SEQ ID NO: 219869 - DNA, 1029 bp, Klebsiella pneumoniae
atgaacaccgcagaaatactcaagtttcccggcgccgcgccggggcaattcaggagcaaccggatggaaaaccagaaatctggctacatcccgttgtaccggagcgttctcaagcagtcctgggcaaaagatgtttacctcagaaccctgtgggaaaacctgctgcttaatgctgctcgtcagccattcagagcgactttcaaaggtcatgagtggtcactgctgcccggtcaactggtggtcacagcggccgatttagggctgcagctttgcgaccggaaagggaatcctactagtcgcgattcagtggagagaatgctggctgtttttgtacgcgaagggatgatttctatcgaaggtgagaagcaaaaagggagagtgatcaccatcacaaattttgcagaatatgctcaaaaaacagacaatttacccgcacatgaagccgcacatgaagccgcacatacttgcgcacatgacgagcccagcaatgacgcgggtttgaaggtggtacccgcacatgatggcgcacatgaagccgcacaaacaaccgcacaacatgaacaagaaggtaataacaagaataaaaacattaaaagatcttcgtccgagaattctggcgaatcctctgacgtccgcctgaagaaatttttgtctgcccatcctgatgccgcggtttacacacccagcggcagcaagtggggaaccgcagaagacgttcgcgttgccgagtggattttctccagggtcaggatgatcaacccaacctgcaaagctcctgacatgaccacctggtcaaacacggttcgactgatgcgtcagatcgacaaccgcagccaccaggatatctgcgccatgtacgactgggccagcaaagactcgttctggcatcgcaacatcctgagccctgatgcgctgcgcaagcagtgggacaagctaaccatgcagcgcagcgcgccaggggttcaggctgccgggaagccaaaagtcgacctgaacaacactgactggatttacggggtgctcgaatga

SEQ ID NO: 219870 - DNA, 798 bp, Klebsiella pneumoniae
atgagttcactttaccagctttacaagcacaaagacaaaaacggcaccggaacggtggttaacaaaacttacacggttcctttgtcagagctgtacgtcgagcccggcctgaatatccgcgaaatcgaccaggatcacgtcgcagaattccgcgatgcgtttatcgctggcgaatcggtgccgccgctggacgtccaagttaccgagaagggcgtgaaggttatcgacggccaccaccgctattacggcgccattgaagcgacgaaagcaggtgctgacatcattcgtcttgagtgcaaagacttcgtcgggaacgaagctgaccggatcgccttcatggttacccggaaccagggaaagcctctcactgctctggaacgcgcagctgcatatcaacgcctgagaaatcaggggtgggagccggacgagatcgcgaagaaggttaagcgttctctgtccgacgtcgactatcacctgcatttgctgacctgcggagaagagctgatcagcatggtgcgtgccggcgaggtatcgccgacaactgcggttgcactatcccgcgagcacggcccccaggcagcctctgtagctgttcgccagatggataaggccagagcgtcaggtaaatcgaaattaacccgcagcgcggcgctgccgcagtttagcgcagcaaaggcgcgccagtttctccagatagtcgctgatcaggctgacattgaactgccagctgatgcgcgcgccatcctggacaactatcgcgaattcctgaaagaggccggctgggagagtgaagcatga

SEQ ID NO: 219871 - DNA, 222 bp, Klebsiella pneumoniae
atggagagttcaacgacacgcaacaaagtggaggctcgcaggatagaaagctggttacacagccagatagctgaactgggtaccacaactatcgccaaagtggccggagtgaataagtcgacggtgagtcgctggcgggaaagtctgctgccgaacatgtcgctgctgctggccatcctgatttctaacagaccgggagagaaaggtgattttgaagcatga

SEQ ID NO: 219872 - DNA, 198 bp, Klebsiella pneumoniae
atgaacatcaaatgtgaatgcacagacatgcgcacatctgtaggcccgcataacacgttaaccgtcgagcttgaagacgtagtgctgtcggggacggttaacagtcgtgaagtcctcatgcaactggattgggacgtggtgatcgaatgtctggcggagcatggctacgtcattactcatcgggagaaagcagcatga

SEQ ID NO: 219873 - DNA, 159 bp, Klebsiella pneumoniae
atgagcgcggcggaaaaatggaatgacgacgaattcattcagctgatgagcgatgcgatcggcgagcgtgatttcgacgatgaagaaccagtaaacctttctgcggaacggaagaacccggtgatcagctgggatgaattcgcggggaattttcaatga

SEQ ID NO: 219874 - DNA, 654 bp, Klebsiella pneumoniae
atgacggataaaaaagtatacgccgctatcagcgctgtggccggagagctggcagagaaaggcatcagcaaggccagaaaacagggcagccaggtcaactacgcattccgtgggatcgatgacgtttacaacgctctggcccccgccctggtgaagcacaagttgctgatcctcccgcggtgtactgagcggtcatgctgtgaacgaaccagcaaaaatggtggcgcgttgttttatgtaaccgtccgggctgagttcgattttgtcagcacggaggacggcagctttcataccgtcgtcacctacggcgaggcgatggacagcggcgataaagcaacgaacaaggccatgtcgattgcgtacaaatatgcagcttttcaggcgttctgcatccctacagaagagacgactgtggaccctgactatgaggctcaccaggtaaggccagcagacgcagatcagattctcgctgatttcactgcttacgcaggctcagagaacgatccgaaggccctccaggataactacggaaaagcatggaacagccttcatggcttccctgggcatcaggcgaagtgcagggacgttaccggcatccgcctgagagagctgaaacaagccgcaagtggtggcagccatgaaagtaacagctga

SEQ ID NO: 219875 - DNA, 291 bp, Klebsiella pneumoniae
atgaaagtaacagctgagtcaatcctgtccaccctgcgcaaggacgcgcggaacaacattacggtatttcatcgctggcagaccgcagcgggcgcccttgggcacaacgcagggataaccctgaattttcatgaaccttattacgccgggtgggcaccagcacttgagatgaaagaagtgttcatctcggcgccggaactggaactggttaagccatttctgaccgtcgagcgctggggtaacgggacgcttggcggagaaatttaccgtttgccacaggaggcccaatga

SEQ ID NO: 219876 - DNA, 528 bp, Klebsiella pneumoniae
atgaatgatgggtatgtcagcgaacttgaaatgggtaaatgcggagaatattacgcaattttcaaactcgcaaaacaggggttcgtttgcttcccgtcggatcagggattgccatacgacatagttgttgaggcaaatggcgatctacttaaaggccaggtgcgctcaacactaaaaatacgcgactacggcaagtcaaaaagcgtctatcggttcggaatgaggaccggaaagggtaacggccgagctacaccgatgaattggagtgacttttacgcctttgtcgtgatcgaagaagaaaaaatcgcattcatgactacgaaggaattagcgagtgctaaaaatcccggcgccctcattcaaacaatggagttcaggtctgccagtggcatttatcctggtcggatttattcaaacggcacacagagaatgctcgattactcacgaaatattgagagttatgaagattttaaccgtgttgcttctctgatcggagataaaaaatgccgaatcaaaaatacagcttaa

SEQ ID NO: 219877 - DNA, 663 bp, Klebsiella pneumoniae
atgccgaatcaaaaatacagcttaatcatggctgacccggcctggtcttacgggaacacgataagcaacggcgccgccgtcgatcactaccccaccatgagcctgctcgatatgaagcggctcccggtgtgggagctcgccgcggataacgccgtattggcgatgtggtacaccggcacccacaaccaggaggcgatcgagctggccgaggcctggggctttacggtgcgcactatgaagggcttcacctgggtgaagttgaaccagctggccgagttacgcattaccaaggctctggcagagggagatgtgaccgacttttacgacttcctcgacctgctgaatgcagagacgcgcatgaacggcggcaaccacacccgcgccaacactgaagacgtgctgatcgccacccgcggcgcagggctggagcgcaagcacgccggcattaagcaggtggtctacagccctctcggcgcgcacagcgagaaaccgtgggaggttcgccaccgcctggagttgctctacggcgacgtgccgcggattgagttattcagccgcagcgctgcgccaggctggagtcactggggcaaccagtgtgctaccgcttcagttgagctgatccccggctgcgccatcgacgttgtgaagacggaggcagcatga

SEQ ID NO: 219878 - DNA, 222 bp, Klebsiella pneumoniae
atgacgccagaagaaaaagaaaacgctctccgcgcccaggctcgtcgctgcgcagaagagataaccaaagcgatgagcgtaaagcctaaaccgaagtggaacgctgtatgcccccccatccttcgcaagcactacgagaaggtaaagccgatgggtgtcagcctggtgaaatttgtcagtgttattggccgcatgaatgggcggtatggagtggaatcatga

SEQ ID NO: 219879 - DNA, 537 bp, Klebsiella pneumoniae
atgaaggtagaaaaaagcgatgttctggcatttaccatttccgatgttgaacgcctcgaccctgtcagggtggtgattgaaaactacgagccaggaaaggggcgcatcactgtaacctgcttcggaaaggcgtggaccggtgcctggtttgctatgggcggagacaacgttcaggagttcattaagcgtgtcagcaatgactaccttatcggctatttcgacccgcaactgcaaagcacagttgatgatgataacgacgccaaccttgaatttgtaaagggtgaaatcatcaaactccggcgtcagcaggaaatcgatgctgaggaggccagggatatgtgggtggaggcagaaaacgctgaggatgtgaaggaaagctgctgcgattgtcgcatcggtaataagttgcctggtctgcttggtgatgatccgtggtatgcaaaatggccggcagtgccaaaccacaattatcaatatctcgaacgcatcattgacgcggtacgtggcgggctcgcagaactggagcgtgcagcatga

SEQ ID NO: 219880 - DNA, 852 bp, Klebsiella pneumoniae
atgagtgaacgtctgagcattaccccgctggggccctatattggcgcgcaggtgagcggggcggatttaacccgtccgctgagcgacaaccagtttgagcagctgtatcacgcggtgctgcgtcatcaggtggtattcctgcgcgagcagaatatcaccccggcgcaacagcgcgatctggcgctgcgttttggcgacctgcatatccatccggtctaccctcacgccccaggggtggaggagattatcgtcctcgatacccacaacgataatccgccggataatgacaactggcataccgatgtcacctttatcgacacgccgcccgccggcgccattctggcggcgaaagagctgccgacgaccggcggggacaccctgtggaccagcggcatcgccgcctgggaagcgctgtcagaacctttccggcagctgctgagcggcctgcatgccgaacacgatttccgcaaatcgttccaggagtataagtacaacaagaccgaagccgagcatcggcgctggcaggaagcggtggcgaagcatccgccgctgctgcacccggtggtgcgtacccacccggtgaccggcaagcaggcgctgttcgttaatgaaggctttaccacgcgaattgtcgaggtgagtgagaaagagagcgcagcgctgctgaacttcctgtttgctcatgtcactaaaccggagtttcaggtgcgctggcgctggcagccgaacgatgtcgctatctgggataaccgggtgacgcagcattacgccaacgccgactatctgcctcagcggcggatcatgcaccgggcgacgatcctcggcgataagccgtattaccgggcggggtaa

SEQ ID NO: 219881 - DNA, 813 bp, Klebsiella pneumoniae
atgggtaaggtcgaacagagcaccgactgggtgaatgacaccgggtcaaaattatattatttcccgtccatcaacgccggtacgctggggatgatcgatgtgaaacataactgggcgggaggggcgaaaaacctggcacccggcgcccagctcaaaaatttgtgctatctggatgatccggccagtgtgggttcggtagccctgaactttgacaacactaccggtgggctgattttcgataaaacatcgcgccagtacctgcgcctgccggcggggtttattccgacagcggccatgaaagactacatgcatacgttctggctgaaaatcgatccggcgaatgctggcgctgatggtttcagtaatgtctgggtggggattggggcaaccagttacgccactaccgctaaccggctgattcaggtctatccgaccatcacggctggggtgatcacggcgctgacggtgtgcgtgcgtggcattaactacagcattaaggattacataggcagtctggccgacggcaatctccactgcctgagcgtccgctatcaggagtcggctgatggcacgcagcaaaaggggctggtttatctggatggggttcttgcttatgagggcgtctggacggggaaaatcgcttatccggcggcggctgttaacctgaatggcatcggatcaaacctggcggacaccacaccctttgcaggtcggttttaccgtgcgcgaattgacgatcttacactggttagcaaaacagcgctgcaggtcatcgcggaggagatggcagcggtgtcgggaaggtttagttaa

SEQ ID NO: 219882 - DNA, 2004 bp, Klebsiella pneumoniae
atggcctttgatccgcctcttgggagcacgtcgcccgcggtgctgctcgataacgccactcgcctggacgaacttgttaacgggccagcgggaacggttaatgaccgtgcagggcaaccgctggactcctggcgaaaaatcatcgccgccatcctggaaagttctgcagcagcgatggaaaccattcgtctgacgctgatccccctcggtgaacaatacgccacagaggccgatgcgcaggcggcgattaataacggaacgatcccggctggttcatatttttacgtcaggagcactgacgacagtgcgctcgctgttgaatacaggaatgtttctggtacagctcagcctaccggacgcaaaatgccgtctcaggatttgctaaaccagctgactgagtcgctcggttttctgcttcccctggctgacaccacacgtttttttaaggccggggtaacaggcacagcctacgaagcgatcaacgctgaagatatctttatcgatgctgagaataacctgcagtactggataaaggatggcgtgcggcagtacttcctgccggttcgggtcccgacactggaggctgacaccgttcttgttgacggtatcgccgttgatccggcagctattcccccggctgtcctcgccacaaacctgcgtggcctggctcagtccagcaagttcctggacccggaggcatttcaacccggcggcgcgtatgagggctgggaaggatacgacaatatctggctggataaatcaggaaatattcagggctatacccgtgaaggtaccagctatttgctgttgcccctgtcagtgcctgaactcagtgcaaaaaaaatccgcctcgacggtgaagacctgcgggacgtgatcgccagacgcacggaaacacggctcccgttcacagaaatggtggacgggaaaagccagatcatgctgctgaataaccagaccggccaggtgtcgcaggtgactgatggcaccgtaaatgaaacggacccggtagttgatggcggcggtgtgctttcctggacttcggacagggacagcagcgtaccaggagggaaattttatctggcggagagcggcaaaattcatcctgtcatttcccggcgcgtcctggcgggctggggcgattcgttcatggaaaaccccgtttttatgaataccctccatgctctgacaggtttacccgcctacaactttggaaaatcagggctcagaagcaccgcagttgctgcccgccaggggggcgatcccttttactgtatgccggtggatggagtgatcccagccagtgggacggtcaacctgataccgaacgtaccgggcccccatgcctctgcatcaaacggggcaatggcggccataaaatgccagctggctggcgtagacggaacgtttaactgggatggcgtgcaggccagctttacccgtgatacggcgggcagtgcgaagactgtcagcgtgctgacaccgctctttgtttacccgtataccactgctgacgtggtgggctcgacgcccgccggtacgctgtatcccgagcacgacgaggccattctgatcctgacctgcgggcgtaacaacacaaccagcgtcagcgaagtggtgaataacgtcaaaaatatcgtcaattatctcaagccgatcgggaaattgccctgtatctgtcctcagtttacacgcggtgatgaaacacgaggttctgctggctatcagcgtattcatgccattaacgcagggctcaaagcggccttgccggagttctactgtgaaattgatggtgttgacctgctgcagaacttcaaaaaccactacaacccggcgaatgcaaccgatgtgcagaatatcgccgacgacaccacacctgcttccctgaaatacgacacgctgcatccgtcacagacgctgatgagtggtgcgctgtacgtcggggcagaagttaacgcaaatttcgtttgccagtttctcaaacataaaggatgggttaaataa

SEQ ID NO: 219883 - DNA, 246 bp, Klebsiella pneumoniae
atgtcagagatcaccgcatccgagcaaatccgcctggatatcatcaagaaagttaactacgacaccgcagcggccaagctggccattgactgggtaggcgacatctatctgaagtctgagctattcgcagactctttcgatcgtgttttcacggaaagcgagattgtctcgaagacccgtaaagcgattcaggaagcgaccgaagcactggcgctttttgataccggcgtagagcaggcgagctaa

SEQ ID NO: 219884 - DNA, 249 bp, Klebsiella pneumoniae
atggaaaacgttagttattttttggtcggaggcaagtttgatggagaagttcataagtttgcccctagggcctcaggcgaatctatcatcatcattgagacgaatgactacaccaagcaaaagttcaccgaattctacgtagtcacggattaccttatccctgagttgcctcaatacaaggtggctacacttgaaggtattaccgttaaggagattaaaatagcggtcaaaaatgttttgggccattaa

SEQ ID NO: 219885 - DNA, 261 bp, Klebsiella pneumoniae
atgagtgaagctaaaccgcaggacggcaccaccgtaaagggctatcgcacactaacgccagctgacatcgagatgatgaatgaggtcaaagccgtaagccgcgagttcctcaaaaagctggatttcctcaaatttgtgcatgaaagcgaaccagagccagaccctcaaactctgcgcagcctggctatcgcgcgcaccaaaatgcaagaagcctgtatgtgggcatgccgcgcagtttcccggcctgatgctgactgctga

SEQ ID NO: 219886 - DNA, 201 bp, Klebsiella pneumoniae
atgacgatgttgatcgcgagctgcgcgaaagatttacccgccccggtggtggttgatacagcgtgcagctgggtgcggatcatctacctgactgaccacgatatcgacgtgctggataagcagaccaagcgcgacattctggcgcacaacaaatctgtgctggccaattgcccgcaatcaaccgaaaaggctacgaaatga

SEQ ID NO: 219887 - DNA, 276 bp, Klebsiella pneumoniae
atgggaattgaaatgattattggtctggtaactgctttgctggcgattatcgctggcgcgtttggcattggtcatgctcgcgggaccagtaaggcaaaagccaaagccgataagcagcgtaccgaagagaacgccgccgctgccgtcgccgcagcagaacgccgtgctgaagtcacgaaaggggtcagtgatgtacaggaagacgttaagcgtatgggcgatgacgatgttgatcgcgagctgcgcgaaagatttacccgccccggtggtggttga

SEQ ID NO: 219888 - DNA, 630 bp, Klebsiella pneumoniae
atgaatcaaacacaattccagaaggcggctggtatcagtgccgggttagctgcgcgctggtatccgcatattacagctgcgatgaaagagttcggcatcactgctccactcgatcaggcaatgttcattgcccagatgggacatgagtccggaggctttacccggctggtggaaaatctgaactatgcagcagatagccttgtgcctacgttcggtaaacaccgtatcaccgcccagcaggccgccgcactcggcagaacggcaacgcagccagctaatcagcgagcaatcgcgaatctggtgtatgggggcgagtggggaaaaaagaatctcggtaatcaggttgccggtgatggctggaaatatcgcggtcgcggtctgaaacaagtcacgggcctgagcaactatcgcagctgcggactggcgctgaagcttgaacttgtcacccagcctgagctgctggagcgagatgattacgcagcgcgttcagctgcatggttttatgtttcccacggttgcctgcttcattccggcgacgtggagcgtgtaacgctgctaattaacggtggtcgaaacggtctggataaacgcagagcgctgtttaacctggctaaatctgtactggtatga

SEQ ID NO: 219889 - DNA, 279 bp, Klebsiella pneumoniae
gtggtaaatgatccttcagcgctggcgaatgcagtcatttgcgccgtcattgtgctggcattgatgttctaccaacgaggtagtgcgagacaccgtccgggcatatccgttctggcttatctcatggtgctggtttatgccagcatccctttccgtttcctgtttggcttgtacgagtcatcccactggctggtggtactggcgaatattcttatctgcggcgcggttctctggttcaggggaaatgtagcgcgtctggttgatgcactgaggcactaa

SEQ ID NO: 219890 - DNA, 393 bp, Klebsiella pneumoniae
atgtccgcagaaccgatctcgggtaccgcagttgcgtcggcgggactcgctggcgccagtgtatttggtctggcaacaggcattgattacggcgtcgtttttggtgcttttgctggttccgttttctacgtagcgaccgccgcgaacgtaacccggttgcggctggtggcctatttcgtgacgtcgtttattgtcggggtgataggcgccggccttcttgggtcatacctggcgtcatggacacactatagcgatcgcccccttgacgccctcggcgccgttatagtttcagcgataaccatcaaggtccttaccttcctgaataatcaggaaatgagcggactgattggcatgctttcccgcatgcggggaggaggttcaagtggtaaatga

SEQ ID NO: 219891 - DNA, 549 bp, Klebsiella pneumoniae
atgaatgcttttcctggttttggtggcgggtttctcaagaacgaaccgacgactccaagcattatgagtaataatgtttcagtaattacaaagaaaattaatccgaagggcgaaatcaaggcaacatattttacatacaccaaacccgccaccttctcaccttatgaacaagaatgttactataatgtagctagaatgattagggatcatggtggagaggccatttatggctgggtgctgtgggaaagcgatattatgatagaaggggaggctcactgcctttacaaggatctgtctggtaatgtctttgatataaccccgcgggtttctggtgaagagaaaatactattcatagaggattctcgcctaaatatctcgctgaagcatattaaagaaacccgtttttctatgattcagcacacgaacccacagctaatatttagtatgaatttatttgttgaatcgaaagcggttccattggtgtttgaccaaaatgaaataagggttataaaactaatcgattacaaagatagttttttatttcaataa

SEQ ID NO: 219892 - DNA, 783 bp, Klebsiella pneumoniae
atgaaacttgaagcatcgttaaagcattttagcccccaagggatgcatatcaccgacgacgcgaaaagcacatccccgaatcgcctgaatggcacagacattatgaccgggatcggggtgaccagcagccgggcacggttcgggctagcggcattctttggtaaggctggcatcagtaagaccgatgagcaactggcggttcaggcgctggcgcggtatgcaattgagacagcaccaaaaaacgttcggaaggctgcgggtaaagcgctggggcgctgctgcctgattctggcgcaatttgcctttgcagaatattcccgctcagctgaaaccaccgggacctgcaaggcatgtgagggagctggtgtaacaaaatcagttgaggccgttgttaagcatcctgggatacacaaaagcgacggagaggaaattgtcgccccgattatcaggcaggagtgggtagtacggcagtgtgttgcatgcggcggaaaaggtgccattaacgcccgctgccgctgtggtggttccggtcaggtgctggatcggaaagcgaccaaagagcgcggggcaccagtttacaaggcgtgtgagcgttgttcggggaatggattctcaacggtgccatcaaccgccgcatacaaagcgattctgatcctcattcctgatctgcacgtcagaacatggacccgtaactggaagcccttctgcgatgcgctggtggacatctgccggcagggggaagagcaggccgacaaagagtttcagcgagccacggcatattaa

SEQ ID NO: 219893 - DNA, 744 bp, Klebsiella pneumoniae
atgtcacaacagtcaacgatgtcgcgcgtatctgagaagcctttctactgcatcaatggcagcggggatgtcgttaatccagaccacagccccagtcgtcttgttttgctcaaatttggagtgaagggccgaaaggtagtcattaacagcctctttatagcgttggcgctcgcgccctcgaagatgaaggctcagtgcatcgaagtcaaattgccgctgtatacgaacaacttttcctctccgcaagcgttccagttcggcggtaagaaacagctctatggggtcggaaacagcattgaatttatcaagccggtaccgggagagcgctcgcttatcgccataccacagcccaaaaccaaaggaaatcagggtccagatgaacacaatcaggggagggttggtattgaacagcaaaacgaactcagtccagatgcttcccataaattctggcgactccttttaatccagttatctgtttttgcagctgcgtttcccgccggggtttatatcagcatgcgaagaaatattcgccgcgactggcgaaagcatatcccgaaggggcaattaccgaaagtgcccactctggcaatgatgagtattttgtgcgtatcccgacgcatcaaatcgcataggtggcggttatgggagcagcgacagtggttccgtgacatgcgggtacgttatgggatcgaggtcgcataccgggacgcctgctactggaaaaagcttgtcactgagaggtga

SEQ ID NO: 219894 - DNA, 366 bp, Klebsiella pneumoniae
atgagtaacttaattactacctatcgccgtcgaattttaaaagcagccttgttacgccaccagcgaaagactgggagtagcctacttgtcattaagcttaacaagggtgggattagtactatcgaattaactgagattcttcttgatggattgttgcggaaattcgagcgactggcgctcggtgagtacggaaatgtggaaggtgtgaaagctctcaagggaatttacagcaactctgttgatgttaatggcagcggcgaattcctcacagaaagcgggaaagagttaatcgacgagcttatttctgaactggtggagttcgtcaaaaagcagaaaccagttactgcggagtccggcaatgaataa

SEQ ID NO: 219895 - DNA, 384 bp, Klebsiella pneumoniae
atgagtaatatcactgatctggcgcagcgtgtgcgccattgggctgacatggccgcactgacaagtgagcgcacgtcttgcttgagcgtagaacaactggaagaaatcgctaatacgctggagtccatcgcctccaccgttggccgaggtgaggtattggttactgtggccggttttactggctgtggtaagagcgcgattgctggcgaaattgagattgccttgaaggctatcggggtgccagtaacgtgggttaatggtgatgccgaaaaacggatgactggagccgactggctaactgctatcgagatgtataagcccaccgtgcgaattgctgaggtaaatattcctcgcgccgcagacatcaaggtcgaggcgaagtga

SEQ ID NO: 219896 - DNA, 723 bp, Klebsiella pneumoniae
atggctgaacaacagccccgcccgattctgatcacaggagcaggccgccgcatcggcctcgctctggcacaccattttctgcagcagcgccagccggtcatcgtcagctatcgtacgccctatccggcgattgacggcctgcgcgaagcgggcgcgctctgcctgcaggccgattttagcagcgatgacggcattctgaccttcgctgaagcggtcaaatcacacaccgacggtctgcgcgccatcatccataacgccagcgactggatggcggaaaagccgggcgtcccgctgagcaccgtcatcaaccgcatgatgcagatccacgtccacgccccctatctgctcaaccatgcgctggaggcgttgctgcgcggccacggccatgccgccagcgacattatccatatcaccgattacgtggtggagcgcgggagcgacaaacatatcgcctacgccgccagcaaagccgccctggataacatgacccgctccttcgctcgcaagctggcgccagaggttaaggtcaacgccattgcgccgtcgctaatcatgtttaatgagggtgacgacgaggcctatcgtcaacaggcgctggataaatcgctgatgaaaatcgcccctggcgaaaaagagattagcgatctcatcgattacctgtttaccagccgctacgttaccggccgctcattcgctgtcgacggcggccgcccgctgcgctag

SEQ ID NO: 219897 - DNA, 315 bp, Klebsiella pneumoniae
atggggttctgtacggctaattctattgatttagtcaatatgacaagttccggtgatgaatgtgcgcgccagggacgaacgcagcaggcagcaaacgtgataactttgccgcccgagcgcgcaatgagcgggcccctcgcagggccgcagaagggccgcttagttatcccaggcgtgaggggcgaacaggtagcctttgttgcgaacggtcttaatacgatagggctccgtggcgttgtcgagcagttttttgcgcaggcgggagatagccacgtcgacgctgcgatccatcccgtcataggtaacgccgcgtaa

SEQ ID NO: 219898 - DNA, 363 bp, Klebsiella pneumoniae; identical to SEQ ID NO: 211628

SEQ ID NO: 219899 - DNA, 1647 bp, Klebsiella pneumoniae
atgtcgaataaaccgtttgtttaccaggatccttttccgctcaaaaaggatgacaccgagtattatctcctcagcagtgattacgtctccgtcgccgaattcgccggccaggaagtgctaaaagttgaccctcaggcgctgacccttctggcgcagcatgctttccacgacgcctcctttatgcttcgccctgcgcatcagcagcaggtggcggatatccttaacgatccggaagccagcgaaaacgataaatacgtcgcgctgcagttcctgcgcaactcggatatcgccgccaaaggtattctgcccacctgccaggacaccggcaccgcgatcatcatgggtaaaaaaggccagcgcgtgtggaccggcggcggcgatgaagccgccctggcgcagggggtgtataacacctatatccaggacaacctgcgctactcgcagaacgcgccgctggatatgtataaagaggttaacactggcaccaacctgccggcgcagatcgatctctatgctaccgatggcgatgagtacaaattcctctgcatcgccaagggcggcggctcggcgaacaaaacctatctgtaccaggaaaccaaagcgctgatcaccccggcgaagctgaaaaattacctcgtcgagaagatgcgcaccctcggtactgccgcctgtccaccgtaccatatcgccttcgtgatcggcggtacctcggcggaagcgacgctgaagaccgtgaagctggcgtccaccaaatactacgatggcctgccgaccgaaggtaacgagcacggccaggcgttccgcgacgtgcaactggagcaggatctgctgctggaggcgcagaaccttggtctcggcgcgcagttcggcggcaaatactttgcccacgatatccgcgtgatccgtctgccgcgtcacggcgcttcctgcccggtagggatgggggtttcctgttccgccgaccgcaacatcaaagccaagattaaccgcgacggcatctggatcgaaaagctggagagcaacccggggaaatatatccctgagcatctgcgccaggccggggaaggcgaagcggtgaaggtaaatcttaaccagccgatgagcgagatcctggcgcagctgtcgcagtatccggtgtccacccgcctgtcgctgagcgggactatcatcgtcgcccgcgatatcgcccacgctaagctgaaggagcttatcgacaacggcgaggcgctgccgcagtacgtcaaagatcacccgatctactacgcaggtccggccaagacgccggacggttacgcctccggctctctggggccgaccactgcaggccgcatggactcttacgttgatctgctgcagtcccatggggcgagcaagatcatgctggcgaaaggcaaccgcagccagcaggtcaccgacgcctgccacaaacacggcggcttctacctcggcagcatcggcggcccggcggcagtgctggcccagcagagcatcaagagcctcgagtgcgtggcctatccggagctgggtatggaggctatctggaaaattgaagtggaggatttcccggcctttatcctcgttgatgataaaggcaatgacttcttccagcagatccagacctcgcagtgcgcccgctgcgtgaagtaa

SEQ ID NO: 219900 - DNA, 1056 bp, Klebsiella pneumoniae
atggcagcaaaaggtttttatctggtacagggagacagaacgacctgcggcggaagaatcactacaggcgcagaagatcacactctgtttgataaacctgttgcccgggagcaggacagcgtcacttgcggaaagcacgcagggctatacaagattgccggtggcatcgacaacgataccattcatggccggcgaatggccggaaccctcgacagctgtagtacttgcccctgtaaggcgaagtttattccatcaatgatgaatgatacttatgagaaaggaggtgaatgcataactactttattttcactcgatgggcttatggcatctttacaggaaccctataagaatcttcatccagaaaataagactgaacgacagtgtactcacacagatggggcgattaaagttgcagaatatatactaagtgaaataaaggcgaatgtcagaagcgatacggcagaaacaatacgatatttaatcgacgaagattttataataaaaagacttactgaatggaataaacttcccttttatgcaaggctggggccgccccctaaagcagatttacttgctgcaatggctatttggtatcagaccgtgaaaacaggttcaatctgggatcataaaccgaagatccgcgattttttttcatccgttgcagtagcacgaccacttcccaggaaaggaaaatcatcaaagtcttattatcataagtttaaacagcatgattatttttatgatgtttggtcaaacatacattatggttatgttggacgtagtgtcggtttttctgaagcaattctcttgaaagggtccacttgggaacaaaacatgacgccaggtgccatgggggatgataccatggatgacattactagcatgaaaatagggtttaatctattttatgaacatgggaaatttgctgagacgttgacggcagataatattctttgcgttttagaaacaacacctggcgcgcaccttcctcactcaagagaaaatcattggtgctggaatacagataatccagaaaaaagtgacgaatcattttga

SEQ ID NO: 219901 - DNA, 1599 bp, Klebsiella pneumoniae
atgagtattttacaaaatttggttgccgccagtcagttggatgaaagcgtactgcgccagcaggcccggtcacgtcaggcgcagtggcagtcctggcttgcgccaatcagtgacgcccaaccaaccggggacgatccgggctatgacgatgattttcagcgtatccgcgatgaggtcaataagatctccggtgtcgataccgaactgatttgccagttggctggacagttactggtaacaacaaaagatatccggattgttacctattactgctgggcccgtttgcaccaggacggggaagctggcttggccgatgggctggagctgctggcaggcttgctgcaacgatatggtatgcagctttatccgcagcgcgaccgtagccgcaaagcagccctcgagtggctggcgggtactcgtatcttagacagtctttcactttttccagaagttgtgcgggaggacgcaaggcgtaccgtcggcgcgctgcttctcattgatgattgtctgacgacagaaccagaaacatcacggccagatctgcaagcactctggggtgctctggagtctcgtttgataaagggcgggggagtcgatgcggtggtgccgcagaacgtcggaaaccgggggctggctcaaaccgcttcacgcatggctgaatacgaagcgccggttctcagtaacatcacctccggtcaggatctgctggcccaggcgcgaaccctgacagcatatctgcgtgttcaacccgatggctggcttgccgcacatcggctaatgaaaagccttcgtcatgacaccttgacaatcatccctgcgcctgatgctgaaggaaaaacacgtatcgagcctcccagagcagatcagcgtgccatgctcaagcggctgtacctgcaacagagctggtcggagatactggaacaggcggacagtaccttctcacgtggcgctaaccacctctggcttgacctgcaatggtatatccatcaggcgctggtgaggtcgggtcaggatgtgctggccgatattataattgccgatctgaaaggattgctgcgccgtctcaccgggcttgaaacattagcttttaacgacggcacaccatttgccgatgaggtcacactgaactggataaatcagagtgtactcgacgatatgtccgtctggcaggatgagccagtatcggctgccagcggcgctgataacgacattctggcccttgaacctgaagcgctcgagaaggctgacactgacggtctcgatgctgcactccactggattcagacgcgcccgggcactgaatccactaaagaaaaatggctgttgcgcctgctgatggcccgcgtggccgaacaaaaggggaagaatgacctcgcgctctatcttctgcgagaactcgacgatgcggcgggatcaatcaccctcacgcagtggatcccagccctgttgttcgagattaaatcgcgacggctcaggctactgcgcatgaaagccacgcgcagcgagagtgaaaagttacggttgcaaccggagatggatcaattgctggcaggtctgattgcgctcgatccagccagtagcgcggtgctttgcggctaa

SEQ ID NO: 219902 - DNA, 1209 bp, Klebsiella pneumoniae
atgccatatacacttaaacatttgccagaacgctaccccagacctaagcctctgaaattttctcgttggcttgttgctctggttgtcatgctttcagtcagtattatcataatgcgtatatttgggcattatgttgaaaatctgtacttctggagattagctttaggttttcctgttgctttgtggagtgtcttgctttcttctcgtctgcttgtttggtctttacaggatagcaaagcaaacgcttttgacaaacagcgagaacagtggattcttcgagaaacccgtaaggcacggcgtgcattacaagtgctgagtgcaacatttattaccggccactcatcagttgctcagaaagataccgctattgctatgcaaaacaacgacagcattattgtttcacaggtcggccgggatggtaatgaaagcgccagaatgagccaaatttcttccagcccgcaggattctatggaattcgtgataatgaatattttttcgcagatgattgcagacattccttttacacaaatccctgataaatgcccactagtaatagtttttgatgtaacaacatcgctgcctttggagaacattcgccattactgggatgaggcatggcaaaagaacaatatcacttttcctgttgaacacgttgaagggagtggtcttagtgtaattgaccgctggttaaatgaacgtattaaagataaagcaatgttattgattgttggcctccagattgatccggttgttacaaacaatactgctgaagcggctgttgctctacttcttggcaaccgcctaacgcaagaggcgcttgaccccctcgcattactacaccggccagatgctgctccctcaggtgaacttagcgaagggatgaggatggccgcctggaacgtcccgctaaaagaaagtatggtgaaaaatttatggctcgctggaatgacaggtgagcaacgtgcagaagcgattggatgtcagaatgcacatcctgcgcagtgcgtaaaagatgaggctgtcatttcactcgatatatccatggggaatgctggagccgctgcaccctggctggctattgctgccgccactgaaatcgcccgacaaacacaatccccgcagatgattatctgcggggataccattcagaaagtgctatggagcacgcttattaccccgatagcttcaagacaggagatggatctgtga

SEQ ID NO: 219903 - DNA, 231 bp, Klebsiella pneumoniae
atggctggggagtggacaaaaaatcaaagtatcctgttaacacatcggcagttttcccaaatgaaaaagtgtgtgtatggaatgtatcttttgcactaccagagtctattagaaaaaaatgtgatgatgatggtgcttatgggtattttattgaatttaagaaagttaatgggaaaacagttctatataactttacctctttgtttgattctcttcccgacggaactttag

SEQ ID NO: 219904 - DNA, 753 bp, Klebsiella pneumoniae
atgcagagcagaaccgtttaccactggcagagccggcgggatgatcgggcgataaccctgcgtatccgggaaatagcggaaacccggatccgctacggttgcccgcgtattcatattcagctgcggcgggaaggctggcctgttaaccacaagaaaacacaccggatttactgtctggaaggcctcaacctgcgcaaaaagcgcccccgcaggcatgtcagtgcagcacatcgtcagcaacgtccggtcctgagcggagtcgatcagtgctggagtatggatttcgtgtcggataacctgtttaacggacgacgtttccgggcgctgactgtagtggataattttagtcgggagtgtgtggcgatccatgccggaaagtcgctgaaaggtgaggatgtggtcggtgtgatggaaaggttgcgggtgctgggcaagcgcctgccggtacgtattcagacagataacggcagcgagtttatctcgaaaagtctggataaatgggcgtatcagcacggtgttacaatggacttctcccgccccggaaaaccaacggataacccgtttattgaatcattgaacggcagtctgcgggatgaatgcctgaacattcactggtttctctcgctggaagatgcgaaggacaaactcgacaactggcgcagggaatataatcatgagagaacgcattcatcattaaatgacatgactccggctgaattcatccgaaatctccggaaagacgaagatctctga

SEQ ID NO: 219905 - DNA, 390 bp, Klebsiella pneumoniae
atgaaaaagacccgctataccgaagaacagatagcatttgcgctgaaacaggccgaaaccggcactcgggtggaggaagtctgcagaaagatgggcatttctgaagccacattttacaactggaagaaaaagtttggcggcatgggcgtgacaaaactgcgccgcctgcgccagcttgaggaagagaatcagcgtctgaaacgtctggtggctgatttaagtctggacaaggtgatgctgcaggaagttatcaaaaaaagttctgaggccggctcagaagcgtcaggcggtgcattttctgcgggaggcttaccgtatcagtgtccgacggggatgcggactgctgatgcagagcagaaccgtttaccactggcagagccggcgggatga

SEQ ID NO: 219906 - DNA, 522 bp, Klebsiella pneumoniae
atgaaaaattttatagctataagtatgttactgttgttgtcattgagagtgatagcaggtgatcccggaggaatatccttacttgtaaaggcattgccttctgcaaatgattataaatatgtccttgatggcttttttagaaattattacggtgtggacaatcctcacactccttcgtgcgatcaaaatgattataccccttatattgataacgtatatttgaatacgctcccaaaaggtattgatgacaatatattaataaaatccataacagatttatcatccagaactcagattgccaaaatattatcatcttactctgatgatcaagtttctggtttcgatggagttcttttttatgaaatgaaagataataagttatttatttatacgttcgactcaaaagcccctgggcatatctttacgaatgagttgaatgttgatggaattattagctataagcttttaggaaggtccatttgccagtctataagatcaaagatactcccttccagtccttaa

SEQ ID NO: 219907 - DNA, 276 bp, Klebsiella pneumoniae
atgaagaaaaaaccaccaaaaataggaaaccctcagaaagtgactgaaaatgcatataactgtattgatacaggtggtttttttatagtttgttttaagtctaaagttctcaaaattatggatgaggacaaaattgggaaatctgatgatgacagcattattttgaaagtaactaaaaatataaatggtgcagataaaggaattgcagaaaggaaaattcctcatctgagccagatcagaatagcttgttttaccctggtggttcaatatatctag

SEQ ID NO: 219908 - DNA, 1494 bp, Klebsiella pneumoniae
atggttgatggagtgaatgctttccatttccagattttctgcgatgatgacaacatcagcaagctaacgggcaggaaaacaggagagctggatatttcgaagaatggccgcaccgatgcggtttatggtgatattcacttttatctgccaccgcagacaaagttttatgacaaggctccagcagataacagcatttctaccaccggactttctgaactatataccagcaatgtgcctctgtatgccagcatgactctggcccaaggcaagtgcacgatggttactcgtcagaaaaatacgcagactgacggaaaatatgatctgctgggtgaaccactggttaatgcagatggtgatgactacgaatacaatctctataaaaccgcgatgcggaattataaggagagcccaagtgccgggtttgaattacttcgctttgggcgagtgatcaacacggaccatgaaacactggtaccggcagacgcaccattatggatgacagtcaattacccgggtggtaaaggagtgatcaaccttgctgattccagtattaaaaagtttagtgacgctgatttccctcactggacgggctggcagatggtagatgacgatagtgatagcaacagccagtgtaattcagctattatcaagaaacttcacgaagttggtgacttcgataaccagtgcgggaagctaatctgtcatttcccgtttgaatgggaaaaaagtacgatcgacatccgtttttcgtggctgaaaacgggaaatgaagagcatgaaccgatgacggaagccgattatgcaaagtttaaatcccatgcggaagcactatgctttgattctggagcgttgagttctgaccggttgtggcattttgagccaaaatcatttattcgacatttcaggaaatgtagttggctcgactctgaagtaattgaaaaagtaatgacggtgaatgctagtaaaaaaaataaaaatgcacttgaaggtattaaaaatattacattagagtactatgcggacataaatacaatcatgcgaaagtataacttatctgatgcaaatagaatttgtcattttttagggcagggtgcagttgaatcaggttatttattgtccatgcaagaaactagccagcaacaaattattgttgatggttttcagcaaggtggtgtgattgttgaagcatcaacatttaatgaaactactaagctaggtcattggtacggagctcttaaagccgagaaggataactatttctccgggaaaaaatacaattcccgtggagggtatatcacaggatcctatagctggattaacggtaactgtggagatgtagatgcacaaaaattcagaggtagagggtttaaaatgctaactggacttaacacatattcaagctactgggtatatcgaggtttgttgtcaaaaaatgagtttgataaatattggtgggatgacccggagtacaagaaaaaaattcagccggtatga

SEQ ID NO: 219909 - DNA, 1233 bp, Klebsiella pneumoniae
atgcctaaatataatatttatacaaagattgaatcgaatgtttcagcagtcgaccttttttacgatctgaatgtttacagaactgatgccagtaataaaaaacatatactactgtcagtggcgcaacaaccagtaacatcaaattatcaaactcagtcccatgaaacgaatgacacagaggatgggttatctgtaatctacataatggaaatgaacttatatcgcaagcacggtggtaagttgttttctgtgctttcctcgcctgcgaaaaagatgtacacacttggtgaaatggcatcagggaaagcatattctaaaaataagcgtgaaaatgtttgttattttgagacaaaggcgcagacaaaaccggttaatgataacggggatgacaatattcatagtgtgcaaatcacttgtattccaaggttttttgtcgcactggagcatccaataggggatccattagacccttttacgaaaaatagtataaaaagtgaacttgatgccagaaaagctgcatccctgttaggtccagaaggggaatattatccaaaccagtattactcgatgttatgtggccctgcagcattttattattgtttaatgatggatagatatgacgtttacgagcaactggtttgggatctatggaatcatggcaaagcaacgctgggatcttttttacttcagccaagcactagcacgatgaaagtgaatgatttattttcaggagcgagtcatcctcgagtttccgcagttgattggattactatggccagcttgcgagattcatctaataatttgttaaaatatgaatcagttggagataaggtatctgcaattaccttgtggggagatattgaaaaatggatgctgaatgcaggtgcgcagaagatatttagtaatataagtttgtaccatagcagcttaagcgatatttgtaaattaaactcattaatgtgtaatgatgtccatatctttagtttgatatctgctggcatgctccaacaaggcgcaaatgttccattcaaagatcactggattgtttgggatggaaagttaaaattagtaaacgggggtagtatcactaacgaaacgagtttagaagagcttgtctcgctgagacttttttcatggggtgaagttaaagataactcgcttcgagtatcattaaaattaggagaatttctaaaccatacttttggggggatggtatttacaaaaatatcatga

SEQ ID NO: 219910 - DNA, 2520 bp, Klebsiella pneumoniae
atgagtagcgtgaaatcgttgttgttcagccacaaccaccacctgctttcggtgaagggatgtgaagccgggcttgatgtgctggccttcgagggcgatgaagccctgagccagccgttccgctaccgtattgaattcaccagcgcagaccatgccatcagcaaagagatgatgctgatgaagtcagcctccctgacgctgcaggcgccggtggctcagggcttcggcatcaatgttcagcaacccgtgcgggtgatccagggtgtggtgacggggtttgaacggctcagtacctccagggatgaaacgcactacgcgctgacgcttcagccgcgcctggcgctgcttaaccgctcgcaccagaacgccatttaccaggaccagtccgttccgcagattgtggaaaaaatcctccgcgagcgccacggcctgcgcggtcaggattttctgttctcgctgacaaaaacgtatccgcgacgcgagcaggtgatgcagtacggcgaggatgacctgcgctttatcacccggctgctgggtgaggtggggatctggtttcgctttaccgccgacacgcggctgcacatcgacgtcgctgagttctgcgacagtcagcagggctatgagaaggggctgacgttgccttcggtcccgccgtcagggcagcagtcggccggggtggacgcggtgtgggagatggcatgccgccaccgcgtcgtggagcagcaggtcagtacccgcgactacaactaccgcgaggcgacggcggacatgaacgcgcaggtggatgtcactcgcggggagaccaccacctttggtgaggcttaccactggggagataactacctgaccgcggggaatgtccatgaccgccatccggcgccggagtccggggcgttttacgcccggcttcgccatgagcgttatctgaacggccagacccggatgcaggccaccaccagctgcccgacgctctgcccgggacaggtgctgaaggtcaccggcggagaggaggtggccggggagtttgctgatggcgtgctcgtcacggcgatgcacagccacgcccggcgcgatgccgactttgcggtggagtttgccggcataccggacagcccggacgtcggctaccggcctgagcccggcgcgcgtccggtgatggccgggacgctgccggcccgcgtgaccagcacccgggaaaacgacacctacgggcatatcgacaaacacggacgctaccgggtgaatatgttgtttgatcgggcgcgctgggaaaccgggttcgagagcctgtgggtccgtcagtcgcggccgtatgccggagacacttacggcctgcacctgccgctgctggcggggacggaggtggcgattggctttgaggatggtaaccccgaccggccgtatatcgcgggcgtgctgcacgactcggcgcacggcgaccacgtcaccattcgcaatgacaaacgtaacgtcctgcgcaccccggccaacaacaaaatccgcctcgacgacgagcgcgggaaagagcatatcaagctctcgacggagtacggcggcaagagccagctgaacctggggcacctggtggacagtgacaggcagccgcgcggcgaaggctttgagctgagaaccgacagctggggagctatccgggcacagaaagggatatttatcagcgcagacggacaggcgcaggctcaggggcaggtgctggatatggagccggcggtcagcaatctggccgaagcccgggagcagatgatgtccatctccggtgacgcgcagaaggcgaccgcgaacccggccgatctccaggcgcaaattaccctgctggagcagcagctgacagacctcaaaaaatcggtactgctggtcagcgcgccggaggggatagcgctgaccagcggggagcacctgcaggtctcagccgggcataacctgattgccacagccggaaagaatgcagacgtcagcgtggtgaaaaatctgttcatcggggtgggcagtgcgctgagcgtgtttgtgcgaaagcttgggatcaggctgatagcgaaccagggaccggtacagatgcaggcgcagaatgacctgatggcgttgcttgcccggaaggaaatcagcattgtcagcacggaagacagtatcgaaattattgcgaaaaaacgggtcacgataaacggcgggggaagttatatcacgctcaatgccagtggcattgaatcagcgacggcaggtgagtacagaacaagggccgggtattacgtcaggcgggaaaaagcgcagcataagcctgacattgcacctttagctaatgcgataaatgacggcagccataatattcgctacctgtgtacagataataatggggtgccgatgatgaatactccttacagggcctttctggctgatggctcggtattagagggtgtcagtgatggcgaggggtatacgaagttgtttacttctgcacagatacaggatgttctgctgcatatgataccggaggccatcaatgcctaa

SEQ ID NO: 219911 - DNA, 1707 bp, Klebsiella pneumoniae
atgagccccgcgcagcagcgtgggctggcgctgtgggccagtctgctgagtgcgctggtgtgcctgctatttttgccggttccccgctggggggcgtggctcattctgctggtcacgctggccctgatcatcgggatctggcgcatcgccagtcgtcgtaccggacgtaacgtcgcatcaaccctggcccctctcccggagggcgcttatcgccagccggtggtcctcgtttgcggcgacctgccgtgtgtctggccgccagcgtcaccggtgcgagtcgtcaaacagggctgctggatccgcgttgaaaagacggaggagctgcagcaggtcgcgcgccaggtattgagccagcggccggaatgggggcctcagctgtcggtgctgctctgcgtctgcccgcagcggcatgcgcaaagcgatgcgctgaccagcgctctgctggccctgcgctggcaactcagccagctgcgccagcagacggggtatgccgtaccgctggcgctgcaggggcaggtgggcagcgtgatgagtcgcgacctgttgtggcaggcggcgataccgggtgaagcggtgaaagtctggcagccctcctgcgccccctgttccgtaccggcctgggtaagcgccggtggggcggccgcgctggagcagcaggtgctgatgaacagcctgatgggctggtctgaacagcacgtccatgccgtgttgacggaagagaataccgacctgccacctctgacccctgcggccgtgctgtggggcctcgggccctcgctgcctggaagtctggcatcgtcggcctggacgacgtggttatcccgacatagcggcctgtcgcgggtagctggctggcagccagatgagagcgacaccggggacgcttcagctttgccggaattcatcctgccgcagttaccggcgggacggggactcacgccacgaggcagggcctggcgcgcggcgctcgcgattttcaccctcgcggctgtcgccgcgctgctcagcagtggctggaacaatcgacaactgctgcagcgcgtgggcgtcgatattgcccgttatgagcggattgcgatggatgattatcgaccaaaagccagcgctgtcagggtgctgcgtgaagatgccgcgctgctcgatagctgggcgcgtaacggcgtcccgctgcgcctgagtctgggcttgtatcacggggagcagattcgcctgccgttgctggaggcgattcgcggttacgtgccgcctccgcctccgcccaggccggtgcagcacgtcgcgccgaacgtcatccgccttgacagcatgtcgctattcgataccgggaaatgggtactgaagcctggttcgacaaagcggctggtcagctcgctgatggacattaaggccaggcccgggtggctgatcgtggtggcgggtcacaccgacagcgtgggtgaggaaaaagccaaccagctattgtcgctgaaacgtgcggaatcggtccgcgactggatgcgcgataccggcgacgtgccggacagctgctttgccgttcagggctatggcgaaagccgaccaattgcaacaaacgatacgccggaaggccgtgcgctgaaccgtcgtgtcgaaatcagtctggtgccgcaggtagacgcctgccggttaccggaccaaccctctgcgtcatcccaggatgatggcgcttcactacacaatggagagtaa

SEQ ID NO: 219912 - DNA, 507 bp, Klebsiella pneumoniae
atgaatattgatgtcgaaacacttgtgaagcaattaggtaaaccttatcaggatatttatgatcaaggtttaattccctacaaaacaaaaccaacgggtactgttagtgatgatatttccaggttgaatatgaggcgagaaggaatatttttatcttttatcaataaccaggaaaaaaatcttgaagaagtgactttgcggttagaagatgaaaataaaatggattggttatttcctaatccgctgccatttggtcttgaacctgtaatgacccagaaatgggtaagggccaaacttggtcatccaatgatttacactgatgcgcagataatcatgactatttatgttggtgtgaaggaattttatactttgccggcccctcatcaatatatcgttgctgcatttacctataacaaagatttttttgtacaaaaagtcacattttactcaattgagcgagccaaagaaatacaagccgcgttagagataaaaaggttgggtgggtaa

SEQ ID NO: 219913 - DNA, 381 bp, Klebsiella pneumoniae; identical to SEQ ID NO: 218202

SEQ ID NO: 219914 - DNA, 1698 bp, Klebsiella pneumoniae
atgcgtgataacgcccgtcgtctgcttacgatactgaccgtcatcctggccctgtggctggtgctgggcttctggccgctgtccatcggcaaccaggtgatcttcagtctgtgcatcctgctggcgggcggcgcggcgctctggcgtcagcgtcgccgggcagtcagccgtcagcgatcggaaatcgtcctgccacccgaggattttcagggggcagtggttctggtctgcggggataccgacggtctgtttcccgggcgttcggcgcacggcgaaacccgtcacggctggtatctacggggagacagcgcggagcaattgccgcggctggcgcagtacctggcggcggcgcgtccggcgctggtatcgcaggtttccgtgctgctggcggtggtaccggagcaccacccctccggggagcatctggcgcagtcgctgcgcgactggcggcggagtatcgttcagtgccgaacctggctaaacggtctgccgccggtgtggagcgtgttctgggtgacgccgccaggcggccaggccgtggaaagccgctggtttaccgtcacgccggagagggctggtctccaggtgcagcagaagggacaagcgccccagtcggttgccgggtggcagcgggagggcagccctgcctcacgcctgcatcagacgctgtggctggagagcattctgtccttggccgaaaacgctctgttccggccattccgcgcccggcaggcggaacttcctccgctgaacctgtgtgccgcgggcatctgcctgacaccggtagcggcggtggcgaataacctctggcaacagcaaatcgccgggatcaccacgctctccccgggcaacgacgcggcgccaggtcctcacccgctgccggatcttcttctgtcgtcactgccgcaccgccacggggtcagccgccggatgcgcgatgccggtcttgccgctggggtgggcttcctctttctggcgctggcgatgctggcttcctttatcaacaaccagcgcctggtgcgcagcgtcggcgatcatctggcggtgtaccaccgcctcagcggcacgccgccgacgccgaagctgcaggcgcagcagcgtctgcgtgccgacagccgcctgctggatgactggttgcgccggggggagccgctgcgttatcggctggggctgtatcagggggggcggctgatccccttcgtggaagccgctatcaatgactgggcgccgcccccgccgccgcgtccggtcattaagcaggttgtgcaggggccgcagacgatccgcctcgatagcatggcgctgttcgataccggcaaatcggcgctgaaaccgggttcgacaaagctgctggtgaactcgctgctgggcattaaggccaaacccggctggctgatcgtggtggcaggccataccgacagcatcggcaacgatagatccaatcgacaactctccctgaagcgtgccgaggcggtccgcgactggatgcgcgataccggcgatgtgccggagagctgttttgcggtgcagggctacggcgcaagccgtcctgtcgccagcaacgagacgccagaggggcgggcgcaaaatcgccgggtggagatcagtctggtcccgcagaaggacgcctgtctgacgccgggcacggccaatacctcaggagcagagactaacggattaaaaagcgaaaccgagtaa

SEQ ID NO: 219915 - DNA, 1269 bp, Klebsiella pneumoniae
atgtctctcaacgacacgaaaatccgcagtatcaagccttctgaaaaatccttcaaagtctccgattcacacggtttatacctcctggtcaatccaggcggctcacgtctttggtatcttaagtatcgaattaacggtaaagaatcccgccttggcttaggcgcttatcccgatgtatccctttccgacgcccggcaacaacgagacggtatccgcaagttgctggcgcagaacattaaccccgctcagcaacgtatagccgaaagagccgcccgctcaccggaaaaggtctttaagacagtggcgctggcgtggcataaaagcaataaaaaatggtcgcagaacaccgccgaccgtctgcttgccagcatgaacaggcatatcttcccggtcatcgggcatctgtccgttacggagcttaaaccccgtcatttcattgacctgctgaaaagcattgagaaaaaaggtctgctggaagtcgcgtcccgcacgcggcagcacctctgtaacatcatgcgtcatgcggttcatcagggattcattgacagcaacccggcggcaaaccttgacggcgtgacagcgccccccgttaagcgccactaccccgccctgccgctggaacgcctgccggaattgctggggcgcattgatggttatcagcagggacgagagttaacccgtcaagcggtccttctgacccttcacctgtttatccgttccagtgaactgcgtttcgcccgatggagcgagtttgatttcaggaactgtatctggaccatccccgctacccgcgaagctcttcccggtgttcgttattccggacgcggagccaaaatgcgcacgccccacattgttccattatcccggcaagccatcgttatcctgaaacaagtagaggaaatctcaggtcatctggaactggtgttccccggtgaccataacccttacaggccaatgtgtgaaaatacagtcaacaaggcactgcgactgatgggctatgacacaaaaatggacatttgcggccatggctttcgggcaatggcatgcagcgccttaatggaatccggactctggtcaaaggatgctgttgaacgccaaatgagtcatcaggaacgcaacagcgtgcggatagcttatatccacaaagctgaacatctggaagcccgcaaagcgatgatgcagtggtggtctgattatctttatacatgccgggaaaactatgttcccccatatatatatagtaaaaatatcagtcatgaagctacctga

SEQ ID NO: 219916 - DNA, 324 bp, Klebsiella pneumoniae; identical to SEQ ID NO: 149288

SEQ ID NO: 219917 - DNA, 618 bp, Klebsiella pneumoniae; identical to SEQ ID NO: 149287

SEQ ID NO: 219918 - DNA, 1998 bp, Klebsiella pneumoniae
atgcttacaggaaaactgacgctggatgccatacctgaggacccgattgtcagggtgacgatcgttgctattctgatacttggtgtggcaattgttgctgccatcacatattacggtaagtggaaatatttatggtccgaatggctgacctccgttgaccataaaaagctcgggatcatgtatatcatcgtcgcgtttgtgatgttactgcgcggcttttccgatgcaatcatgatgcgcagccagcaggtgctggcctcatctggagtggaaggggcagggtatctgccgccctggcactatgatcaaatttttacgggtcacggtgtaatcatgatttttttcgtggcgatgcctttcgttatcggcctgatgaatattgttgtgcctctgcagattggtgcgcgtgatgtggctttccctttcctgaacaacctgagtttctggttaacggtggtaggcgtggtgctggttaatctttgcctgggagtgggggagtttgcgaccaccggctggctggcatatccgccgctttcggagttagcgtacagtcccggtgtcggggtggattactggatatggacactccaactgtcggggatcgggaccacactgaccgggattaactttttcgtcaccatactgaaaatgcgtgcaccgggtatgacgatgtttaagatgccggtgttcacctgggcgtcgttgtgtaccaacgtactgattatcgcctctttccctgtgctgaccgtcacgctgacattgctgacccttgaccgctatctgggcttccatttctttaccaatgatatgggcggcaacatgatgatgtacgtcaacctgatttgggcgtggggccatccggaagtgtatatcctggtgttgccggtcttcgggatctactcggaagtggtggcaactttctctaaaaaacgccttttcggttatacctcactggtctgggcaacggtcgccatcacggtgctctcctttctggtatggctgcatcacttttttaccatgggagccggtgcgaacgtgaatgccttcttcgggatcatgacgatgattattgccatcccgacgggtgtgaaaatcttcaactggttgttcaccatgtatcaggggcgcattcagatgcactcttccatgttatggacaataggctttatcgtcactttctccatagggggaatgaccggggtcctgctggctgttccaggagctgacttcgttctgcacaacagtctgttcctgattgcccacttccataatgtgattatcggcggggtggtgttcggcagtatggctggggtgacctactggttcccgaaagcgacaggtttcaccctgaatgaaaaatggaacaagcgggctttctggttctggatcattggtttttatgtggcctttatgccgctgtatgtactggggttcatggggatgacccgccgtctgagtcagaatattgacccccagttccattccctgctggttgtggccgctggcggtgcagcgctgatcgcctgtgggatcctgtgccaggtcattatgttctgggtgtcagtgcgcgatcgtcacgaaaaccgtgacctgaccggggacccgtggggtggacggacactggaatggtctacctcttccccgccgccgttctataactttgctgaggtgcccgttgtccgtgaacgtgatgcgttctgggaaatgaaggaaaaaggcgacgtgtacaaacagccagcccgctatgaagaaattcatatgccgaaaaacagtggggcggggctgattattggtctgctttgtatcgggtttggcttcggggctatctggcatatctggtggcttgcgggcttgtcattcctcgggattatcctgacgtgggtgattaaaagtttcgatgaagatgtggattattatgtgccagtgcccgagatccaaaaaatcgaggatcagcgttttgcagaaataagcaaagccggtgtgacatatggtaagtga

SEQ ID NO: 219919 - DNA, 927 bp, Klebsiella pneumoniae
atgcgacatcataaatataagaccattgtgaagtgcctgccggtaataacagggacgttattactgagcggatgtcatgccgttttacttgatcccaaagggcaaatcgctattgaacaacgggcgctaatcattacggcattttgtctgatgttagtggtcgttattcctgtggttctgatggcagttgtgtttacctggaaataccgggccacgaataccacggcgaaatatacgcctgactggtcccactccaataaagtggaggcggtggtctggacggtgcccgtcctgattattctgtttctggccgtgctgacatggaagtctacccatgcgctggacccatccaggccactgacctctgcggtgaaacccatcgatatcgaagtcatctccctggactggaaatggttgtttatttatccccaacagggtattgccaccgtcaatcagattgtattcccgataaatacccccttgaatttgcgtattacatccaattccgtgatgaacggcttttttattccggcactcggcagccagatttatgcgatgccgggcatgcagacccggctgcatctgatcgccggtgaaacgggaaccttcaacggaatctcgtccagttacagcggcaggggcttttccggcatgaaatttaaagcgactgccgtaccggataataccgcgtttgaaaagtggatcgctgatgtgaagaaatcaccggatatgctgcttggtccggctgattttgaaaaattggctgagcctgacgaaaaccactcggttgaattcttctctgtcgtcgatccgacgctgttcagatacgtgactaaaaaatttaaagcacacgatcacgataaggagacgggcatgactgggtcagagccggaacaacacctctcacacagagcgcggggaaattaa

SEQ ID NO: 219920 - DNA, 1533 bp, Klebsiella pneumoniae
atgtctggttcagcatttccacctctgtccggattcaaactggtggttgcggcaatcgtgctctcgctcgggaattttatggtggtactcgataccaccattactaacgtcgcgatgcccacaatatccggttacctgggcgtgtcgacaacagaaggaatctggatcatcaccgcctatgcggtggctgaagccatcacggtgccgctgaccggctggttggcgatgcagttcggtcaggtgcgcgtattccttttttctgttgttgcatttgtgattttttctgtctgctgcggtctttcctggtcactaccgagcctggccattttccgtgtgctacaggggcttgccggtggcccgctgatcccgctttcttccacgttactgcttgcagccttcccgaagaaacaggccaacattgccgtggcgctctggggaatgatgacggtagtagcgcctatattcggtccgatactgggtgggcttatctcggataactggagctggcagtgggtattttacatcaatatcggctttggtctgattgtggggtttgggacctggtgggtgctgaaggggaaagaaacacatatcagccgttcccggctggacagcgtggggctgggtctgctcgtcatctttgtggcagcctttcagatcatgctggataaagggcgtgaactggactggttttcctcggatatcatcattgtctgcgccattgtggccgctattgccctgatctcgctgattatctgggagctcaccgctgagcaaccggtgctggatctgagcgtgtttaagtcacgtaactgggtggtatcaaccgtcacgctctgtctgatgttcggtattttcttcgggaatattgtgctgacccccctctggttacagcaatggatggggtacacggcaacctgggccgggtatgcgacgggccccatggggatcctggccgtcctgagctcgcccataattggtcgtctgctgccgaaggtcgatccccgtctgctggtgagctatggcatgggggtgctggcggtctcctttgtgatgcgtgccctgctgacgtcgcaggctgactttatgtcagttgccgttcccatgttcgttctgggggccggagttcccgcctgccttatcacgctcacctcgctgggcgtgtccgaactgccgccggagaaagtggcagccggttccgggctgcagaacttcctgcgtgtcatgtgcatggcggtaggctcttccctgacccagacctactgggaacatatgacaaaatttaaccgggcggagctggtgacggcaatcaatcctgacgtgccagggattgtcagcaacacgctgggcgcgaccggtattccggcagacacgtcagcggccctgttttcgagaatgatcgatagtcaggccatcatgctggcaacgaacgatttctatcagtcggctaccgttctgatgctggggtccataggcattatctggctaatcaaaaaaccgaaagggccgcttcagaagatgtcgggccattaa

SEQ ID NO: 219921 - DNA, 1200 bp, Klebsiella pneumoniae
atgactgaagataaagataaaaacggcccacaggatatggacagggctctggataacacgaatgcaaaaccggatagcggtgataaaaaaaagcatcgccgtaaattattcgctttgtttggtggcgtcctgattcttatcgccatcggttatgccatctggctgattttctttgccggtaaatccgtctcaacggataacgcctataccgctgccgaagtcgcagacgtcacgccgcttgtcggcggaccggtgaagaaagtaaatgtggtcaacacgcagcttgtgcatgccggtgatgtactggtcgtgcttgatgatacggacgccagaattgcggtgtcacaggctgaagctgagcttggcagcgcccggcggaaggtgatgcagattatggccaatgacaccgctctgggcggacagcttgattcgcgtgaagcaggtattcagagcgccgaacatgatgtggcgagggcacgggcccggtttgataaggccacccttgatgagcgacgtcgccggaatctggtgaaagccggggccgtatctgagcaggattttacggatgcgcagacagaattacgggaggcaacggccgcgctgggagaagcggaagccagtctgaaagctgctcgcgctggcagtgtcgaagcaaaaggatcccggcaggcgaacgaggccctgtttctaaacagtaccgttgaaactaaccccattgtggtggcggccagaacccgtctcgatcaggcccgtataaacctggcgcgtatggttatccgggccccggtggatggagtggtaacacagcgctcagtggatatcgggcagcatgttcaggccggaaaccggctgatgcgggttgtgcccatcgaggatatttatgttgatgcgaatttcaaggaaggtcagctcagcgacgtcagaccgggccagaaggtagagctgacttcagacctgtacggcagcggtgttgtttatcacggcgtggttcagggatttgacggcggctccggttccgcgctttcactgataccggcgcagaatgccacgggtaactggattaaggtcgtgcagcgactgccggtgcgcgttcgtctggagcgggaagaactgcgtaaaaatcctctgcgcatcgggctgtccatggaagttacggtggacctgacatcgaatgccaaagatgaccacacggagaaataa

SEQ ID NO: 219922 - DNA, 1275 bp, Klebsiella pneumoniae
atggccttcggcgatacgcagcttaaccagctgatgagtgaagccaccgcgcattcaccttctctggcacaggcagaagcccgggtgcgtgaagccacggccagaaccggtgtcgcccgttcccggttatacccgtcaatggacgccagcgcgtccattgataaagagaagctcagctacaactacatctaccctaaaacagccgtgccgcacggatggaatgatatggggcgggccagcctcaactttagctgggaactggatttctggggtaaaaaccaggatgcgctgcgtgccgcgacatccgaagccagcgccgctgaggcagatgccgccgccgcgaaactgatgctgacgacgatgctcgcggacgcttatatccgtctgcagtaccagtatgacagtcgtgatattgcggcccgacagctgcgtaaccggacggataccgtcaggctggtgcagttacgccatgctcagggactcgattccagagtctccgtggaagaaagcggtgcccggctggatgccgccagagcggcgctggctgaagccgatgagcaaatcaaattaacccaaaacggcatcgcggctttactgggccgggggccggacagagggctggatatcctcagaccccggttgcagatgcgccgccctgtcggattacctgatgcgctgaacgcaaacctgctcggacgcaatccggaagtggtggccgcacggtggcgggttgaagccgccgccagcaatatcggtgttgccagagcgcagttttacccgaacgtgaacctgatggccttcgtcggataccagtcactggggctgaataacctgttcagctcgggctctgatatcgggagcgtcgggcctgccatcagcttacccctttttgaaggcgggcgtttacgcgctaactataaaggtgcgagagcggaatatgaatatgcggtggcgtcgtataacgaggcgctgacacaggcattacgtgaaacagctgatgttacacggagccttgctgctctggtgggcaggtcagaagcaaccgcatctgctttgtcccacagcgaggaagcttatcagctggcaaaagcccggtatcagggtgggctggccgattatcaggaagttctcatttctgaagatgcgttactccaggctgagctggcgaatacagccatgcattcccggggttatgtcttggatgtgtcactcgtcaaagcccttgggggcggatttgaatccagttcaacatttgatgcgcaggtgaaaccgtaa

SEQ ID NO: 219923 - DNA, 720 bp, Klebsiella pneumoniae
atggtaagatcaagctttattccggataaggaagtgcagatgtcggtatcaacaaagacctcaattgacactagaagaaaaaataaaatactttctaatgatatagttagtaacttacctgaaaaagcacaacgcgtgcttgaaggagcaaaagctatttttctggaaagaggctatgcagcagcatcaacagatatgatccaacaggctgctggggtctcaaaatcaaccgtatatgcatattatccgaataaagaagcattatttacagcggtgattgagatagaatgcgagcgttttcttcaaaaagtacataaaattaaaatttcgggaaaagatatttatgataaattatttaaaatagcccgaacgtatctggatattgtgctttctgaaaatggcctcgccctctaccgtgttgtagcttctgaagcaccgcgttttcctgaattaggtagacgtttctatttagcaggtccagaaaagataaataacattgttgcagaaatactacaacaagctgaatctaaaggagaaatttcgttaggtggtattgggcgaaatgcagttgcttccttattcgtgaatatggtacgcggtgagcctcaaatacagtgcttaatgcatccaaaatcttccacttctgctgcacagcgtgatcaatgggcaaaggatgcggtcaatgcctttttattagcctttcgtaaaggatacttataa

SEQ ID NO: 219924 - DNA, 927 bp, Klebsiella pneumoniae
atgttgaaaagcagcgagatcataaacggttcgcttccgaaacctgactgggtaaccatacaagaagccgttagcataattaatacagagagcaacgaaagaatcaaagagagtgatatttaccgttatgcattatataataaaattaatctcgccatatactttcaatctccaattattctgcgaaaaataaaatatgcatttcaaaaagtaaaaatgcatccagctagagggacattgattcatcgtttatgtctgctagaaaaaaatagctttattaatggatgggactcaattttcagtactgagggcagatacgtccactccacacaaaatattattgatacatcacttattggatttgaatgtattttgataaagcaatttctcgcatgctcattgaatataccattaccaattattgggaaaaacacggtaaattatggcatcactgttacaatgtccaatgaagtttttcagctgtttgaaaaaacaacctggaagtgtagaattgatcatcaaataaaaaacctaccaacagatctggcatttgatattatggagagaatttcttcagagggaacgataaatcaaaatacaaagcaagaatatttccccctctataatttgcctcaggattcctgctttgttattcgttactcagagattgagaaactaattagcacccaggttacagagaaatccctcccctcttcaaccagaatatccacgcccttgtcaaggttattttggctcgcttgtaggcacaatgatgttatcagcccattaataaaacaaccctataaattattgacaatttttgaagaatgggcggcagctgatggcatcactgaccgtctaagcggtgatactttaaaaacagcactagagcgtggttcccctccttcctcatccttattaaattga

SEQ ID NO: 219925 - DNA, 186 bp, Klebsiella pneumoniae
atgacatcacatcagttattacgcttaaaaaaggttgaagaaaaaaccggcttgaaacgttcacaaatctatctgtatatgaaagagggtacatttcctcgttcaataaaaatcggcccagccagtgtggcctggctggaatcagaaattgacgaatggatcaatattaaattgtcccggcgctaa

SEQ ID NO: 219926 - DNA, 588 bp, Klebsiella pneumoniae
atgatcccttcactaaattacgccgtgctcaccaatgccctgcaggcgcttaatgaaggcaatattcgtcactgtgaagaactcggtttcacatttgacgaaatgaatgccctcagccagctctcgccagatgcactctttacgctgagccgagcagccgcgccttttatcgcggtctcgctacgccacgatgttctgcaccagttgctggcccattctggtcaggaagaacagcgccgacaactgattgaccgggccatacgactgggtggctccatcgcactgctgaaccactatttcggtctcacctccaatgaagtctgccttcgccgtcggttgctgggtgtcagcgtgccgtatggccgaacccctgagccggatgaaaagacagatgtggctatctggctgcaatggcagcagcgcagggtagaaaaccttgaatcgcccgatgcactgatcaccatgatgcaggtgacggaaatcctgcagccagaggccgaagcgctgtcactcaccacggtctggaaacgtatcgcactgtgcgaacagggagccgctactggcaggaggactctccatgccggatga

SEQ ID NO: 219927 - DNA, 210 bp, Klebsiella pneumoniae
atgccggatgagatcgaccgcgatcaggaatttaatgaacagcgactggaagagatgattgagcaaaaccgttttaagccgggttcaacaccatcattatttcactgtcgtatatgtggtaaacctattcctgaaaaacgacggcagaccctgccgggcataaccacctgtacaaaatgtcaggaacaacttgagcatcgcagacgctaa

SEQ ID NO: 219928 - DNA, 222 bp, Klebsiella pneumoniae
atgcgaaaacccctatatcacgtctttatcactcaggaaagtcagcccgatgcacagggcgagaaaaacacgtactggacccgggttggtgtggccttcgcacataacggtaagcctggcctgaatatcgtgctgatccccggtattgcggtttccggcaggctggtactgctcgaaccgagagaagagagtgacatttcacagaatgccgcagccgtttaa

SEQ ID NO: 219929 - DNA, 645 bp, Klebsiella pneumoniae
atgctttccaccgcagcctttctggcgctggcgacgcagtgcgccaccagtgttcacccgtccacggcgcttgatgtggcacgggtcgaatccggttttcacccttacgccattgctgaaatcgtgccgggcggtaaaggtgtgatttcacattttcccacgagcctgccggaggcgatccacctcaccagacagctggctgcacaaggccgacgctattcggtcggactgatgcaaatcaccagcaccaatttccgccattacggcgtcacggccagcgacctgcttaacccttgcatcaacctgtcggtatatgagcgcattttcgccgactgctaccggcgcggcagaacgctgaaacgggcgctcagttgttactactccggcaactttgaaaccggacagcgaccggaatccacctttaaccagaccagctacgtgcaacgcattggctatgtcgtcccgtccacgcgggaagaccggcagcgtgaccctgatcggaacgcacagccgtctgtccgttatcccgccgttgtgctgcgcggcgagcctgccggtgccactgtgccggtcctgacttccctgcattatcccggtgccgtcattcgcggcgctacccccgttatctctgatgaggagaaatga

SEQ ID NO: 219930 - DNA, 273 bp, Klebsiella pneumoniae
atgcgtaaacgccgttactccgctgttgcttccgtgctgctgtctgccccggtgctggcggcggacagtggttttaacaaggccaatgaaacactgagcaatacctcgaccggcctgctgggactggccgcagtcaccatcacactggcgactatgtgggtgggctacaaggtgctgttcgacggcaagagcctgcatgacatgcgtaacatcatcatcggcgcgatcctgattgtcggcgcgtccggcttcggtgcctactgggcgtcataa

SEQ ID NO: 219931 - DNA, 2748 bp, Klebsiella pneumoniae
atggctacgctgaataaagcactgacgcggcctgccgccattatgggtattcctctggtgccgttcgttctcgtcagcggggccatcgtcctgctggcagtctatgccagctattacctggcgattctgctcattcctgcctgggcggaaatgaaaaataaaacccgaaaggacattcattatttcagtctgctctggctggcgtttaaaacccgtggacggcttttcaccaatacccattttggcgcgaatgccctgctggcaaaccagtacgataacgttgatgtctcggagtttattcagaaaatgaaattaagcgagcgtattacgctggataaatatattccgtattcctcccatattcacccctacgtcatcagaaaccgtcaccgtgatttggttgccacctgggagctgggcggcacagtctttgaatgtgaagacgaacatcacctgaccctgatggctacgcacctgaataacgttattcgttcgtatgagggtctgccggtaacattctatattcaccggctacgcgaaaaataccatgatgcttttgaagcctgttcgggtattcccttttccgatgacgtgacccggcggtattaccagccggtaaaagaaaaaccgttctggcggcaccggctgtttttcaccgtctgctacgcgccgttctctcagattgagaagaaaaccatgaaagcgcagtcgcacggtaaacgccaggcagcactggatgacgcgctcaaaatcatgctggaataccgcgaagcactgggatcttcattatcccgctatatggcaacgccgctggggatatatgaagaaaacgggcgggtgtattcctcacaactggcgttcttccatcgtctgcttaccggtcagtggcagaaggtggccgtaacgcgctcaccattttatgaaacgctcagtacgccagacgtctttttcaccaccgacaccggtgaatgccagacggtcagcggttcccgtttcttccgcaacctggagattaaggattattccccggaaacccataccggtatgctggatgcgctgctgtacgccgaaagcgagtatgttctgacgcagtcctttacctgcatggcacgggatgaggcgcagaatcatatccgtctggcggaaaaacggcttaactccacggacgacgacgcgacttcccagcgcgaagagctgattgtcctgcgcgacctgctccagtccggacatgtgtcgtgcggtaaattccacttttccctgctgatctcctcagacaatgccggacaggtggtgaaggacactaatgttctggcccagcccttcgccgatcttggtattatgacgacgctctccaccctgtcactgcccgccgcgtatctggcgcaactgccgggcgtgtatacgctgcgaccccgactggtggccgtcagcagccagaattttgccgatatagcctgcctgcataacttccatccccacaaacgcagcggtaatccgtggggggaatccatcgccatcctcacatctcccggcggtggcgggtattacctgaacctgcacgacagccaggccgggcgggatgacaccggtgagaaaacgccggggaatacggcgattatcgggaaaaccggatccggcaaaaccctgctgatgaccattatgcaacaactgatgcagaagtaccgtaacccggcgtcgtttgcgccttctgccaccatcaaacggctgaccacggtgtatttcgataaggaccgggcagcggagatggcgatccgccaggcgggcgggcgttatttccgcatccataccggcgagcccaccggcttcaacccgtttgcgctggagccaacccgccggaacatcagtttcatcaaacggctggtacgcatgctgtgccgccgcaacggtaagccgctcgatccgcgcgatgaggagcggatcagtgccgccgtggacaccatcatgctggactatccgccggagtaccgccggtacgggatcacccggctgctggaagtgctgccggagccgccgaccacagatgcccgcaccaacgggctgcgtattcgcctgaaacagtgggcgcaggggggcgagttcggctgggtgtttgataacgaggccgatactttcaccatcaacgatgtcgataactttggtatcgacggcaccgaatttctggatgatgacgatattcgcggccccgtgaccttttacctgctgtaccgtgtgaccagtcttctggatggtcgccgcctggtgatgtttatggatgagttctggcgctggctggccgatgtcgaattttcccgcttctccctcaatatgctgaaagtcatccgaaagctgaacggtatcttcgttccggcaacacagtcaccggatgaaatcgtcagacaccccatcgccccggcgattattgagcagtgcggtacccagattttcctcgccaatccgaaagcaagctatgcggattacgtggagaaaatgaaagtgccggacagcgtttatgagacggtcagaaaccttgatccgggcgagcattatatggtcatcctgaaaacacctttgcaggccggagaaactcgcccgtttgtggcaatggcgaaaatggatctttccggactgggtaaactcacccggcttctcagcggcagtgaggacaacctgaaaatattcgatgccatttatcaggacggtatgcgacctgatgaatggaaagacactttccttgagcgggcaatctga

SEQ ID NO: 219932 - DNA, 729 bp, Klebsiella pneumoniae
atgcgtacccgggatcatcttctggcattattgttatttttctcgacgcaggcattcagcgccggaataccggttttcgatgccgtgcagaataccgaatccattaatcagtggatgcagaaactacagcaatgggaggatacggttacccattataaaagtgaacttgatgcgtataaaaagcaactggctaccgcaaccggtgtgcggaatattcagggttttctcagcgatgccagaagcctgaaaaccgatattgataatctccgtaagagcggtatttcactggatgaactgctgaccacgcagaacagttcatattctgctgaactgcaaaacctttacagtaaatacaaatcgttcagcgtatgcagcccggaacaggaaggaataaaatctcaggctctggccgacagttgcaaacagataatcctcaatcaggcaatggcgattgagaataccaccgacgttgaaaacaggatcaacagcacactcagcgatatatcagacttatccgatcgtatatcgaatgcacaggactcgaaagagtctcaggatctggctaacaccatcgcggcgaaaagcgtacagttaaatgcgctgacgaatcagtgggagatgtctgtcagacaggctgaacagcgaacgacattgctggaacagcaaagacagaaagcctttgaacagcagcagctaacggcacctgttgctgaccttaataatttataa

SEQ ID NO: 219933 - DNA, 276 bp, Klebsiella pneumoniae; identical to SEQ ID NO: 190939

SEQ ID NO: 219934 - DNA, 1035 bp, Klebsiella pneumoniae
atgtccggtggtatttttgttggtatggacaaaaacatcatggatggactgaatgccgtactggaaggtcagtcttccgcttacggtacgatgatcagcgtcatcattgtcagctctttcaccttatttattctctatcgcggctatcagacactggctggcaaactccggaccccggttgaagatgtcgtctgggatgtggggcgaatgttgctgatcaccacctttgcgttaaaccgggatggctggctggatatggcagtagcggctatccagggacttaaagacggtgtcagcggcgatgataacgtctgggcgctgctcgatactgtctgggaaaaggcacagacactggggcagacgctgttcagtatggacacctcgacttacgtcaaactgaatggtggctttgccgaagtgctggtatggggcggcgcgatcattctgttactggcggccacctttgtgaacctgctcgctgaaattaccatcctgttaatgacgaccaccgcgccgctctttattttctgcctgctgtacggttttcttaagccgatgtttgataactggctgaaaacgattttcgcggcaatattgacgatcatgttttccgccttatccatccgtatcgccatcaattacctgaataaaatccttgacgcagcgacccggacatccaatatcagcaacatggtgacgctggcggcgcagtgcctgctggccgggattgcggcgggtgtggtggtctggttctccgcgaagctcgccagcgcactcagcggggccgccgtacaggcggtgctgcagggggcagccatgagtggtctgagcggactggcgaataaatccgccgacctcgccgggccggggataaagggcggtgcccgcctggctgcgaaaggcggcatggccgtcgtcgctgcggcgaccggcaggctcaccggcgcaggcgcgggtaaaaccgtgagcgcctggcagaaacgcgccgccgccatcgaaagcatgaaacgcctgaaccagcagcgtcatcgttaa

SEQ ID NO: 219935 - DNA, 141 bp, Klebsiella pneumoniae
atgaaattcagcatcttccttctgatgctgtgcgcgctcaccggctgcgcacggcatcagggcgaccttccgccggtatccggcgaacccgagccggtgaattcccccgccatcattcaggagctgactcaccatgtctga

SEQ ID NO: 219936 - DNA, 684 bp, Klebsiella pneumoniae
atgtctgatattcagaacgttattaatgtctcccgctcttttgaatccatcctgctggaaaaggaagagcgttcccgaaaaaccgcctggcgggtggccgctgccggactgattctggccgcaatggcagttgcggccattattattctgctgccgctgaaaactaccgacactgaattatggtcagtggataaacagaccgggcgctatgaatatatgacccgcgtgaaggagcgggatatttcgtctgaaaaggcactggcgcattcactggcagcacactatgtcagactccgcgagggatataattatttctccctccagcgtgattatgacgacgtgcagttatttaacagcgacagcgtgaaccgggactatctggacgggtttaacggcgaccaggcaccggacgtgatttttaataaggcggaatatgttgttgatatcgccattatatccaatgtgcatgcgcctgccaccgggccggataatctggcaaccctgcgtatcaagcgcactatccgccgtattgctgataattccgtgaaaacggatgtatggaatatccgcctcacataccgctacgtcccgcatcggcaactgaccgacagccagcgcgaagtaaacccgctgggctttatcgtcaccagctaccagcgcgacaaagagctgaggggggaatga

SEQ ID NO: 219937 - DNA, 891 bp, Klebsiella pneumoniae
atgatgctgaaacataccctgctcttcacgggtttactggcgtcatgcgtggcatggagcgcggcgacaccacgcggcagcgcgtatgacagccggatgcagaacgtcacgtacaacagccagaacgccacggtcgtcagtacccgccccggctacgtcaccatgctggtgtttgatgacaatgaaaccgttatcgatgcgcaggcgggctttcccaaaggctggaccgtgacgaaaagcgataaccgggtgggtgtcagcccgaatcccatcgcccagccggtcacggatgccagcggcaacaccgtcagccaggtctttctgccgacggcaaaagactggaaaaccaacctgttcgtggtgacatcaaagcgcgattacagcctggaactgaacgtgctggataaagactcgcccgcccaggcctttgttatccgctaccgctatcccgacgaactgcggaaaaagtcagccgccgccagtgccacccgccagcaacaacagcaggaagcgctggaccggcagcggatagcggcggcattctggcaggccaccacgccgcgcaactggcgctatacaaaacgggtggcagccggttccgccgccatcgccccggactttacctgggatgatggtcgttttgtgtatatcggtttttcccccacgaaaaccctgccttccgttttccgggtggtgaacggccaggagcaggcagtcacgcccggaacggttaaacggggcaactacaccattatggcggttccggcatcgccgcaactggttctgcgctacgggagctcggtggtggggatcgaaaacgacggattcgggcgcatcccgctgaccaacagtgacaccgtttcaccctccgttatgctggaggaaaaatga

SEQ ID NO: 219938 - DNA, 1317 bp, Klebsiella pneumoniae
atgaccgacaaacatttcccggatgaaccggaaaaaaccaccgcagaacgggaagcggaagcccgtgaacgcgcccgcgcggcaatggcatatcaggagccggagcagaaaacgccgcccggccagccggaagtgacccgtttccgtaaggcttccggtcgccgcacgctgatcgtcagcctgctgagtctggtcctggtcatcgcgctggcatccggtggcgatcgttttctcagcgccctgaaaaggggcgatgagaaggaaactgacacagcaccgccgccctacatcggcgcggtgcggcaggagcgtaaaaatctgggtatggacagtaacccgtttggcctgttcgggcagcgcaaacagcaaagcgcagacccggccagtcagaccgtcactactggaccagccctgccagcggaaccgcccgccctgaacaaggcggcagcgctggcaggcgggcagaacagcggcagtacaacggctggcggcaatgcccacacgtcccgtagcgaaccgcgcaacagcgcgggaacgtcggacagcccgccagcctccacggcgtacacatcctgtcagtcggtactgatcagaggggcggatggccgcctgcgctgcccggatcccgccgcaccggaaaccgcgtcggataaatctgacagcgactatccgggcgtcgcccgtgtcaccggtgtcagacggctgggccttgatcccgatctctatatcccggtagaccgctatattccgtgttcgatgatgcggcgcttcgtgtccgatgtcggtggccatatatcctgcctgattggggaggatgtctggagcgccagtaatcatgtgaagctgatcccgaccggaacagtcgcccgtggcgtctaccgtaccggggcactgcaacacgggcgcagccggatgtttgtgctgtggacggagctgcgcacgccggagcccggcagcctgcaaatcccgctcaccgatacgcagaccaccggcccgctcggtgaggcggggatcgcaggctggatcgacagccatttctgggagcgtttcggcaacgccctgatgctgagtaccgtgcaggacgtggcggcagcggcatcagatgccgcgccgggtaaagaccgcaataccgactataccgaaaacacccgcgccgccacggcggaaatggcgaaaacgacgctggaaaacagcatcagtatcccgcccacgatgtacctgaaccagggcgatgtgatcggcatcatgaccggcacggatattgatttttcctctgtttataaactaaggctgaaaaagaaatggtatgagcgctga

SEQ ID NO: 219939 - DNA, 1020 bp, Klebsiella pneumoniae
atgagcgctgaaaacctgtcactggattttatgaaaagccggctgtttggtgattttcttgctcaggatggcctgacagaaattgctgttaaccgaccgggtgagctgcatacaaaaattcggggaaaatggcaaaaacaggcctcccccatcacgttgcgtcagtgtcatgcctttgccagagcgctggcgtcctggcatgacgataatattgacgatacatcacccatcctttctgcaacattagggtccggcgaacgtattcaggcgattattcccccggcctgtgaacgtaatacggtgtccattacgctgcgcaaaccctcgtttgagcagaaagcacatcagtcatggattgatgctggattttatcagcgcgtggccggtcaggaaaaaacggaaagccaggataatgcactggtccggttatatcacagcggggatattccccgctttatggaaaaggcggtggaatacggcaaaacgatttttattgtgggtgaaaccggcacaggtaaaaccacctatatgaaaacgctactgcattatattccgctgcatctccggctggtaacgattgaggataatcccgaaatccgtttttatcaccacggcaattatgttcatcttttttacccggcggatgccggggataacgccattgtcacgccaggcaggctgatccgtgctaattatcgtatgaaccctgaccggatattactggcggaaattcgtggacgggaagcgtgggacgcgctgaaaattatcggctccgggcatgaggggttaatcacctccctgcatgcgggcagcccggaagaatgtattgaagggattattgaccgctgctatgaaaaccccgactgccggaacattcctttcgatgtgctgttacgcaaggtacttaaaagcattgatgtcatcatcagtattgatatacacggcgatgtgcgccggatgtgtgatatttactttaagccagttcatttaaatagcatgaaagagacattcagaaaataa

SEQ ID NO: 219940 - DNA, 1860 bp, Klebsiella pneumoniae
atgattttaaataagcttgccgcttcactgtcaccgatagtgaacgggatgctggcgctactcgcttttgtgcaacagcaacaactgatactggcgttattagcggggctgacgatgccgttttttgcatcaatgaaaagcgatgaacgacagaaagccccgttatggaaaaagctgattattgctttttccctgctgtgttttctctccggcacaatggccccggtcgttatcggcttttttcagtggctgtataaaatcagactcaccagtgataattcagcactggcatggtcagtacggattgctttcactgtaaccgggattatttttcatattatgcttcgccgggtattcacgccggaactggacaggataaagaaacgccttgttaaaaaaaccgccctcgaacgggaacttcgcaccgatgtccgcaccgtaaaatccctgctgccggaaactctgcattataatccgctggattatatcgacctgaataaaggcatttttactggcatgggtagggaaaatgaaccgatgtatcgcccgttaaaagactggcagaaacaacacgcggatattatcggtaccaccggagccggtaaaggggttgccgctggcattttgctttatcaaagcattctggccggtgaaggtgtgtttgtcatggaccccaaggatgatgaatgggcaccgcatctttaccgcaaagcctgcgaggatgcaggcaagccttttgctttgattgacctgcggaaacagcaataccagttaaacctgattgaagatatcacaccagatgaactggaagaactgtttgttgcagggttcagcctggcggaaaaaggacaggaatcggacttctatcgtattgatgaccgaaaagccgcgcgtatggccgcgcaatttgtcagtgataacccatcggcaacaatccgggatgtttataacggtgattacgttcagggtattgccgaaaaaatcaaagcgttctttgggaaaattgaagagctggcattactcaatgccattaattcaccggaaggcttttcacttaaacacatatttgatgagggcggctgctgttatgttgtcggttccatgcgaaacagcaaaattattaccgcccagcgcatgctgctggttcgcctttaccagctggcagaaaagcgcgatcgagtaacagacgtcccccgccccattgctgtttatctttccgaactgaaataccatttatccaggccagcgctggaaggtttaggcgcggcgcgggataaaggcgtacacattattatggaccaccagtccatagccgatttaaaagactgcccggcagatttgaaaggtgacgccgttgtcggtacggtcgttgaaaatgccaaattcaagctggtttaccgggttatggacccggatacggcggaatgggtagcgagaatgtcaggcactattctggtggacgacgaactccgcaaggctaaaacggataatatgctgacggaaaccatcgacaatgagcgaaccattcgccaggcagaacgtttttttattgacagcaatatgatcctgaacctgcccgattttgtcagctttatctttacgacaaaaacgctaccttctgcttcactgatctcaccgataaaggtcagaaagcgtcagctaaaaatcttttcggtttcccctgatattgccgccgcggtagcccccgtgaagatcatgctggattttggcgaggataataaaccagccatgccggatgcgatgacaactcacccggctcttttctttgacgaaagggaagtaagaccggcaacgccaaaatctgatgatgaaaaagacctgtccccgctggatttttaa

SEQ ID NO: 219941 - DNA, 747 bp, Klebsiella pneumoniae
atgctgatttcgtcatttaacgagcgccagacgcgtaacaacgaaaaaataaaacaactgctgaacttcctgaaagaagaaacctacagtgattttaaaacgctgatgctgttatttggtttccgggaccacaaatcgctttattcgctgctggcaaaaacggagcgaatggggttaatccagaagcatgtgcttgaatcacggacaatgaagatttcattatgggggatcaccagcgacgggctggcggtagtgttaaccccggatgatgaaatctttcctgcgcggtttgaaccatcaaaaatcaccggctggacgctggagcaccatcttgataatcaggccgccaggcttattctggagaagaaaggcgcttcgggatggattaacggcgaccgggccagttttctcagccagtatcaggtaaaacatcgcccggacgggttactgaccctgcctgacggtaacgttattgccattgaaaccgagcgccgcctgaaaacccgggcccgttatcagtcgatcatggcaagccacctgctggcccgtacccgcaagcagtggatttacgttttttatgttgtgcccgatccacagaagaagcgtgcgcttgaactgctgtttgacagcaccaggcatgtcatcatcaaccatcagcacgtcccgctggaagaacgccaccgtcgggtgttttgcatttatacccttgatgaactgaaacacctgtcattaggcagctatacgtaa

SEQ ID NO: 219942 - DNA, 948 bp, Klebsiella pneumoniae
atgacgatttccctgcataccacccggacaagcgcccctaacgccgcagcggcgaccagcgtatccccgctggacccgtcaggctcctcaaaaacgaaattttctaaaaccagaaccgacatttaccagactgttactgacaacatcattgcagcgctggaagccggtgtaaaaccgtggtcctgcccgtggcagcgtgtagatggcatgtctggtctgccttccaattacgtgactggcgcggcttatagtggcatgaatatcatgttgctgtggtgcagcgcatctaaacagggtttcagcgattcccgctggatgacttacaaacaggcacaggcagcaggtggacaggttcgcaaggctgaacatggcacaacagccattttctatacgaccctggaaaaggaaaacgacgccggagaagttgaacatatcccgatgctgaaaaccttcaccgtgtttaacgttcagcaaatcgacggcctggccctgacaactgaaacagtcagcccggaaacaacctttgacccgttgccgcaggctgaaaacctgttcaggaagagcggcgcaaacatcatcgagaaaggacaaaatgcctttttccaaccctcaactgatgaagtatggctaccggagcgccatctgttttcagatgcagctaatttctatgctactggcctgcatgagctggttcactggagcgggggtaaaaaacgcctgaaccgtgaaatgaaagggaagtttggcagtgcgggttatgcagaggaagaactggtggcggagttgggaagtgcctttctgatggcggatctggggattgagggagaggtacagcatgaaagctatattgcgtcctggctgaaagcgctgaaaaacgacaagcgttatattttcaaagcggccagcgccgcctctaaagcacatcgttacctgatggataaactctga

SEQ ID NO: 219943 - DNA, 1059 bp, Klebsiella pneumoniae
atgagggttatagattttttttgtggatgtggcggagctagtaaaggctttgaactggcagggtttgaggttgctctcggcattgattttgatgaaaatgcagctagtagctataaagcgaacttccccaacacaaagttcattcgggatgacatcaggaacgtcaaagtaaaagacgttgctaagctagtaccagatctgaagagttctgagctggtcttttgtgcctgtgccccatgtcaaccattttcttctcaaaacaaaattcgtaactcaagtgataaacgaagaacgttattgggtgagaccaaaagatttataagagcatttcgaccagcttttatttttattgaaaatgtacccggcattcaaagcatcaaaatagaagaaaatggaccattctctgattttttgaattttattagtagattcggttaccagtatgattataaggttgtctccagtgaattttatggagtacctcagcaaagaaaacgacttgttgtgttagcaagactaaatgacaaaccaatattcccttcttactcgcatggagttgataatattcctttcgctacagtaagagactatattggaagtctgcctaaattacaagcaggtgagtcagatagtaatgacctactacatgcggcggctgttatccaacccatcaacattaagagactacagcatacaccagaaggtggtgacagaagagattggcctgatgaactatggttgaattgccacagaaaatatgatggccacacggacgtctatggtcggatgagctgggataagccatgtaaaactttgactacaaaatgtacgagcatttccaacggtcgttttgggcatccggatacaactcaaaaccgtgcaatcactttcagagaagcagcttgtcttcaaacattcccaaaagattttcattttcttggtagtaatgtatctaaatcaaaacaaattgggaatgcagtacctgtattgttggcacagcgagttgctgaatcaatattagagcaggcaaaatctaatagggaggatgggggttgttaa

SEQ ID NO: 219944 - DNA, 816 bp, Klebsiella pneumoniae
atgctgggtagacaacagattgcagggattccaactgcattaagcgagttgttcaaaaatgcccatgatgcatatgctgacaacgtagaagtagattatataagaaaaaaaaacctacttatactgcgagataacggcttgggaatgagccgagatgattttgaagaaagatggctaacaattggcacagatagtaaattcattgatgaagacagtattggtgcaccgactacagacgacaaaaagaagaaacgccctattatgggtgaaaaaggaattggacgtttagcaattgcggcaattggacctcaggtattagtaattacacgctctcgcaaaaatgatatattaggaaatatcgttgtgtcttttgtaaattggacgttattttccttaccaaagcttaatttagaagatattgacatacctattattgagttaaattatgatgagtctttgaataaaaagcatatcgataacttaatttcacaagcattgaaaaatgttaataacttaacggggaagatttctcaaaataaaattgaacagcttattaaacaaatagaatactttgattatgatcctgagttctggtccatcgctcttgataatttagataaacaacttaatctaatcccttcacgccctcacttaaatttagaaaatgaaagtgggacacattttattatagcgcctgttgatgatatattatctgacgaagttgaaggatttgataccaagaaacgtactgatcaagcctctcgtttagggaaggtgcgaataagcaggtcatttcttcccaagctgactcgctga

SEQ ID NO: 219945 - DNA, 2538 bp, Klebsiella pneumoniae
atggataatcttggttatgtcaaagggacgttgttcgctgggttattgattacagtaaaccagggttgggcagctaatgctacagcgccagtcaaagtcagtaactatattattccttcggtatttgctaacgcgttatatcagggcatgtcggtccctgtttttattcgttatgaaggcgataatagtacccaacgcagtcagcaaaaaatcgctgatgccatcctgaccatcaaggataatgagtttcgcctgaatcagatcgcgctcagcgatctgccggagcgaaccgaactatcacctcagattaaatcattgctcaacgagatgcaggataaaagcatcggcgacggtcagcgcgtttatatcaacaaagacgcctcactttcacttgatacgcgttccttttatctcgagctgacggttaaccgggcagccatgcaggccgctattttgccgcgtaccaatatgcttggagaatctaccgcccagaatctctcgagcgtgctgaattactcgatggggagctattacaacaaatatgagaataccgataacgccagcagctatctgacgctggataatacctggtcgctgcgggaacaccatctgaactttaacggttctctttacgggataggtaccggcaaccaggagagtaaactgtatcgctcgatgtacgaacgtgactatcagggacgccgcctggcaatgggtatggtggatacatggaatctgcaatcgattgccagcatgagcgccctgaattccagccgtatttacggcgtcagctatggcaataaaagcagttcacaaacgcaggacaatacgcttgctctggtgcctgtcacggtgtttctcccggccgctggtgaagtacacgtctatcgtgacggcaaactgctcagcattcaaaacttctcgatgggtagctacgagctcgatacgtcgcgtctgccatttggcatctacaacgttgatatccaggtggtagttaacgggcgcgtggtcagcagccggacggcgaacatcaataaaacgttcgcccgtaaatcgagcgtgaccggcgatctctcgtggcaaaccttcggcggcagcctcgaatacaacaagatggactatcgccacaaatacaacatcaattatggcacaaagaatacatggatagccgggatcgccgcggcaaccagccaaccctggctttccggcgtcaatctgaaaaccacgctctacggttttgacactaacggcgtcaatgaaacggaagcgaacgttattttcaacgacgcgttcagctttaaccagcaggggctgctcgctaccgacggcagctggcagagtacctccacctttaatatgagtttacccgacggttacggcaacctgtggggggcgcgccagtacagttccatcggtaacgcgctcccgatgcagcagaatgactacgtgaccatcggcgccaatgccaatctgcgcaaaatcgcgccgttcctcggtacgctgagcgtcagccgaaccaataacaaatataccggcagcacctataccaacgtcgattacgaccaatcgctgttagccaatcgctatgcgaccgtgtcgctgcgcgccggtattcagaactatcaatacaacaaccatgaaaatctgcgtgataagtacgtcaatattgatgtctctatccccttctctacctggctcagcaccggcgtgtccagccagaatggaaacatgctggcgaacgccacgctgcgcaaaagctttgacgacagcgctattacccaggtgggagcatcggtttcgaagcagattaaacagaataaaaatgacgatagccgctatcgttccgacgattacgccgccaatggttacgtcagctatgacaccaaatataacgctggcaccgtctccgttagccgctcatcgcagcacagttcaaactacagcctgagctcgcagggcagcctggcctggacggaaaaaaatgtttatgtcggcaaaggcactcaaaccgcaggcctggtggtgaataccaatttcagcggcaaggggaggatgatggcgcagatcaacggccagaactacccgctgaccggcaaaagcaacttcatcagtcttccgccctacgccgaatacaaggtggagctgatgaacgacaaaaattcggaagacagcgtcgacatcgttaacggccggcggaacaaagtcgtgctctatcccggcaacgtcagcgtgattaacccggaagtcaaacagctcgtcaccgtatttggccgggtgaaagatcgccgcggtggttactacgccaacgccgatatacataaccacattggtaaaacacgcaccgacgaactcggcgagttcgccatggacgttgataagcgctatccggtgattaccctggtcgataaattcggcggtatttgcgaagtggatttggatctgcgagaagcgaaaggtgccgtatgggtcggtgagatcccttgtgagatccaacaacaaacggcatcagtgactggagatattaagaatgtctattaa

SEQ ID NO: 219946 - DNA, 678 bp, Klebsiella pneumoniae
atgaaactgaatccattattcctctctctctttttattcaccgtgacgccctcctcccatgcgattaatgtcggagacgtcacctcaataatggggccggatgcctcgactctggcaaaagaaatcattaataccaccgatacggcgcgttacgttagcgtcagcgtggagcgtatctcatcgcctatggccggtggcacggttatcccgatggcgaacagatcggaattattatcaacacccgccagcctgatattacccggcaatgctaaagagaactttcgttttttttacaaaggacctcaggataaccaggaacgttactaccgaatatcctggaccgatgaaccggtaaccgagtttgaagccagtaaaaagaaaaaacagggcgaggcaacgacttcagccattattggtaccattctggtggtcgcgccgcgagaagaaagatttgactatcgtcgcgataatgacacggtaaccaatactggtaacgcttcattccgtgtgatctcctacggtccctgtcgtgataaagcgaaggatgagggacaaggctgccgtgagcgatattatgtcatgcctggtgtcagcgtaaaaataaagcataccgatctcaccaacaaaaaaacgcgaattggaatatggcacggtgagcaatatataaatgtaaactga

SEQ ID NO: 219947 - DNA, 165 bp, Klebsiella pneumoniae
atgtgcggttgttttgtcgggtggcgcttcgcttacccgacctacggtccgtgcggcctgccgttaattcattcaccattgttgctgaaactgccggtgctggcggcctcaacatcgctgagacgttcccggaaggccggggcagcccgcatggatgcgggctga

SEQ ID NO: 219948 - DNA, 837 bp, Klebsiella pneumoniae
atgactgacatccgactgaccgtccagggactcgccgtcgactatcccaccgcccgggtggtggacaacgtcagcttcaccctcggcaacgagcggctggcgctggtgggcgaatccggctccggcaaatcgatgaccgcccgggcgctgatgggcctggtgcgcaagcccggggtggtgagcgctgaacggctggaggtgctggggcgcgatgtgctgaccctcagcgcccgcggctggcgcgcgctgcgcggcaacgatatcgccatggtgctgcaggacccgcgctatgcgctgaatccggtgcagaccattcagacgcagttggaggaggcgttaaccctccatcagcgtctgagccgccgcgcgcgcgctgaggcggtcaaagacgccatcgccgccgtcggtctggatctgccggtcctcagccgctatcccggcgaactctccggcgggatgggacagcgggtgatgatcgccctcgcgctgctcaataacccgaaggtgctgatagccgacgagccgacctcggccctcgacgcccgcctgcgcaaccagatcctcgagctgctggtggagcagagcgcgcagcggcagatggccatgttactgatcagccacgatctaccgctggtagccgcgcattgcgatcgcgtgctggtgatgtaccaggggagacaggtcgacgagatgccggcgcgggcgctgccgagcgcgacgcactcttacacccacaccctgtggacctgccggccaaatgcccacacctacggccagatgctgccgaccctcgacagaacccaggactttacggagacaacccatggcgatcgttaa

SEQ ID NO: 219949 - DNA, 510 bp, Klebsiella pneumoniae
  misc_feature (466)..(488): n is a, c, g, or t
atgcggcactttatccgcggcggccagccgggtggacagagattgtttatcggcgttaagggctttgacctgatcgagggcagcctgctgcgtcttttccgcagcggcgaggcgaatagtcagcgactgcttatcggcgttaagggccttaacctgctcgaggacggcctgtttctctttttccgcggcggccagccgggtcgccagcggctgtttgtcagcgttaagcgctttagcctggtcaagagcggcctgctgcgtcttttccgcagcggcgaggcgaatagtcagcgactgtttatcggcgttaagggccttaacctgctcgaggacggcctgtttctctttttccgcggcggccagccgggtcgccagcggctgtttgtcagcgttaagcgctttagcctggtcaagagcggcctgctgcgccttctccgcagcggcgaggcgaatagtcagcgactgnnnnnnnnnnnnnnnnnnnnnnntccgcagcggcgaggcgaatag

SEQ ID NO: 219950 - DNA, 1626 bp, Klebsiella pneumoniae
atgaaattatcttttcaatataagctgtttatttctctggtcgcttttttctcggtcctttttatcgcgctgggcatttattattattttgacgccagccgccagctttatcaggagatgagtgcccgggccaaaatacaggccgaagagatagccctgatgccgaatttacgtcaacaggtcagccggcacgatccacaggcgattcaggcgtttatgcagcaaatcgccgcccatagcgacgccagctttatcgtcatcggcgaccgtcagggagttcatctgtttcattccgtccatccggagtgggtcggcacccgactggtcggcggcgacaaccaggcggtactggaaggaaaatccatcaccaccattcgcaaaggcggcctcggggtctcgctgcgcagcaaaacgcccatcgttgatgacgcagggcgtgtgatcggtattgtctccgtcggctacctcaccagctatctcgacagcattactctgactaaagtgatcaatatttttatcgccgccgtcctgctgctcatcgccctgtttatcttctcctggtactttacccgcagcatcaagaagcagattttttcgctcgagccgcgggaaattggcctgctggttcgccagcaaaaggcgatgatggagtcgatctttgagggggtgatcgtcatcgatcgccagcggcgtattgaggtgataaaccatgccgcccgcagcctgctggggctcagccagcccgcccgccagctgcgcggtcagtcgatcgacagcgtcatttcgccgcagccctttttcgccagcggcgacatgctcgaacgcgatacccacgatgagctgtgccgcttcaaccagttgaccgtgctcgccagtcgggtgcgcattatgctggagaataccctgcagggctgggtgatcacattccgtgaccgcaatgaaatcaatgccctcaccgcccagctgagccaggtgaagcgctatgtcgacaatctgcgcatcatgcgccacgagcagctcaaccggatgactaccctctccggcctgctgcatatgggccattatgacgaagcgatccgctatattcaggcccagtcggaacatgctcaggagctactggattttatctcctcgcacttccactcgccgacgctatgcggtctgctgctcggcaaagccacccgcgctcgcgaaaaaggcgtggcgctgagcttcgacccggcctgccgcatcgaccgccccctgccgtcgctgatggaatccgagctgatctccatcatcggcaacctgctggataacgccatcgaagccacgcagcgtgccgagctgccgcatgagccggttgaagtcctgatccagctcaacgcccgggagttgattatcgaagtggccgaccgcggcgtcggcatccgccccgatatccgcgagcgcatttttgaacgcggcgtcaccaccaaaacccgtggcgatcacggcattggtctgtatcttattgaacattatgtcactcaggcgggcggcaccatcgaagtcgccgataacgcgccgcggggaacgatcttcaccctatttatcccggccgacgcgcacgcctgtccgcaaccggaggtccacgatgcatcatga

SEQ ID NO: 219951 - DNA, 243 bp, Klebsiella pneumoniae
gtggatagcggcagcaaggggattgaagagaaaacgctggcgctggtgcagggactgtttagcggccgggaagcgcactgtttttccgttgatgaagtggtcagcgccgccgggcttagcaaaaccaccgcccgtcgctatctggagcacggcgttgagaccggttttctggaagtggagatgctgtacggaaaaattggccatccgcggcggctgtatcgccgcgctaaggtcaaaagttaa

SEQ ID NO: 219952 - DNA, 330 bp, Klebsiella pneumoniae
atgcaaaacatatcattacgcccgacaagggcggctcagccctgcctgttacccattgaaacctggcaacggctgctgactcatctgttatcgcagcactatggcctgacgctgaatgacacaccgttcagtaatgaaaccaccatacgagaacatattgatgctggagtatcgctcagcgatgcggtgaactttcttgtcgaaaaatacgggcttgtccgtatcgatcggaaaggattttcgtggcaagagcagaccccgtatctttccgtaatggatattttgcgagtaaggcgctctaccggcttgctaaaaactaacgtgaaataa

SEQ ID NO: 219953 - DNA, 240 bp, Klebsiella pneumoniae
atgaataaacctcattgccttcaggcatttgaacaaccgctggcatctcttccgcacacgcttcgccagcttatccttgaacgtattcaaaatctgacccactacgagccggtgattgtcatcatgggtaaaagcggtgccggcaagtcctcattctgtaatgaactcttccagggcgaggtctctcctgtcagcgatgtgaacgcctgtatctatcctgagcagactgagccgcagtaa

SEQ ID NO: 219954 - DNA, 240 bp, Klebsiella pneumoniae
atggccacacgcctgatgagccgaggtacgagctatacttacggtgatcgcgtctccacgcagcacaacagtttcaataaagagacaattgacgactttattggcattgatgtggcgaaagctaagtgtgatgcgattaatcctgcccagttccctgagcacgaagaggccctgcgaacgctgcttagatatctcgaaaagtggctcggattgagagaaaaagacatttttgattcatag

SEQ ID NO: 219955 - DNA, 540 bp, Klebsiella pneumoniae
atgagatccggttcagcaatcagctcatcgccgtctgctgcgcggatccttatcaaccgcaaccattcagctttcattgccacaacggtgttgagatctaacgctggctcgaaggccccactctcaccctcattacgatcggtgggatcgctgagatggatcaggattgaggtaacggatagcgcttcagttttacggagtgcttcaagagctaaaccgcctcgaacatcctcaggaattcgcttcaagtaccaacttgtcgctctccatgctgctacatatgacgagtcgaaagagccgctgttcgtgcctgagaggttttcagcaattctgaacattcctgggagcagaacagcagcgttctcggttggtaatcggtcgacggattcatcgagcctcgcaacgagcgaattcagcagcccgtcagcttcgacggctgcgatttcagcaaagagctcgtcctctgtcgctgttgcattgagaaaatcaacgaaacggcgctcagatatttctccaaccgacgtctgcagttcaaagtaa

SEQ ID NO: 219956 - DNA, 525 bp, Klebsiella pneumoniae
atgcgatgcacgaacgatgccgggacagctggtaaatcaaaactagcctgcacgatcttttcaaggaaggctcggccgtcattgtcagcaaccggatctagtgctcgttctactatactgggctggaacagtagcacaaaaacaatattaggtagattagcattcgcctttacctgccgaagcaacatcctgatctgctcaggttcgagccggtcaatgtcgtcgacgaagacaaccagcggccggtcaagttcgcgaagacgagcctcaagcgttgtgcgtaccttgtctagagactcgccgctatggtctcgcccgagatacgatagcacgcgtccgagaagaggtactccgaccgagagaaaggcaagaacagccgcgacctttgcaactgtcggaaggtcatatccaatagccgacgcgatcgctataaccgaagcatttgttagcaccgtcgagattagaaggcctgaactcccagcctctttaagaggcttactgaccccggtaaggatcgctccgtag

SEQ ID NO: 219957 - DNA, 240 bp, Klebsiella pneumoniae
atgaatcacgatactttaaagaacaccatcgcaacgcttgaaaagctgcgcgatgctcactgcagccaactcgatgctggcgctctggcagagctggaagatgtattgcgtcagttacgcatacatcgtgacagcccggtaagaagcggtttccggtttgacgatatcgtcttccgggcactgcgtattattgacgttgtggttcgtctgatcacaaacattgatgattggatgaaataa

SEQ ID NO: 219958 - DNA, 291 bp, Klebsiella pneumoniae
atgaatatcggacaggctatcaagttatgccgaaccagaaggggaatatcacagacggatttagctcggaaggcagaatgttctgtttcttatctttccatgcttgaaaacaataagcgagacccgacgctttcaaccattaacagcattgcttctgctctcaacattcctgtcagcattattttctttattgcagcagaggccggtgatcttaacggtattgataaaggactccagggagaacttgcgcgtactgcgttggagctgcttaatgattcacactccgtctga

SEQ ID NO: 219959 - DNA, 972 bp, Klebsiella pneumoniae
atgattcacactccgtctgactcacccttctatagcaaacgacgcatcagcagtatgacagcgctatcaaaagcgctgaacatctctcctatcgaactacttaatctagccaatcgtgcagaccatatgtaccgactcgccagcactatcactaagcctgacggaagtacgcgccagacttgggatgcatatgcaccactaaaaaaagtacaacgcaatatcaggcgcaatattcttgattacgttgtgtatccagcatatttgacaggtagtctgaaaggttgtgattttaaaaccaatgcaactttacacactggttctacgattgttattaatgaagatatcacacgtttttttccgtcaacttcagacacaatagtgcataacatatggcaacatttctttggcttcgataatgaagtagctgaatgtttgaccaagctgacgacccgacaaggggagctacctcagggggccatcactagttcatttctggctaacctggcgttttggaaagatgaaccggcactgcaagccagttttcgggcaagagggataatttattcccgctacgttgatgatatcgccgtctcgtctgtaaactttcttgataaaccggctaaaacgaatgtgatagcctcggtttatggcatgctttccaggcacggttaccagcccaaacgagctaaacacgaaatcagaacatctgggcaacggatggaagttaccaagctttcggtgaattcaaaacctggtctctcttccgctaagcaaagtcagatacgatcggcagtccatcatttggagcaagctattcttaggggcgaaattatcgagttcgataagggcccttatgcacaaacattgggactagttcatttattggccagattacatcctggtaaagcaaaaaaacttaaacagcgcttgcttgctcttaagagtgcggtgcgcatgaatatgtatacatag

SEQ ID NO: 219960 - DNA, 3852 bp, Klebsiella pneumoniae
gtggcaatctttgacattgaaaaggatgaattacttcggctctccgatactcagctagaagagctgatagctcggctagcagaagctgaagtggcaatacatggtcatagccctgcatgtgtaaattggtctggctcaattacagcccctgacggaggaattgatatccatgttcaggttccagttgatcaactgaaagcaggctttcttataaggcctaatacggtctttcaggcaaagaaacataaaatgccaaaggctacaattgagaaggaaatgggcaccggcaacgcgctttcacccataatctcagaacaagccagaaagcaaggtagctacataattgtcagcctgggtgatgattgctcgccgacaggaaaggcggatcgtctcaaagcgatgagggatgcagtaaaagatgatcctaacaaaagcaatcttcacctcgatttctacgaccgttccaaactcattcaatggctgcgtcaacatccatcagtaatgctgtgggtaaaagggaagcttgggcaaggatattccggctggcaaccttacggagcctggagtaatccgccccaaggtgttacagacactttaatctcagccccgggggtaactattactttaccgtcgggaaacgggcaaaaactcaaaattgatgaagcaattagcccaatgcgagaacttatccgttcgacgaataaggcggttcgtattacaggattatctggtgtcgggaagactcggatcgttcaggcgctctttgatgaaactgttggaacagatgcgcttgaccggacagtagctatttatgttgatactggctctgagccagtaccgtcggctacagcaatgcttgataagctgatcgctgaggaccgacgagcaattatgatccttgataattgtccatcagaactccatgcttcgcttgccagcaaggtatcagccgcaggaaaagaagtaagcctcatcacaatcgagtacgacattagggatgacaaaccacagacaactgaggtcatctatattgagacagatggtccagaggtggcagagcaacttcttatccgtcgcttcccttctattggtcagaataatgcccgtcgtattgctgagtttgcagatgggaatgcaagagttgctttggctatagctgagagagggcaggaaggcgagagtttggctctactttctgatgcgcagttgtttaatcgcttgtttgaacagcgtaatcatcctgatggtaatttacgggagcaagctgaaatattgtcactggtgtattcattctcggtatctagtccagatgctgctaccgacgaactggaaatattaggggcgctctttgggtattccagaacccagttatttaaagccgttacgaagctgatggaacgtcatatcgttcagaaaagatctcactggagagctatcttacctcatgccattgctaacagattggcagcatccgcactcgacagtattcccgtcgatcaacttagggcgacttttgaagctccgggttgtgagcgtttattaatgtctttttcgcatcgcttgggattgttgcatgacaattctgttgcgaaagaaattgtagaagcctggcttcagcctaaagggatgttaggaagaatagccgagttaaatgatatttcgttacgaatacttgggtatatcggaccggtcgcacctgaagcattgctcaacagaattgaggtcgtactctcatcatctgatttcaaaggtatggaaccgggctacaatccgcagcgacgtagtattctgcatcttttgcaattgatggcatacgaaccgaacgcctttgaacgatgtggcaggtttctcattcgaatggctgagaacgaagctgataataatgacttggattctgctcgaaacatggtcccaaggtttttccaggcgtatctgtctggtactcatgcatccctaagccagcgtattgctttaatgaacgaatgcattgcatcaagcattattacgcgtagatctttgggcttaaagatgctgtcaactgccctggatggcccaccgtggtcagggtttggagttggtgagtttggagctcgaccaagagactatggatacgaacccaactatgacgaacttgtcgaatggcgcagcgcctttattgacgtcattatcgaattagcggcatccggagatcctgagcttgaaaggcctgcaagatcaattctggctgacaaattcaggggaatttggtttcaagaagcaatgcgagacaaactcgtcgatgctgcccgtacattaaatgctttaagtccttggggggaaggttggaaagccgttcgttcaacggtctattttgactataccaagcgtagcgatggagatgatgttgatccgttgccggataatcttgctgccttagagaaggagttggagcccattgcgttaattccaacaatacagacatacgtgttgagtacaaatcatgattattgggcactggatgcagattttgatcatgaggacaccaatagatataccgcagcccgaaaacgccttgaagacaaagcatttcaattaggacaggactttgccttatcaaatcatgcgcttgaagagttaggagcagatctgttctctatcggtggaatgccttatcgtgctgtctttggtcgaggtcttgctcgaggggcacatgatctacgtattggctggcagcgacttgttgaacaaattgaaaaacagccagatgctaacaaagactttggagttattgggggattcatcgaagaagttgactctgtcgatccatcattggcacagaagtttctcgaccaatgtgcgcagcatcctgaacttcgacaggtattggttggcttgcatccttggaggaagtttacagtaaatgatttggatcgctgcatgaagcatttggatgatccagacattagccctttcatgtatgagcctattctgtggcgagaacaatatgctaatttgccgagaattcgtcttcttgagcttgctgagcaactcctgagtaaagcaagcggagacaatgtcattttgcatgcgctctccatgagactgcatggtaaagacaaatcggcagatacgcttggcgcagactttcggttgattggtcttgctgctgcaatccagcgggttaaaagcagcgacaaaggccaaagagggacaattgatttttacatggagcgagttatcgatgctgcattgcgtttcgatggtaatgaggcaaaaaaaattgagtggttggacgcaattttcaatgtcattgatgaacactatggatattttttgggattcgagaagactatagcaacaactgttgcgttaatgcctgaatcatttctcaattgcatttttgaatgcaccgaggaacagcagcagggaagacacttctttattcgacgtggcggtttacgccgttctcctcttgctgatgtaagtactagcgtcttgattgaatggtgccgtgccagaaatgatcccagtgtttgggctgccattgctgttggtgtgaccctctggtcaaagaatgatgaacagaatgtactaaccctacacgaaactgctatagaactattagaggcctctcctgagccattagctgtgctggagtcttttgctgagcgaatcactccatcctcctggactggtagcctagcgaacataatgcaagctagatcaagtgccatcggtgcgttgagtaaacacgagcgtccagatatcgccgaggcagccaaaacagtttgtgaaaaaatgagtcagtgggtcgaacaccaaaaagaacgtgaacaaagggaagatagtgaaagggaacagcggttcgaataa

SEQ ID NO: 219961 - DNA, 1059 bp, Klebsiella pneumoniae
ttgaatctgagcaaagatggctatccacaggggccgttgttacgtgcagtatgggagtgttgtgatgagctctatgagaaactaggtcgagctccctcccgacaggaattttataacgaaattgacaaacgcgaaccacatcgcataggtattagtacacattctcgccaatggggagagtggatgcgccatcataatttctcaacatatgtagctagtgtgccgggtattatccctgaagaaatgcactctccacaatatctccgtgtatggtatgccgtgacacaactcggttcagcctctgccgctgatattgtcaagtggatccataatagcaacgcccctttgaaagagaccgagattcgcattcagctggatgcattaactgttaatagcaattcccgacatcgatatcttggtagtcgtactaacgctcgtagtgacttgggtaacccatgcgacttgttatttcgtacgggaaacctacgaaatacacgatatgaactatatacccaggaactgcacggtacatgggacattggcgaagatggtagaacaccgattcagatagctgttccaagaccatgtgatcgactagtggttgaggcaagagatgaactattcactgaattacctgtggatgaaggtgactttcgtctgaaggctctacgtgaagttattgttcgggaagggcaacccgtatttagacgaaagctcattgaagcttatgagggcaaatgtgcggttacaggttgttcgatccaggtgttgcttgaggctgcccatatcaccccctatgcaggtgcctggcatacccgagctcagcatggactgttactcaaaacagacattcatactctttttgaccgtggtttgctctggattgataccgactttaaaataaggatatcagaacggctagccgggacagaatatgcagagttgaatggtcgatgcctaatgttaccaaaagataaaaaaaactggccattaacaactcatttgataaatcatcggcaatattggaatgaaaaacataatgacgatgaacgcacatag

SEQ ID NO: 219962 - DNA, 1023 bp, Klebsiella pneumoniae
atggggacatggggtacaacaagcgcatcattcaagtcgttctttagcgatagaatcggctataaatccgggcttgcgcttgacaataatgaaataattcaactcttagataaaaatgatccactacttgatatattcaccaatcataaagaggagctgtgtcgaatcagaacaaaccacattgaagacactttccagaaagttttgtatcgtctaggcgttacgccatatgatttcattggtcatgccccaacattactcgatatagaatttaggaatgaaccgagtaagcacaagctattcaaacaggtattaagctatcttggagagtcgcactttgataaaggaaaacactcaatattcatggatttcgatgaggaccaatactataaaaatattcaagtgcaatttggaagtgaagcactgaatattgcacgacggctcgttgagttgacgaaagacagtgaagaggctagtccctgggactggctctcagcaagagtttttgattgggattcaccacttgagcttagagacttatttgagagtgaatcattagacgcgatgtacggaacctttatagatcaaagatacttgaactatttatcaattaatactgacaagctcgatttaatgcattggcggcaattcgaagctctaactgccgagtactttgaacgaaaaggatacagagttgatataggaagtggaagaaatgatgggggcattgacgtccgagtttggcaccctaatgcaaataccttcgactctcctgttcagcttattcaatgcaaacgaacaaagtcaaaaattgacaaagttttggtgaaatctctctgggcagatgtaattgatgaaaacgctaaaggtggaatcattgtaacaacagcatcgttttctcctggtgccgtagccgtctgtaaagctagaaaatatcccgttcgagaggcaaatagagaaacagtcattcaatggctaaatgaattacgcaaaattggtagaggtgtattcatgggagattag

SEQ ID NO: 219963 - DNA, 603 bp, Klebsiella pneumoniae
atgaacacgtcaccgtggaacaaagaccgtatcatcggccaaaaaagaccacttcagatatctcatatctgggggatccgaatccggcttgaactggaaggtaaaacgcacgatttagctctgttcaatatggccctggacagtaagcttcggggctgtgatctggtcaaactcaaagtatcggatgtggcatatggtagttcggtttcaagcagagcaacggtgttgcaacagaaaaccggtagccctgtgcaattcgagataaccaaagggacaagagaagctgttgctgcattgataaagcttagcaatttgcacagtaaagacttcttgtttcggtctcgggtcggaactaaccagcacatttcaacccggcaatacaaccgaatctttcatgggtgggtagaaaagcttggtctcgaagattctctttacagcacacattccatgagaagaacaaaaccttacctgatctacaagaaaaccaagaatctccgggtgatccaacttctgttgggtcataagaaactggaaagcacagtccgttatctgggcattgaagtcaatgatgcgttagaggtctctgaatcgattgaagtctaa

SEQ ID NO: 219964 - DNA, 870 bp, Klebsiella pneumoniae
atgaagtttgaatttggtgatttatacagatttatcgtttcattgggtattttcttgataagttctgcatttgtttttccatggttatttttaaaggaaaaactggaattaaataccgatgctatatgtaagatatcaagtcttgattgtgatgttgcgcatacaaaaaaagaaataatttactatattcttaaatcaatatcggttatttcccctgtgttttttatagtagggatattggttgttatttttggtgtggcaaaatggagaaagaatcaattactattggatgagcaaataaaaattgaacacgatttgaaacaagccagtctaagacctgctactcaggatgagatcattgacaaacttgagagtgagattatagagtcagaacctgaagtaagttgcgtgaataacttttcggagaaggtaagtgtttgggaacgtatggaggataaaattgccgaaaaattaacaaacactaatgtaggcaatggactggaaagaaatgttatcatagcaaatcatgaagtggactttattattaaaggtaacctcttcagaagggattgtttgatagaagtaaaatacatacgcaaaggatttaattttggttggttaaaagaggtatttctaaagcatctttataaaaaaagcttatatgaacagttcagaggaaaaaaagcaatcgctcttgtattaatattaatagaggacggggttttcagtaaagataaatatgaagaattgcagacaagattgattcaatcaaatgtttatcatgataaaaatgacaggataaaaatcttcccagtgagtcaatttatgaacattgaagcatccaaaatggattcagtattgtttggctaa

SEQ ID NO: 219965 - DNA, 1173 bp, Klebsiella pneumoniae
atgggtaagaatagtcaaagtagacgcgtgaataagaaaaagcagaaaaacgaaaaaattagagtattaactgcaaagaaaaataaaatgatgtacacaaaacctgatatattctttgatgagtcgggtaataccggcggaaatttacttgattcaacacaaccttttttcaccttaagttcaagtagcattaataaagcagatgcacttaaagcattagagctaactggaagcaagtcaccagcagaagctcactttaaaactcttagacgtagaaaatcaggccaagatggaattattagactgcttgaaagcaagtacgtcaatgaagaaaatgtcaaaatctttttggtcgataaaaagtatatgttaacaacaaaaattgttgatattttaattgaaacatggtgttacaatcgagggttggatctttataaaaatgggcagaatattgctctatctaatgtttattatttctgttttcctgctttctgtggagaggagaaaacagataaaatgtatcaaaaatttatgagcatgattagaaatcaaacccctgaatctattgatgaattttacacgtcagttgatgagctaaaggcatgttcaagcgacaaaaggtttatagaaacaataaatagaattagcattaccaaaaatgaaattgatgacattctagaagatgttgaaaaaaatacactagatccttccataccctctctcttcaagcactgtatagaatggggtaaattatatcccaacggtttttatattaagcatgacgattccaaagcgattacagaacaacaagatatttttaataaatttatggatatgtcaaaaatcacggaggtatatggatatgatagaaggacttttgagctaccaattaaagctcgctcgttgacattccattcatcgcaagaatatcctcaactacaaatcgcagatatagtagcaagtgcggcagcttattatgttaattgtttaaaacgaaatgaattagatgattatctctttaaagagctcaaaagaattaaaatagataactattttaaagatatggttatatggcctacaacatatgttacgcctcaggaactaggaacagtctataccggtggactaaatccggcgaatggagttgcagagtatctttctcaatatcaatag

SEQ ID NO: 219966 - DNA, 270 bp, Klebsiella pneumoniae
atggaagaactgaagaaatccatcggcctgagatgtactttctgccactccgtgctgtttgcattgccacacgaaaaatacgcccctcttcatggctcgctgattgtgtgcgcaaactgtgggcgcgaaaatgatgtgacttctctcatctttgttgttaaggctaaagcgatgaatatcgcagaagactatgcagacaagctcattgataaatttcaaaaggatttaaagaaagcattcaaaggaagtaagtgcctaaaatttaaataa

SEQ ID NO: 219967 - DNA, 543 bp, Klebsiella pneumoniae
atggatccggataaaattcaaaacgatattgatgctttattgatttttatgaatgacgatatggaacgaatcgggggaactataaaggatacgtattggggttttgctcaggggcaaggggatcgtaatgcagtagaaaagttacatggttggtcagaagaaaatttatttgtaattataaatagatgccattcacgcggcttgttgaaaaacatgtcaaccagatacgatcgtgtggtattaacagaagaaggacagagccgcgctctgtcggttaagcacggtaagaaccgctcttatgaacttgcaaggagcagttataccattggcgctatccatgttgccgggtcagctcaggtaggcgatggtaatacgcaaaatatttacaatgtctttcaggaaataatagacaaaattgaccgtgctgaagcgacttcagaagaaaaggcagaagctaagtcacttttaacaaagttcttggagcatccactcacttcttctgtggtaggaggtgttgctggttctcttaccggacttttataa

SEQ ID NO: 219968 - DNA, 870 bp, Klebsiella pneumoniae
atgagaaattctcaagatgccaagaccaacactttcttgttagttgctgagcgttggtggaatgtgaagaaagccagcgaaacagaggactatgccgacgatatctggcgttcacttgagagagatgttttcccagcaatcggtgatatcagtgtcactgagattaaggctcatactttggttaaagcagtacagccggttcaggccagaggtgcattagagactgttcgccgcctttgtcagcgtattcacgaagtcatgatttatgcgcagaatacagggctgattgatgctattcccagtgtaaacattggaaaagcattcgagaaaccgcagaagaaaaacatgccaagtatccgcccggatcaactaccacagctaatgcagactatgcgtacggtaagtatcagcttgtccacgaggtgcttgttcatatggcagcttcttaccattaccctccctgccgaagcctctgaagcgagatgggatgagatcgattttgataccaacgaatggaaaattcctgctactcgaatgaagatgaaccgggaccatacggttccattatctgatggagctctcgctattctggaaatgatgaaatctctcagtggtggccgagaatttatctttcccagtcgcatcaaaccaacccagccgatgaacagccagacagtgaatgcagcacttaaacgtgctggattaggaggcattctcgtttctcatggcttgcgttctatcgccagcacttctctcaatgagcaaggatttccgcctgatgttattgaggcagcattggctcatgtagacaaaaatgaggtacgacgagcttacaatcgaagcgattatcttgagcaacacgtccaatga

SEQ ID NO: 219969 - DNA, 1350 bp, Klebsiella pneumoniae
atgacttacttaagagatatggaagagttaataatcagtatcaatgatattaatatgcaaaactacatgcgagaagctctacgatgctatatgactggcgctcatagagcatgtattataatgtcatttataacaatacatgaaaatatctatacaaaattagatcgcctagctctggtcaatagcaaagcaaaaaaaatatttgacgaaatcaccccaataaaagaaaaccaagctgtttttgagaaagagatggttgataaacttgccaaagaaaacatcataacaaaactagatgcttcttttattgaagtcttaggtaaattaagaaataaatctgctcatccttcaggccattccccttcagcagaggaatctcgatatgtattttctgaggctataacaagatttttgtctaaacctatcctatccgccaaccaagtttcggatgaaatcctagaaagcttaggtggcgggaatctattcccaaccttaaaaattaccgatcttgcgataatagtgaagcatgaattaacccggctcgcaccagaaggtttaccatacttactaaataagcttttgcacaacctagattcccccaataatacaatcagtaaaaacgctcaaaatttcatcttaggaatgagttatgaatgtagcgatgagtatattttgagttcgattagaaaaatcgcaatcgagaaacaaatacataaaaccgagagagaagcatgtatcgtactcttagcttcatgcaattatcaccttctagaaaaattaagtgaaccaacctacataagattaaatgaagtcattataaataactgtaaaaacaacggtgacatcctcacgccaaataaaataaaacacccaatcaacattataaaatcaattataaaaatagaacctgacatttccagaaaaaaattccaaaaagcaataaaacacacagttgaaaaattcaaatataataccgcgttatataaaattattaaagattgcgactggattaaggatgaattatttaagcatttattaaacgcctctaataaccatgattttaaaactgcaaatgattttgcgaaatttgctatcgatacagataacgaattaagcagtacattcacagaaaaacaatgcttcagcctattagctggaatttacaaagccaaaacatacaatgcacatgattcgaaagcaatagtagtgaataattttaactctattccaaagattaaagaaaaagcactaaattgcatacataaagaaaaggaattatgtcaatctcttttgagaaaaattgtcgacgataattccttactcatcgatgatttcatcacaattgaatga

SEQ ID NO: 219970 - DNA, 576 bp, Klebsiella pneumoniae
ttgatacttgatactcaggtgaataacgacgagttactggatagaatttgccaagtatatggttttactcaaaaaatccagctagcccggcacttcaatattgcagccagctccctacaaaatcgctacacgcgaggcactgtttcttatgatttcgccgtgcagtgcgccttagaaactggagcaagcctactatggctacttacggggcaaggctctcaatatgatggcaaaccgtccccaacggatccggcaacgatagacgctttcactcttagtgatggaaaactcgcagaaaactcaccattgagtattgattccggtttttttagcaagcaaatgtcaaaaggcattgctgttcgcgccgatggaaagctgtacttcatagaacaagatgcctcactttctgatggcctttggttggttgatattgagggggctaccagcatcagagaattgacgctcctacccggtaaaaaattacacgttgcaggcggcaaagtaccgtttgagtgcgggatagatgagataaaaacgattggccgtgtcgtgggtgtatacagcgaggttaattga

SEQ ID NO: 219971 - DNA, 264 bp, Klebsiella pneumoniae
atggcttctgaaatcgcaatcatcaaaatcccgtctcctgtagtcacgcttcagcaattcgcggaacttgagggtgtttctgaacgtaccgcctaccgctggacaaccggcgataacccttgtgtaccaatcgaaccacgcaccatccgtaaaggctgcaagaaagcaggtggcccgattcgcatttattacgcacgctggaaagaagaacagttgcgtaaggcgttgggtcattcccgttttcaactcgtcatcggcgcttaa

SEQ ID NO: 219972 - DNA, 510 bp, Klebsiella pneumoniae
atgtttgattttaaagtttccaaacatccccactatgacgaagcatgccgggcttttgcgcagcgtcacaacatggcgaagctggccgagcgagcgggtatgaacgttcaaacgttacgtaacaagctcaacccggaacagcctcaccagttcacgccgcctgaattgtggctgctgactgacctgaccgaagactcaaccctcgttgatggttttctggcgcagattcattgcctgccatgcgtgccggttaatgagctggctaaagacaaattacagtcttacgtcatgcgcgcaatgcgtgaactcggcgagctggcaagcggtgcggtctctgatgagcgcctgacctctgcacgtaagcacaacatgattgaaagcgtaaatgctggaattcgcatgttgtcattgtcggctttggcgctgcatgcgcggcttcaggctaacccggcaatgacaagcgttgtagacaccatgagcggtctcagtgcctcattcggtctgatgtga

SEQ ID NO: 219973 - DNA, 228 bp, Klebsiella pneumoniae
atgcgtaataccgtaacccgtagttttaatacagatagcgatgcgctggccgtattgctgaccgatgcaaaaaaagaagaacgtaaagaccgcgcgctcgctgtttcaatccgtcttgaggcactggcgatacatatcaccaaagaggggatgactggtaccgaagccgccgaactgctgcgccgtgaagccactcgctttgagaatgaatcacaggagctgcactaa

SEQ ID NO: 219974 - DNA, 222 bp, Klebsiella pneumoniae
atggccgacgcaatggatttagcacaactgcgcgagcaggaagaccgcgaacgccacatcagcaacgcgcgcagccgtatcgctgcaccttcccgttttctctgcgaagaatgtgacgcacctaccccggaagctcgccgcattgcgattccgggggtggccttttgcgtgacctgtcaggaggtcaccgaattgaaatctaaacattatcggggggtatga

SEQ ID NO: 219975 - DNA, 798 bp, Klebsiella pneumoniae
atgttgagtattatggctatagatgtcaaaaaatatcttgagatgtttgataaaaagagaacgccaagtcatacaattagtttaatgtttgataaagcaatacattatgatatgtattcaatttatattaaagatgaaaatggtgatgattatctttttgatagatacgttaacggcgaaataagagcaaggaaatgggatccggaaaatggcatttttcaaattgactctattctcatgcctgagcaacttaactcaaattcattttcaggaatttattattatcacgcgcatgaattaaagtttacctccttaaatgatttaagtttttttaaggttttcaaattcaaaagaaatgctgattatgaaaacaaaaagctgagtcgtgaaaaattcctgtatcgtcagcgtaagcaagagattactgatgctatgactgttttaacatctgttgtcaggatttatcgtgagcagcagggagatagaccattcagcgagatacttataatgactgacgttgcagggaaattatgggtttatcatgataatcaggcaagacttagaaaagagcttggtctctgccttgattcgctagtagaaaatggcgacctttcaaagaccccagaagggtataaacctaccggaaaagcagttaatacccttgctaacttcaataaaaccgaacaacgttacaaagagaatatacgcagccaacaaattatgatattggcaacttgttttgcagctgtcggaggtgtaggaagcatgattgccgcttttcttggactgataaaatga

SEQ ID NO: 219976 - DNA, 141 bp, Klebsiella pneumoniae
atgcttactcccttcagccagggggcactcctgggtcacagggcccggaaagtgtttttactattttacaggagtaatatctatagggtgttatgctacgaaggaaagggcgtgatcatggtgtatcttattgataattaa

SEQ ID NO: 219977 - DNA, 627 bp, Klebsiella pneumoniae
atgattacactgtggggacgtaataactcgaccaacgtgaagaaagtacgctgggtgctggaggagctggatctgccttatcagcagatcctcgccgggctggagtttggtctcaaccatgacccggaatatctggcgatgaacccgaacgggctggtgccgctgttaaaggacgatgccaccggggtggtagtgtgggaatcaaatacgattattcgctacctggcggcccagtatggcgttgaccgtctgtggctggccgcgccggcgcagcgcgcgcaaggggaaaagtggatggattggtccaacggcaccctctcacccgcccatcgcccggtattaatgggcctggtgagaacgccaccggagcagcgcgacccggcggccatcgccgcggggatcagcgcctgcgaagcgctgttcgccatgctggacgacgaactggccaaaacgccgtggctctccggcgagcagttcggccttggcgatattgccgtcgctcccttcgtctacaatctgttgtcgatcctcgacagctggcaaccgcggccccatctgcagcgctggtatcagcagattagccaacgtcctgcctggcgcgaagtagtgcagatcccggtgacctga

SEQ ID NO: 219978 - DNA, 1110 bp, Klebsiella pneumoniae
atgcgtccgatcccactgctgttgatattgagcgccttagcgctaccagccctgagccaggccgcggtgcgggtggaggtattgcaaaaccggctggcccagccgtggggcatggcctttctgcctgacgatcagggcatactgatcaccctgcgcggcggcgagctcaagcgctggcagccgggtaaaggtctgtcggcgccgatagccggcgtgccgcaggtatgggccaacggccagggtggcctactggacgtggcgctggccccggatttcgcccagtcgcggcgggtgtggctgagctatgcggaaagcgacgccagcggtaaggcgggcaccgcggtgggctatgggcggttgagcgaggatgccacgcagctgacggactttaccgtggtctttcgccagcagccgaagctctccgtcggcaatcattttggcggcaggctggtgttcgacggcaaaggatatttgtttatcgggctgggcgaaaataatcagcgcgccaccgcccaggatctcagcaagctgcaggggaaagtggtccgcctgacggagaccggaggtgtaccgccggataacccttttgtcggccgggctgacgccaggccggagatctgggcttacggcatccgtaatccgcagggcatggcgatgaatccctggagcgaggcgctgtggctgaacgagcatggcccgcgtggcggagatgaaattaatattccgcaggcggggaaaaattacggctggccgctggcgacgcacggtattaactacagcggcctgcccattccggaagcaaaaggcaaaacggttccggggaccgaacctcccctgtatgtctggtcggtctctcccggggtgagcgggatggccttttattcggcgccgacctttccccagtggcagcataagctgtttatcggcgcgctgaaggagacatcgctgattgtcctggcggtggacggtaatcaggtccgcgaggaggggagattactggaggcgcgcggaaaacgcattcgcgatgttcgcgtgggacccgacggctatctgtacgttttaaccgacgagtctaacggcgagctattgcggttgagtcccgaggcttag

SEQ ID NO: 219979 - DNA, 1491 bp, Klebsiella pneumoniae
atggcgaaagctggtgcagcctcgggcaaaggtcagcaatgggatgccattaactggttgaacattgaggcaaatgtcagtcggctacaggcgcgtatcgtgaaggcagtgcaggaaaatcgctggaataaagttcgtgtcctgagttatctgctgacgcgttcgatgagcggtaaatttctggcggctcgcagagtgaccagcaacaaaggcagaaataccgctggcgttgacggtatcatctgggactctccagcgaaaagatttgctggggctcaatccctcaaatcaaggggctactcgcctgctccgctcaaaagaatatacattcctaaagctaatggtaagcgacgtccgcttgggatccctacgattaaggatcgggctatgcaggcactatttctgctggcgcttgatcctgtcgcggaaactacagcagatggcggttcctatggattcaggaacatgcgacggtgcgctgatgcgatcgagagatgctttactaatctcgctcgaaaaagcagcccggaatgggttcttgaaggtgatattaaaggctgtttcgataatatcgaccaccagtggctcattgaccacgttccaatgaacaaaacagttctcggtaaatggttaaagtcaggctttatggaaaaacaggtttatcactcaacaattgcaggcactcctcagggagggatcatttcacccgtgctggcaaacctgacgctggatggactggaacacctgctgaggacgcaatatccacggcagggaaaaggttcaggggcgggaaaagcagccaaagtgcatctgatccgttatgccgatgactttattattaccggtgacagccgggacacgattaataaagtcatacctctcgtcgaagcattccttgcagaacgtgggctggagctttctaaagcaaagacccgggttacccatgtctctgaaggtttcgattttctcggccagaacataagacgttatcctaacggaaaacttctcattaaaccgtccagaaaaagcatcaacacgttgatctcgaaggtcaaagcaattgctaatcaaatgatagctcaacctgttgcgtcattgatcacgaggctaaaccctgtgatcaggggatgggccaactaccatcgtcatgttgtttccaagcgggtattcacttatgtggatcacctgatctttgaaattatccggaggtgggccaaggccagacatccccgtaaagggctcagatggattaaaaagaaatacttcgctcaggtgaaatcccgagactgggttttcagcggtctatatcgggatactgtcacgggacaaattatgactttgagattaattaacgctcaaagcatcaaaattgtccgtcacagacttgttgcctcagcacttaatccctatgacacgaattgggcagattatgcccgagccagatcttcgcgactgactgcacctgctgcatcatttcatagtggtgtttga

SEQ ID NO: 219980 - DNA, 339 bp, Klebsiella pneumoniae
atgtgcggacgttttgcgcaagcgcaaagccgggaggaatacctggcgcatctcgtggaagcggccgaacgagatattgcctgggacccggcgcctatcgggcgctataacgtcgcgcccgggacaaaagttttactcctcaatgaacgcgatgagcaactccatctcgatgccgtttactggggctatgcgccaggatggtgggataaaccgccgctgattaatgcccgggttgagactgcagcctccagcaggatgttcaagccgctgtgggagcacggacgggcgatctgcttcgccgacggctggtttgagtgggtgcgacgtgaagtcgcataa

SEQ ID NO: 219981 - DNA, 2097 bp, Klebsiella pneumoniae
atgacggctcaaaataactacctggcgtcgctcgagacctgtagacggatcgccaaagaagagtacacgactgttcagcgccacttcgaacaatgcgatgccattatcgatgggttgagtaaagaattgcaacgcgtgattgaacatggtagccgaacgctttccaaagataagatggttgttgatggtcttaccgacatgctgcataaccttgagagggattatggaaagctactctcgaaacgaaacgccaatcttgcaaagcagctaagaagtcttgattgctttaacgtcatgctttttggtcgcacaatggcgggtaaaagtacggttcgcgaggcgattacccgaggagatggtcggaccattggtaaaggagcacaaagaacaacacgcgacgttcaagagtacgaatggaacaacttaaggatagtcgacactcctggcttcggagcctataacggcctggaggacacgcaggttgcccacgagatccttgaacagtcagacgtcgtgctgttcatgctgaatagcgacagtattcaggaatcaacttttgttgagctcgaacatgttcataagctcaacaaacccttgatcttcgtgttgaacatgaaaaaagatctggagaatgagggaaatcggcgacgggcgctgaataatccggaaaaatatattttcaaagaagaagatattcaagggcatactgagcgcttaaaaaaactcgctggccgtgtaggcatcaatcccggcgcggttcgaatcatccccattcatgcccaagctgccttcctggcaacgactataacgggtgaagaaggtactcaattgcatgagctgagccgaatcgatcacattcttaatgcgctcattgaagaagtcgaaggcaatggcccgatccgtagagtccagacgtttctagattcaagccttcaccatattgaggagcagagtttactgattctaagacaaagggatcaactttccatgcttttgccacagtatgaaagcggcctcacacgtatttcccaatggaagatgaagacgcttcgcgatgcaccacggttcctctcaagggaggtcgatctggcttttaaacctctcattgactctgtggctgattttgttgatgacaatattgagagtgacaatgcggcagccgcctgggatcgtcattataaaagtttaaatattgttaaaaatattgagaaatcggtgcaggatttggctgagcaggtgatggaggaacttcaggatttcaatcgtgaaatgaatgagggacttgatattactctgtcttttgaagttatccacaatgggaagaacttcagcgagttcgacttcaggcgaataaatggctggggttcggcgatagccggggctataagtgctattgcattctttaatgcctggaatcctgtcggttgggtggcggctggtattggtttagtattcaccatattctcgttattctcagatagtcgtgctaaaaaacttaaagaggctaagtctaaacagcgtcaggttttgcttgatgatatcgagggaagtaagaaaaaaataaaggctaatctagtcgattggttcgaaatgaatatccatcgggcctgcattatcccggcggaaaacaacctgtctcttctttgtcaagcactgagtaagtttataagtgaaatggatgttgccgacagtcaactctgtaccttgaagcacgagattaactttaggctactgaacagagtggctcatatcatcactaagcaacattttgtcctgccgaggccgatcaaggtggtgcgcattcctggctatgcatgttattttcttatttcagattatttccgaaacactgaccttcttatagctatgagtaaatccatgagagaaaagatactggcagtgtataacacaagcctagataaaaaaatatcacatctttataaagggctcgtagatagggtcgaactgaccggagataataatgttgccctattcgttcagaaaaaaaatataagtaaaattattgggaaagaccaccgccgcataaaaatggtggctgcgctttgttcctgtgaaatagacctcatcactgtttaa

SEQ ID NO: 219982 - DNA, 1710 bp, Klebsiella pneumoniae
atgaccgaaattggttacaacacgctcaaagaaaaggtggaaagcctttaccaacgttctcatgagttatggtgcgccggtaacgtcaatgcatcggaagcaaattttgatattaatttagcaccgttaaatcttgtttttgccggacagtatagtgctggcaagtcctctctcattaaaatgctgacgggtatcgagaatatcaaaactgggtccggtgttactacagatgcggttactcaatatcagcataagtcgttaaacatctgggatacgcctgggatacttgcgggtgaatgcgaacaacatgatgccaaagcgcttgaggcgatatcgaaagcagatcttctggtctatgtcattaccaatgaactgtttgatgatgtcgttggcgcggccttccgggacctgtgctttaagcaaggacgcgccggggagataatgatcgtcatcaataagttcgaaagcgactcggccgataaagagactaagatttcgggtatcacgcaggtgcttgagcccaaaattcctgaggactttcccatcgtttttactgacgcgcagtcattcttcgacgcgttggatgaggacgatgagcaagagcgtcaagagctattggagctttccaacgcggaagggctcaccaaagccattgatagttttgtggcgcaacgtggtctgtacgccaggctgacaacgcctctccagcagcttcaagtcaggctggaatcaaaaatagatgagctgactatttctgacccgctgcaaaaaggcttggtgagcttactcactcaaaacaagcgcatatttatggctaacaggcgtgatctgattaaaaaagtcggagtgaatctggacacgctgaatagtcagatcgttgagcaaggcaaccaactggccgatgctttaggtggagaacaggaagcattcgaaaagatgcaggacagcgcgatttacaaatgtgagcgactaattaattcgactttggaagcgctgcgggacactgtagacgagtgtctgtcagatctggaggctgagttagtcgaattggcgaatacccctgccagcgcgaagatcaatgaagcactattgactgcaaagaatttcaaccccgaagccgaacaagggaaagtcggcagcgtctcaaacgacgatcccttcaagcttaatagtgcaattaatcagggtatggtgaagtctgcagagaaagggttttccttcctggcaaaaagcgctataggtgatgcctctaaaacggggctgaaatccatttctggtagcagcctgcacagtgctattaaagaaattgggggcttctttggctacaagttcaaagcttgggaggcggtaaaaattgcggaaaaaatagggaagggcgcaaaatttctgggtcccgccatggcgatttttggggtgggtatgcagatttatgatgactatcaacagtctgagcatgcaaaaaagattgttcaaattaagcgggacattcgcaaaaactttaaagaatacagcgaaaccgtgcgtgagagtatggatactcagctcaagaaggtgcttgaaatgggctttgatctgcctatcacgaatatcgatgaggctctgcatgaaatacgctcacaggttgaaggtaaatccgatagcgctaatgcgctgcgggcacaactggatgaaatcaaaaatttacgcgaagagattcatggtgccttttaa

SEQ ID NO: 219983 - DNA, 1269 bp, Klebsiella pneumoniae
atgccaaaacttacagacatgcagatccgcgcgtggattaagagcggggaaagtttcgaggggcgagcagacggcgacggcctctatctgaggttccgtaaagaggataaaactcctttctggcgctatcggtataagctggcggggaagtctcgcacgatgatgatcggctcttactccgatttctcactcgctaaagccagagagatagcaaaagagttatccgccagggtggcgctgggatacgacgtagccgcagaaaagcaggagcgcaaggctgaggcaatagcgaagattgaggccgagaagaacgccattcacgtttcagagcttgccgctgagtattacgcccgccagatagaaaccacctacaaacacccggagcttttccgcagcagcctgcaaaagaatatcgttgcgctcatcggaaagttgaaggtagaggacgttcgcccgcggcacattgatagcgtcctgcaggatgttttagagcgcggatctcccacggtagctaatgatgtactccgcatgcttaagcgcctgttcgattacgctgtggtgcgcggaatgatagaggttaacccggcgatatcctttggttctaaagacgctggtgggaaggagcaggggcgcaaacgtgcgttaagccgtgatgagctgattatgttcttcagggcgctacgccgcgggcgcggaatcagtagagagaatgagctaacgttcaagattattctggcgcttggggtgcgcaaaatggagctctgtgccgccgaatggtcggagttcgaccttgataatgaggtgtggcatctccctggctcgcgggcaaagaatggtgatgacatcgatatcccgctgccggcgccagtgatcgaatggattaaagagattcgccttttcgccggagatagccgctggttaatcccggccagacgtgccagaacaaccgctcacgttagccgggccacactgaatatggttatgccgtcagtgttgaaagaaatggctgacgtagagccgttcagtatccacgacctacggcgaaccatgcgtacccagatggcggcgattgggattgacccgctaatagccgaacgttgcttaaaccacaaaataccgggtatcgagggaatctataaccgccaccagtattttgatgagcggaaagcggcgctggcgcagtgggcgaatctactggtggccttagaaactggtgaagattataacgtgacgccaataagcatcgcgatgaacgcgtcagctaaatga

SEQ ID NO: 219984 - DNA, 954 bp, Klebsiella pneumoniae
atgagaccagataaaaacatcaagagcagaattttaccactagaattttgcgatctccaaaaagccagtcgtatgctgggttgttcagtcgatgacttgtttcattgggctgaaattaatgctattagcctttcccttaggcttgattatttcccaagctttctatcctttgatcacgtaggtgggaaggatagcgcagagctatttgaatcacttatttcagagtataaccaagttactctaagtgtcgaaaggcgcgtttcatacttcatgcctgacatgaacaatccagaagtatatagagatggaaatagaatacatgttaaaggatgggcttttggcttgtgggctattaggccaaataaaatcagggagttgagttctgttggccagatagaacttaatgaagccctcgtggttgaccagcatatggatttgtatattaagcatgacattcgcgcctttctcagggctgagaatgtatttagggaaaaaacactccctatattggttaggccttctcatggtgaccccaaccccgaggagattataaatgccattaataagaaaatagaatatcacacaataagaaaagatgacgtgcttctttcaaggcattggattaaaaaacttcatgattgcattgaaaataatgagggtatttataattcatttgatttggatggtttctcttatgaagagaaagaaatgtttgacgttaataatgtacatggaaacgttgaaatatcggcacgcaaaagagaagaggtttataaagcagcaatttattggcttttaaatgaccctgaatcgtgcaaaggaaagaaaggtgatattacacagcaggcttgggcaaagcgcatagtcgaggggcgacatgagaaaccaatatccttgggtgaggacaagataataaaatgtctgagagaggctatgaaaggtgacaagaactga

SEQ ID NO: 219985 - DNA, 435 bp, Klebsiella pneumoniae
atgcaaaaagaaaaccgccccggacagcaggcggctaacacagatactcgcggatctgatgttacgccaccagcctacaccgttcaagcctcaaagcgcattccgaagaaacaccgtgcccgcacctacatgctgcgttgtggggctggtgggtggacagaaaacgatatcctgcgtaattgccggctctcatctggccgcaactatgcgagcgaacttgagcgcgagcttgatatttgcctggaacgcctggaagagaaaaaccctgatggtatcggtgcgcacatgcgttaccggtttgcgtgccgcggtgacgtgctgaaggtgattcagttcgttaaccgcatggccgcagtcaaccaacattgcgggctttcaaagcaggatatcgccgacattctgaacctctacccggacaacttcaccgccgcataa

SEQ ID NO: 219986 - DNA, 810 bp, Klebsiella pneumoniae
atgaaaatcgaaaaaagcagattcaattctgaggccgcccctcaacccaaggttaacccgggcgtaattaacggcaatgactttgccgccatcgttcccgttattcccggccaaattggcgggcgcgaaaccaatattgcgagcgccagagctctgcataaggcgctgggggtgggccgcgactttaccaactggattaaaggccgcatcgaccagtacggatttgcggccgggactgactacatccgtgttgaaaatttgagctcaccaaaacgggcgagcgcaaaatttcgccagcaaatcgagcatgattaccttctctcgctggatatggctaaagaagtggcaatggttgagcgcaatgaacaggggcacgccgtccgccgctatttcatccagtgcgaggaagcgctacagctgagtgcgccggaaatcgccgcgaagtatcgccggcacctcaaagcccgcattggtgctgccaacctcttcaagccgatgtgcgccgctctggatgctgcccgggcagaacaggggaaagagacgcaatcccgccactacagcaatgaaagcaacatgatcgcccgtattgtgctgggtggcatgaccgctaagcagtgggcgcaagtaaacggtatcgacggcgaaccgcgcgatagcatgagtgccggccaactggagcacctcagctacctagagagcaccaacatcacgctgatcgatatggggatggagtacggccagcgtaaagtagagctaatccgcctgtctcagcggtggctggcaaagcgtctgggggcggctcatgactaa

SEQ ID NO: 219987 - DNA, 573 bp, Klebsiella pneumoniae
atgcctgtccctcggcctgtagccagccagaaagagatattccaagccgaagagagcgatatttcagttattaaatttgaggggtataccgtgcgcattgtgaatgtttacggtgagccgtggttcgttgtatctgacgtctgccaggcgttggaaatcagcaatccaaccagtgccgtttcctctctggattgtgacgaggtaatgaccctaactttaactgagggtcattcgggtaagcgcggcggggcacgtagctggaatatggccgcagaatctggcttctataaactgattgcccgcagccgtaaagcctccacgcccggtacgttcgcccaccgcttcagcaactgggtattccgcgacgttatcccgtccatccgcaaaaccggctcctacggagtgccgttcgcattcctgaatgaccatacccggcgcaaagagctgtacacgaagaaagccagtaagcgcggtagagacctgcagtcgtgcaaagatgagaaggcccgccttgctgctgaagaaatcgagctatggcgtaagtatcagccagatctgctggaggttcattaa

SEQ ID NO: 219988 - DNA, 180 bp, Klebsiella pneumoniae
atggttaagaccaccagcacaccgctgccaaaccactcttatcgcgaagctcacggccagatggtgagcgtgaccgctgtagcgcataaccgcgtgacgttctatcgcgagggctaccagttcccatgcgtacagcccattgagcgcttcatgaaggagtacacggaggtgaagcaatga

SEQ ID NO: 219989 - DNA, 756 bp, Klebsiella pneumoniae
atgattgccgccgcccagggtaaaagcctctctctggctggcctgatgtatgcaaaagttaacgctctgcaggcggtgcgccaccgtggaaacctgtcaaaacctgtcactttgcgggccactgatagtggcgtacaaaacgcctggcagagtttcgagacaagtacgcgcgcgggtaagcgttcggaaactgactatctggaagatagcgtgtccggcgccggcggtggatgcggggcccatcacaccgtcagctataaattgccgcaccgtgacaaaaagggcttgccgactatcgccaacccggtttatggttatagcgcaccagcaaaatctggtgccgggattggcgtcccggtaattatcagagcgcacaacacgcgccatgcgtgtttttttgtgccgcgcagttacaccccttcaatggtggactgtatgggggcggagcaatccgcgccggtttctctgattcccggttacgccaaccctgtacagttcaccaccagcgaaattggcgtttccggtggtggttatcaagaccatgaatcagaggctgcctacatgctggctactacccccacccaaaatccgcaatttatctggttaatcgcagcagttcgccgcgatatgccgacaattaccgccaaaattcaccatatcgccgcagagactgagcaggaagcccgccgcattctggcgcgggatcacgtttgctttttcgccggacgtattcgcacagggggcgcacatgcttaa

SEQ ID NO: 219990 - DNA, 180 bp, Klebsiella pneumoniae
atgcttaattacttccgtgttgcaggatgcgccaccacccggagcggcgagctagtcgagttcgtttatatcgttgacgcccgcagcactatcagcgccaaagctgaggcgctaaatcaggccagaaatgaacgcctttcccacatccagattaaccgcattcgtgaggtggcagcatga

SEQ ID NO: 219991 - DNA, 264 bp, Klebsiella pneumoniae
atgaacataaataccatctaccgccacccagcagagctggaagccgaatcggcgctatctcgtaaagaagcatacccggatgattttacgctggcagaccgaacagcagaacgcatgacccgcgcccgcaatgggctggctcacgttatgactgatttagccactcaactaaacgatgaacaggccgcaatcgtgtattgctggctgagtaaagtcctgacgattgtcgatatagccagaattgatgcggagggcagcgcatga

SEQ ID NO: 219992 - DNA, 213 bp, Klebsiella pneumoniae
atgagcaagttatccctggttgattcagcctgccgtatcaagcaagcgcagcaagttctttctctctggcttgaagcaccgattaaaaaagatagcggcacggatcatcttattggcgcagtcattacccttctggatggtatccccgagctgatggattcagtagaaggcgagttagttgatatggatttgagtctggacggcaaagcatga

SEQ ID NO: 219993 - DNA, 627 bp, Klebsiella pneumoniae
atgagcaacgtagagaaattcacaccgggaaatgccgacttattacacgccgaagccacaccgcacggcgtcaatatcatggccagcaatgatgccgggggatatgagcagtttgctcttatcagctacgagagcgccgtgaacggccttgacgccggagagtacgacgacaagccagatatcggatacgccattcattttgccgttgctgatggcggggcgcgtggctggttcgactttaccgcacagcataatctgacaatgtggcgctggctgattgctgccacgttcatttctgagatgaagcgcgaaaacggcacaactaccgtcacggaggctgacggcacaacgtcaaaagtagcgatttactccaatggcacggcggggattgtggtttacccgttcgcggaacgtctggcgatggctaacaacatggaaggcgcaatgattgagcgctacggcattgagcagggaacggcgaacgccattattttttatcaggccatgatcgacacggagcgcggcgagctgaccccgttcggacgtgaaacgctggccgagctgcatgatggattcattgctgatctgaatgaaaacggcttgcctgaaatgccagcggcgcactga

SEQ ID NO: 219994 - DNA, 2760 bp, Klebsiella pneumoniae
atgcgtaatatcgacattatccgcgaagtgaccagcgccgccgctggtaaatggccttatgtgctggctggcctgtctatcgacgttcctgattcatcgcgccgccatgccccctgccctgcatgtggtggaaaagaccgtttcagattcgacgacaacgggcgaggtagctttatctgcaatcagtgcggcgcgggggatgggctggatttaatcaaacgtgttaacaactgcgacaccacggaggcggcgcaccttgccgctgatgtgctgggtattgattaccgcgccgcagaaccagcaccagacgctgccagccagagacagacgcagttagccgcagaccgccagcagcgcgagcaggagcgccagaaacaggcagcagaggacgcagagcagcgaagggctacgtttgcccgtctgtataccggaatgcgccagagcgtcatacagggcgaatctaggtacctgcaatcaaaagggctgaccgggtttaaatacccgcttatgcccgatggttcgttattgctggagctggtggacgaatccggcgcagtggcagcagcgcagaccattacaccgcatggagaaaagcgactcctgacaggttcagcaaagcgcggggcatatcacgccgtaaacgcgccagaatcgccgcagagcgttttaattgccgaagggctggcgacggccctttcagttcacctgatgcgcccggacgcgctggcagtggcagcaattgacgcgggcaacctgctacccgttgccgaagtgatgcgccgtaaacacccgaaggcgcaaattattatcgccgcagacaacgaccaccaccaaaacggagaagccaatacaggcagggaggccgcagagaaagccgccttatccgtggctggctgggtatcaatgccaccgacagactacaaagccgactggaacgaccaccaccagcaaaacgggctggaagtcgctacggctgcgtttaacgattcgatgtaccagattcaaggggaagccgtgaaaccacgattgcaggccattgagggcggtaaaactgaccatccagagaaagacccactaaaaccccacattgagagccgcaaagatggcgttttctgggtaacgccgaaggtggacaaggacagcggggagatcatcaacgctgaaagctggttatgttcaccgctggaggttatcggcacgggacgcgacgacaaagatcagtatcttattatctcatggctggcattcggtgcaggcataccgacaacagcggctatcccgctggctgatattggcgagcgtgaaggttggcgcaccctgaaagctggtggcgtcaacgtcaccacgaaaaacagcttacgggcgattcttgccgactggctacagcggagcggctcacgtgaattgtggcgcgttgctcatgctacaggctggcagtgcggggcatacatcatgccggacggggaaatcatcggcacacctgagcggcctgttttgttcagcgggcgcagttcagccgctgccgggtataccgtagcaggaacgtcggaaagctggcgtaacagtgttgcgcggctggcatacggcaactacgcgatgatgacaggcatcggcgcagcactggcagcgccattaatcggggtggcagatcgtgacggattcgggattcatttttatgaacaatcgagcgccgggaaaacaaccgcgcagaacgtggcgggcagtctatacggaaaccctgatgccttgcgcctgacgtggtacgggacggcgctggggctgataaacgaggccgccgcccacaatgacgggctgatgccgctggatgaagtcggacagggcgcagacccgataagcgtttctcagtctgcctatgccctgtttaacggcgtggggaaattgcagggagcaaaggaaggaggcaaccgggatctgaaacgctggcgcaccgtggcaatcagcaccggggaaatggatttagaaacgttcatcgccaccgcaggacgcaagacaaaagcggggcaactggtgcgactgctgaatatcccgctgagtaaggcggtgcgctttcatgagcaccagacagggaaagatcacgccgacgcgctgaaagacgcttaccagcaccatcatggcgctgccgggcgggagtggattagatggctttcagaccaccagcagcaggcgattgatgccgttcgtgagtgtgaagtcagatggcgaagtctaatccctgctgactatggggaacaggttcaccgtgtaggggcgaggttcgccattctggaggccgctttactgctgggtggcgtggttactggctgggatgctcaaacgtgccgggatgcgatacagcacacctataacgcatggctgaaagagttcggcacggggaacaaagagcaccagcagatcatcgagcagacggaggcgtttttaaatgcctatgggctgagtcgattcgcgccgctgggttatgacccgcgcgatttacccatccgtgatttagccgggtacaggaagaaggggaaccacgacggcgacccgataattttctacaccttcccggcaacatttgagcaggagatcgcacggggttttaatgtcaggcagtttgccgaagttctcaagaatgcaggaatgctaacaccaccaacgagcgggcgaggttatcaggggcgggtaagggaaggagggcggcaaattcgcgtttatgtgctcaacttcatggatgaggaaagcagccagccagaagaataa

SEQ ID NO: 219995 - DNA, 447 bp, Klebsiella pneumoniae
atgacagcacaaatttcagcatacgggcggctggtggccgaccctgagacccggacaacgggaaaaggtacgagcatggctatggcccggctggcggtatcgctgccgtgcaatgccgcagcggacgggcaggctaccttctggctgggcgtcattgcctttgggaagcaggccgatgcgctggccaaacaccagaaaggcgatctcgtgagtgtggcgggcaatatgcagatcaatcagtggacgggccaggatggcggcacccagcagggttaccaggtactggccgacagtgtgatcagcgccagaacagcacgccccggaggcaggcaggggcagcaggggcaagcaacagacgcgctacggcgtgcgcagcagcaaccggcgccgccgggctatgaggactacgaccagacgccgccatttgatgacagcataccgctctag

SEQ ID NO: 219996 - DNA, 378 bp, Klebsiella pneumoniae
atgaaaatggttatggtaatcatttcctcgcttttatttctcaccgcatgtaaacctacggaagagaaagccatagagttagctaaaagcgagatatctcacgacatgaaagatccattatcgacccaatttagagacgttgtgtcaaaaaaagttggtgaaaaggatgatggctcaatcgcaatgcttgtctgcggagaggtgaactcaaagaacagctttggagcatatgcggggtactcgccttttgttattgcgctaacgatgaaatcaaagggttttttctcctccggcgtggtgtatgcagtcgaagggaaaacagttgatgaccgtccaacacgcaagaatagtgcaaatacgatcaacccctgcaagtaa

SEQ ID NO: 219997 - DNA, 327 bp, Klebsiella pneumoniae
atggaacaactacagaggctggctgaagtaattgccgagacctatattcgcgatctgcgccgggaaactggctccaacgttcttagcattgatggtgtaagtggcaacgttgaaaaacacctgctcgccgcggggcttgtcgataacacaatatatgccgctaaagatgaatatggcgcgacatttgaacgagaagcctatcgcatgttaatgaattttatatcatttgatggtccggaatatcgccttaccgaacatggtcgattagtcataactcttctgaacaccaacgctctgaaaaaaaacaaagaaagaaccctacactga

SEQ ID NO: 219998 - DNA, 2799 bp, Klebsiella pneumoniae
atgacaactgattttggcaaatacaccattgagattgaagccgatgcggccaaactgcttgcgggtcaggcgagcgcagattcagctttaaagcaaattgaaaactcagtcaaaaaaacagctaactctgctgacaagctagataaaagcctggataacttgggcggaggtttttcgcgccttgctgtggccgtgaaaggatacatatcaattcaggcgttgatgaagctccaacagctgtctgaggaattcacgctacttcaggcgcgagtaacgcgtttatcttcaagttcagaggaaggtgcgcggagctttcagcagcttgtgggtattgcttcggcaaccggtgccagccttggggataccgtcaacctctggcagcaactgaccgctacactaaaaactgtaggcgccactaacagtgatgttaaccggctagtgatgaccctgcagaagatcggcactatcggtggctcatcggctcaggaaatggctaacgctctcaggcaatttatgcagtcggttgcgtccggcagaattcaggcggaagagtttaactcagtgctggaacagatgccggaactggcgaggcagatcgccgatggtatggggattccgtttaacgagctccgtcagttgatgttggcaggcaagttagatattggcgaggtgctagcggcaatcgaaaagaggtccgacgaaatcaatcagcagtttgaaactatgccgcgtactgtatcgcaggcaacaaatgctttgatcactcagttcggggtagctatctccaaaattgatgatgctattgggacgtcgcgctatttggcaaaacttctcgaccaaactgctctttcaatctccgtagccaccggaaatgtagatcctattgttgcgatagatgcgcagttggattcgctgaataaaaaattagctgtaactgaagcggcttacaataccgtttccaaagcttctatctacactgacgcaggcactaaaacacaaatagatgctatcaaaggtcaaatagcggcgctagaacgagcaaaatccctttattccgatgttggtaaggcggcatcgggttctgtagacggatctaagccagcctatatcaccaatctcgaaaagaaaactgcagagaacaacgccaattcgatcattaaatctggtcaaacagtagttgataagctcacccagcagcgtgaacagctaagcaaagacaaggccaaagggctaatcgatgataagaaatatgctgaagctgctgctgttctggataagcaaattgccgacgccagaaaaaaacaggataaaacgccgaagaatgcctttgcccgcggcgatgactcaatagacaacttgcagcggcagattgccgttttgacaatgcgctatgacgagaacaccagagaggctgcgcagtttaatgccgtggccgctctcggagctaaggccaccgacacgcaaaaagagcgggtgcgtgaactggctggacagttatttgacgcccagcagcgccagaaagaccttaatgatgcgattagcaatgaccccgtgcgtaaggaaaataaaacttattcagatggtcgagaccagctaaaacgtcaactagacggccagatgattgaccagaaaacctataaccagcaatctgagttaatggagcagcagcatcaagtcaatctggcaaaaatccgtgctcaggagcaaacagcaaacccgatagcagccgcccgcgctgaagttgacccagtacagcaactggtaaacgagaacgaccagaagcttgccctgatgaggcagtaccagcagcaggaacaggcaatactccagcagagctatcaacagggaaaaatcagttatgatcagttcatcgctgccaaatcagctacggatgctcagtatctggccctgagaacagcccaggagaaccagttcaacgagcagatgacagcagcgcagtggcagctattaagccagcagagcctcggctataacatgctgacgagtgctgtggacgcctttagcggtaatgcctcaaacgcaattactgggctactcactggcacaatgtcagcacaggaggcgatgcagtcactcggcaataccatcctgaacagcgtgatcaacagcattgcccaggtgggtgtggagatgctgaagaacttcatcctgtctcagacattgggcgcggcggctcaagcggcgaatgctgcgtctgccattgcaggaggggctacggcacttgcagcttgggcgccagcagcaattgccgcctcaattgccactgggggaacagcctcggcgacaggcttaaccgcgtatcagggggcgcaagctgccgggttggtaacgagtgtgctcggtggccgaaaaaatggcggccctgtaactgctggtggagtgtaccccgtaggcgaaggaaacctaccggaactcatgcagaccagtaaagggctgttcatgatacccggtgatgatggccgagtattcagcaacaaggatgtaaccagcggagcgccgaccatcaagaaggcatcaaccggtaaagaatatctcccggcatcctccgcatcatctagccaggcggaaagccgcactgaacgaccgatacaggtcaacataacccttatcgaccagaccaccggcaatcagcacaacatcactggcactgaagctttccagcaaggtgacattgtgacagtgactggatggctaaatgacgtagatactgccggcccaatgtctacagcattcgcagatgctcacgggcttagacggcaggcaaggggagccttttaa

SEQ ID NO: 219999 - DNA, 372 bp, Klebsiella pneumoniae
atgggtatcaaaggcaggggaatgaacaacattcgccgcaacatcaatgcgctggtgaaagatatagccgggcgccgggcataccgcgctgttcaggcagcattgcaagaaggttcgttggtcgccgccctctatactccgattgataccagtaccctgataaattcacagtatcgggaagttgtagccagaggaacgagaataaccggccgtatcggttactccgcaaattatgcaatttatgttcaggatccggctataccgcagacgttcaggcgttcgacggcaaagaaagagtttctgcagaaaggtatcgaggatgcgaagccgcagatggttgccgctatcgttcgcgagctgtcaaaacgctga

SEQ ID NO: 220000 - DNA, 630 bp, Klebsiella pneumoniae
atgagagagcagacgcgggtttacacctctgcgctaccacgaattaacctccagtttctggcaaatctgcaaagcaggctggtggattcgagccagaaaacacacattttttgtgataccgagagcggaagggtgtacttctcgatggtctctggtggctacagcgcgacaatcaacggggtaacgcgggttattggcatcacgatcacccgggtaggttttggctatcggcgatggtacatttgcccgcattgtggtggccgggttgcgaaattatttattggccggaaggatgtagggtgtcgtaaatgctggagccttcactatgccagccagagtgaagatgagatcgctcgcttacggcgcagtgtgtggaagcagaggcatgatatatggggggatgattacccacccgcgggcagcctgctaaatagcccgctcaagtttccgaagcctgccggcatgagatgggataccttcgagaaaaagcgctctcgactgcttaagactgaatcagcttactggcggctgaaagaaccgagggacgctaaagggtttgctcgggtgatacgcaaagtggaggcgtcaattcggtcatttgaacgggcatcgaaaaaggctaccccatga

SEQ ID NO: 220001 - DNA, 543 bp, Klebsiella pneumoniae
atgtaccagctaaagataaccatccgagacagcaaaccaccaatatggcggcgtgtgctggttccagagcaaatcccctttagtgaacttcacgcggtgatccagttggcttttggctggaatgacgaacatctgtatatgttcgagaaaggccgtaaaggtgatctaggtagcgagtatcgcgtatggggtgagggtgaaagcatggataatgcggcaatcacgccactatgggcggcgatccagaatgagggtgacaagctggtttacacgtatgactttggcgactggtgggattgccttattgtgctggagaagcaaacacatgataccagcatccagcctgttagctgtttgcgtgggagggggactaccccggcggaaaattcggggggattgcatggttacaatgaattgctcttacaggccagagaatctgataatcctgaacaggccgagatacgcaatttccttatgctggatattgaacgccgggtttacgacctgaacagcattaacgacagattgcaggctcttaactga

SEQ ID NO: 220002 - DNA, 360 bp, Klebsiella pneumoniae
atgagaatgaccagccgcaaaaaagagatcctcagttattttgagccggataacctagaatgggtgactggtgagattggtgcgccgccgttcgatgtgtcgggtgtggcctacctacttcatggcatggtgtcgttcgataagcgccaccagctagaatcaacccggcgaactcttgaaagtatggttgctggtgggttgcttgagcgggtgacagtgtacgaatcccggcagataaaaagcggcggtgagactagcgcaacggtcgtgcgctacggtttacccggacagtgtgccgttgtgcgcgataatggcggcgctgataaagcgattgatggggaatgctggcgggtcagttaa

SEQ ID NO: 220003 - DNA, 771 bp, Klebsiella pneumoniae
atggaaccagagaaatttgctgaaactgcaataggatttaccaaaagccctcttggtatcattgcactctttattgttctcgtttatggatttgcctctttcgtcgttggctttggtaatggcttatcagagcatatagctccccttatttatttcatggttttctttcctgtcattgtgtttcttggctttctctggcttgttgcgaaacatcataataagctttacgggccgtcagatttcaaagatgaaaataattttttaagagcgcaaatagctacagcagcatcattgaccgccgccacagcaaaacagcctgaaaatagtgcaggggtcactgaaagccaactgcgaaaaatcgtcaacgttgtatccaatgcaaaacggcagagtaagcatgaaaaatggcgaaatcgtattttatgggtggatgatcgaccagaaaataatgtttacgaaagacaggcatttgaggcacagggaatagagttcgctttagctctttcaactgacgaagccttggaattgttaaaaacaaataagtttgcagctattatttcggatatggatcgcaaagaaggggcgcaagaaggttatgtcttactagaaagattacgcgcaatgggagacaaaactccttttatgatctatgcgtcctcagatctaccagagcacaagagaatggcgagagaaagaggtgcaattggctccactaatcgagcagaagaactctttcaaattgtcatgggtgcgattaccaatggctcataa

SEQ ID NO: 220004 - DNA, 396 bp, Klebsiella pneumoniae
atgaccacgattgatccgccctcatggtatcagtatttattttataacccgcctctcaatacaccaagagattgcggtaaagtggagcagcatgattaccagctttatctggcgataaatgatattgagcatacgaaaacgaaggcaatgtcatctaagaccaatagtatctgcgagcagttccataaaacgatactgaacgagttttatcaggtgacgttccgcaaaaagttatatgatgatcttgaagcattacaatcggttcttgatgaatggctggttcactataataatgagcgaacccatcagggaaaaatgtgcagtggccgaacaccgatggaaacgttacttgatggaaagcacatctgggatgagaaaaactcaagccagatgtaa

SEQ ID NO: 220005 - DNA, 1470 bp, Klebsiella pneumoniae
ttgaaagtaagcgagttatctagccaaattggccgactttacggcttaaacaacatcaacataattatgggccgaaacggtgcgggaaaaagtcgtttccttcgcgatatcgaacaaacaatcagccagaacaagcagcaattttatgtccggtatgtaagtccagagcgagcagggtcgttcaagcgtgatggcaccatcctcacaaatatgagcgacaaccccgaatggctgaggcacactcgggcagttaatcaggcaagcaacttcaaagctgcatcggctatgctatttcgcgaggccgagacgctttacttacgtcgacttgccaatactccggaaattcgaactgatctaacgcgaaactttcagacagaccgattaagtaaaattaatcagcttctcactaacatttcgctcgagatgggtaatgctgattatgagtttcgatcacttgtagatggtcagattattgatccggcccaaatcagtagcggtgaatcggaagcggttgcattagccgcggaaatcatctatttcttcgacacaatagatccggagaaattcaacgtactcctcctcgatgagcctgatgtacatctgcaccccgacctccaagctagactgggcaagctgataatcagtatgctcgacgaattcagaacacacgcgaacagtattgccatatgcttatccacccatagttccccgctcgtctgttctcttgccgcctccccatatgtatcaatcggcacgaagagctttgcagtgaatgaaatctcattgataccggccagcgatgaacttcgaaagattgcaccattcttcgggcaccccctatcgctttctcttagcgaagacgctgcattaattttggaaggagaggacgacgaacgagtctggcaacaagcggccagaacatcacagggtcgaataaaaatctttcccgtactagcaggtagcgtagatcaacagagtcaacttgaggatttttgcgtagacctccttagtacactctatgacaatccaatcgccttttcccttcgtgatggcgatggtgtaatcaacgagtcgcttgaacatcgcctacctcttaaacgctatcgcttacgatgctacgctatcgaaaatgttcttttgactgattcatgccttgcagtaatgaatgttacatgggcggaatttgtagacgcagccaaaaaatgggttgaggataatcaaacacactccgacatagcgttgattgcagaactaatggaatcgagcgaccgattgcgtcacaagaagatcaagaaaatccgccaactcgtctgtgctattgttgagtgtaaaaaaccttgggaggtagtagttggacaagcaatcggggcattgaccagggaagaccttgaaaactcgaatatgttgatcgattttcttggaggagagatggtcagcgacgtcatcttcagggacgcaataaacccatga

SEQ ID NO: 220006 - DNA, 927 bp, Klebsiella pneumoniae
atggcaaagggcaccacctcgacgccgcatgatgcggtgtttaaacagttcctcactcaggccgacaccgcgcgcgattttctggcgatccatctaccgcctgcgctgcgtcagcgctgcgacctcgataccttacagctggagtcggcaagctttatcgaggagagcctgcgggcctggtactccgatgtgctgtggtcactcaaaaccgcctctggcgagggctacatttatgtggttatcgaacatcagagctcgccggatgcgcagatggccttccgcctgatgcgctacgccatcgccgcgatgcagcgccatcttgatggcggtcatacaaaactgccgctggtggtgccgatgctgttctatcacggagcgaccacgccatacccgtggtcactcaactggctggactgttttgccgatccacagctggcgagtgagctttatatctcgccctttccgctggtggatgtcacggtgatccccgacgatgagatcgttcgccaccggcgcgtggcattactcgagctgatacagaagcatattcgccagcgcgatttaatgggcattgttgagcaactgacgacgattttacttagcggggacgctaatgacagacagctaaaaacgctgtttaattatctgctgcagactggcaacgcgcgccgctttggccggtttatccacgaagtggcgcaacgggttcctcagcacagggagagattgatgactattgctgaaagattacaggaagtgggccgcagaaaaggcaaacgggaaggccggcttgaaggcagacaagaaggacagcatgccgaggcgctgcgcattgcccagaggatgctggctgacggcattgcccgcgagacggtggtgaaaatcaccggcctgaccgccgacgagatcgccgcgctggcgcattga

SEQ ID NO: 220007 - DNA, 225 bp, Klebsiella pneumoniae
atgccgccatccggcacaaccgcaggtacggcgtctgatgtgtatcgcccggcggcgctacgcttgcgcgggcctacgctgtttaacctgtgggggacccgtaggccggataaggaatttatgccgccatccggcacaaccgcgggtacggtgtctgatgtgtatcgcccggcggcgctgcgcttgcgcgggcctacgctgtttgaaccagcagaggactcgtag

SEQ ID NO: 220008 - DNA, 234 bp, Klebsiella pneumoniae
atgccgccatccggcacaaccgcaggtacggcgtctgatgtgtatcgcccggcggcgctacgcttgcgcgggcctacgctgtttaacctgtgggggacccgtaggccggataaggaatttatgccgccatccggcacaaccgcgggtacggtgtctgatgtgtatcgcccggcggcgctgcgcttgcgcgggcctacgctgtttgaacctgtggaggacccgcaggccggataa

SEQ ID NO: 220009 - DNA, 1155 bp, Klebsiella pneumoniae
atgcctgtcgctcgtcatctgcttgtcgcttcactgtccctgtttgccgccgccgcgggcgccgcgcaaacccactatgcctgggtaggcacctataaccccaatggcgaaggtctgtatcgctttaccgtcgatgccaaaaccggcgccctgtgcgataagacgctggtgagctcgttgccgaacgtcgcgcagttaaccgtgtcgcgcgatggcaaaacgctgtatgccgccagtgaagtcgaaaaaggcgtggtgcaggcgtggcgcattgaaaagaacggcgagctgaccgcgctcaaccaggtcgcctccggcggcgccgggccggtgtatctctccctgacgccggacggtaagcatctgctggtggctaactatgtcagcggcagtatcgccgtgctaccggtgcaagaagatggtagcctggctgaggcggtggacaggcatcaggatgaaggcccggcaggcgccgaacgcccggcggcggccgtcgagggcagcttcgccatcagcgatcacaacggcccgcatgcccatatgatcgccgccgatcccagcgggaaatacgtttactctaccgatctggggctggatcggatctatcagtatcggctggatagcgccagcggcaagctaacgccgaacgatccgccgtttatcgccgcctcgtcgccgggggccggcccgcgccacttcgtctttacgccacagggcgacggcctgtggctgattaacgaggaagcgtcgacgctgaccttctatcatctggataagcaaagcggcctgctgcgtgaaggcaaaactgtctccgcgctgccggaagggtataaaggcaccagctttgccgccggacttgtgttgagcaacgatggcaaacagctatatgtcgccaaccgcctgcataacagcattgcccacttcacagtgctggccgacggcagcctgagtcaccaggaagatatctggacgcgtggcgattatccccgcaccctgacgctggataatcaggggcagtggctgtacgtcatgaaccagcgtagcgataatattacccgcttcagcgtggcgccgaaggatggcaaattaacctttgcctccgactatacgccggtcggtagcccatcgcagatggtgatatccgcccaaccctga

SEQ ID NO: 220010 - DNA, 1374 bp, Klebsiella pneumoniae
atgcgcattcatattttaggaatctgtggcacgtttatgggggggctggccatgctggcgcgctccctcggtcatgaggtaacggggtcggatgctaacgtctatccgccgatgagcaccctgctggaaaaccaggggattgatttaattcagggctatgaccccagccagctggagccccggccggacctggtgatcatcggtaacgccatgactcgcggcaacccgtgcgttgaagcggtgctggaaaataatattccctatatgtccggcccgcagtggctgcacgacttcgtgctgcgcgatcgctgggtgctggccgtcgccgggacccacggcaaaaccaccactgccggcatggcgacctggatccttgaagcctgcggctataaaccggggttcgtgattggcggcgttccgggcaatttcgacgtctccgcgcgcctgggcgacagcccgttcttcgtcattgaagccgacgaatatgactgcgccttcttcgacaagcgctccaagtttgttcactactgcccgcggacgctgatcctcaacaaccttgagttcgaccacgcggacatctttgatgacctgaaggcgattcagaaacagttccaccatctggtgcgcatcgtgccgggcaaaggcaaaattatcctgccggagaacgacatcaacctgaagcaggtgatggcgatgggctgctggagcgagcaggagctggtgggcgagcagggccactggcaggcgaaaaaactgaacgccgacgcctcgcagtgggaagtcttactcgacggcgaaaaggtcggcgaagtgaagtgggcgctggtcggcgagcataatatgcataacggcctgatggcgattgccgcggcgcgtcacgtcggcgtgctgccggcggatgccgcgaacgcgctgggcagctttatcaacgcccgccgtcgcctggagctgcggggcgaagccaacggcgtcaccgtgtatgacgatttcgcccatcatccgacggcaatcctcgccacgctgcaggcgctgcgcggtaaagtaggcggtaccgcgcgcattctcgccgtgctggagccgcgctctaacaccatgaaaatgggcgtctgcaaggacgatctggcgccgtctctcggccgcgccgatgaggtgttcctcctgcagccgcagcatattccgtggcaggtggcggaagtggcggaagcctgcgtccagccggcccactggagcgccgacgtcgataccctggcggagatggtggtcaaaaccgcccacccgggcgaccatatcctggtgatgagcaacggcggcttcggcggcattcatcagaagctgctggataagctggcgcaaaaagcggccgcggctgaataa

SEQ ID NO: 220011 - DNA, 1503 bp, Klebsiella pneumoniae
atgagcgccgaggcacaccaggagatccttcgcaccgaaggacttagtaaattcttccccggcgttaaggcgctggataacgtcaactttagcctgcggcgcggcgaaatcatggccctgttgggcgaaaacggcgccggaaaatcgacgctgatcaaagcgctgaccggcgtttaccatgccgatcgcggcactatctggctggaaggccaggctatttcgcccaaaaataccgcccatgcccagcagctggggatcggcaccgtctaccaggaagtgaacctgctgcccaatatgtcggtggcggataacctgttcatcggccgtgagccgcggcggtttggtctgctgcgacgtaaagagatggaggccagggcgacggcgctgatggcctcctacggcttttccctcgacgtgcgcgagccgctgaaccgcttttcggtggcgatgcagcagatcgtcgctatctgtcgggccatcgacctgtcggccaaggtgctgatcctcgacgagcccaccgccagcctcgatacccaggaggtggagatgctgttcaccctgatgcgccagctcagggataacggcgtcagcctgatcttcgtcacccattttctcgaccaggtctatgcggtcagcgaccgcatcaccgtgctgcgtaacggcacatttgtgggctgccgtgagacccgcgagctgccgcagattgagctggtgaaaatgatgctgggtcgcgaactggaccataatgccctgcagcgggcgggccgtaccctgctgagcgataaaccggtagcggcgtttgaaggctacggtaaaaaaggaaccatcgccccgttcgacctgcaggtccgcccgggagaaattgtaggcctcgccggcctgctgggttccggacgcacggaaaccgccgaggtgatcttcggcattaaaacggcggacagcgggaaggcgtggatcaaaggcaaacctcagaccctgcgctccccgcatcaggcttcctgcctcgggatcggcttctgtcctgaagatcgcaaaaccgacggcattatcgccgccgcttcggtgcgggaaaatatcgttctggccctgcaggcgcagcgcggctggctgcggccgatcccccggcgtgaacagaacgagatcgccgagcgctttattcgccagctggggatccgtaccccgagcgccgagcagccgatcgagtttctctccggcggcaatcagcagaaggtgctgctctcccgctggctgctgaccaaaccgcagttcctgatcctcgatgagccgacccgcggcatcgacgtcggcgcccatgcggaaattattcgcctgattgaaaccctctgcgccgatggcctggcgctgctggttatctcttctgaactggaggagctggtgggttacgccgatcgggtcattatcctgcgcgatcgccgacaggtggcggagatcccgctcgccgagctctctgttccggcgatcatgaacgctattgcggcataa

SEQ ID NO: 220012 - DNA, 201 bp, Klebsiella pneumoniae
gtgaaaagcgttcgctatttcacccttaacttttctggcttcacgaccgccgcctgtgaaaaacaggggtatctgcgtcttatcgccggcgaccatgtcttttataccgataaacgctattttaacgacccctcgctttttgaccacctgacgatcaatcagcctctgcatcctggcgcccgtagctattgctcgcgctga

SEQ ID NO: 220013 - DNA, 2160 bp, Klebsiella pneumoniae
atgtacgagcattcgcaagtacctattattgcccgttttcgtgatcatacactacatggcgaatgtattgataggattagtgagtcagttttctttacaccagaagagttttcgattgcagatcaccattttaatggcaattttaatgaattcggccaattcgaaggaaccataaaaatttatggagaagagaaatctattgtagtaccgtgggcagaaaataataacaaagaggttttatgtggtccatttaatctcaatcttgcttatattcatggtacacaaagagatagtaagttatcgcctgaaatctggcaagatttaagagataagacagataagtttggtgggctttacatttatcgagatggaatccgaattctaccatatggtgattctgattttgatttccttcgtatagaacaacgcagatctaagagcttaaaagagtatttcttttcttatcgcagaatgtttggcgctatcgaactgactaaagaatttaactatgaacttaaagaaaaagcaggtcgagaaggttttattgaaaataaagcctacaaacaactaaaagcgatccttgaaaatttctttatctcaattgcatcagactttttcaatgataaaagtgaacttgcagctacctttattgaaacaagagcacgccaacagcgtgaatacgaactattaaagaaaagagaaaaacttaagaccactaaaagaaaaaattttgaagcagcacttaacaaatttttcaccaagcttgatgaaggaaagttagactcttcaattctccagtcaaataataaactagacactctctttaataatttcaatcaaaatacggattcaatagatgatcttgccttctctgttgagtcagtagtaaataatgattttggcaagttgattaatgatatagaaataaataaacctactggcattggccttaataaaaacttagctgaccaatgggatttatatcaagtaagaaaaaatgaacttatcaataagattagtaatgttaagaacagcgcaaataaaatattagttagtttcgaagagaaatatggtgataggactgggctaagaagaagattcaatgactcgttagtaaatcaagatgagtatcaaagaaaactattgaatgaagcttttaataaggccacgtctattcttgaagatttgcaacaacaagtaaaaaaaatgattacccataacagggaagttgcaaaaaaaaatacagatgaagtattcaatgcgttcaactccacaagtttccaaggtgttacagtagaacaactttatcgtattaaaaatgaactagaaacaaagattgataattcctcttcaatggtaattgaaaatattaatctgattaccgaaagattattgacagcaaaagaagattcagagcaaaatataacgtcatcatcagaacttgtttctgttctggagtcagaatatgagcatataaaagaacaaaatgataggaatcttcatttagcgcaaataggaatggctgtaggaattattaaccacgaattcaatcataatattctttctattcgtcgcggcctcaatgaaatgcaagttttcgctaaccgcagtgaaaatttcagagcaatatatgatcgtgtacgttctggcttcgatcatcttgatgcatatcttaaaacatttacaccattgactaggtcgcagtcaagaagacggacgactataacagggaaagctcttagtgaatttatagagtcggtatttgatgaccgatttaagaaagaagaggttcgcataagttacacatctagttttattaaccaaagtattcaagcttatacatcaacaatatattccgtattcattaatttaatagataatgcgatctattgggtatcgaaaggctcggcggataaaagtataactcttgatgcttccaaaaatggtttcaaaataatggatagtggtccaggtattcctactatcgaccatgagaatgtttttgaattcggttttgggcgccgtattggtggacaaggaatggggttatatatcgctcgacaaacattacagcgtgatggttttgatattactcttgaatcttatcaacctaacactggtgccgtttttattatagaaccgatacaagataaagaataa

SEQ ID NO: 220014 - DNA, 1725 bp, Klebsiella pneumoniae
ttggaaaattcaaatttcttcgcatcttctaaagaaatagtaagtagatttcttaataacgttatcgctgttgacgatcaattatcctttggaaaagcaattaccacaatagatagttctgttaatgatgactttgcagagtttgatgcagctagtaatgacgttagtgggttaggtgtcgtaccacaaaccccacgcataccagccccaatggataacccactgaattatcaagatttatctattgcattctcagataaaggaataaattgctgcgcttttaaacctgatccatcgagagatgtaaatatccccaacgcatcaaaccgaataatgacaggttccaaacatacagacattactattttagattggcaaatggattcgcagtttaaaaacaatcaagatagtcaggagcgcgatggtacactggctatagcaagcattgaaaaaatattacaacatgataaagagcaacaaggtcggttacgacttatcgtaatttatacgggttcaccagaacttacagggattacaaaattagtttcagatcatttgaattcaaaaggttattctaatgcctttgaaagtacaaaaatcacatttaatgatgacgtttttaaattttgtcatatcgaagtcatagaaaaaatggttgatgctgctcaattagttgataaagtaataacattatttacaaaattaactattggattactttccaatgcaactctctccgctataggagaattaagagaaaaaacacatcacatattacacacattcaataaacagcttgatcctgcgtacttatcccatgttgttggccttttctcttcacctcaagtgagagaaaaagctcatgaagttgcttttgactacgctacagacattatttcagaagaaataaaatccaaccttcaaattagtcaatcaataacaaataatttaaacttaactagaattcatgattgggtagattatattaatagtgagaaccgagatgatttattccaagttaaaattaacgatgggaataacatttccatcacatccgacagaatcaaaagacttttatccacagaatcggaagatgctctattaaataccttatcagaagcacctgtcattatgaaacgtaatggtgagacaattgaaaaatttaagaaggctaaaatacagattagcctaaatggcgttgaatatctccctcatgaaaacttgagcgcaattgagtgcaaacgtagagatttaaaatcattaaccgactcatccccacttccgactataaaacaaggctctatcgttaaaaaaagtgacactgaattttatatgtgtatgcaaccactttgcgatagcgttcgtatacagagccctactaatttcatttttataaaaatagacaggatgactgcggccaaccctaaatttactcatgtgttacgaagtgcagatgatacttttatgaagtttaaaattaaacccggctctaaggacatccacatattcaaactcattccagatatgaccactagctcaataaaagtaattagaagggataacagacttgttgtttgttacattaaagatgatgagcaacaagctgaattatcatggattggtgaatttaaaaatagtgtagcccaatctatcgctaatagtctcgcctctaatatatctagagttgggttagatacaaatgaatggctgagattgagttgttaa

SEQ ID NO: 220015 - DNA, 1239 bp, Klebsiella pneumoniae
atggaaattaataatgtttcagaaatgcttaggtgtttcatgatagcagaacgtgatatattgaataattccgatattatccatgctccgactataggggaaatgtatgaaggattgacaaaggatatattaaaaaaagcaataccttcagaattaaatctatctgttgtgaatggttttattcatgatggacatggggggcaatcgcgacaaattgattgtatggtagtacatggtgaaggtgaagtaattaggcacaccaataaaaaaagataccatgtaaaagatgttgtggcaatatttgaagtaaaaaaagagcttttgtctggacagttgaaggattcgatagatctattaactacgattgatgatatatatttttcttatagaagtaaaacattagatgcacctgcattttctactttttatgctgctaaatcatttgagagaataacgggaaagattgctcctaggtatgatgaaaaggatagtttatctatcttggatagtgcaatttatcactctttagttattgatcaactaactcctgtcagaattgcaattggatataatggttataaaagtgaatataatttcagacagtcattttataactattatagtaatatgagaaaattccgaacattcaaaatacctagtttattgattagtgatggtttttcaatagtgaaacaaaatggttatccatattatttattcttaaagaatagagggtggtgtattgcttcttcatgtaaaaataaccccttgattttaattcttgaagttattttttataaaataaaacaaatgtttgatgttaaaatagaacttgaagaggttgtggaaaatgaaaatatgactccattagtgttattagacaaaaaatcagagaaatgggattttaccttctgtgaatataaccctagtgatcttaaagatagggatgattttttaatatggacacctttgcatttaaaagaagatgagttgtccattataaaagaaatttgggatgcaggcggtttgtcagaaatagatatattagcgttcacagaggaatttccaactttttcagacattcttgtaaagctcttggaagaaaggtttctgatctactctggtgatttgattgctgttaactctgatattttcactcaacaagcagatgaaggatactacttatttccatcaaaagagaaacatgaagcatggaagaagaaatattataacacttaa

SEQ ID NO: 220016 - DNA, 1020 bp, Klebsiella pneumoniae
atgaaactgtattattataaagatgttattggtaattttggtgatgatttaaattcttggctttgggatgctctaattcctgattttttcgatcaggatgagtctatcagaatgtcaggaattggaactatcataaacactgccatgccaaaggctgataagtgggttgttttttcgagtggtgtgggttatggaaatcctccagataattttggtgatgactcatgggatatcctttcggttagaggtccactaagtgctaaagtgcttgggttgccaaaagacaagtacataactgatggtgctgccttattgaatacccttgaggaatttaaacccttatccgataacgaaaggaatggcataatttttataccacatcaccatgcgcttttaacaggtaactggcagtatgtctgtgaacaagctggtgttgaatttgttaacccacaatgggatgcaaaaattgttataaataaaattcggggggcaaaaatggttttagcagatgcaatgcatgctgctattatcgctgacgcaatgcgagttccatggcttcctttaataacatcgccgcaaataaatacttttaaatggttggattggactcagacaattcaggagaaatattctccacttgtgctaggtagcagtagtttacgtgaatcaattcgcagccgtagtttggggttttatggagaagattattatattaaaaatcttactatagattctgcgctgtcagatttctataagaagagagcatataaaagtaaagcatggtggccaaaatataataaagccgcgaagaagttagtatcaactattccggataagattgcattatctctaggagaaactactcttaataagtttgatttaaaatatattgaatctgctgttaaaatggtcgaatcttgcaaaacaagacaaccgtttttaagcaatgataatgttttttacgaaaacgtaagcaaacttatgtcttgcatcgataaagttaaaaagtataaagattga

SEQ ID NO: 220017 - DNA, 1533 bp, Klebsiella pneumoniae
atgtcaaagaataaactcatcgtaaaaaatactctttatttagctataaggacattgttgtcattattcatttcattctacacaactcgaattgttttacatgaattaggtgtttcagattacggtctttttagcgttatttatggaactgtagctttttttgtatttattgtatcagcaatgaacgattctgtacaaagattcatttctattaatttaggagttgataattatccggcagttagcaatacattaaaaaatagtattttgatatatttttcggggggagtgtttttttgcctttttttgcttttaattagaaattacgttgtaggccatctgttgacgattgatcttaattcattatccacagcaaaggaggtatatataattgcattgttttcaatctttatatcgattattcagactcctttcaacgcacttgtattagcgcatgaaaagatgtctttttatgcatatatggcaatttttgattctttatcaaaacttatcgtttcatttgtgctaattgttctgccatacaataagttaattatatactccctgttgctactattgtcgtcttttactagtttctgtatttatgtgctctattgctataaaaaatttcctctatcatttaaaggaggggtttttagcccaaaaataattaaagatattacgatgttttcattttggaatacatttggtaatttcgcatatgtatgtagaacgcagggaataaatatcgcaataaacattttcttcgcaactacagtcaatgctgcttatgctttatcagcgactattcttaatgccattaattctttaactcagtcactagtctcggcggtacgaccacagatatttaagtcctatgcggagatgaatgagcagagatatcttactttggtaacttactgttcaaaatatactttttcattcctttttttaatatcatgtccggtccttatatgcacgaaagaactattatctctgtggttggttaatattccaccttatactataggattcgtccggttggttattatcgttgcgttaatagatagtttttcatctagcataattgcaggtgtacaggctgttggaaaaattaaagtctatcaattgactgtgagtttttttgtattcattagtttgccttttgcttatttgttttttaaactaggactccctccttttagtgcatatattccgttgataataacctcacttattaatttattcttaagagcatactttttagccagatatacaaacttcgattttcttatctatttttctagagttgttttgccatgtatttctacagctgttattacttatgctgtttcatactacatcaacacaatgctttctccccaaggagtattattgactttacttgcttgttctttttactccttgatttttttgttttttgctctggtttttgtagtgagcaaaccagagaagaaaattattttaacgacagtgatttctaaataccatgcttatcgtataaggaaataa

SEQ ID NO: 220018 - DNA, 921 bp, Klebsiella pneumoniae
atgaaacctagaagttttattcaaaagtgtaaatcttattatgtttataaattgcaagatcctttgctatcaatgttttacacgaagttattcgagagaaagaatcaaatcaaaaatgggcgttaccataaccttacaaatgtattgtcgaatgtagatgttagcttaacaacacatggagagcgcattgaaagtgtacatattacgattgaatctatattgagtggaaaagtcttaccagcaaggattatattatggttggatgatgaaaatgccatcagaaatctaccaatgtctctggttaggcttaaaaatagaggcttagaaattaaactttccaaaaactatggtccacatacaaagtattttccgtatatattggagggaaagcacaaagattatttagttacggctgatgatgatatcatttaccctaaaaactggttgtttgatttgtattctgctgctaagtgctattctgatgttattgtctgtcatcgtgcacacgaaattacttttgacgctcaaagaaaatttaagccttatgaagagtggaatgcatgtagatcggttgaaaaaaatatagcattttttgcaactggagtttctggcgtaatttatcctaaaaagtttcttgaacatttgttgagagctggtgatgattttataaataaatgccccagagcggatgatgtttggctacattacatagcatatgtaaataattataaggttatgcaacttaaaaaaacaagcgctcattttttgattgttaacaatacgcagcatttaggactcatgaatactaatgtattaatgaatcaaaatgatagccaaataatgaatacatactctctcaaagatatggaaaatatttttttattgagcaacaacattgaatcaataaaaaccaataactaa

SEQ ID NO: 220019 - DNA, 1170 bp, Klebsiella pneumoniae
atgaccagactgccagaatcctcatcgtgggaagacgagattgagctgatttccagaagcgagcgcgtttctggaggactggacggcgtagcaaacaggcctctgaaagccctggctaaccgtacgcgcttcctcaaagagcaggcggataaatcaagtgagcttgtcgccgaaaaaatcagtgcagttaagaccttctctgaaggtgcgacgctgaaatcaccacgagaagagatcctgtatggtgaatacaggcttgtatggaccggggcatttccgaaggttgtcccggcgaattcaactccggccataacgggaggtgtgggggcggggcgctgggcatatacgtctgacgccatgatacgccagatccttacctcgattgatggcattgtgtttatcggctctccggagcataccgggcagctcaaggcggttaaccctgctgaaggcgcaaggctgttatgtcgtggcgcatattcagaaaatgacggcggtgcctcctggtggaagtttgtttccggcaaccacagcaagatggtcacaaattacccgcatctgtgccgggctccgctggcagatcccaccggcgccagcggtgtatgggttaacgctctggatggtgatctgcttacccatcgttttgggatggggatttcgcaggacccggtagtaaatggagaaattctgcgcaacctgctggcatggaacagcgatattgaggcctcaattgctgatggatatggaaagaaaatagtgctttgcggggatgtgatatggattgattacgtggaaattacccagtccagcgtacatattcagggagcaaaaggcgcaacagcaaaccagtacggtggtaaaggcacggtactgatgttccgtgacggagattcaaccaaaccagccttcactgtgtcaggtaaatatacggccgatgaatcaaccggccgggacaaagtggaaggcagggtgacaggcgttaaactggacaacctgactctggttgctgagcagttttttaaaaatgccacgccagccggtaaaaaagaaccagcaccaacaacgtttacccctcgctccagtcggcttggtctggtcattcagtacactggtggtcatggcggtattgacggagtgacgtctattggttttgcgggtagcgacgcgtaa

SEQ ID NO: 220020 - DNA, 582 bp, Klebsiella pneumoniae
atggcgaccgggtcgtcggagctggagcagcgagccgccgaagcatgcgccttcatcagtgatttatccgtaccgctgcgtgaactgtggaatccgtggaaatgcccggctggttttctgccgtatctggcgtgggcattttctgttgatagctgggatgaaagctggagtgaacaggaaaaaagaacggttatcagtgagtcgttccggctccatcagcacaaaggaacgatagctgcaattcggcaggtagttgaaaaaatgggatatgccttctcaattgaagaatggtgggaagtggcggacccggcaggaactttccggctcgaagtcgatgtcaatgatattggtatcacgccaaaaattctggatgagttgaccagattgattaatgacgcgaagccggtaagtcgtcatatggcgcaattcagtatatccgcaaaggtgcatgggaatatccatgccggttcaacgctgtgcagtggcgacattatcagtatttatccggccgattttgaggcagaagaaaacattacttataacggcgttattttccacgacagtaattttaattacaggtaa

SEQ ID NO: 220021 - DNA, 1248 bp, Klebsiella pneumoniae
atgaaagcatcagaaattttcactcctggcggctaccctaaccatacattggtagacgaccatttggtttcaaaacagcaacaactcattgatacactcgatattggatccatgctggtatccatttctggcccttcaaaatcgggaaaaactgtcttcgtaaagaaagctctgggtacacaaaaccttctagaagtcactggcgcgggtgttcaaagtgcaaatgatctatggatgcgggtatttgatctcttaggtacacctgtcacccaagtacaatcaaaatcatcatcaacaaatgtttccgcatcaggtaaagcaacaggacagacaagtattattgttgctaaaggttcggttgaggggggagtaacaatcggccatacaggtacatctcttacaacagagacttatgccattgatcctctccagcttttgaaaagtgaaatcgggaatactgattttgttgtttttattgatgacttccattatatcaatcgagatgttcaagctgagatagcaaagcaaataaaagacgctattgccaatggttgtaaatttatatgtgcatcagtaccttatcattctgacgatgtaattcgcggaaatgccgatctgcgagggagaatatttaatattgatttcgattattgggatgaaagcgctcttaaaagtatcgctgacaagggattcaaacttcttaacattaaccctgagtctgaagttgttgataacttagttaaagaatccgctggctcacctcaattaatgcaatatctatgcctaaactcttgttttgagctgaatgctagaatcacttgtgagcacacattaaattatcctaatgattcggctcttttagagaatgtttgcaaaagaactttagcatccgcagactatagttctatagttgataaaatgaaagatgggcctaaggttagaggttcagataggaagtcttatatatctatagatgggtggcaaggagacgtatatgtatttctcttgaaagccatcggccgtaacccaccaactttgacgttccgatattcggatttagtcagtagggttgcaagcctttgttatggagatagccctagtggctcaagtattactagtgcatgtcaacattctactgctatagctaacggagctgccagcaatagtattattgaatgggaccaggaaaatgatgtattagacattcgcgacccctaccttcttttttatttgcgctggacggattaa

SEQ ID NO: 220022 - DNA, 450 bp, Klebsiella pneumoniae
atgaatgacttcaaaccctttgaggacaagctcgccgggttgatagcggccctttctcctgacggacgtcgccggatgaccgtcgatattgcgaagaaactgcgccagcggcaacagcagcgcattaaatcgcagaaagcgccggacggttcgccatttgccccgcgtaagcgccagcccgtcagggcaaaaagaggccgcataaagcgcgagatgttcgtgaaactgcgtactaaccgctatttgaaagcgagcggtaacgacagcgcggcggtggtggagtttaccggaaaagtgcagcgcatcgcccgcgtacatcagtttggattaatagataacccctcacctaaatataataaagtaaaatatatcgagcgtgagctattgggcttttcaatatgtgacaacaagtttataaatgaattaattattaaatttctcgatgggtaa

SEQ ID NO: 220023 - DNA, 642 bp, Klebsiella pneumoniae
atgttcatcagagcttatttaagagcatcgacggaagatcagttcgccgaccgggcaaaagagatgctggagcagttcgttcaggagcgggggcataaaattgccagttactaccgggagaacatcagcggtacaaaacttgaccgcccggaactgggacgcttgctgatggacagtcaccgtaatgatattttactggtcgagcagatagaccgcctgacccgcctgagtaacagcgactggaggacgctgaaaaagcagatcgaacaacacgaactgcggattgtcagcctggatgtcccaacctcatggcaggcactgtcagataaagacccttcgcaggctgacccgatcacccgcgctgtgataaccgccatcaataacatgcttatcgatctgatggccgcgatgtcgcataaggactggctgaaccgccgccagcgccagaagcagggtattgaacgggcgcataaactgggaaaataccggggtaagcaggccgatcaggagcgtcatcagaaagtcctgtactaccgtcatgtcaagaaactgagtatcagggaaacagcggatgcgacagggtacagtccctcccagatttgccgcattcaggctctttataaagaagtgacatctgattaa

SEQ ID NO: 220024 - DNA, 534 bp, Klebsiella pneumoniae
atgttaaaaaaaatagtggtggcggccgtaatggccaccacactctcttcgtccctgtcagcgatcgccgctccttccgtgcaggtcggtttcagcccggaagggaccgcccgggaactggtgctcagcaccatccatcatgcccgtgagtccgtccgtatgatgggatacaactttaccgctgcggatattgcgaaagccttggcgtccgccagccggcgtggtgtggacgttaaagtcatcctggataatagagaaaaccagaacaaatattcgaaagcggcactcaatatcctggtgaatgccggcgtgaacgtgcgtctgacggatgcctataaaatccaccatgacaaagtcattatcatcgaccagaacacggttgaaaccggctcattcaacttcagtaaagctgcggagtattcgaattcagaaaatgcgctggttctgaatgatatgccacaggtggccagcgtctatctggaacactggcagtcccgctgggacacgggacgtgactggaaatcgacgtattaa

SEQ ID NO: 220025 - DNA, 2193 bp, Klebsiella pneumoniae
atgcaacagaagcagaaaccggtcgatgccgcccggctgcagcgtcaggtacatcagagcatggtcgaagagatggcgtatcgcaccggccccctgctgctcgccattatcgccatatttggtgcggcaatagtctggcctgtccttctgtgggcggccattccggtcatgctggtctgggtcccgatgttcatgctgaatgaattccgaatgccggcgaggatgccaatggacatggacagactggatccgtcaacggaaaccatgcggcccggcaaactgctgggctttctgcccgtcactaagcttaaccggcatatggaaaaggcggcgggcgtgttctataccggatacgaacgcacgctcgatggcggccgtgagatatggctgcgcatggatgacctgacgcgccatctcattcttatggccaccaccggtgccggcaaaaccgagatgttgcttggttttgtgttaaatgcactgtgctgggcgaaagggctgatcttctctgacggtaaggcccagaatgacgtctggtttgctgtcgcctccctgtcccgccgctttggccgtgaagacgatctacggttgctgaactacatcaccggcggccagagccgctctcagcgcctgctggagaatgacaaatcacgccagcagtccaataacacgaacccgtttgcgctggcccaggaaacctacatcacgcagctgatggattccatgatgccggaagccggcaacgaccgtacctggcaggaaaaagccaaggggatgaaccaggtcctgacaaaggccctgatttacaaaagccgcaaggaacaaaaggtgatgtcgcagcggctgatccaggagtacctctccctggataagttcgcggagctctatctgcaggctgaagctgaggaatggcacgaagaaattcgaaccgggctgcgtaattatctctcaaccagcgtgccgggctttgatatgagtctgatcaccaagccatcagagtggtcgcaggaggcgcgtaaccagcatggttatctgacgagccagtacaaccgtatgctgtcactcttcagcgatacctatggccacgtgttttcatccggcgccggggatattgacctgcgggatgtggtccacaatgaccgtattcttgtcatccttatcccggcactggagctatccgcgtcagaagcgctcacgctggggcgactgacaacctcacagctggcgatgatcctgagccaggacctgggcgaaaggatggaggggaaagcggaagacatactggttatcaaaaaattcagggaccgctttccctttttatggctggcagatgaagtcggttcgtactactccgataccatcggtcagctggccacccaggtccgctccctcggctatgcgctcgttctggcaggtcaggacctgcagaagctcaaaacggctgtaggggacaagctctggacgctgctcggcaacatgttcacccgcatcttcgggaccatcatcgatccaactgaaaccgcagagttcgccgcgaaatcagccgggatggaataccaggccattcaggacagtatggaataccgcgccggcgcgatcggggggagctatgccgataccgggcgcgttacggtccaggagaaaccgaaactgccctttgatgaactgcaggctttaaaccagggtgagcaggccacggtcttcaaaggggccgtgatccggaacaacgccctgtacatcgcggatgacgacaaaatcaccgacaaggacgtccgcatcaaccggtttgttgaggtggaatggccaacgtatgacagcctgtctcacctgctgccggcaaaagtccgccgtgaccgccctcgtccggccagtatcaaccgcattatggccatcgtgaaaaacgacaacatcagacacgcccctgacagcatgatcattcaggatggcgtgctgtatgccattgccgatgaagccatgtatttcgacgaagtctcccccgtgccccccgatacagtccggcgcgcgacgcagctgctcagcctcgccgcctcggtactgaccgagacccggggccgttacagcgtcgaatacccggagccggaaaaactgtccgtcaaaaaggatgaactggaaaaataccagcacattcaccagtcggccgtcactcaacaggttgacggtttcgtttactga

SEQ ID NO: 220026 - DNA, 1092 bp, Klebsiella pneumoniae
atgatgactccgacatttaatgcccgtatatctggtaatcacctgattgcttcactgaatgacgacacaccgattttttctctcaatgtgagcgaggacccgagtttctggatcgaggggggcacactgatggccagcctgaatacctacagcagccatccggtataccgggccctggactataaagaggcagaacaactgctgtctgtcattacccgggtactcagcgatcgtaagccgaaaataaagtggaagagcacgctcctgcccgcggctgcgctacttgttacctgttttgccgtctggcgttttgcgcctgcaacaccctcgcagggcgtgccgccgttcggaccggcagagccccggaatgccacggcggaaacggccgcaccgcgcttccagggactaccggagctgcgcaaccctgcgccgggtaatccctattttggcaaccacacaacaccgaatgccgacaatggccagccgatgccggcagcttcccctgtccggccctcagcaactcggccggtttccgtggccagtcaggaaacgctgagcccacacattatgcagaacctgcagaaagcagcaggccgcggctatttcaccgtccccctgtcttccggacacgaacggacactgtacgtttttgccgatccggagtgccctaattgcaaaaactgggagccggtcgtcgaagcattaggtaatgaatacaacgtggtggtcttccccgtctctgcgattggtaaagagaaatctgtccggaaaatccagtctgtcctgtatctggagacggcgcaccgcgcagcggcctggaagaaactgttttcggttgacgagggcatgctcaccattggcaaaaagaaaaccggtgacgatcaaaaagaaaccccggcacaacgcgatgataaacgctggaaaatcgccggcgaggcgctggccattaacgatgtcgcgttcaggcaataccgtatccccggcacgccctgggtcattgccgacgacggccgccatgtaccgcaatcaacgatgaaagatccggccaccctgcgcgccttcatggcagagcacagcaacgcggagaactga

SEQ ID NO: 220027 - DNA, 1419 bp, Klebsiella pneumoniae
atgtctcagaaccgtcaggccgcttccggccatgatgacgcctacggctttctgctgatccctgccgccctcgtgattatctgctggctgtggttcagtaaatttgtatgggtatcgtgcctgctgctctactggctatgggggatggtcgattttcagcgtatccatccctgggtcgcggaaaaaatcaacctgctggcccgtaccggcaatcacgcccaggctgtctcctggcatgactggttcgccgtgatgaatgaaacgtccggcatcctgcttatttttctgctccccattgccatcggtgcgctggtcagtatcaaaaaccatccgtcccggccgataaagagcaagcgtatcgtcaatatccacacgctgccgcagatcatgagcaaatggtcgccggccattgtgccggtgctggcagaaagccggtcggcggacctgttaatgaacgatgacggcccggaacgccgctgggcggaaaaaccggaagagttcgccaccaggcatggtcttatcgcctcgcgcatactggaccgggaaaaagcccgtgacgtttttatctctcagctgggtacacggttgtcggcctctccggacacattgcaggattatgagaaagccctgtttgccgtgttcggcctgcaggtgttgatgaataaccggaaagccgccaaaaaactgctggatgatctgaaccgcagctgcctcccgcgcaaccgtaaagaacgtaagcgcacgaaaaatctgtaccgtcctgatttttcccgggcagaaaaagcctttcagaaggtctggcaggcggaggggatgaaagaaatccatgccacacaccagtacgtcagaacggctctcagcggcctgctgggccacgatattcgcctgccgccgtcacagtatctctggctgaagcccatcgatcgcacactctggtatgccctgcacggtgccgataccgccagcgtttttgtggagggggcgggcgtcattgctcagacgcgttttgaaatcgtggtacgaaaagagaagctgccattgcagatcgactatgtcgaatccgccatcgacgggctgcagtacgagctggaagggctgggtctggtgcatgagcgacgcgtgaagaaaaccgaacgccggaagcaagaacctgactggttacccccgacgctcagccaggacagctttactgacctccagggcgatgaaccggaacctgcagaagcagaacagcctgaagataacgctgctgcagcggaggcgcatcccgaccaggacgccgggagacacaccgggccgtccacttcccccctcactgataccgcctcagctgccgtatcgaccgttaccgcacctcacgtatcacatgacgccgcagccggtgaggcggcggacgacgatgaacctgcttttatataa

SEQ ID NO: 220028 - DNA, 624 bp, Klebsiella pneumoniae
atggaaagccagcgggaacgtaccggcatggaaactttcgtgtcactgttaaaattctgggccgcgatgatctacttccctgtgtgcctgcttttcgcctttatctgtaccatatcttcaagatctgaagatgatggcaaggcgctactgttctgggtgctgtttgtgacgcccttcatcattcgtcagtttaccctgcgcaagcgacgccgcgcgctgaacagcgtggtgaatgccgtcagtggtgaggagtttatgccacagaaagggaacgtcatcatttcgggcaaccggacctatctgggcgtggatgccatccggggaaccctgctttacgtcagtatgcgtcgcaagggggaatacgatgtgatggggctggacatgtccagctggacgcgggtggcgtataagggggatgtcatcaccctcaaaaccaaaaacccggaactccccagcgtcagcgtcgatgcaccgggcggtgagaagtattcctccgcgctatatgacgtcatctgtgcgatggagcaccggcagtatgcggatctgcagttccctcagaaggtccatgagcgtgcccgtaccgcccgcaaagagaccggactggcgatgttcagctacacctga

SEQ ID NO: 220029 - DNA, 2145 bp, Klebsiella pneumoniae
atgaaactatttaagcagcccctgcagggtctgttgctgctgctcatctcgttgccggccctggccgatgacgtgacgtacagcaccattcgtgacgctgctgaaaattcaagtgacctctcccgccaggcgttggttaccatctttggcgacgtggtgacgtcgccctttacttcaacggataccaccgtcatcggttccctgttcggcatcctgaacggcgttatctgtgccattgctctgttctggtttctgactgtcaccctcaaaagcattgtcaaagcgggtaatgccggcaaagtcttcggcagtacgcgcaccgcgatggcgcccctcatgtcctttgtcgggttcatcaccctggtcccgacaacgagcggctggtcgctttcgcagctgatcatgctgtgggcggcgtccatcatgggggtgggcggcgccaatctgctgacaaacaaagctgtggatatgatggatgacgggtattcactggtcacgcaacccgtcgccagctcgacgcgggatgcagcccagcagatttttgagatgaacctgtgcaagtatgccatcaacgaacagctcagcggcttctacgacgatgccggctcagcgagcacgtcagagatgagcacttccggcagtgacggcagttatgaaaccagcaacggcagcgcctattgtgggaccgcgaaaatccccacgaccacgcgcagcagcagctggtcggtcttgtttgattccgatgtggatactgacgctattgtcagcgcacagaagtcagcattggataccatgcagacgaccctcgacagcgccgcacaggcatttgtcagtacctatatcagcaaacgtgatgatgactccggtacgctgaccgatgtcgaaaccactatccagaatgcggcaaccgcctatgagaacaccattaactctgcgctcaatcagattgactatgaagacactctgcagagcagcctgaccagcaacatgaaaacctacggctggatcgctctgggtgcctggtaccagacgtttgcgactgcgaacgccaagacttctgatgtgggtaaatcggcacccaccgtcagcgggccgacgggcctgggggaaatgggcaacaccgacctgtatcagcaggtgttcaccgcctataacacccagttgcagaatagcagctacaccgcaacgctcggtaccaagaccagcaaaacggacatcgagacgggccgggcaaaggatccgaaatcagtgttcatcggactgtttaacagcccgatgcagcagctgacaaactggattgcgacaaggaatatcggccaggtaaatgacgacagcaaccagctcaacccgttgctgcagatgaaaaccatcggggactacaccctggataccgtaggtgcggcgctgacatcttatgtggccattcaggggtcgattgcatggagcggtaataatatcgtgggccgagttaccaacgggctgaccggctggaaagcgaccctggtggctatcatgcaggcgctgtcccctccgttctacttcctgctgctgatcctcttctcggcgggcttcagcctgtcagtgctgctgccagcgatcccgttcatctactggatgaccggcgtcctgaactggtccgtcagcgtgctggttggctgtgccgccggcccgatgtggtccgccacgcacctaggcaccgaagaggaccggggaagccgcgcggcctacggctatgtctttcttatcgacatgatgctgcgccccagcctgatggtactggccttcttctttgcctctgtggctatcgtggcagccggcacgatcctgaacctgctgtttgcctcggcgctggccaacgcacagattgactcctggaccgggctgtttactgccgttggttggttgcttatctatgcccggatttccaccaccgtggccaccaaagtgttctcgatgctggtcgtcatcccggattacgtgatcggcttcctgggcggacgtgaaggggcttctctgttcagcggcctgagcgattcggtctcgaatatctttgctggcgtcgggcgcacggttaacccgggccgcgtcccgggaatggatgccaaagagcgtacccccggggacaaggatggatttaaaggataa

SEQ ID NO: 220030 - DNA, 582 bp, Klebsiella pneumoniae
atgacacacaaatcccatgatgaccagaccgaaccggccggacagacaccgcgttcaacggcagtaaaaagggcccgcaaggccctttcattgtcggtctcgatttttacacccataaacgacatgcgccgtgtgggggcggacgtcagccagtccctgaagagcagtatcttccggctgaaggccttccggcgtcaggcgcgtgaggaaaaacgcgagaagctgacatttgaacaggctgtccaggccagtggctacagtctgccgcagttgctgtggaagtaccgttttctcaagcgattgtggtgggtggtcgccgggctgttcttggtcctgacgcccgttctgatggctatgatactgttgacggcctccaccctgccctcgatgacgttctggcgggcgatcatttttgtggtgatcttcgccgcgctggccagtctggcggcactgaaggttgtgatatgtcagtaccgcctctggcagctgcagcaacgccgcgtcagtgacgaagaaggcggacgattcagcgatttcctccaccacgcacactggatcaaagacgccttgaaccctatctga

SEQ ID NO: 220031 - DNA, 1197 bp, Klebsiella pneumoniae
atgaaacgaaaacttttagccgccgcattgtccatcgcatgcggacaggctcttgctgcctacccggttagcgttatttccagcgtgccgatcacaagccaggttgtgccccatctgacaacgatgcaaaccacgctggcagaaatcctgaccaccaacacggaaatcggcagcgccattacccaggcgagcgataaaaacacggcgacactgacagaaggcttccaggcacaacgtcaggcggacaatttcggccgtgaaaccgaacgtctggaaaaggctcgcgccagctttagcgtgccggacagcatctgcagcgaatcggcgtccggcgtggcgcatcaggttcataatactgcccgggccaccgcgtcctctctggcgtcaggcagcgggatcagcaactcggccattcagaaagctgtggcttccgcgccggttctccccgcgcaggatgattaccgcagcgccgccattcacgcgaattactgcaccagtgccgaatacgcggtgtatggcggcacctcgctgtgccagtcggtgtcctccgacatgcctggcggcgacatccaggtccagtcgctctatgacggtgccggcgccgcgggtaaagagccggaactcaccttcagtgatgaccagatcgatgccgggatggcgtacatgcggaacagcgcgaaacacagtcccgggcgcacgctcggcaagggagaaatcaagaatgaaaccggctggcagtaccagggcctgctgacgcagtacaaggcgattcagagtgccgcccagcaaccgcagttatcgatgattgcggacagtaaacccaacagcagcacgaccaccgcgctgaaagaagcgctggaaaatgcatccgccaggtcgtatttcgatgacaccgcgtcagatctggccaaaagtaactaccagatgtcagcccgcgagtttgaaagtttcgaagtcggccgccggtatgccaataccgattaccaggaagacctgcaggcaatggatggcgataacctgatgcgcgaactgatccgggtacagtcactgtcaaattatctgcagctcggcattaagaaccagctcagggaaagcaacattatcgccggccagcaactcgccctggcggctgaccgggaatatcgcccgcagctgcaggcactgatgcaggaaatcagcggaggcgtcgccaaatga

SEQ ID NO: 220032 - DNA, 3048 bp, Klebsiella pneumoniae
atgtcattaatgaatgcggttgaagatttcatcacctcggtcagccggcacacggtttctaatgcaatgccggactactgcgacctgcggaccatcgtcaatctgacggagtcagatcgcaacttctatccggatatgcaggtcccctttatcgccgttaccgacgccggccattatgcctctacttttgaggtacagggtggcttctgtgaaatggatgaggacgcccccgccagtcagaaattcagttttgacgggtttatcaataaagtggccacggcaatggccacggattttaaatcgacgggccacaaaatctcgatggtgatggagaatgaccccaaccagggcaatgcggaactgaagcgcctgctggcacaccagtaccgctccattgcccgcactggtgtggacatggcggacattctggatgaaaagatcgccaaaatttccccgtgggtcagccgtgaacgcgtctggctgacctgctggacggggcgagaaaccctttcgcctcaggagttgaaaggcgacatgcgtcggatcagcggactcgtcagtaaagcgcccggcacgcagtttggccaggtccccgcgttctccgaactgacagggctgaaaattcgccatgacgcctttctcaacacgataaaaaccgccctttttgacgggggggatggccagcttatcgatctgatggatgtccatcaactgggccgggagatccgccgtcaggtggacaggaagggcaccgatgaagcctggcggccggtgctggcgtccgatcgcgtcagacctcacgggaaacgtaaccgggaagacgcttcaccgctcttcgccccctggctgaactaccagctcatgggtgtggatgccgacgccgaaaacaacttcattaacattaacggcatgtggcacgccacgctctccgtggcgatgggcccacagcagctattaaccttcgctcagctgaaagcccggatcccccgttccgtaccgtaccgtattcgcatggatgtcatgccgggaggactgaagagtctgtcatggaaaggcaccctgctcacgtataccgcttatatcccgccactgcgccccatctgggaggcggtggaagaactgaagaagcgcgacagtcacgatccggtctgtgtgatgacgatagtggcttcaacctggggagaaacgaaggaagaggcaacgctgaacctcaccctgctgaccaaagcgtttcagggctggggcgtctgtgaggtgaccagtacgtttggtaatccctaccgtgcctgggcgtcaacgttactggcggcccggactggtggtggtccacacaacctgtatccaccgctgaaagatgcgctcagcttgctgccgttaagccggcccgcgtcagcctggtccgatgatgcctcgattgttttcccaacccctgacggcaaaatcattccggtggggctggcgtcagcgaagcagaataagcacaccgaggtgattgtcggtgaacccggttcgggtaagtcgctcatcatgaacatgctcagcaatgctattgtgtgcaacgcccagcaaaaactgccctttatcgcggttgtcgataagggctacagcgcccagggacaaatccagcttatccgggacagcctgcccccggaacgcaaggatgaagccatcggctgggcgctgcgcaatcacagcgatcactgccgcaatatgtttgacatccagctgggtgcccgttaccccatcgccccggaactaacctggatgaaaagcatgctgaccgcgatgtgtattgactccaacaccggtctgccgcctaactcccgcgatatcgacgtcctgctggagcgggtgattacgatggcctatcgcgataaggatgaaaccagccccaataagttttcagacggcgcatcgccggagatcacccgggcgttaaaagcgtccggcctctggacccggtatgacgaggaatggtgggacgactgtccctggtatgacgtccgcgacatgctgttcagcgccggctacgtgaaagaggcccagctggcacagttcctcgccgtgccggaactctccgacatgagcgagtacatcaacagcccggagatcaaagcgagcttcggcaacgtctgtcgtgataactcccaggagctgctgacagagtatgtcgcccgcgtgatcggccaggcgtgtaacacttataaaatgctggccggccggacccggttcattattaacccggccacccgcattattgccatcgacctgaataatgtcgtcggggataaaagtgccgaagggcagttgcgtaccggcatcatgtacctcttcgccggccaggtgagcggcggagacttcatcctgccgcagtaccgtaaagagctgatggccgcggtaccggagatgtaccggccgatgcacatggaaaaactggatcagcttgaccaggaagtgaagtcgaaatactacgacgaactccacaacgcttcggacgtgccgtttatcttcccgatgctggaaacgcaggatcgtgaacaacgtaaatttggtatccgtaccgtactgtgctcacagtacctgaccgacttccctgacacgattctgaaatcggccaactcggtgtatctcatgcactgccgccccgaagatgaacgggcgcttgtcgaccacttccaggtaccggaagtcaccatccggaagttcatgcaaataccgaaaggcccggccgctgatggcagcgggacgagctttcttgccgtattccgcacgaaagccggtcgcatcgcccacattctgaaaaacaccgcgggcccgaaagaactctgggcgctgagttcatcgccgggcgacaccgcccttcgggattatctgtatgaggaactggatggcgccaccgcgcgcgacattctggcggaaaactttgagcacggttcggctcagcgtgtcattgaattccgtcgcaagaaggccggcgaacaggacgccgggaacgtcacccgccatctcgcccgggaaattatcgaaaaacgcggttaccgcctctga

SEQ ID NO: 220033 - DNA, 564 bp, Klebsiella pneumoniae
gtgacacaaaaaggtgttgatgatgtcgcctggctggatgtcagcggtgatgacacgccgccctcaccagttcaggtaaatgctgaatgttgctcacggtgccggtggcccgcccggcggcttttccggctcagtgaagcagagaacgacgcggtctgtgcagtctgctggataagccacaacctggacacggcgtcagcacaccagggcgacctgtgctggttaccggggcttcatgccgcagacgtcgtgaacctgcaacggatcgcctgtatcgcggccatcgccggcaacagtcacgcgaaaaaacaggggcaacgggtgctgctatggatgcgccgccacaaacgggaaaccgaacgcgcctgggatacgtcccgcccggctgaatttgcggcggtgatgtcacgcttacacccggatgaccggcgggcattccgtcagcgactggcaggctgtcatctggtcctgccggccaccgtgttcagcgatctcacattgctgctgcctgccggcatggacgcggacgccctgctgaacactctcacactccccaggctgtag

SEQ ID NO: 220034 - DNA, 402 bp, Klebsiella pneumoniae
atgtctgcaatcttcgatcgtgtcttaaaagcttccatcactgcacatgagctgcgccattccatgaaacgtaaattcactgccggtatggcaagcctggtggcgttaaccccgctcagcgccctcgctgacggtaccctgaccgacatggttgatgagggggcgagcgggatgagcgatgtggaaaaagacgcgctggttttcgccgaaggtgtcggtgtgctgatcgtgtttgcgaccatcatcgccatgaagaacaaggagaaaagtccgcacatcaccaccaaaggcatcattatcggctgggttgtcgggatcttcctcatcgggctgggtgaaatcgttcgccgttcgcagagccaggtgggtctgaccgaagtcaccgtcggttccggtagctaa

SEQ ID NO: 220035 - DNA, 534 bp, Klebsiella pneumoniae
atggttgatgccctgacggcactggtcaacctggccagtgcgatccacaccagtggtaaccggttcatcttcgccctggctgttgtgcttggcatttatggggtgatgttcgcactgaccaaagaggcccgactggcccgccaggtgccgggccacaacggtacgggaaaaatcatcggcgtcgtcattctcggcggcatgctgatagggctgtcccagataatcaatgctggggccgcccagctcggctggtctgatgtcacctttgatgaggtctcgtatgtttccaccgacacctttggtcagggtgccgatgcggccaatgccctgctgacgcttctccagacgctgggtatagcctatgcactgtccggcacacagcgcattaaacgttcactgaaagacggccacaccggtctgtcagccggtgaagatgtgggaaccggcgccgtgaaattcattaccggggtgtttcttatctgcgccccgacactgctcgatgctatccagaccagcctcggtctgtctctctag

SEQ ID NO: 220036 - DNA, 720 bp, Klebsiella pneumoniae
atgaatgaatttaatcatcccgccacagacaaggatgatcagccagatatatcggccatcgtgcagcatgagaaaccgagtctgaaatatcttcttctggagaaacagtatgttctgggactgaacggtccctggcttatcggcattctcatcgccgccaccctggccatctggtatctctttggcaccaccaccccgtcatcacaggatgagctgaatgcggcggccggctttgaaaacgttcctccggcagcctcacaaccagacaaccggtcattgtcctcaacactgtcaccaccggccagcgataacgtgaaagaggaagtggccacgatggtgaacggcgtcaaaacctacgcggaagccaaccgtacagccatccagcggctgtccgacaccgtgaaaaccctgcagcagcaggcggccaccgcgcagcagctgcagagccagtatcgggaggagatcaacatcctgaagtcacgggtggcgacactggaggtggagaaggtcaataccgcaacgtccgccccccatcgcccgcgcctgctgacgtcaggcatgaaggtcagttcagtccaggacggtgcggcgtggatcttctggaaaaacaaaacctgggccgtccgtgagggcgataccctggctgacggtaaagtcaacatcatccggatcgattcggcaaaccgccaggtattcacgactgaaggcgtgatccgttaa

SEQ ID NO: 220037 - DNA, 1341 bp, Klebsiella pneumoniae
atggccaacgaaaatgacgcaagtcgcgataagacattactggtcgggctggctgccctcgtctgtgccggcgttgccggagggggctacctgctctggaaccacttttttgccccgccgccgacaccttcccgtatcaatgtgaccaacgttgccagtgccgggaaacaccagagtgcagaaactgagcagtaccgtcagctcctgcacgaatacaaccgggagggcgccagtgccgcacgggcggataattccagtttcatcgccagtatcccggtaggcgggagcaccccggtgcataccgtggaagcccccccgaaagagaaaaagcggaagcccgctcacgaggaaaaacagcaggagaagaaaaaggacgagggcctcagtaagtcagaccaggcagccctgaataaactcctcgcatcaatggacacgtcggcacagtcgccggatctgcagcaggtctctctggccgtggcaaccgagccgggcgctgccgccgaaggcagtcaggccaaatcggcttatgctgactggacatcgtccatcatgccccggacaaccggtgggggattatccggcgggggggaaagcacggccccggtcatcgagctgatcccggcttatacacgtgtgcccggctcagtggattttggtattgattccgacaacaaccattcgccggcggtcgtcaggctctataccggcccctataagggtgcggtgttgaaagcctctcaggcacaactcggcggggacggcgtggtgatccacatgacaaccatgtactggaaccgcaaaaactaccgtgttgacgcctatgcgctgaaagacgacacgctcatggccaatgtggccactgacgtgaatcaccactatatgtcccgcatcctgttgccgtcgattgctgccggtatcggtaaagccggtgacctctatgcggatgccaataccgagatcctgaccaacggctacagcacggtgaccagccatgccgggatgccgaatggcgaggcggtggccggcgtggtggcaggcggtgccgcgtccaatgccgctgacgtgctcaagtcggacgccgccaaaatttcgccgactcaggtcacggtggatgccggccaggccgtttatgtcgagtttatggctgctgtcaccacggctgatgaaatcaagcctcgcggtcagaacaccaccggcaacacggccaccccgctggcaaacccgcaggacagccataccggcaacgcactttcgccggtcagccctacgctcgcacagctacgggaacaaacgcagtcacgcatccggacccagtcacagcctgaaaacacgtcggagtaa

SEQ ID NO: 220038 - DNA, 1104 bp, Klebsiella pneumoniae
atgaaaccgtattttgcactctctttactcgccgtgatgtgctgcaacgtcggggcggtggagactcaacagaccgtggtacctcactctgccgatccgatactggtcactgacggcccccaacaggatgccgcgctgatgaataaagccggattaccgccgcagtccgctgaacagccaccggcgccgccggtgcaaccgcctgaaaccactcaggccgcaccgccatctgcatcaacagccgccgcgccacaggccagttcgcagacggacccggcaccggcggcgacgccaggtagtgacgaactcccgccgccttcgccgctgtacagtgccgcgcagaagcaggttgcgcccctgacaccggatgaagtccggcaactgcgggggcagaaagagaatatcaaccgggcgctggcttccccggcgatgacggtggtaccccgcatcagtgcgcagacggtgaatctgtcaccgggttccagtctgcctctggtccgcacagcggtaaaccatcccagcaacctgagttttaccgatgccacgggtgccccctggcctgtggcaggcaagccgacgaacccgatgacgaaggactttgatgtgtattacatcccggactcacccatcgtcaccattgtggccaaacggccctatgcgagcggcagcattaccgtcctgctgaaaggcctgtccgtaccgatttcggtggaagttaccagcggtgacaccgacagccagtcccgggtgtggaccgtcgataaccgtctggatctgcgcattccgcagcggggaccgtccgcccgcccgatggccgcgccggaatcgaaaatcggcctttacgacaacacgcttcaggccttcctggatggtacgcccccgagggaggcacaccgcctgaaagcgaccgggcaggtgcctgataccaccgtctggcagctgggcgacgacctctttatccggacgcgcgctgagatagtcgatgagtttgatcagacgctgtcctccgctgatgggatgcacctctttaagctcccggtcacgccctatgtgacgttctccgtgatggggcgttctcaggcactgaacattactctggagtga

SEQ ID NO: 220039 - DNA, 705 bp, Klebsiella pneumoniae
atgaatacacccgcgacagggggcacagactcgtctgtgcctcagacaacgcgttccctttcagcgcaggaacaacaggtctacgacgaagccattcgcctgcaaaatgagcaggcgctgggggcgaccttcgcccgtaagttgctgacatcaaacctcattctgggcaccgcgttcctgctcaccacttccctcagcggcgtgacgctgtggaaagtgtatcacccggataatcactacttcgccacggaaagcggccgtgtcacaccgatttatccactgaacaaaccggcctggtcgatggaagacattgccggcttcggcgccgacaccatccagcgggctttcacgatggacttcgttcactaccgtcagcagatgacatcagtgatgacgcgctttaccaatcagggatacgccgattattacaaggcgctgacgagctcgaacgtgctgaagatggtgcgcgatcaacgcatgaacctgtccaccaccgtctcgccgggggtcgtacacagccagggcattattaacgggatctataccgtcagggttcagtatcccgtctccctgaagctcgatggccaggagcgcagcctgcccgcagcgaattacatcatcgagctgactatccagcaaaccgatccacgggaaaagcccctcggcctggaggtcaggcagaccatcatgacttccagtcattaa

SEQ ID NO: 220040 - DNA, 354 bp, Klebsiella pneumoniae
atgccagtacaaaaaacactgggcgccctggttgtctgcgccctcttcctgacccccctctcgctgcaggccgccacctgccgggctgccaccgcggccgagacaggcagtgacacgggataccagacagcaaaaaaagcggccgaagcctggtatgaacgggaatcagatgtctctgactccctgcagagttgcctggataaaatcaggaccctgtccattaccatgccaaatttcagcagcctgtcttccattctgaatggctacgcggatgaaatttgcagtaccgtggtcagtgaagtgaacagctatatcccgtccagtattgacccctgggatgagttaaccaactaa

SEQ ID NO: 220041 - DNA, 3216 bp, Klebsiella pneumoniae
atggctcagcatgctcaggtcgcagaccgacgtttgtggctcgcagtaccccatgaagaaaaagatgaagccgtcgccgcaggcggcctcgccagtgacggcaaacccaatatcagctggtcaccggacgataagctctggtatgcacgggaaggcaccgccttagcaggcatccggttatggctccctgatacttccgcgcgggcaacgggtgacgccgacccccgggtggagtttgctgacaggttaaaggaagccggtttcatcctggaaggcctccccgtcatggacgggaaatggcaccgggccaaagtcgaagaggataaaaaaggtaaatcacaccgggaagggggcggtgcctataaagggttcactgacggccatcccgccggcatttttgtgaattatcaccgttcgtcggaaaaagaagtttcacggtggcgggctcaggggggagaaacggacccgctgacacggctgcacattcgcgctgcaacccgccaggcgcaggacgatagcgaacgtgtccggcagcaggcctatgcggaaaaagcccgtgcggccagccagctttatgaccagctggccccggcgacagactcacatccttatctgatgcgtaaaggcgtttccgccgatccggcattacgtgtcacccgcaacaaccgactggtagtaccgttttataaccaggacggtcaatttcagtccctgcagtacatcgccgaagatggggaaaagaaactctattctgaagcgcccaaagccggcaatttttttatcaccggcggcatgccggtgaatggccagcccattctgtatgccgaagggtatgcgacggccagaagcctcactgcagcgacaggcttcccggtcgtgatggccatcgatgccggcaatatgagaacgatagcggaaggattcggacagcggttccccgacagcccgcacttcttcatggccgatatggacctgaagaaaaacgataacaaagacgatctgtaccttgccattcagtcctcccgttttgtccctagcgatccgggtttctatatggatgaagaaaaactgaaggaaatgaagggattgtttatggcgttacaggccgccgatcgtgtgcctgacggacatgttgtgataccgccatttactgagcaggaaatgaaagcagggctgtctgatttcaacgatctccattcagctcgcgggctggattcactgaaaaccgtactggcggagacacccggccttgctgcacatctgtatcacccggagacgcaaacaatgacagttccagttgaaaagcaggcacctgcgcagcccttcgctgagccggtccccgcgtatgacaacgtatcacaggaagggcctgacaataccagcgcagatatggagagttatgaagccatgatggctgcggaagcagcagcggcgccggaagcagcagcggcaccggaagcagcagcgacgcccaccttcgccagccttctgaaagtgacctcagcacctgcggaaccagaggtatctgcagatccggcggcagatgacaatctggcaccggtaaaagcaaaaaccacggcagaaaactcgacgaccgctgcgaatgagccggatgaaactgaaaatgccattgtatgggggccccgcgcgccgggcgaaggtaacttcaccccagagacagtgcccgcatcaaccttaattgataccaatgccctgcttcagcgcatcacgcatgaaatgcagagcaacacggtgctgtacaagctcgatggccagccggcatttcgcgatcatggcaaccggatgacaatggaaaccccggatgccagtaagcaggatgacatggtgatggccgcgctgctcacggcaatgcagcattatggtcgcaggatccagatcaccggcagcgagacctttcagacgaaagttatcgggctgattgcatcacacgggctggatgttcagatgcgcgatccggtacagcaggccatgttaaacgaggccctgaaacaacaggccgctgacaggccggatgtccgcgacagtatcaatgccacgcccgtgatgcctgcggatgcgtccgttcagaccagtcccggcaaaaacgcgcccggtccagcaccggcaggagaacaaccctccccggtcccgcccggtggtacggccgtaccgccggttaaggcctctgaaccggcggggcaaccacctttagcgacgaaagccgaggactttaaagacggcgtgaaggggcgcctgctggagcatggccgggcgcattaccagttcaatgaacggaacagcatgaactattacgttcatctcgaaacccgcgagggagtccgggaggtctggggaaaagagctggaacaggccatcaatcagagccgcgtcagtgaaggtcaggtcgtcagtctgaagtttgaagggaataaacctgtcaccgtcaatcagcccgtcatgaaggacggaaaaatccagggatacgaacagatcacggcgcacagaaattcatggagcatgacgccgctggttaatccccgcgttcgcccgccggcgacacccactaccggggaaacactctccgcgtatgatctccatgagtacagcaaaatacaggcccgtctgttgcgcaccgtgcaggcagagaacgtgccaccgatcgccgagcagaaaaataacctgctgtggatacggcccgacgggcggggaacgggcgatgccggcgacccggccacggtaaaacttccggctaaagatggccagtccacgaccccggtcgtcagcgcctggcgggatgacggacagctggcactgcacctggtcaaagggcatggcccttacctacagggcattgcgcagattaacggacagtaccagcacgtcctggcttccatgacgggaaatcagagcaatgccagtctgattatcaacgcgataacccctgatggcctcaaaaccgtgggatacggacaggccttaaacaaggtggaaggtaagcccgttgcgcgggatgccatggcctttcgtttcgcgggggagaccgacacggacaaaaagctgattggtaagctggaaaatccggaaaccttaccccggactatccacgccagactcggatttgatgaacctttccgtcccgacaccgactacccaaagtcgcagccccgggcagaacatcatcacaaggccgcaccgggagccggacgcccggggtaa

SEQ ID NO: 220042 - DNA, 267 bp, Klebsiella pneumoniae; identical to SEQ ID NO: 109876

SEQ ID NO: 220043 - DNA, 1188 bp, Klebsiella pneumoniae
atgaatcccaccaaaccttctgatccctccacccccgatcttgaaatgtttgatttcggtggtgcggttaatgtgcaaagttacaaagcctttctggtatgggcagccaaaaatgccgtcagcgacattcacgttcagggcagcaaccccatcgtcatcgaacgctatggccggatggtaccggtgacgcccttctcgttaccggacaatatcctctcggacattattgacggattatttgacccggaacttcgcgctaaggtccggggaggaaccccccaggaccgggccatacagctcgatggggatcagaataaacgctatggcctcgatcgcggtgaacgcctgcgctttcgctgcaatgttgtgcaggcaaccgcagccaacatgctgaccacctgtgccatgacacagcgcgtcatcccgacagccattcctgagctggaagcgatggggatcgagccggacctgtttgaagcactgttgccccataaaggccttggtctggtctgcggtgaaaccgggtcagggaaaagcaccctgctggccgccatttaccgttactgtgcgaacctcttccctgaccgcaaaatcaccaccgctgaggatccggtggagtacattatcggccgtaaaggcgatgtgctgccggcgacacagctggagctcggccgggatgttgccaccttcgctgaagccatcagggcggcgcttcgccgggcaccgtccattatcggcgtcggggaaatgcgcgacaccgagaccattctggccgccgtgctgagcgcactgttaggtcacctgtgcctgagcaccctccacacggattccgttggcgaaacgatcccccgtctgttagccggtatcccgattgaaatccgggaggcgacggcacgcgatgtgatgggcacgatgcagtacatcatcgtccagcgtctgctcagaaccacagacggcaaacgtcaggcggtacgcgaatacctggtattcgaccagcctctgcgaaacgaaatggctcaggtgccttataccgaatggggccacctgctgaaccggaaagtgcgggagaagaaaggccgcatcgctgataaagccttcacgctgctccgggagggcatcattgaccgcgatgaaatgctctccgttgtatcgcctgcagaacttcgggaaatggaggcctgcgtatga

SEQ ID NO: 220044 - DNA, 819 bp, Klebsiella pneumoniae
atgaaacataccgctatcgcgctgctctgtctgtgtgtcgccggatatgcgatggcagacgacagcgagccgtcaatcccacagggtatggaacactacctggacatcagcaatgacagtgagagtgacatcactgacgcccgggccgccatcatccgatcagcaggtcacaccatcggattccggggcgggaaagcgcaacgtgcatttgagctggttaacgcgctgaatgcccgggaaagcgcgctgaatgccctgtatgacttcagaacgctcgtcagtcaggaaggctggttaccgcctgtcatcgacgaagcgcaggatgtggcgcatatcaccgacgatcagatccgcaccgcaagccgcgtgtaccaaatcattctgccggaacgctttgtcagtaacccgccgtcctggcgccgctggttactggccgggttgagcacgacatccccctctggccaggaaggtggcgtcatccccaaaaacagtgatgaacggaaaatctggcaggaagcggtggagaaaggctggcaggacggacgtgacggtgccgatcacacactggaggccaattttaaccgcctgacccgggattaccggggcatgttgctctactcacgcctgttgcgggaaggctatatctctcgcccggaaattaccgagcaacaacagagcgtcagcggcggccataaaaaactggtcacaggcgatcgcgtccgcaatctgcgcaggcatgccgagttcaatccaaataaaggtcactggaaaccggtcatcaacacggagtcacaccatgaatcccaccaaaccttctga

SEQ ID NO: 220045 - DNA, 468 bp, Klebsiella pneumoniae
atgatagaaaagcttctggccacggtagtggcttcgttcatgctggccggctgccagcaaccgaaatccgtcattacggcgccgtacgttccgccggaaaaaacgtcacagaacgtctcggtagtgcgagctcagcaataccagctctgggacgagaaggtcatcaatattcgcacaccgctaccggcagacacgatatacgctaacagcacgcgcctctcactcgactgggacggcgatgcgatcgaactgctggcccagttggccagacagcgcggtcttcagtttaactacagcggcgtccacctgccgttaccgctgaacattcatgtccgcgatatgacgttccagaatctgctgcgccttgtcgaatcgcaaatcagctggcgtgccacgctgcaccagtatccgggcctgctgcaggtcgagtttatgccggtgaaagcaacgccggggggccgccgatga

SEQ ID NO: 220046 - DNA, 480 bp, Klebsiella pneumoniae; identical to SEQ ID NO: 205205

SEQ ID NO: 220047 - DNA, 606 bp, Klebsiella pneumoniae
atgaaacatctacttccagggctgcttatccccgcagttctggctggctgtgtctcacactcagccagcactgacgcccctgccagcatatacatcgatggtctaatcgcagacagcgctcagactatcagccaggcccagaccggccttcaccagacaggaccgaatccggcccgaccggtatcccctactgcactgattaaaccgttaccaccttcaacgcctgtcagaccaggagtgatcgaaccttaccgaagcccgtcccttccggtatcgcaaaacgttcaactgccggcactgagccatgtttcctacaacgggcgcccgggacctttatcattcccgcaacgcgctggttacgcccggaacattaccgttcaggatgccgcacaacgcatcattcctgtcggctggtcagtcaactggtccccgggtctggaaaaagtgcgccggcaacgggtgaacctgtctcttaacgatcagtggccgcgcgtactcaataatctggtctcggcgaagtcgctctacgcgacggttgaatggggacagtcacgaatcacgataacctcatacagcccccgacctcgtctcttcagccatcagtaa

SEQ ID NO: 220048 - DNA, 228 bp, Klebsiella pneumoniae
atggcaattaatgcgccgcctgaaaaaagaaaaaaccgtacatcagataatgtcatttacattggtgctgaacgtaaagatagaatagaccaaatgactattgagatttcttacagtaccaagaggaaagtctctacagctcgttttttccaatttttaattgatcattatggagaaaatgcaaagaatgaatttattgaagcgataataaagtcggatgattcctga

SEQ ID NO: 220049 - DNA, 843 bp, Klebsiella pneumoniae
atgaataacaacacaaactggatcggagatctggttgcaaaagttctaacgagtggtggcgtaccggagaagaaacattcaatgcatgtggggcatgtccttgagatgtcttctactgcggccactaaaaaattggcaggaggaagtgaatggcgagttcagcagctgcttgaagttgtgcattccgttggtatgaggctggatgatttttttcgactttactatcaggaacaatctaataaggatgttgaagttcatgaggcagtttggagcgatggggaattgaatgagccctgtaagatctatatttctgaaaacccatcggaaccgacaaattactctgcattaaaaataaatgatgtgtggcatgttgttaaaacgagcagtatccgtgatgatgtgctatttgaatcaaaaatgaatattgatttaatcgaaattattccaaaaaaaatagacaaagaaaagcatagaattgctgtgcttgatgacgataaaaatatcgttcagagcctatcatctcttcttgaaggggatagatacacaataaaggaattctatagtatagatgaattagatgatgctatcgaacaaaccccgttcgatgcatacatattagattggattgtagataataaaaccgttttcaatacaattaaaaaaatcagatcatcaggaaataagcatgcgatggttatggttttaacaggacagttatccggggcagttgatagcgagatctcaagagctattaacgaacttgatattattggcccctatgaaaagcctataaaatctttcgttataaaatcaaatgtagataagttttttccaaacaaatag

SEQ ID NO: 220050 - DNA, 930 bp, Klebsiella pneumoniae
gtgtctccctatggagtgaataagaaaaaacctgttggtgatcttgctccattggcatataaaacagtatataacaatgcattaaacaaggttaatgttgattataaaaaaataaaaaaagtcaccataattaatggattaggggtaacccttggagattcaatcattggaatctctgctctgcatgcaattaaatctataaatccggatattcatataacattgattaggccggagcattgccaggactatgtcgaacaaatttatcacatggcatcaggcattattgataagttattatacttaccttttgacatctctaaaatcaaccatgcagacgttaatatagatatgggaaatcagctttattgggaagattttgatagcatcgagatgcatgatttttttctaaataatcttggaatcaaccccaaaagcattaatgataacatcaaaaataactcctggcttttaaacacagatgtaccaaattttgatctgggggagtatatactgttttgtcctaacgcgagtacaaagataagaagcatcccctcacgatttcatgttgaaattgttgaagaattgagccacgagttcggcgttaaagtattaggtttcaatgacgtagatcaccctaatttctttaatataagcaacatatcccgtgatacgttatctttcgcaggaatcataaaacatgcatgttttttgtatacctgcgattcttctgcgcttcatttaggagcaggctttaatatacccacaaggtgtatatttaccactgtcaaacctgagttgcgtagtctttactatactaaatgtgaatcaatttatatcggaaataaccataccgaaggtgttcattgcagcgaagatgattatatgctggaagtattaaataaagaatttgaggaattttatgcataa

SEQ ID NO: 220051 - DNA, 495 bp, Klebsiella pneumoniae
atgcataagtttaaactttcatttttcgccacgattttgtttgtgacctctcaagcaatggctgcgactgaagatataaatattgacggaatgattagccatagaaacaatgacattggatacacactcacattcaatgactttattaaaatgccaatggcacacataaagacaacgacaccgtggacgaaaccaaaaactaaagtagattttgagggtgttagagttaaagacatattaaagttagtcggtgctcaagggagaacattaagaatgagcgcactaaatgattactcaattgatatccctgtctcagatgttgaaaattacaatatcatctttgcttacaaaatgaatggtaaaaaacttaaagtaagaaattttgggccttacttcgttatatacccactcgatgagcacgctagcgagataaacaacccattgtatttatcgagattcatttggcaggttaacaaaattacggtgctaaaatga

SEQ ID NO: 220052 - DNA, 1692 bp, Klebsiella pneumoniae
atgaaaaagattcttattgttctatctggaatggcagttacattaacttttgttgtatcgacaatagttagatacgattctatgttgtctgacaagtctttttatgccataagcggcactcaggaaaactatgcatgggcaattgcaaagttttcaatccaattgtctgagttttactctcttgttaagagcgaagacaaagatatggataaaatccgattaaagctagatatcctttactctcgcattcatgttattagagcaagaagcgaatcgactgaacctttatataatcaagaagggtacaagcagatcatagattctatttattacaaaataaaatcggtagactcgtatataaacacccctaacccaaacattaaaaaagttattgagctagttaataaaattgaaccagactcaaaatcattgaacaacatagcagaccatgccgaggtcaatcaaagaacaaaagcccttgaggactttaaagaaaaaaggcaaagccttattattttattggcaatcgtaacagttttaatctttgctatgtttatcatagtagcttttcagttatataaaaccaataaattattagaagctgaaaaagctgcgtttaataataaaaatgcttttttgggtgcattagggcatgaattaaaaacgtctctgcaggcaatcacatcttcaattgaaataatatccttaaaaaattcaggattggattcaaaacatatcgaaagactggagaatgccgcgaagaggatggaaaaccagatgaaagacctggcagagttcgctaaggttgacaatggaaatgtagtggtaaacaacatatcattcaaccttgccaaacttataaaagatacagttagcgaatgtgaatcaatttccaataaacattctattgatattagaacagacaatattagcgatacttatataataagcgaccctttcaggattgcacagatcacagaaaacctagtaactaacgccataaagtataccgacaaaggtcatataactataaatgcttttttagacggtgatagaacacttgtcatagaggttgaagatacaggaagaggcatcccaaaagataaactaaaatcgatattcctccctttcattcgagtagctgatggagtaaaagttcccggatttggtatggggcttgccattgttatgggggttgtcaaaacaatgaatggaagtattagtgtcaaaagtgagttagggcttggaagtctgttcagaataacgctgcctgtaaaaaaaacgactaaagaagaattggctatttccgatgttattcgaaatgaaggttttacggctaacgatctcagcatattgataattgatgatgatgagttggtttgtgagtcgctcgcatcaattttacagggtatatttcaagtagaatatacctcatctccggaaagggcgctggagaagttgcgacgtaaaccatacgatcttgtgcttagtgacctgcagatgccaatcatgactggcgacgagctttatatggcagtaaaaacaggctcaggtcccaacacacaaacaccatttattttcatcagcgcttattcaagcgagagtccagttgatggggttgagcttcttacaaaaccagtcaggcttaacgatatacgaaaaagtatcgagaaaatatattcaaatagatag

SEQ ID NO: 220053 - DNA, 942 bp, Klebsiella pneumoniae
atgaagaaaaaaaacagcacccccacaccccacgatgccacattcaggcagttcctgacgcaaccggatattgcccgggagttcatggaaattcacctgcctgcagagctgcgcaccgtctgcgatctcagcacgctcaaactggaatccggctcgttcgttgaggatgatctccgccagtatttcagtgacgtgctctacagcctgaaaacgacaacaggggaaggctatgtccatgtactcattgaacaccagtcgtctccggataagcatatggcatttcgtctaatccggtatgcggtagccgcgatgcagcgtcatcttgatgccggtcataaaaagttgccactggtgataccggtgctgttctatacggggaaacgcaccccgtatccatactccacccggtggctggatgagtttgacgatccggcgctggcaggcaaactctacagcagcgctttcccgctggtagacgttacggtcatcccggatgatgaaatcgccggacatcgcagtatggctgccctgaccttactgcagaaacacattcatcagcgggacctggctgaactggttgatcgactggtgcccattttactggccggatatctgtcttcatcacaggtaatatcgctggtacactatattgtacaggcaggcgaaacagccgacgccgaagcctttgtacgcgaactggcacagcgtgtgccgcaacacggagacgcactgatgaccattgcacaacagcttgaacaaaaaggcatcgagaagggcagagctgaaggtctgcagctcggtgaacaacgtggtatcgaaaaaggccgcaatgagggtaagctggaagtagcccgtaccatgctgcagaacgggatcgaccgtagtaccgtcatgaaaatgaccggtctgacggaagacgacctggcgcagatccgccactaa

SEQ ID NO: 220054 - DNA, 1929 bp, Klebsiella pneumoniae
atgaacgccatcattccacccaaacgtcgcgacaagaagtccagctttgttcagctggtcgcgtacgtttctgtgcgtgatgatgtcccgttaaaagacgaactgaaagaagaccagcgtttccagcgaccgtcacgttcccgccaggccatttttgatcgccttgttgactacatgaaccgtagcgaaggaacgatcaccgagcagataactgacatgagtccggaaggagatgtccgctgttctgttgacggtgttatctgtcagcataacctgatgtcggttgaaacagccgcaatggagatgaacagcattgccatgcagaacctgcacgtaaaggatgcggtttatcactatattttgagctggcaggaagatgaaaatccttctgacgatcaggtttttgatagtgtgaaacactcactcaagcgcctgggtatggaagaacaccagtatgttgcggcgattcaccgtgacacggataatctacatgttcatgttgcagctaaccgcgtccacccggtttcttatcgcgcggctaatgtctggaatgacgcggataaacttcagcgtacctgccgggaactggaactgaagcacggatttaaagtggataacggaagctgggttcgtgatgctgacaacaacattgtgcgggccagaaaagggtatcgcaatgcaccacgttcagcgcgacagcttgaacacttctctgataaagagtcccttcatcattttgcagtccagcatgttcgtaagcctgttaatgccatgttccgtgagaagaacgcgtcatgggaaaaactgcatcaagtcatgaatgatgctggtttaatgttagagacttccggcaaaggactgatcgtgcgtgatgtgtgtggcgacgagaaactggccgttaaatcatcgagggttcaccctggtatgacgctttcccgtcttgagcctgcgctgggaacctttgttccctcaccacgttctgcggaaatggttaagcaaagtgttcagacgccttacagtgacaaactgcatgtccgcgatcgtggtgcccgtgcggagcgccggcaggcacgcgctgacgcccgtatcgatttgcgcgaacgctacgagaagtaccgcaatgcctggaaaaaacctgaccttcatgccgctgaacgattccgggctgtgtccgctgcatttaaagaacagaagacccatatccgggataacgagaaagacgcgcatatgcgtaagctcatgtaccacatcgtggagtttgaacgtgagaagtcgatggcagcgctgcgtattgcactgaaggcagaacgccagaagttgtatgacgagggcatgatgcggccgctgagctaccgtgcctggaccgaacaacaggcgcttcacggcgatcaggctgcgctcagtcagttgcgtggctggtcttaccgacagaatcgtaaaaaccggacaccgcaggcctctgacaatattatttactgtgcacctgcagatgacacctcgttgctcaaagcagatggttacgaggcccgcctgcatcgtgacggcgcggttgtctattcccgccaggggcaggatgccatcattgatcggggagaccgcgttgaagtcattaatccgtatgatgacggtgacctcaacacgcgcattgccgttgacatggtggcctggaaatcaggcgagcgtgtcgaattcagccgggatggcagtttcgcttatgctgccggcgatgcggtggctgcacacaacctgcatcatcgtgacagtatcatcgtgccgagtgaccgggaacaatacgactatacgcgggagaagtttaaccagctgaaaggccggtatacggacagcgaacgggaagcacttcgtcagcaatatgacgatcgttattacgacgatgttcgccacaatgacgacagcagttataagccataa

SEQ ID NO: 220055 - DNA, 312 bp, Klebsiella pneumoniae
atgagtaaaagtgagacccgtcagaagacagcccttctacccagcatccgttgcacccctgaagacaagcaggcagttcgtgagaaggcggaggatgcgggcctcagcattggtgcatttatgctgagggcggcgttaggaaggaagattgccccgcagacagatcacaaactcattaacgagctctcacgtcttggcggtttacagaagcacctctttaaagaagggaacggggtcggcagtaaggagtacgcagagatactgcaggccatcaaggcagccattttcaggatagagcaaaagaacgactag

SEQ ID NO: 220056 - DNA, 312 bp, Klebsiella pneumoniae
atggttgccaaaaaatcgaagctgtacagcacaacagacatcgaatctattcgaggtcagctggctgaacttccagatgtgacccaagaaagattacagaaacgagatgtacttgattccctgaaaagtgatattgagacgctgattaaaaacaagggatacacactcagcgaaatccttgagcaccttaaaaactttggttttcatgatgtgacgcttaaagatttaaaagagattactgaaggaaaaagaacacgtcagagaaagcgggtctcttcatctactgaggataaatcgccagttcaggcgtga

SEQ ID NO: 220057 - DNA, 321 bp, Klebsiella pneumoniae
atggtattaaccggtattgaaacagtaaaggtagcggtgatctgtacaggccacgttagccatcaagattcagagattatccctgagtttctctggaacaactggaaagaatctggagagttctggataagcagtactgctcacggttggttatttcggttgtgtgctctgcccgatgaatgggaggagcgtctgaaaaattttggggtaagtgacggctgcatatcaaatcttagagtgctggaatgtgaaggatatgactgggttcatttccaggctgatgcacccatcgtggaagagcttcagcactgggactggtaa

SEQ ID NO: 220058 - DNA, 234 bp, Klebsiella pneumoniae; identical to SEQ ID NO: 109860

SEQ ID NO: 220059 - DNA, 285 bp, Klebsiella pneumoniae
atgttaacactaactgatattcgcgccagcaatacggtgctggttacggaatttggcggcatgcgtgctgtgcatttctgtctgcatgaaaaattaagcggtagcgacaacgatctgtggtttccgctggccaatggagccgacctgttcgaggcgctggaaagcattatgtgcatcaattttgccgctgctaacgttgtctcgctggagttcctgcggcagaacgggaagtgcaaagactaccggatcacctacaacaaggccaaattcaagccattatgttag

SEQ ID NO: 220060 - DNA, 441 bp, Klebsiella pneumoniae
atgtctactgaactgaatcaacccgccatcactgcacgcattatccccaataaccgccgcatggcctttctgccacgcctgttcggcgcctggtatctcacaggtgaggccggtgtctacaaccacgcacgttctctctgcgccgattatcaaggcggttcctgggagttcgtcgaactgtcttgcggtagcggcttcatgtacccactgagcgcagagcgcttcacggtatcggttagcggtaactggttcgaaggggaattgtccgcagaagctaccggtatcgtgctgaccctgttcaccctgaaccacatgatctggcacgcacatgaagaaggctatcagcacatctgcgacatgctgatcacccagcaggaaaagctcaaattatatgccgaccagcacgccgaagccggtttgatttaccgcgcgattgactga

SEQ ID NO: 220061 - DNA, 306 bp, Klebsiella pneumoniae
atgtcccagaatgaagcctattacgacacgctggccctgattgaaaagggggaatggtgtttcggcagtatgaacgaagagaacgaagagcgggcaatcaaggccgctaaggcgctggcgctgtttgcgcgcctgaatgagcagggcagcgacggacacccggtttccgaaatcatcgttgattttatcgctaacctgatgcacctgggggaagcgataaattttcgtgtgctcgatgaggaaagcgcggtgatcccgttggtcaggatcgcagccgtacactttaacgctgaaacaaagtcatag

SEQ ID NO: 220062 - DNA, 411 bp, Klebsiella pneumoniae
atgcacggtaacgtaaatgaaatttgcgcaaggcttctcgatagttttgaaccacagcagcggatcagccttctgatctggactgctgaagatgtccatgactgcaccagtgatatgaacctcactgacgatgaggccgaagccgttctggcagaaatcgcggaatgcagttcacacagccgttatggcgtcggaaaagataccgtctggagcctggcgaagcaggtgcgcgaagatgccgcccgcgatcgaaagattgaggttaatgcagaagcactgcaaaaagtcgtggcgctggcggcgcagtttgtccggcaggaagagatccagtctggcgaaggagctgcacgccgactttatccgcaggagtctgaggcgctggactgtatcactcaggcgattaacggctaa

SEQ ID NO: 220063 - DNA, 231 bp, Klebsiella pneumoniae; identical to SEQ ID NO: 95981

SEQ ID NO: 220064 - DNA, 339 bp, Klebsiella pneumoniae
atggctattcaatcccttcagttccgtaacggctccgtttctcttggtgatgtttttgtttccagctggggttatgagcagacaaatacctgtttttatcaggttatcgccctgcgtggtaagaaaactgccgtactgcgccgcatcgctgcgcagcaggtgaaagcagacagtgcaatgtctggcgagttaaagccggttttgaacgagtttaaaggcgaacccgtgacccgtcgcatccgtgaaaaccatgagcatccgtctgtcagcattgacgagtacgaacaggcttataagaccgatcctaacgaaagccatttttacagcacctggggctga

SEQ ID NO: 220065 - DNA, 861 bp, Klebsiella pneumoniae
atgtcatctgaaaatactctcccgtcggtcgatctgatgtcttgccagcatggcggtgaagtgatcccgtccattgctattgagcgcattatctcgttgcgaaatgaaggtctccgcgtctatctcgacggcatagacaagctgcgaaaagcgcgcgatctgatgcagcaggccggaggctgtcagtacctgtatgactacgacaaagccgtagagagcgccatcaaatggagcgacaccacgccagatcaggccgaaacggctatttcccgcgttatcgacggaaaaatctgggatcggctgatgacggaaaccggtatgtatacgctgatgagcaacaagcaacgtcaggaatgggatcggcaggtggcaggcaaagaaatgccgccgataacgctggataacgttatgagtacgttccggcacctgaacgcaagcaaggctgataccttcacgcaagggctgattgatatctttaaatccctgtcgtgggattataaaaccaataacccctgcatgtttggcaagcgtatcatcatcgcgccgttgctcgatgtctggcgcagtggctgggtgcgcttcagctcagacgggcacaccaaaattgacgatctggcgcggccgttctacgtgctggacgggcgtaacgtgccagattaccgcgtttctgacggtgccagactggatgcctttttcagtgaaaaccagttcaacggtaaggtgttcgagtgtgattacttcagcgtgcgatattacaaaaagggcagcgcgcacattacgtttaaacgcccggatctggttgagaagatcaataatctggttgccagtcactatcctgggatgttaccccctcgcgtgtaa

SEQ ID NO: 220066 - DNA, 180 bp, Klebsiella pneumoniae
atgagtaaagcactgaccccctccctgcttaaagctgaactggacacgcagaaagatgcgttgctgaaggcgtgcctgtatgccctcaacgaaatccctaaccgccgtttaagcggtccgtatgcgtccacgtatgcgctggccgcgcaggtcagtaaactgcttcagagctgcaaataa

SEQ ID NO: 220067 - DNA, 1284 bp, Klebsiella pneumoniae
atgaatactgataactattttttcagagtaccggccacacgcggaatacagggcggcatagaacaatacatgctgacggttcctatggtcgtgttacgtcgtattcttgcaatggacaatgatggcgatgttatggatcgcagccagcgagaagcgaacaaaacgcgggccaaaaaaatacggaattatgttgccggcgcaacatcaaaacgagccccctatattttgccgtcaattaccggaaatattgatagtcatgttgaattccttcccagcgaactctcgccggcagtgggaattcttaaaattccgatggacgctgatttaaaattattcgatggccagcaccgtgcgctgggtatttttgaatttgtacgcgattattccaatacggaagatacgatcagcttgttgcttaccgttggcctgccacttgagttacgccagcagtttttcgctgatattaataacaacgcgagcaaaccggctgcggcgatcagtatggcatataacaacaatgatccggtcaaccagctggcaatgcatctggcccgaaccgtcaccgggctggcgggctcagtggattttgaacacaacgtggtcccggcgaaaagcgcacggctgatcagctttaaagcactgaacgatgcgacgaaaaaaatgctcaacctgcgggccaacagcattccctcaacgcaacagcgtgatatggcagaaaagctctggactgcctgggcacaggcgatgcgctggaatgatattgcccaggatgatatcgctgcggagtaccgtcaggaggcgctgggactgcatggcatcatgataaatgctatcggtatggcaacggccaggatgttacggcacagaacacctgaaagcatcgagaaccttctggcctgcgcggaaaacggtgacaacggttttcattatcgggagtcgtttgtacctgagtgctgggaagggaagtgtgttgatccggagactggcaccattaaaactgaccggcgggcgcttgaagcaacggctgaagcgttgcaaaagctgatagatccgttcgcagatgcgctgtggttgcgtgcttatctgccagcggaagaggcgagtgatacggcattactgaaatatgcagctgacatcgagagttataagcagcgcacagccgtgccgatgatcaatatcgtggagaagctgaaggcgctgggtgacggcgaaccgcagttcagagcgtcggtgctggcttcacgtgaggggctaagccgctatctgaccggggctgaaagctga

SEQ ID NO: 220068 - DNA, 267 bp, Klebsiella pneumoniae
atgggcaataaatataccgtgccgcttaacgtgggcgcgatccgcgaaagctgtttccgtcccgctgacaaatggaccccgccaacgggggaagagctccgctatctgctggaaaatgtgctcaacctgagtcaggaggggctggcacgatatgttggcgttaacggcagaacggtgcgccgttgggtgactggagaaagtgacatcgcgtattccgtctggtgcgtcctttgcatcgatgccggcttgccgccgatctggaaatag

SEQ ID NO: 220069 - DNA, 450 bp, Klebsiella pneumoniae
atgaaattttcagcagaagaactcaacattatccgccaggcggacgccattattgccggcaaaattaccacaacggattttatcaccggtgccgacgccgcgcgttccttgctgcggtttcgtcttgctgcagaaccacgcgaatcattctgcgcgttctttctgaactgccataacggcgtgattgcgtttgaagaactgtttaagggcactatcagcagtgtcaccgttcatccccgtatcgtcctgcaacgcgccctgcatcataatgccgccgccgtggtgctggcgcataaccatccctccgcttccactgaacccagtcaggctgacaagctgatcacagaccgtctggtgcaggtgctggggatggttgatgtcagtgtcctcgatcacctgatagtgggcggcagtgatatttactcttttgctgaacatggtctgatttga

SEQ ID NO: 220070 - DNA, 486 bp, Klebsiella pneumoniae
atgaccatgcaatcagaacttgtttttactgatcctatgctcaacgtcgttattgctgaagttaagcgttttaattgcccgcttctttttgtcaaagatcatggcgtgtatgtgatggcgtcgaaaggtgagaaaaacagtaatgggatgcacaatgtctgttacgccaatggtttcaatccggatacaacggattttgacgagctctgggaccggatgcgtgatgcctgtggcggagatgatttttgcgaatccctggacctcgatccgaggtcgattgaacttctcagccgtaccaaaccctgcctgaaattatgctttcagagacggaactggaagttattgcagggggcagaaataaatcataacagcccgttaaatcgggcttttttatttataactgtatttacatctaggacaaaatgtcctagtatatatttgtggccgggcaaggtgctcaggtcccctaccgagggaaatatatga

SEQ ID NO: 220071 - DNA, 264 bp, Klebsiella pneumoniae
atgactgctctcaattttcagcaacaggctgatgttgcccgttatatccgggaacatggtaataaaaccgttatttcccctgaatggacacttatttatttctcgctgtgtcagtgtgaattacatcaatcgcatgaagccattatttttcataatggccgacctgcagggctatttcttctgaatgaaacaggcgagctcaccgaattatatctgctggggtccctttctgacattctcaccgctgctgcggtcagcaaatag

SEQ ID NO: 220072 - DNA, 480 bp, Klebsiella pneumoniae
atgattaagatggttagcgtcgttccgcagccggaaacggtgaagacgctccggggaaaaatgggcatgactgaaaccgcattaggggccgtcatggggtatgaactgcgtgcctggcagcgtaaggaagccatcagcgacgacctcagtcagtacaacaagaccagtctacgccctggcgaatataacatgctgatgctgatcgccggcgtgcatcctgattatcgcctgaacaggacattcagcccggatgatatggttaaagagcccgccacggccgaagatgttcgccgcctgcgtctggcgctggggctgaaacacgctgaaattgcagcgctgtttggctataagccggcgtcatggcagaccaaagagaaggcgggacagcgtggcgtgaagctcaagaccggggaattcaattttctgttactgctggccggtgagcatccttcactgcagctggttgagaaggtgaaataa

SEQ ID NO: 220073 - DNA, 507 bp, Klebsiella pneumoniae
atgcaatcattccccctgttcgtttcccgtatcgtgccggtgatcaccagtgaccattgcctgcggcagcagcgcaggttcctgcaccacacgtcatgccagattaacctgagatcaggaagtcacctgcgctcaaggcctttctgcacgctatccaggcgggaaataagcgaccggcaaccggctatgccccgcggttactggttcaggcactgcagccgggatgtcatgtttacggggcgcattgatcaggcagatcctatgaaacaggtctactacaacgaaggctggagcggttcgagcaagtatacgtttgaagtttatcagctggagaacgggagttaccgggcgctggtccgcaaatggaatggcaaaatcaataaggtgcagcaggagacgcagtacctgtctgacacgcgggagggactgaaacaccaggactatccccgcacgcgccaggtgaaaatatttctgaattctgacttctgggagaagggtgatgattaa

SEQ ID NO: 220074 - DNA, 444 bp, Klebsiella pneumoniae
atgacagataaccgtaagtgctcgttttatatctacccggagcgcaatgcggcagaccgggtagccgacggctttcttgagaaactgcctcagaaagagcgcggccgcgcgatgcgcgccatgatgctctgtggtgccgcgctgatgaaacaggacgaacgcctgccgttcctgatcgctgaatttctgacggagaacacctcgatgcaggatattcagcggatcattagcagtacgctgccgcagcaggatacgggagagatggcgcgcctgtttgaggcgtttctgcaggccaccggcggtggcagtcatttattaccgccggcaggcggcgcaacgccggaaaacagctccgccgtgccccccgaaccggcagaaccggaggataagaacctggaagaaacccgtaagaacatccagcatctgttcccggatgatgactaa

SEQ ID NO: 220075 - DNA, 975 bp, Klebsiella pneumoniae
atgcgtatttttgttgacgacggttccaccaatatcaaactggcatgggtggcagacggtgaagtgaaaacgttgatcagtccgaacagctttaaaccggaatggtccatgacgctgctgactgattcaacggggccggcttccgccaactatgaaattgacggggaaaagtacagctttgatcagctgagcccggatgctgtacgcaccacggaaacccgctatcagtacagtgatgtgaatgttgttgctatccaccacgcgctgatgcagtccggcattgaaccgcagccggttgacattgtggtgacgctgccgctgggcgagtacctggatgagaacgatcagcctgatatggccaagatagagcggaaaaaagcgaacgtgaagcgtgcggtcgccgttcaggggcgtgaaagctttaccgtgcgtaaagtcagtgtgctgccagagtcggtccctgcaggcttcagtgtgctgaaggatctggacgatctggactccctgctgattgtggatatcggtggaaccacgcttgatatcgcacacgttcgcagcaaaatgtccggcttcaccaagacacattgcgatcctaaaaccggcgtgtcgatcatcaccgaagcggtaaaacatgcactggatgccagcgtgagcacccgtaccagttcgtattttgccgaccgtctgatccaggcgcgacatgatgagtcgtttctttcccgttatcttcagaacgcagaccagcgggctcaggtaatgaaggtgctgcatgagcgtgaaaaagccctgacgcatcgtgtcaccgattcagttggccgctttgccggcttcacgcacgtcatggttgtgggtggcggtgccagcctggtcgccggcgcagtgaagaaggcgacgggtgtgagtgacgatcgattcttcgtcagtgataacccgcagttcgatctggttctgggtatggtggcaatgaagggctga

SEQ ID NO: 220076 - DNA, 741 bp, Klebsiella pneumoniae
ttgaacacttttcccctgcaaatttctcagaattcacgtagcgacgtcaccgggcccgatcgtgtgacatacgcctacttcgattatgccgatgcgctggcgctgcgggagatggccagccaggccgagttacccagatacctgctggccccggaggtgatggtttttcttcggtatgtaccagacctgcgtcagcaggtccttttcgacaccctctggaacacgggggcacgtattaatgaggcgctggcgctgaccggcgccagctttcagcttgacggttcccggccgtttgtccggctgaagacgcttaaacagcgtcagcgcggccgcggcagaccgggcaaggatgaagaagtgttccgtattgttcctctgaccgatcctcaatatgtcaggaaggtgcgtgaatttctgaccaccctgcgtattggtaaacagcaactgctctggccggtgcagagtgataacacgccgcgtaactggatcaggaaggcgctggacctcgcaaaacgtgactctgtcacttttagtatccctgtcacctgccacacgttccggcacagcttctgtatgcacctgatccagcatggggttccgctgaaagttgtgcaggcttatgccggacattcccggctggaaaccacagaaatctacacgcgcgtgtttgcgctcgatgtcggtcgtcagtatggcgtccgattcagcctgcctgacagtcatttaacacttccggaataa

SEQ ID NO: 220077 - DNA, 486 bp, Klebsiella pneumoniae
atgaaactgaaaggatacatcgccgccctgtcgacgctgctgcttagcgggtgtgccatgctccccggacagcccaccgattatggccgcttctgtaacgtctcaggcatcgccagccacggcgaaacctaccgtgtcagtgacagccaggatttctggttaaccccgaacggccgttatttaagccaggctgagtacagcagtccggcagatacgcttcagaaactgacgggcgtggtcagtggtgaagatcctgatcaggtgcggaaaaatgccatcagggtacgggtgttccgtgtcgaaagtgagagcgccagtaaaggggcgtgtctgcctgtgcgctatgacgataaaaacgcgcggcggaaaatggattcgctgactaacggccgccgcatgagcgtgtacagtgaagatgcaggacagtcaggccagcagatttacaataacagccgcggtgccggttttagttaccggctgctatga

SEQ ID NO: 220078 - DNA, 588 bp, Klebsiella pneumoniae
atgaatgagtccatccatgttgtcggctcttttatccttgcgggtatcctgctgtatggcctctggcagggtacacggcgacgccggcgccggcacgaacggaaacaggccagcgcggtacgagtgatcgataaaattaatacgttcccgcatttcgggcagaaaattgcctatctgcgcaagattgacccgtttgtattcgaagagctgctgcttgaaggctttgaacgccgaggctttgaagtgatccgtaaccgccggtataccggtgacggcgggattgatggccgtgtgaagattgatggccagacctggcttgtccaggccaaacgctataccagctatattgccgttggccacgtccgtgacttcagcgacctgctgaacaccaccggtgcccgcggatttttctgtcataccggcaaaacgcgcgaaggcaccaaagaactcattcgtggcgacagccgcttgatcctggtcagtggccagaagctgcttgaccttattgccaccgatgcgccgtttatcccgtatccgggataccgcccaccggccgaaatggttcatcctgaacaggagacaacatga

SEQ ID NO: 220079 - DNA, 249 bp, Klebsiella pneumoniae
ttgaccggctttgacttgatcctgtggcgacggggcctgaactggacccaggaacgcgccgcggctgagctcggtatcagccgtaccagcctggtaaaatatgaggacggtgagacagtaccccggaccatacaacttgccaccgtcgcgctgacgctgaaagcggaatggcccgccctgaaaaccatgagcaaagacaggctgctgcggcagctgaagtatgaagtgctgaggatcgataatgaatga

SEQ ID NO: 220080 - DNA, 462 bp, Klebsiella pneumoniae
atgatgaagaaaccacttattgccggcatcatgctggttgtggcgcataccgccggcgctgcgcagggtgatgataccgatctgcagcagatttataccgaggcgggcattcaggggatatgcagcgccgggatgctggccgtgccggaagaggccagggatgaagttgtcccgcagaacgtcagacacctcctggttcagtgtgcctatttcgacgagcagcagctgcgccggcgtgctggtctgccggtacagacgtttaaccactggcgtgaccgccatgcggtccttaatctttcgtcagaccaggtatctgatgcgctctggttgtcagcgtggcgtgacttccgggcacagctggcatcggcctacccggccacggcggaaaaaaaggcacaggggaaagaggccgtacccgccggcacgaagcccgacactgagcatgggagtgcggcggattga

SEQ ID NO: 220081 - DNA, 546 bp, Klebsiella pneumoniae
atggatatcaactactacgatgaacatcaggaagaatttgaggcggttaaactggcgctgaagggcgaaatggagaggatctggggctccatgctgaaagaaagcggggatagcctggataatgaagccacgtaccttaacctgtttgaagaactgcagtacaccttctctccgtccagcttcagtaaactcaccccgtcgcaggatctggatgaagataaaattgccgcctttgtggccagaacccgcggctataagtacggcatcacgatcaaagcccggccaggccacccgcagaaatggctgaaaggacgaatcaagccacttgaggacgcggcaggcacaaaccagtgctggatcgacaccgccaccatcgtgcatatcggtgccggtcagcagtttgacgatcagtattacctcaccgtgaccacccagaccgggcagagctaccgcgtgaatgaattccgtctgccaggtcgcctgctggaagccgcccaggaatccctgttcagggcgcttgattcaaccacaggcggtaatttctga

SEQ ID NO: 220082 - DNA, 408 bp, Klebsiella pneumoniae
atggtgactcagcctatggtgcttctgggcgcggtacatcccgtagcgggttatctcttcctggaggtgatccctgacagtgaggttggctacgttgatatatatcagctgaccgaccgtctttatgtcggcgattatctggtcattaacaatccggaatggcgccggcgtgaaccagcatttgacggccggccgtgggatgaatgggtgatccgtgaacacctgtcccgcatagactggtattcgaatgacaccattctgaggttatgtcagaggcacaatctgtcatgtgctgacctgcaaaagtggggagaaaacgtggcacgctgggaggatgttccggtgatggttgcacgtgaagaagacgacatgtccatcacacttctttcaggggttacagataactga

SEQ ID NO: 220083 - DNA, 579 bp, Klebsiella pneumoniae
atggccaccaagcatattaatgacgagctctggcatcgtattgaagatctgaccgtccgggcaaatgccagacaaaacctgatccgcccggtcaaagaagcggacgtgcttcatctggtcctgcagcgtggcctggagctgctgacagacgacgatctgctgcagctgggcaagtaccgccggcccataggatttgtgctgcgtcggccgggtatggagatgctgaagctggatacactgagtatggctgacgccgctactatcctcatgcgcagcggaccggcaacgctgtgcatctggagtcgtgacgatatcctgcggcaggccggtgaagcggtgatccgcgaacggctaccggaaacggccctgctgtcggagggggatgaccgggcccggttccagacgctgctgcctggcgtctggaatgccgcgaaccggggcgaaacggccgtgatatccctgcgtgctgacaatgcggatctcgctattgcacgcatcactgacctgatgtgcgaatccctgctgggctataaggggcagcgggcctggcggccaggtgaagacgaacagggggaataa

SEQ ID NO: 220084 - DNA, 273 bp, Klebsiella pneumoniae
atgaacactatctggaaatatgtacttgagccacaaatcaccctgaatatgcctgctggcgcgacgatcctcagtgtgggcacgcagggcgatgatatctgtctctgggcgcgggttgacactgacgcgccgacagagcagcggcgcttcctggtggctggctcgggaatgccgctggctgagtccttcactggcgccaggttcatcgggaccgtgcagatggtgcaggccagcgtaaacctggttatgcacgtttttgaatcggaggtgtag

SEQ ID NO: 220085 - DNA, 306 bp, Klebsiella pneumoniae
atggaatatgaagcgtacaaggttcgcggctacggcttcggactgaagaaagagatcaccggcgtgctgggtcgtttccccacgcaggaagaggcgcagaaggtcgcggatgactacacgcaggcctgcctgccggataacctgccggacagttacgatacgggcatggtccggccggtcgttgccggcgaacctgccgccgtcgatccgggcgtgtttcgcggtccgggcgtaccgttcactatcgatgctggccatgccccgacaggccatacgctgcgcttcggcaagccctctgaccggtaa

SEQ ID NO: 220086 - DNA, 1059 bp, Klebsiella pneumoniae
atgcagcgtctgaacgtccgcaacatccccgatgagatctacagacagtttgagcaggaagccgcccgccaggagcgcagcaccgaggcgcacgcccgttttgtgatcgcacagtccgtgcagcgtgaagcagctctcaccggtgccgatcgttaccgccgggagctgagcgcccgcctcaggcacctgttacccctggtcaacgaagcggcctcccgccccggccccaattaccagccgccgatggacgcggccgccctggcggagcgcctcggtgaggccaacccactggcggtgatgaactggttttccggccacgatgtcccggattttgagcaggccgaccgtctggccacttacctgggctgttccgcacgctggctgaaattcggcgagggacgcccgttcgcgttcggttcgcagcggcgcctcaacggccacggcagcgcgtatgacgatgcgcgcgccctgctgacgccggacgccgccggcaatccggtctataagatcagcctcatccgcgaagactccccggaggggaatattctcatcctgcgtgagttccacaacagcctgcaggcggagatcttctggactaacctccacctgagcgaacacgtcggcaataccggttttcacgatctgtgtgattttttcgccatgctcgagcagctgtacattttctataccaataacgacgtgttcgtgaaaagttacgatatcgcccggggacgcctgcagtacgaatttgaagagaacgactgtcacccgctgctgatcacaaaacgctgcggccgggaaaacatctggtgggaggatatctggcacgaagaaatgctcggtaagcgcaatccggaacgcaacggcgggtatttctggcctgacgatcgggagattatcaatagggtcatggcgcacctgaaggagaagcagcgtctgatggataaggacgatctggagatgctgacgcgctactctttcgggatggacgaacaacgctcccgttacaggctcgccacccacaccggtacgacagaacaggagtctgaccatgaatga

SEQ ID NO: 220087 - DNA, 210 bp, Klebsiella pneumoniae
atgaatgatgaaatccgccatgaaaaacccgttgaggtgaatctgcagctgacgcacagggaagcacaggcgctcgcacagctggtcaagcggcagggattcagtgactgccgccgactggcaacgtctgatattgaggcatacctgatgatggatggtatcaatcaactcatgaaagcactggcggaagagggttatgcaccacggtaa

SEQ ID NO: 220088 - DNA, 1170 bp, Klebsiella pneumoniae
atgcaggattggattattcaattttttgatgtgcatgtttcacgtctcggtacccattcgagtaaatgggatcggcctaatcaagataatgtactaccattttcagtagctgacatggatttttattctccccccgcagttataaactctctttctaataacattcgacacggagtatttggttatcattatgtaccagaagattactttaactctatcattgagtggttttctcgaaggcataattacaatattttacgcgaatggcttgtttgtgcttcaggtgttgatgtatctatatctacaataataaagagtatctcatcacaaggtgatgaaataattatccaagagcctgtatacaatatgttcgcctcttgtattgagagctctggaagaaccgccatgattaacaatcttatttatcgtgataataagtattatattaactttgaagaacttgaaattatggcggcgagggaatcatgtaaggcgatgttattctgtagtccacataaccctataggaagagtctggtcagaggatgaaatatctcagttaggtaatatttgtgctaggcatggagtcattgttatctctgatgaaagtcattgtgacataatttgggcgggtaataaacatattccattttcaaagcctataggaaatatgctatgcagttctgtagtctgtttttcacctagcaagtcttttaatatttctggtgttaaacaaggagtgatgataatcagtaatgctcacctcagagaaaaaataaaggattcacttaaaaatgattatgctaacgatataagtatcttcgccatttcatctctaatcgcagcttataatgactcggaatggtggttggaaggcgttaaggattatatctatcgaaactataagttattccgtaagtatatttttcgatacttaccaaagtgtaaagtagtggaactacaaggaacatatctagtttgggttgatattagtaaaacgggatttaacagcgatcaaatcctagagctactgagaaataatgttgggataatcgtaaatagtggttctatttacggtaagtctggcgagggttttattagagttaatcttgcatgtaaatacagcatgctcaaagtagccataagaagattgaaatatatggatttttag

SEQ ID NO: 220089 - DNA, 1419 bp, Klebsiella pneumoniae
atgattaactggaagaattcagactctttttacaataatgagcatcaaggatcaggaaagccggttctgttgtttattcacagtgaccaactgagttgctgcaatgaattagattcactcctcgaaaacattaacaaccaggatagtatccttgaaaactatttccctatcagggtatcttcatttaacccttcagagaatgataaaaaacttattaacaatcatatatttgtagcatctcctgttctgcaggtgttaaatcatgatggtagccgtagtcatgagtttagttatgtgcctagacaaacaagacattcaaaaggatattcttatacgcataacgagaatgacggggtatttaacgaagatttagttcgctcgcaattggaaataggtcttgcaaaatatcactttctcaataaaaaccaagataaagcatctgatatagcggaaaaaatcattacgaagaataataatgatcccaacgcctataatcaagccaagattatcatcgataaaaaagaaaatgatggatactcaagttttctagactcgaaaataaattatagcgaattgtcaaatgccactacccgcctgttaaataacctgcgaaatatagaagacagattagtgatgaaagagtggccttacaccgatggcgacggtgattggaaatggtatacagattgtgtacgtgaactctcatttcaaatataccaagagttgataacaacttctaataatattgaacttgctgttggaccgcgcaggaaaaataaaaaaacccacctaattttatcaaattggcacaaaaactacaggaaattacaatcagatttcattggcgttcctgatgagatgttagatattattgctcttaagcatgagcgtagtttacgagaaaacatcgtccattgcatcctttgtgaaggtagcgcacatggtttacagatcctaaatacagttaatgaaaaaaacaaccctgagtgcatcattgattttgaaacccatcaagcacaagtaggtgaagtaactgcagatattggcccaactgcagatcttttctcacattatgaaagcgtccacacaaaaatgatgaaccagctcaagtatattaaggatagcgagctagatattaagtcaaaatggtgggagcccgaagcagttacgcttaagtttagacttgaccgtcttggatggcatctgcaagaccatatttgcactcacagaaaattattatcagagatgaattttaaacctaaccttgtagatacattttcacaagttatctttgaaggaatggcgcaggttgaatgcagttctttaggatttgaaaggcaatttaaggatgaactctcaagcctaattgccatgataaacaagagagcggacgaattcttagagttctcaaaaaaataa

SEQ ID NO: 220090 - DNA, 1305 bp, Klebsiella pneumoniae
atgagcaatgaagttgaattctggaaacgtttgaaatgctatagtggcattgattgcgaaacattcctatctgaaaagtggcagttaaaaaacacgataaaaaatagagataatttactcgaatttcttcgacaagaactacctcaagaaattattgatgattttactctctctctatctaaaaaccctatgcagataaaattaagcccatatattttgtcactaattgactgggataattttcatgaggaccctattagaaaacagtttatccctttgtttagtgaatataaaaaggatcatccggcattgagacttgactcacttaacgagagtgacgactcccctgtccaggggataatacatcgctacccaaacaaagtgctttttctctcaaatcatagctgcccagtatattgtcgtttctgtacacgaagctatatggttggcgaaagtacggcatccgtgagcaagggtcataatgtagcaatgcccaataattggcatgatgcaattaattacattattaacaatgaaaatattgaggatgtcgttgtcagcgggggtgatgtatatactctcccagcaaaacatctaaaaacattactcactgaactattaaatatacagtcggtaaagagagtaagaatagcaaccaagtcacttgccgtactacccactaaattcctatcatcagatggttgggctagtgcaataattgatgcgaatacactcgctctaaaaaagagaaaacagttttctattcaaacccacttcaaccatgcgaatgaaataacatggataaccaaaaaagcagctgaccttctgtttgaccatggtataaaagttagaaatcaaacagtactgatgaaaaatattaatgatagtttccagagtcttaaagatcttatggactcattagttaatataaacatcgaaccctattatatatatatgcatgacctagtccctggaagcgagttctttcgcaccaccttgaaaagcgctctagagttggaggaactcttacgaggctcgacatctggatataatatcccaaactttgtcgttgatctccctggcggtggagggaaacgcaatgtttggtcatatcgacactatgatatcgaatcaggtatatctatttttcgctcacctgtaatagataaaaataaattctatttctatttcgaccctatcgctcagggtaaagaaagtgatgtcaatatggaaaactttgaccaagccaatcttgatgctatcatagaaaaaataaaaaataaaaaatttgaggagttacgataa

SEQ ID NO: 220091 - DNA, 1446 bp, Klebsiella pneumoniae
atgcaaaaatatcttcttgtttccgctatgcctactccaaacggagggcttcaccttgggcatttagctgcacaatttctacctcaagatattttcaaaagataccacaagcctagaggaaaaatagttgagttttatagtggctttgatgtctatgataacgcaattagtgttgctgcaaaaaaaaacaatgttagtacatatgaaatggctattcactatcaaaacattattaaggatcaacttagttatttcaatatagatattgacagattaatcaattacttagaaccggaattgataaggaaatcgaaaaacattcttgcatctctaaataaaaacctcagccctaatctttttaccaagaatgtttcatatccttattcggctgataacactccactaagtgggaattggctgacaggcaagtgcaaaaaatgtcaccatgacacaaaaggctattcctgcgatcgctgcggaatatcgattacccccaatgatatttacgactttaattttgaaaaattatacgtaacacaaggaataacttggaaagacaagatgatatctttcctctcagtccctttttctgatcttgagagttacattgaaagtcaacctatatcagatgatataaaatctctttgttatgtgttaaatcaacagaaaaataattgttaccaatggaccgctattgaccagtggggtatgtctctaaattcagaggtaaaagatgaagtattttttaacagaaactttaccttgatagaacaaatgatgatttctgatattttttatgaacatcatggtgagaatccattttcgatagacagtgaagtgacaacaattcttgcttatgggaaggataatgtaggattactcttgattgacttacctagtatactacttggctctaaggtttttgcaccttatagacaacattgggtaagtcacttttattgcatcgatgggcagaaaatgtccacgagcaaaaatttcgctatctggctagatgatattatgacgtctaatataagctccgatagtacaagagcttatatttgcagtgtatactctagagatgaagataccaatttggatttgaaatcactacttgaacatgaaaaatttactgtcgacctgcagcaaggtattctcggcatgaataaaataactcaaaaagattcaggagagaatgtactatcgagtagaatgcagtctatagctgaaaaagtagatactatattctccaatgttgatttggattttaaagaatactacaatagatataaagaattttgttctttgatttattacgtaaactgtcagaaatcagcaatcttatgggtggaaatatttcatgggtactttagcgcattggttccaaacactgcatcttttgcaaaagaaaatgtgagattttatgccaaagattcaaaaaggtaa

SEQ ID NO: 220092 - DNA, 1170 bp, Klebsiella pneumoniae
atgccaaagattcaaaaaggtaaatttatcgcaagtgcaggtttagataattttggggatggtcttatgaccatctttttccctcttattatgttatcaatgacttctgaccctattattttctcactaagttatgtaataaaaactttgtcgtctgttctatcgtcttttctttctggatacatactggattttcatcctatattaaaagtaactaaattagctaaagccgccagactaatttctcttattttaatcatatctctgccaatgaatattatcatgatacttttttgtgcgctaatttttggagccacagaggtatttgttgataactcaacgcaaactattagtttaagtctctatcaaaaaaatgaattagttaacataaataacaaacttcagtcaatggaatatttttttgttttctttattgggccaatcgttggtgcatttatttttaaaccttataacaatacgctgctttacttcgcgatcactacatactctttatctttattgctcttttcatttatgaatgacattccaagaaataatagggaaaataaagaaaatgcttttaatgaaattatgcacggattgaaattcctgttaagtcatgtatcgctgaggatcttatgtatctatgctgccgctttttgtttagttatatcttgtttattctcagttttcccgatgataatctcgtcacaagtgaatgatccgcagttgttcactggattgttctatgcactaaactctctcgggttcgttttagcttcatctctgacccctatagtttcaaaagttatttcaacaagaaaattgctatttatttcattgtgttttacatttctctctagcattattctagtattggatcatactattcatataatgcttatatcagttttttttctcggatgtggtatggggtgctggggctgcattgctgtaacctatagacagaaagtaatacctcaaggtatattctcgaggactaatgctgtttacagacttttttcttggggagctttatgtgtgggaggtcttatgggtggagctatttatcagataatcggttacgattcactcttctatatgacgttagcatttacactattccttactatatctttctattttatgcccttaacggatgagttatga

SEQ ID NO: 220093 - DNA, 243 bp, Klebsiella pneumoniae
atgatgaagttacctacatcacttttaccattcaaaataaacagaatacatactgagttaggtatattcaaagtgaatggatatagatcatcagttagcactgataaaatgaccataattctctcaacggtttttattctttctacagatggctgggaagaacttattttaacccaacctaatagtaacctgctggaacaattaattccttacctggagcaccatttaatgtcaattctgtag

SEQ ID NO: 220094 - DNA, 615 bp, Klebsiella pneumoniae
gtgaatcagtcaggaaaatcggcccatctggcgtggtgtgccctggtggcgctggccttagccaggcagaacggtgacgtggtgtcgccggcacaggaaaatctctttctcacccgctggctggcgaccgcgctgagacaacgtcgtttttcgcgcgatgtcgcttccgacattgagtggctgcttaaacagggccgtcagctgggcgtcaatgcacagctggccagtaagctgaattacctgtggcattcctgtaccggcgagttgtctgagcaaaatgatctgttccggctgaaacatgcgctggaggcagcgaaggctatgaactggaattaccgtgtgttaagcgaccgggaatggtccggccggaatgccgtaaccctgaatgccagcgtgaacggcatttatctttcacgctccagtctcgatgccgcatttgacgacgatggccgacagataaatcctgtgttggtgcgtctgacagggaatgtaccgggactggtgacactgtttatccgcagtgactggctggtgcagcctgaaggtgatgcctccctgacttatctgcaccgattgttggcccgatcggctaaaccgcgcgacaacgcaccttag

SEQ ID NO: 220095 - DNA, 468 bp, Klebsiella pneumoniae
atgctggccattctcgacgatcttgatttacgggactggcagacccggcacaaccttgaaacactggctgaacgcgcaggcctggcaacgcgcagtgatggcggtcataagtcgatttcccgggccagccgcggatgcgatcgcctctcctggcttaatgccatcatcacagaaaaagctcccttcaatccttatgacgcccgttgcgcctgtaagcacatagaggtgactgaggagttctttgccattctgggaattcccctgaaacaggcataccgtgaacgcgccaggctactggaggctgatccgaatgaagtcatctcgtcgggagatattcgcctgattgccatcagagtcgagaactggacccgcaaagccgccgccggtttatcgcgaatgaaagccaggcgcgacgtagctcgccagcgtaaacgggaatatttctcccaaccccccgtactggcctga

SEQ ID NO: 220096 - DNA, 1278 bp, Klebsiella pneumoniae
atgatttcacgctggcaatggattctcaggcagacacttaaaaagctatggttcagggcaacgttatttgcaatggtagcaataataacggcccttttatctattctttttagatcaatgatcccagagtcagtatcagtgaaggttggtgcggaagcagttgataatattctgaacatactggcatcgagtatgctggcggtgaccacattttcactgagtatcatggtcaccgcttacggttcagccactactaatgtgacgcccagagccacgcgtttagttgtagaagacgtaaccacacaaaatgtactggccacttttatcggttcttttctcttcagcctggtagggattattgccctcaatatgggagcctacggagaaaggggtagagtcattttattcattgtaacactggttgtcattgccttaataatcagcacattgcttcgctggatacagcatttgacctctctgggcagggtaggtgagacaacagcaaaagtagaacaggcggcgatcgagacatttattgcgagagcaaaaagtccatgtcttggcggatatccatggcttgagaacaatgaacaaccaaaaggaactgttgccgtatatccggagaaaattggctatgttgaatatattgacatggtcaagctcggcagtctgctgagcaatgatcctcgtcatgtatatcttgtggcgcagccaggcagtttcatacatccatcgatgccagttttgtacctgagttctggtcaggagtcatcaatctgtaccgatttacttgaaacgatcattgtctcggatgtgcgttcatttgctcaggatccccgattctgtctcagcgtcatggccgaaatagcctgcagggccctttcgcccgcagtaaacgatcccggtactgcgattgatgtcattggcagaggtgttcgaatactctccgcttacgcgcagaataaaatagatgaaactgaagtgatatatccttcagtacatgttgcgccacttcagatcaaagacctactggaagactttttcttacctgttgcacgtgatggtgcgagtatgagggagattcagataagagtccttaaaggactgtctatgctgagtaagggttggcctgggatgtttgctgaagccgcacatatactggcatctgaaacattagagcatgcaactcgtactggtcatatagcccatgacgaatatcttataaaatcaatttattataatttattcagtggcgaaaatcctaataaaaaaccatag

SEQ ID NO: 220097 - DNA, 1998 bp, Klebsiella pneumoniae
atgagtgaaaatgatacaatccaaaagaagtctaaaagccagattaacaaagcggtattctttacatctgctttgttaattttccttcttgtcgcctttgccgctgtattcccggatgtcgccgacaaaaattttaaactacttcagcaacaaatcttcacgaatgccagctggttctacatccttgcagtggccctgattctactgagtgtctcgttcctgggactctcacgctacggtgatatcaaactgggtccggaccatgcgcagcctgattttagctatcactcctggtttgcgatgcttttctcggcagggatggggatcggcctgatgttctttggcgttgctgaacctgtgatgcattatctttcacctcctgtcggcactccagagaccgttgcggcagcgaaggaagcaatgcgcctgacgttcttccactggggcctgcacgcatgggcaatctatgccattgtggcactgatcctggcctttttcagttaccgtcacggtctgcctttaacgctgcgttccgcactttatcccattattggcgagcgcatatacggacctgtaggccatgcggttgatattttcgccgttattggcaccgtctttggcgttgcgacatcgctggggtacggtgttttgcaggtgaatgctggtttgaatcatcttttcggggtgcctattaatgaaacggtgcaggtgattctaatcgttgtcatcactggtttagcgacgatttcggtggtgtccggcctggacaagggaatacgtatactgtctgagctcaacctgggcctggcagtgctgctgctggcgctggtcctgtgtctgggaccaaccgtgcttctgctgaagtcatttgtggaaaatacgggcggttatctttctgaactggtgagtaaaacttttaacctttatgcgtatgaacctaagtcgagcaactggctggggggctggacattactgtactggggatggtggctttcatggtcgccgtttgtggggatgttcatcgcaagagtctcgcgcggtcgaaccattcgcgagtttgtcaccggcgtgctgtttgttcccgccggcttcacgctcatgtggatgacggtgtttggtaacagcgcaatctatctcattatgcaccagggggcggctgatctcgccaataccgttcagcaggatgtcgcgctggccctgtttaatttcctggagcatttcccgttttcttccgtgctgtcatttattgcaatggcgatggtcattgtcttctttgtcacctcggctgactccggggcaatggttgttgatacgctggcatcgggtggcgtcgctaacacgcctgtatggcagcgaattttctgggcctcgctcatagggattgtggcaatcgcactgctgattgcggggggactgagcgcgctgcaaaccgtgacaatagcgagcgcattacctttctcagtgattttactgatatccatatacggattattaaaagccctgcgtcgggatttgaccaagcgtgaaagcctgagcatggcgactattgctccgactgcagcgcgtaacccgattccatggcagagacgcttgcgcaatatcgcttatctgccaaagcgctctcttgtgaaacgctttatgggcgacgttatccagcccgccatgacgctggttcaggaagaactgaataaacagggaacgataagccatataagtgatactgatgacgaacgaattcggcttgaagtcgatttgggcaatgagctgaactttatttatgaagtgagacttcgtggctataactcaccggctttcgccatggctgcaatggacaatgacgagcagcaggctgagcaacatcgatattatcgcgctgaggtctatctgaaagaaggcggtcaaaactatgatgtgatgggctggaatcaggaacagctgattaatgacatactggaccagtacgaaaaacacctgcacttcctgcacctcgttcgttaa

SEQ ID NO: 220098 - DNA, 1557 bp, Klebsiella pneumoniae
atgaatactttctctcttttaactactgcctggcttccggtccgttaccgcgatggtacaacgggtaagctggcgccggtcggtctgacggatgaggacgtggtggatattgccgccacgcgagcagatttacaaggtgctgcctggcaatttctgattggactgttgcagtgcgctgttgctcccaaaaaccgcaatggctgggaagatacctgggaagaggggttaagcgcagagacgctcgttgcggcattagcgccgctggaggctgcctttcagtttggcccggatacaccttcgtttatgcaggatttcgattcgttagggggcgataaggtgtcgattgcctccctgttaccggaggtccccggcgcgcagaccactaaattcaataaagaccattttatcaaacgtggcgtgaccaactctttttgcccgcactgcgctgcgctggcgttgttttctttacagctgaatgcgccagcaggcggcaaaggctaccgcaccggactgcgcggcggtgggccgctgaccacgctgattgaactgcaggagtatgagggggagcgactcacgccgctatggcgcaagctgtggctcaacgtgctgccgcaggatgccgcggatatgccgttacctgccgcttacgatgagtccgttttcccgtggcttgctccgacgcgcaccagcgaacaagccagcgccatcactaccccggagcaggtagataagctgcaggcgtactggggaatgccccgccgtattcgcctggattttgccgccactcagccagggacctgcgacatctgcgccagcgaaagcgatgggctactcagccagatggcggtcaaaaactacggcataaactacgacggctggcgccacccgctcacgccgtatcgtctggcgctaaaaggtgacggcggcttcttttccgtcaaaccccagcccggcgggcttatctggcgcgactggctggggttaagccaggacaatcagacggaaagcaacagtgaatacccagcccaggtcgtgaaggtgttcaatgcacgcggtctcaggaacatcaaagccgggctatggggatttggcgccgacttcgacaacatgaagattcgctgctggtacgaacatcatttcccgctgttgacggatgaaagcacgatcccggatttacgcaaagcagcacaaaccgccgcacgcctgctgagcctgctgcgcagcgcgctaaaagaggcatggtttgacgatcccaaaggcgcgcgcggcgactttagctttattgatatcgatttctggaaccagacccagccgctttttttgaacctcatccacgaactggagaatggccaacccgcgcaggagcggctggacaaatggcaaagagagctgtggttattcgttcgtcgctgctttgacgatcgtgtctttaccaatccctatgaaaacaacgacctggcgcgctgcatgaccgcgcgtaaaaaatatttcgccacgtcggcggaaaagcagagtgcaaaagccgccagggctaaaaagcaggaggctgcgcaatga

SEQ ID NO: 220099 - DNA, 519 bp, Klebsiella pneumoniae
atgaaaaaattatcagcagctgcgtttgcatttggtctgttatctgtgtctggatctcaggcattggcggcggatgccaccgttaacttcagcggaaccattcttcaggaagcctgcagtgtagatacttcagacaatactgttaacgttcagctaggcacctacggtgctgctcaattcccgacggtagggacaacgacccttcctgttcctttcgccatcaacttaacgggttgtccggcttcaggtggcccgacggctgcactggtgaccttttcaggggccgcggatgcggcgggtgacctggcgttgaccgcaggcggcgcatcgggcgtttccattaatatcaaaaaagcagatggtaccaacattgatattaactctaccgattccggtattgcgctgactagcgctacgacccaacaactccgctttaccgctaattacatcagtactgcggcttctgtcaccgcaggcgcggctaacgccgtcgcccaggtaaacatctcgtatatgtaa

SEQ ID NO: 220100 - DNA, 2484 bp, Klebsiella pneumoniae
atgatgtctgcgctattcaatgctccagccatatcgtttgcggatgagttttttaatcctgctttgcttgaggttcgcgaaggagaaggtgcgccgacgacagacctctccgtatttgaagtcgtcaatggacagccagcaggaaactaccgggtagatatctacgtcaataacgaaatggtgactgcagatgcccgcgatgtgatgttttcaaagaaccaggatggaaagctggagccctgcgtcacgttggcagaactcggccaatggggagttgatacggcctcatttccagaactcgccgtcagtgatagcgaatgcgctaatcttgcgggcatccctgatgcatttgccgacttccagtttaaccgccaaaagctgaatctgagtattcctcatgcggcaatgaatacgcgcagcctggatgaagtgcctattgaacgttgggatgaaggtattccagcccttctcctcaattacaacatgaatagctatcagagccgatataagggtgcagaaacttacgaaagcacgtatttgaacctgcgtcccggtctcaatatcggtccctggcgtctgcgcaactataccacctttgagcatagtaatcagagtggaagtaaatgggacaacgtctatagctatcttcagcggaatattgtctctttgcgaagccaactgacgttaggcgacagttcagcaccagctgatgtcttcgatagcgtgccgtttcgtggttttcagatggcctcggatgatgacatgctgccttccagcgtacgtaactatgcgcctgtgattcgaggggttgcccgcagcaatgccctggtcaccatccgtcagaatggttacgttgtctatgagaccaaagtggcgccgggggcgttcgagatctccgatttggcctccaccggaggagcaggcgatcttgacgtgaccatcaaagaagccgacggcagcgagcagcacttgcgcatcccctacgcatctttgcctgttctacagcgtgaaggtaagtttcgctatagcgttacgggcggtcaattccgcgcctacgattctcacacggaaaaaaacctgtttgttcagggcaccggaatttatggccttccgtggggctttacgctctacggcggcgtgcaaaacgcaggcaataaatatcagtcatatgcgttgggggtgggtaagaatattggtagctggggcgccttttccgccgacgccatccattcccgatccatgtcgaccgatgccggcaggcaacagggccagtcgctccgggtgcgctatagcaaaaatttcctgcagacgggaacaaattttaccatcgccggctatcgctattccacctccggatttcgctcgctggaagaaacgctgggtacctaccgtagcgataataacattccttcttatatcaccgatcgccggcgtaaccgggctgagctgtcgctgaatcaggatcttggcgataactttggggcgttgaatgcatccttgatcagcgaggattactggcagaacgaacgtaacagcctgtcggcaaatctgggctattacaaaaatttcaacgcgattggtatcagtctgaactactcctggaaccggaataccgggctctatggccatgccgaacaggataatgtggtctcctttgagatcaatgtgccgctggataaattcctcaaccggacatacgcctcatacgggacaacccatgcgagtggaaacggaaccagccacaacctccgactgaatggttcagcctttgatgatgccagtcttgactgggggataaacgcgacgcttgcggggcgcagcgaacaacaagtcgtcgggggtaacgtcagctggaaggcaagccacggaacgttaaatggttcctacagccgcagccgcgacagccaacagctggggtatggcatagccggtggggtagtgattcatgagaatggtatcacgctgtcccaatccctgggtgaaactattggtttagttaaggctcctggcgcagaaggcattggcgtcaataactacgccggtatctctacggatagtcggggttacgcggttgttccgtatctgaccccctatcgccgcaatgatattagcctgaatagtaaaaccctgcgggacgataccgatatcacctatatgaccaataaagtcgtccccacccgcggggctatcgttagagcagagtataaaaccgccattggccaccgtgtcctgatgacgttaacgcggcctgggggaaaaccggtcccctttggcgcgatggcgtcgctgcttaaaagtgaagaaaacgcgtcaattgtcggtgacggcggagaagttctgctgagcggtttaccgcaaaaagggacgctgcaggtgaaatgggggaatggccaggggcaggaaaccacctgtcgggcggattatatagcccataaatctgctggcgcgtccggtctctggaacgcgacgagcgtctgtcaataa

SEQ ID NO: 220101 - DNA, 1173 bp, Klebsiella pneumoniae
atgaagtggtttgtttttatgttcgcggcaatcgcggcaatcgcggcaatcgcggcgacgctgatggtcacccctgaggctaatagcggatcgtttgatccggtaactggtgcttatactacggatccgataaccgtcacgctgacgccaaagaccgtagctgtcagcacgtcggtaatcgcgaatggtgaaagggtttactgggccactgataaatatccccaaggagcaggtacgttttactggggatcgcatacctacaccttggaaagtgcctctgacgtcacattagccattcccggtataaatgccagcggagtctgtactgcaaccggcagcggtacatctcttaccataaacggatgtttttccttttcacataatagcatgatctacatgggaaaaagcgcctcttgtaaatccttttttagtttacagagcaatttaagttctttaacgaattttggcgattttgtcgcacttactcttggccctggtacaaacactatccagttgaacaagacaggtataacagacgtcaatactacctctttcacctatccaagtacgactcgatcaacaagttaccgctggacaacttacgatataaatctacaggcaacactatctgccaaaacgccgccttatacctatctttactgcagcgtatcgcaaggcctccaggtcataatgaccactgggggagtagttcctaatccttttgcgatggtgcctgcggccagtaaacccgcgtattccccgacgattagttactcgccagcgctccctatcatcaatactatcgccgtaaatatccgtaatatcaccgcgattgacattctcccaaggacggtatttaacaccgggactatctccgcctggcgcacaacctatatggaacaaccgcttaccgtaaccgggcaggggaatatcacccgcgattttggcgcatcccagaactttaacgttcttgaatcctggacctgcgcgacaacagggcaaatcgattttcgaataatgcgcgacaataccaacgccaacgtctgttcgggggcgacctatacccatccggtgcagacgccacagtcgttgacggcgcagtggaaagcgcaaagttcgaccgcatcaggcgcatggagcgccatggctacggtgacctttacgctgccctag

SEQ ID NO: 220102 - DNA, 1281 bp, Klebsiella pneumoniae; identical to SEQ ID NO: 180734

SEQ ID NO: 220103 - DNA, 1953 bp, Klebsiella pneumoniae; identical to SEQ ID NO: 180735

SEQ ID NO: 220104 - DNA, 426 bp, Klebsiella pneumoniae
atgaagttcattcctgcagtatcagaagccagcatagtaaaaattcctttgttcacagagcgatgccctgcgggttttccgtcaccggcagcagactacactgagtctgaactggatctgaatgagtactgcattcaccggcgccactccacctattttgtcagggcgattggcaactcaatgactgatattggcctctattccggcgatctgttggtcgtggataaagcagaacagccgcggcacggggatattgttatcgcggaaattgagggtgaatttacggtaaaacgcctgcttctgacgccgcggccagccctgcaggcgatgaacccggacttcccttccctgtacccggatccggaaacgctgcaaattttcggcgtggtgacagccttcattcataaaacccggagggcagactga

SEQ ID NO: 220105 - DNA, 1434 bp, Klebsiella pneumoniae; identical to SEQ ID NO: 180736

SEQ ID NO: 220106 - DNA, 2310 bp, Klebsiella pneumoniae
atgagtttcaatgccaaagatatgacgcagggcggtcagatcgccaatatgcgctttcgcatgtttggtcagattgccaatattattttctacgtgctgtttattttattctgggtactgtgcgggctgatgctgatgtataggcttagctggcaaacctttgtgaacggctgcgtatactggtggtgtacgacgctgggtccgatgcgcgatattattcgttcccagccggtatacaccattcagtattacggccagtcgctggaatatacctcagaacaaatcctggccgataaatatactatctggtgcggagagcagctgtggaccagtttcgtctttgctgccgtggtttctcttgttatctgtatcgtgacgttcttcatcgccagctgggtgctgggccgccaggggaaacagcagagtgaggatgagaataccggcgggcgccagctttccgataagcccaaagaagtggcccgccagatgaagcgtgatggtatggcctccgatattaaaattggcgatctgcctattcttaaaaactccgaaatccagaacttctgcctccacggtaccgtaggctccggtaaatcagaagtgatccgccggctactgaactacgtgcgtgcacgtggcgatatggccatcatttatgatcgctcctgtgagttcgtcaaaagctattacgacccgtcactggataaaatcctcaacccgctggactcgcgctgcgcggcctgggatttgtggaaagagtgcctgacgctgccggacttcgacaacatctccaacacccttatcccgatgggtaccaaagaagacccgttctggcagggctccggtcgcactatctttgccgaaggcgcgtatctgatgcgcgaagacgacgatcgcagctacgagaagctggtcgataccatgctgtccattaaaatcgacaagctgcgcgcctatctgcagaacacgccggcagcgaatctggttgaagagaaaattgagaaaaccgccatctccattcgtgccgtgctgaccaactacgttaaggctattcgctacctgcagggcatcgagaagaacggggagccgttcactattcgggactggatgcgcggtgtccgtgaggacagacccaatggctggctgtttatctcctccaacgctgacacccatgcttccctgaagccggttatctcgatgtggctgtcaattgccatccgcggcctgctggcgatgggtgagaaccgtaaccggcgcgtgtggatattcgccgacgagctccccacgctgcacaagctgcctgacctggtcgaaatcctccctgaggcgcgtaaatttggtggttgttatgtgttcggtattcagtcctatgcccagctggaagatatctatggcgtcaagcctgccgccacgctctttgacgtaatgaatacccgggccttcttccgttcacccagcagggagatcgcggagtttgctgccggtgaaattggcgagaaggaaatcctcaaagccagcgagcagtactcttacggtgctgacccggtgcgtgatggtgtatcgaccgggaaagaaaaagagcgggaaaccctggtcagttactccgatattcagacgctgccggacctgtcctgttacgtcacgctgcccggaccgtatccggccgtgaagctggccctcaaatacaagccgcgtccgaaaattgccgagggatttattcagcgccgactcgatacgcgtgttgacgcccgcctcagtgcgctgcttgaagcgcgtgaatctgaaggcagtcttgccaggacgctttttatgccggatgcgccggcatccgggcccgcggatacaaacagtcacgccggtgaacaacctgagccgatcagtcagcctgcgccagcagacatgacagtatctccggcaccggtaaaagcgccgccgacaacaaagagtccggcagcggaaccttccgtcagagcaacggagcctcccgtcctgcgggtcacgaccgtaccgttgatcaaaccaaaagcagccgcagcggccactgctgcctcaacagcatcctctgccggtgcccctgcagcagctgcaggcgggacagaacaggaactggcgcagcagtccgcagagcaggggcaggacatgcttccggccggcatgaacgaggacggtgtgattgaagatatgcaggcgtatgacgcctgggcagatgagcagacacagcgggatatgcagcggcgtgaggaagtcaatatcaaccacagccaccgccacgatgagcaggatgatgtcgagattggggggaacttctga

SEQ ID NO: 220107 - DNA, 726 bp, Klebsiella pneumoniae; identical to SEQ ID NO: 215807

SEQ ID NO: 220108 - DNA, 867 bp, Klebsiella pneumoniae
atgatgcctggcgatgcgtttagtctgcctgataccgcggcattgaataaagcagcagatcagaaaacatctgtcagtatgccggttcgtggccgtctggttatgaatgatagcggcattctggatgttcagctggtcaaaaccaatactgccggtgccgtgaaggtcgctcgtgctgtactggataaggaaaccggctactggggctatactcttcccgttgtcgcagatgttccggcgcaaactatttttgtcagcccggctgacgcacctggtgcaaacggaccactgacgctaagcgggccggtaccactaccggagcgtattctgcataccggtgatcagatttcggcgccacaggctacagataaaaccgtgacgccggtagcggatgacctcgattttgaagatattattctggtgtttccaccggagtccggcctaaaaccgctgtatatgatgtaccgtagccctcgtaacatgcccggtacagtaagcggcaaagggcagaacgttggcaataactggatggggggggccagtaccggggatggtgctcctgttccttcccagattgcggataaattacgcgggaagactttcggtagttttgattctttccgtcgggcgttctggaaagcggttgctgacgattctgcactaagcaagcaatttagtgaagctgatattaatcagatgaaagctggaagggcacctactgcggactttttagaatcagtagggaaacgtgttaaaattgaattacaccacgaaaaagaaatatctcaaggaggggctgttatggatgtcgataacattaaggcgctaacacctaaaaatcatattgagacacataaaggaaaataa

SEQ ID NO: 220109 - DNA, 561 bp, Klebsiella pneumoniae; identical to SEQ ID NO: 104073

SEQ ID NO: 220110 - DNA, 1242 bp, Klebsiella pneumoniae; identical to SEQ ID NO: 104974

SEQ ID NO: 220111 - DNA, 894 bp, Klebsiella pneumoniae; identical to SEQ ID NO: 154545

SEQ ID NO: 220112 - DNA, 1998 bp, Klebsiella pneumoniae; identical to SEQ ID NO: 104972

SEQ ID NO: 220113 - DNA, 912 bp, Klebsiella pneumoniae; identical to SEQ ID NO: 104971

SEQ ID NO: 220114 - DNA, 1383 bp, Klebsiella pneumoniae
atgtcgttaaaaaccgtatccaatatgatttatcagggtgatatcgctgacctgccgccgctgacggctccaatgccgcgagggggcgtttactatgccgacctggtgaacaacctctttgtcagcaagccggattcgaatttctcgaagaaccgcaattacgccaccgccctctctttcacccgtaccacgctggcatccttcatcagtgccgcagggaatctcgaatatgcggccatcaatacaccacgtattgatcgccatccggcgaccagaaagattctgggtatgcgggtggagaactcggcgacgaactatgcactgagtgcgctcgatcagaccgccgcgaactatgtgccgtcgggcctgacggtatccgcgccagctgccgggtggtgtaccctgaccgaaagcacgatgaatgaagcgcatgtgctcatggataaccagagcacgattgatccgaccctgtataacgtggtgtccctgtttgctaaagccgggtcagcacagtacctgcagattcaggttttaggcgccggggctcaggcgttcgctaactttgacgtacgcaatcagaaggtaaccaaaatgggccgtcttgccgtcagggccaacatcttccaggggttcaatgacagcgcccggtgtgtgttgtgtgtgaaaggaagcgggaatactgtcggctcggttaaatacagcctgattaacgatccgctggcagagccggatgtcgcctacgtcggaaccgggcggaccatgcaggtcagcctgatgcagatcgagaagaacacctatcacgccagctccgcgttctttcctgatggcgcggtcggtggcactgccagtgcgaaccgtcaggcagacgccgcccgtctgcttgatattcctgcgggcgtgaaatcaaacttctcggtgtttgtgaaagggataatgaccccggcggcacttggcaatgctggcggcaatatcctgttctctctgctgaataatacggcgctgaaatacgttggtttcggtctgggcgcggctgacagctccaatgcgttccagtccctggctgcgcataacattaacgccggtagcacgctggcgggcattccgtttacagggaaaatgttttcacagtatggcgaatatgcgcttatgatcaccctgaacaacggcgttctcaaggtctattccggaatgactgataacccggaaactctgctgaccggatgtccggcatttgattacgtcatgctgggcagaaacagctcggtttctggttctacagtgtcaaactcaggtttctggggcggctggctgcagaaagccgtactgttcgattcggcgctcagtgacgcggatatgattgctcagtttgatttgctcgcataa

SEQ ID NO: 220115 - DNA, 2289 bp, Klebsiella pneumoniae
atggcctttaacccagagctggggagcacgtctcccgatgtgctgctcgataacgccgagcgcctggataagctgttgaatgggcccgccgcagatgttcccgaccgtggtggtgatcctctttattcatggcgccagatgatggctaagaatgacgaagttcggcagaacctgattcctctcagtaagcaatatatgacgctgtcagcggcgcaggcggatatcgcgaatatccctgaggggagcaccacgtattaccgcagcccggacgacagcgcgctcgcaatcgaggtgatgaacgttggcgggacgctgcagcctaccgggcgaaaaatgccttctcagcaggcggtagaccagatcaggcaacagattaactacgacgctgtgcagatccttaaaagcgcctatgacgaagatggcaatgtttaccttcttctcgatgagtttggtgagctttttattgcgaacctcggtccggtttcagttcaggaaaagttcagaaagctggatgcgctaattcataaagaccgcgctgctaacctgcatgagtttccggataaaaatgcaaacgtacccgcttttattgatgaaatgggtgatttgtatatcgctggcctgggccccttttctgttgcacaaaaaatcagagccatcgaatcttcaattgttaataacgatgaacatgacataacgcaccagtacgatttcaacgggcgtctgatttcctttcaggatgcttttggggaggtgtttatccccggtcttgataaatcagttcaggagtcgataaaggggatcagggagaactaccagcgtgaccgtgcgccgcatattcgccgcctgacggatgcacaaagccgtgcgctggagtttactgacgaagaggggcggtattatctgaaaggattcggggccaaatcgctggaggaccacttcgagtcacttaaaaagcgcgttaacacgctgtataaggcgaaagcgatttttgatgcctggctggattttggtattgactggaacggtcgtgaatccatttccctgcagctgcaggccgcagccaaccaggtaagcaagttgccatatggtggcgaaatcttttttcgccctggcgtatatcgcctgcatacctatatcactgcgaaacctaacgtgacgatccgctgcgttccaggcgcggtatttatgccgatgctggcgaatgcggcgttttattaccgttcgccgcaggaaatttacctcgaaaactttaacctgattgatgtcgagattgacgggtcggaacagcactcaccgtcttatgacgtgggagcaaagggaacatacctgcagtatttccgtcagtgcatgttcctgcgctgtaacgtccacgacaccggggccactggtatcggtaatgattatcctgacaggtcttttgttctggactgccagacggataactgcggacgcctggcacctgacggcagcggcggtgcttccggtatcggtatcggtttgggtgccatgcaggacgaggcgctgattgtggcgcgtaccattaaccgcaacagcaaaaacttcggcattttctttgagcagcagcgcctttctgggcccggtcagccttacgtctcccggcagattatcgtatccgatgccgtgtgtaccggaaacgggcatggatttggcgactgtggcgcatccggactggtggtggtcaacggccagttcaatgacaacctcaaaaccggaatcagcattgacgcagggacgctggctaacaacggtatcgctccccgcccgggtaagaacgggctgatgctgaactgtcaggctgagcgtaacggggtgaccgggctccattatgactcgaccaaaattcaggccgatggcggctattcattctccgacatgcacatcaacgataacgtccaggatgcgattttaatcgaggctggcgctaacaccctggcggatgttcgcttcgacaatatggacatcaaaaataacggacgttatccggtgaatgttgccagcggcacctttaccgacctcgacttcacgaatcttcgcatgctgcgaaatggcggcgataccgcgtttaagctggacggcaatatcacgcggggctcgattcatggctgtaagctgcgttcgcagaatggcgctgcagcgattaccggctcagggactatcagccatttcgacatcgccgaaaaccagtacaccgataccaacagcaaccccatcaatctcaccggcacactgactaacgtcacctacggccgcaacccaggactggagtaa

SEQ ID NO: 220116 - DNA, 3702 bp, Klebsiella pneumoniae
atgacagaacaaacatcccgccttgctattattctcgatagcaccggagcagaaaagaacgcggatagtttagccagtgctctaaacaaaatgacggcagagggtgaaaaagctgagttcgcaacggataatctttccgcagctactaaagacctgaactcccatcttaaggtcggaccaaagcactctatcgaaaatgcgaagtcaacaaggacgcagcgggaagaaatagaaaaattactggataagctggatcctacatcaaaagcgtttgatgagctggataaagcaatggagcggctgaaaaaggcaaatttatctggtgtgctgggggctgaggaattcagccactacagttccatcattgatcaaactcgcaatcgtcttcagtctgctcaggatgaattgactgggtatacgcaggcccagagagaagctgcgaaagctgctcaggattcagcagcgcaacaggcgcagcaggagcgaattctcacgcaattacaggctcgccttgatcccgtcacccacgcattacaggcccttgacgagcagcaacggcaaattttcgaatatacgtatagtggtgcgcttagtatccagcagtatgatgcctacagcgccaaaattgccgaagcccgccgtgagctgaacggagaagcgcaagcagaacgtgaggcagtaaaggctcaggaagagcagcgtgcttcgttgcagcgattagttggccaacttgaccctttctcagctgcgttagataaaatcaagaaacagcgagctgaactgtcggcagccaaagatgccgggctgcttacgcctgaataccacgcagagctttcaaataagctggatttgacggagaaagggctcaatcaggtcagcaatgaaatgcggtttggagccatctcggcagggcagtataaaaatgccatgcggttactccctgcgcagttgaatgatattgctgttggcctggctggtggtatgcctttgttcactatcttcatgcaacagggttcgcagatcgctgattcgtttggcggttggggtaatctgttcgagatcataaaacagcagttgctgggggccggagatgccgccgatgaatcaagcgattccctgtcagataacgctaactcattgtctgaaaatgcagagaatgccaaaaaacttactggctttctgaatcccatgactatcgggatcggcgctcttgtcgcagttgtgggtactctcacatatgcctggtacaaaggcagccaggagcaacaggagttcaataagtcccttgttctgaccgggaatattgccggggtaaccaccgggcaattggcagacatggcgagatcggtcgcagataatacagggaataccacagccgccgccgctcaggcactaaaccgtgttgtctctggtggtaaaatcgctacaggctcaatgcagactgtcacagaggccgttgtcgcaatgaacgatgcgaccgatgaatctatcgatagcatggtggcagacttcgagaaaatcgcacaaaacccggtagccgctataggagaactgaacgacaaatatcacttcctgactctggcaacatacaaccagattaaggcgttgcaggacgagggtaatcagcaagaggctgcgagactggcgacagagacgtatgctgcgactatgaagcagcgtgctgaccagattcagggtaacctcggctcactggagcaggcatggaaatggttgggtgatgccgcgaaaggtgcctgggatgccatgcttgatattggtcgtgaaaaatctatagatcaaaaaatagcagaagctcaggacgaactgggtagggcgcaaaggtcactttctgatttaagtgccggacaatcaaaacatgagggggcatatggcccatggaagtctagtgacctttccatgcttcaaaagggggtcgatgctgccaaagcacgactatcttcattgcagtctgagaaaatggctcaggacaccattaacgggttatatgatgctggcaaccagaggcagcaaaagggtataaaggctcagcaggaaatcaatgctcttgaggatcgtctagccagtaatgcggaaaagagagccaaggcgcaagaaaaatacacgcaacaattgattgacgctagggctgcaggttcgataatcagtcctgagaaagaggctgatacccgaaaaaaaattgacgagcaattcaaagaccctaaaaccccgaagacaccaaaaggcaaaacctacaccgaagatgctggtacccgcatgctcgaccagcttaatcagcaatatgctgcgttaacttctcagttcgatataacagagaagattggagttgctcaacaagcgcttatcaaatggaagaaacaactcgccgacataaaaagcaagaagaccctgaccgccgatcaaaaatcattgctcgcaaatcagaacgaaattacagcgcaattacagaaaaatgcaggcttagaaaaggaaatcgcgcttcgcaaggatgctgataaattaacagctttcaagaatacgctgacatctggactacagacagatgcgacgactttacaaaatgacctcaacaacaacacaatcttgtcacaggagcaaaagcgccaacaggaactaacgaagattgtcaccgagtatcagaaaaagcatgttgagctgaccaatcagcgcactacagggcagatctcgcaaaatctgtacgaccaggagacggctgctttgcagcaagcgctagatcagcgacttgccatgcaacacgcttattacactcagacagatcaactcaatagcaattggcagcttggcgtccaaaacggaatgcagtcataccttaacagcgtgcccacgctctacgaatcagtgaccgcggcgacaacttcaatattcagttcaactgaaacagcaatctcctcaaacttgtctgcgatgttgcaaggaaccgaaagcctaagcgatggatttaaaaatatggcggtagggatggggcaggcggtaattgatgctttgaccaagatggctgctcaatggctggtataccaggcggttcaattgcttgtagggaaaacggccgccgctggtgccgctgcgtctatggttggacaagctacggccatgtcgcaaatagcaggaattaatgcatacgcatcagcggcagcaatacctgttactggatgggctatggctccagcggctatggcggcagctttggcagcaaccacccctcttatagcatcagtagctgtaagttctgcagccatgactgctggaggtggactaacaggcatggctcacaacggcatcgactctgtcccatctactggtacttggttgttggagaaaggcgaacgcgtcatgacagctgacacatcggcacggctggactcaacactggagaacctgcgcaaaaacggactggactcgacgctaagcaaaccgggttttgggaccggggtgcagaacgtgaatagtgataacagcagcaagaccaccatccatgctcccattgagcagcatttccatacgccgccaggtgtgacacctgatcagatgactctctccatggctcaaacgcagaagcgggcgacaacagatgcgattaatcaggttgcatcgcaagtgttgaagggggatgggaaagttggtaacgcaatgcgtaataaatacccgggaagggggataggttga

SEQ ID NO: 220117 - DNA, 375 bp, Klebsiella pneumoniae
atgaataattttgctatattagttcctttgctttgtctggtaatgcttgggtgcacctatacaaaccaatatgaaagtgggtctcaaatagctgttgaaaatgtgaaccggattgttaagggtaaaacaactgaggctgagttgatcggtatgtttggacagcctttttctaaggcagtcatcagtgcgactgaggtcaagtggatttacacacacaatgcggtgtcagcttcagcccaggcgtttaccatgaaaacaacatcaagcgctgaaatgacaacgcttgatatccttttgaaggatggtgtggtcgttaattatgcgtataccaaatcccctctaaatccaactatgaacatgaaaacgtctttgtaa

SEQ ID NO: 220118 - DNA, 201 bp, Klebsiella pneumoniae
atgtctgagttctcatggcttattccctacattgaaagattagattctgcgaatgccgttattttcgaaaattatggaagatggaaatcgattgatgagtttgaggtgatatcagatatccttgatgatattgccagatatctaggcgtaaccgtctccttacgtccgcagggtgtgtgggttgatattagttattattaa

SEQ ID NO: 220119 - DNA, 399 bp, Klebsiella pneumoniae
atgacccttacagaaatcagaaacgctgtcatttcccgaatgacggcgcagaccgctattgccgctgaggacgtgcgttactcaaatgacagtcgcggcacatacgacccaacgggcaaagccatttggtcgagattaacgaatattactggtgttgctggagcaaatgagatcggcgctggcccggtggttcatcggacaggtgtccttattgttcagatctttgttcccgtcaatgaaggaaccgtactcatcaccgaaacggcagacaaaatccgggagctattcgagtttcaggatgacggccgcctgagttatttcgctgtttcctgctatgacgcgggagagatggacggctggtatcagatcaatttaaacattccatatcgcgctctgtag

SEQ ID NO: 220120 - DNA, 189 bp, Klebsiella pneumoniae
atgccggcatgcacaatttcaatagaggttaaaagccgctggtggctgccgttctacctcaagactctggctttattctgcctgatgttccagctcgaacctgattacgaaaagacagccgcactcatcactaagcatggcatcagccataaagtgaaggcgggaccagtgcgaaagattacggagtaa

SEQ ID NO: 220121 - DNA, 237 bp, Klebsiella pneumoniae
atggcagagatcaccccagcagaacagattcgactgaatctgctttccaccctgaactacgacaccgcagccgctgctaaggctattgagttcgtccaggatagcccgctcaaatatcagctgttcatccagcagtacaaccgcgtggtaactgaaactgaagtggtagcacggactatcaaagcgcttcaggagtcgaccgaagcgctggcgctgtttgataccaccgctgagtaa

SEQ ID NO: 220122 - DNA, 261 bp, Klebsiella pneumoniae
atgagtgaagcaaaaccgcaggacggcagcactgtaaaaggctaccgcacactaacgccagctgacattgagatgatgaatgaggtcaaagctgtaagccgcgagttcctcaaaaagctggatttcctcaagtttgtgcatgaaagcgaaccagagccagaccctcaaactctgcgcagcctggccatcgcccgcaccaaaatgcaggaagcctgtatgtgggcatgccgcgcagtcgcccggcctgatgctgactgttaa

SEQ ID NO: 220123 - DNA, 231 bp, Klebsiella pneumoniae
atgtacagcagactgttagccatatgcctgatgactatgttgatcgggagctgcgcgaaaagtttacccgccccggtagtcgttgatacggcctgcagctgggtgcggattatctacctgaccgaccacgatatcgacgtaatggaccgtcagaccaagcgcgacattctggcgcacaacaaaacagtgcaggcgaactgctcgcaattcaccgaaaaggctacgaaatga

SEQ ID NO: 220124 - DNA, 222 bp, Klebsiella pneumoniae
ttgcgtctgtatgtcgctcagggggatgaagtggagctggatatcgccgaagtggtggacataatcaggcaaggcgggaagtttttaatttcgagtgaggaaggaaaaataaccgggctcgaaaaggtaagaaaaaaccagtttttgctgactattgaagagtttaaagaactggctaatgatgctggttgcattgacgaaaccgagagtaagctgcgataa

SEQ ID NO: 220125 - DNA, 1986 bp, Klebsiella pneumoniae
gtgaaagatagcgaaatcatcgttgataactttgctggtggcggcggcgcctcgacgggcattgagctggcgattggtcgtagcgtggacatcgcgataaaccacgatccaaacgcggttgctatgcataccaccaatcacccggacacgctgcactattgcgaatcggtttacgaagtcaggccaaaggtcgcgaccgctggccgcccggtagcgctggcgtggttttcaccagattgtcgtcacttttcaaaagcgaaaggagctaagccagtcgagaaagcgatccgtggactggcctgggtggtactgcgctgggggctggatgtaaaaccccgagtgatgaagctggagaacgttgaagaatttaaaacgtgggggccgctgctcgctggtgaaatgcgtccagatcctgcccgtgctggcgagacttttgaggcattcattggcatgctgaccacaggcatttcagcggatcatccggcgctggccgaatgctgcgaatttctgaatatttcgcttgatagcgaggatgcagcacgactggtaaacggtttgggttacgccgttgagtatcgcgagttgcgcgcatgtgattatggtgcaccgactatccgtaagcgattcttcatggtgatgcgttgcgatgggaagccgattgtatggccggaagccactcatggagatccgaaatcaccggcggtactggccggaaaactggcgccgtggcgcacagctgcagaatgcatcgactggtccatcccagccccgtcgatttttggccgcaaaaagccgctggcggaaaacacgctccggcgcattgcccggggaatccagcgctttgttatcgaaagcgcttcgccgttcatcgtgaagtgcaatcacacaacgacacgcgggaaatatgactgtttccgggggcaggaactggacgaaccgctgcagacgattacgaaaacccacggtttcgcggttgccgtgccacatctgacgaaattccgcaccggcgccaccgggcagccagtaaccgaaccggtaccaacggtgaccgccggcacgtccactcgcccgggcgggaatggtcatgcgctggggattgttgaggcaggccttgtcccgttcctcgctggcaacggtggcagtgagtaccaggcgaaaccacggccgcttgataaacctgctcacaccatcatgaaagagtcgcgagcctgcgtcgtcgctccagttatcgccaggcagttcggcgccagtgtcgggcatagggctgatgagccaagcgcaacaatcaccgcgggcggtggcggtaaatcgcagctggtagtgccaacgctcattcaaatgggatacggagaacggcccggccaggcacctcgcgtgccaggactggataagccgctgggaaccgttgttgctggtggcgggaaacatgctttagttggtgcattcctggcaaaacactacggcgggaattacaccgggccgggcgtcgggctggatgagcccgcgcactcggtgacgactgtcgatcaccatgccgtggttgcttctcacctcgtgaaactgcgtggcacctgccgggatggccagcgcaccgatgaaccgatgccgactataactgctggcggccagcacgtaggggaggttaaaacgactctggcggtcgaggactatgacgaagagcgagcgcagcaggtgctggcgttcctgcaggaattctgcggagaagaatgcaccgggctggtggaaatcgccggggtaacttaccgcatcgttgatatcgggatgcgaatgctgcaaccgcatgagctctaccgcgcgcagggctttcccgagtggtacatcatcgatcaagattaccgcggcgtgaaatatgcgaaggataagcaggtggcccgctgtggcaatgcggtaccgccgcccttcgccgaagcgctggtgagagctaacttaccggagatgtgcctgaaaaaagacattgcagcatga

SEQ ID NO: 220126 - DNA, 453 bp, Klebsiella pneumoniae
atgactgatatcaccgaactgactagcgtacaaaaaaacgcaaatattcaccgtttatccaggctcattgcctacgcacctaacgatgaattgcggcaaatggctgttgaagttgagcattacacggatcagctcatagaggcgctggagaaggcgcagagcagagacgtaatccagtcagctaaagactaccatttcgaccagcaggcagaccgcatcgacgaactaaacgcagagcttgagcgagagagagaaaaatcacggcgcgtgatgtctcgcatcgccgagctggagtcccgcaccgtcaccgtgaagctaccacaacgacttcagccaggcgctgatggttgggatgactggtatgtgcacagcgacgatgaaggggaatatctcaagtttgatgatgtgctggcaatgctaaccgccgctggcatcaaggtggaggctgagtga

SEQ ID NO: 220127 - DNA, 483 bp, Klebsiella pneumoniae
atgaccgagcaaaccatcctcgacatgtgctgtggctcccgcatgttctggttcaacaaacgagatactcgcgcggtattcgctgacattcgagccgaagagcacaagctgtgcgacggccgccgtctggttatcagtcctgacctcgttgctgacttccgtgcgctgccgttcgctgatgcctcatttccggttgttgtgtttgacccgccacatcttgagcgcgtcggccagaccgcgtggatgggcaaaaagtacgggcgcctgaacaaaaaaacatggcgtgccgacattcgcgcaggattcaaagaggcgtttcgcgtactgcggccacatggtgtgctcatattcaaatggaatgaaacccaaatccccgttagccaaattatagctttaacagacgagaaaccggcgatcggccagcgcaccgggaagaacgataaaacccactggatcatcttcgtgaagggagctgcggtatga

SEQ ID NO: 220128 - DNA, 237 bp, Klebsiella pneumoniae
atgtttaaacagaacgaaaaggctatttcacagattgcggaatatatcccgcgcgcctgccggggtatgcagctgcaggaagcgaaagcgcgtctggagaaaaaaatcgcgctctataccgatgacggctgtgatgttgccgttcttaacgcggcgtttgcatcagctcttaacagtcatacgcgggagtcttttttttcgtgcatcgcagagcagctgcatgagggggccaaatga

SEQ ID NO: 220129 - DNA, 369 bp, Klebsiella pneumoniae
atggctagagcattgtcagcagttgagcgcagagagtacgtccgcgcagtgattcggatcaccagacatcaggggcgactcacaaccgccgaggcaatgaaaaaactggggctgagccgcgctactgtccagcggtatttttccgaagcagaagcgactggtgaggttgtccggcatggtcgtttggggcttttccgcgatcagcgggccgtcatcgactttgacatgaagcgttttggcctggtgccgaaagttgctgttgggatgaattacagccttcttggttgccccgtattccagcgtttcctcgatattcaggaagtcatttttacctgtacgcctgcatcgtcatcccgggaggccgtatga

SEQ ID NO: 220130 - DNA, 744 bp, Klebsiella pneumoniae
atgaaatctatcgcagaaagcatgcataacttcgaccgggaaaacttccagcgagtggctgctgggcttcctgaaatgcaagaccagcaggcggtaaagcgccaggcggccaagactgcggagatcttcaacgagctgttccgccagctgctcgccgtattcccagtgctggccaacaaatcggcggaagacctcaacgagatgcgtcgccagtggctgttggcgttcaaggagaacgggatcaccacgatggagcagattaacgccggaatgcgtgttgcccgcaaacaggaaaagcccttcatgccgtcgccggggcagttcgtcgcctggtgtcgttctgaggaggcggtaactgtaggcctgccagacgcgagtgagctggttgatatggtttaccagtattgccggactcgcggtcagtatccagacgctgagtcttacccatggcctgagcatgaaatcgaaccgttaacgctgaaacataaagcctgctattggctggttacggggctgtataccgacatgcgtgcaaatgcgctgagtgattccgaattgcgccgtaaagcctctgaagagctactgcgtatggttcgtcgcatcaagaccggtgaagctatccccgagcctgttaagcaaatcccaaagttgggcggacgtccgctgagtaacgagcagggcttaaacaaaatcgctgaaatccgcgcgaaattcggtttaggcagagggcggaatcatggctag

SEQ ID NO: 220131 - DNA, 132 bp, Klebsiella pneumoniae; identical to SEQ ID NO: 208875

SEQ ID NO: 220132 - DNA, 537 bp, Klebsiella pneumoniae
atgcaaacacttccctttcaacaaaataccggattcaacaccggcgctctgataaagcgtaatcatctgagagagacagatcacgatgcaattcgttctgccgttcgcgcctgggcagcagctgaagggcaggacgttgtgtcggcccacatcatcgatgagtggcgacagcagggcggcgaggagatcgcgtttcctgacgacatcagccgtgcccgtcagaagctttttcgctacctggacaaccctgccgagtctgagcgctatcgcgagtacgttcgccttcttaccccggcaatcatggccgttcttccgctggagttccgccatcgcctgatgcctcaggacgacattttgtcgcgcctgtcttcggccatgaaggaatgcgctgaagccaagcaggcggtgatgctgaacgcgccggagcaccagaaactgaaagaggtaagcgagggaatagcttcgctattcaggctgatgcctgagcagacaggaacgctgatgacactcgttagctcgatgctgtgcacgctgtag

SEQ ID NO: 220133 - DNA, 156 bp, Klebsiella pneumoniae
atgcagaagaaatgcggttactgccgtaaagcgatcgagggaaaaccagtggtgagcaccctgttgtacctccagggaaaccagctcgcacggaaagaaaaagagtattgctcagaacgttgcgcttctcacgaccagatggctcacgagggctaa

SEQ ID NO: 220134 - DNA, 1089 bp, Klebsiella pneumoniae
atgtccaatttagtcgcaactactgaaaaccagacccagaagatcgacaacgtttctatcctgacgaacggtgaattgttcaaccgcctgcgcacgctctcggaagtaatggccaatagtggaaacttcgtgcctgagcattatcgcgggaaaccagatgcgtgcatggctgtagtgatgcaggcagcacgttggggtatggatccgtttgcagtggcacagaaaaccttcatcgtgggtaactcaggtgtgcttggctatgaggcacaactggtgaatgcggtaattaacaccatggctccaaccaaagaccggatccattttgaatggtttggtgcatgggaaaatatcgttggccgcttcattaaaaaaaccagcggcaaaggtaacgactacatcgcgccgggctgggatttgcaagatgaagctggcgtgggcgtccgcgcctgggcaacgctcaaaggagaatcagaacctcgcgagcttgtgctgatgctttcgcaggcacaagtccgcaactctacactgtgggcgagcgacccccgtcagcaactggcctatctcgccgttaaacgttgggcgcgactgtactgcccggatgtgatcctcggggtctataccgccgatgaaattgacgaacgcgaagaaagggttatcaacccggcgcagacagaaaaggtcacgctgaatgagataacacactccgttggcgattccaccagcacgcaagagcctgcatctaacgttgactctgttgctcacgaactccgagagcggattgatacagctgactcagtggaccaggccaaggccattcgtgtagacatcgaatcacagaaagctctgctgggtactgctttgtataccgaactgaagagtaaggcggtgaaacgctactaccttgttgatgcgaagaacaaagttgaggccgccataaattcacttcctaacccgggggatccggaagccgaagcgttattcgcgaaggcagaaagcaccctgacctcatcgcgccgccacctcggtgatgaactgtatgaccagttccgcatcaccctggacgacatgaaaccggaatacgtgggctaa

SEQ ID NO: 220135 - DNA, 345 bp, Klebsiella pneumoniae
atgagcaaatcactgaatgcacgatgcgtacgtcgctgggaagtggaattcaaacctttttgtgattcaaaagttaacccctactggcgtaagcgcgatctgcgtgggtatatccgcgaagctgcgcttaccaccgcttacagcatggtcgagagcatggctgaacgtaacgccaaggttgactatgacggcacgactgatggctggtcccctgagttctcggcatggtatgacgaacgccgggaacagtacctcaaagaagcgcgtgattacctggacgaagaagccacaaatgacgagatcgatgaagaaatccagaacgagctggaggcctggaatgactga

SEQ ID NO: 220136 - DNA, 309 bp, Klebsiella pneumoniae
atgagcctgaaacaccgcctgcccgagctggaagccagcatcgacccggcagcattgcgcgcagccgccgacgaatattcggatctgcttctgacattgtgcttgtgcatgaagatggccggccccacccgggcaaacgtgcgcgcctgcgccaccgagcttaaaaaacgcctgacaacctggcacagccagaaagaactcaatgcaattctgtccagttgggatcccgttggctatgttctcggcctccgccgggaagcgaacgaaaatgcgcgcgcagctggcgatccagttgatgtttttgtgtga

SEQ ID NO: 220137 - DNA, 276 bp, Klebsiella pneumoniae
atgagcaatgaactcgaattgatgaaaacgcgcgatatctgcgaacaactctgtattacaccgagaacactggatcgctatcgcaagcgcaaaaagagcgaaaaccccttccctgatccagactgttcatatatgggcggcccgaacaaatggctgaaaagcaaagtagtcgcctggcagcaaaaagagatggttaggaaaaccagacggccaatgtcacatcttaatctgccccgcgataacaaaggtcgccttatccggcctgacgcggcgtga

SEQ ID NO: 220138 - DNA, 1230 bp, Klebsiella pneumoniae
atggctatttcagatagttatctaaagtcgtgcctcgggcgcgaacgagacaaggtagaagagaaggctgaccgggacggcctttgggtgcgcatttctaaaaagggcgccgtcacctttttttaccgtttccgctttctggggaagcaggacaagatgacgatcggcagttatcctgagttcggtttaaaggccgcgcgcgatgaagtagccaaatgggctgcgattcttgcccgcggggaaaatcctcgaatcaggcaaagcctcgataaagcaaaaataaacagccagtacacattcgaggaacttttccgcgaatggcacgccatggtttgtatccagaaagaaacagcagggcagatcctgcggacgttcgaacttcacgttttccctaaactaggtaaatacccggcacaccagctgacgctacataactggcttacggttctggacagactggcgcagggttatagtgagatcacccgccgggtaatcagcaacggccggcagtgctattcatgggcggttaaacgtcaactacttgagaccaaccctctgtctgaaatgtctggccgcgatttcgggatccagaagcagatgggggagcgcacccttgatagaaaagaactggcgatagtatggcgagctattgaggactcgcgcctgatggaacggaacaagatactttataaactctctctgctatgggcgtgcagggtcggcgaactgaggcaggctgaagtatcgcatttcgattttgaagagggtatttggaccgttccatgggaaaaccataaaaccgggcggaaaagtaaaaagccgatacttcgaccgataattccagaaatgctaccgttgataaaacgggccattgatcttgcacctggtcgctttgttttctctaagtacgaagataagccgatgagtgaaggcttccatatgagcatcagcagcaacctggttaagttcatgctgaaagcttataacgagcaagtgccacacttcacgattcacgatctgcgcagaactgcgcgcacaaacttttctgagcttaccgagccgcatattgccgagataatgctggggcataaactgcccggcgtatggtctgtatatgacaagcatacgtatatagaagaaatgagagaggcatatggcaagtggtgggcccgactgatgagcatcatcgagcccgatgtactggagttcacgccgcgtcaggccggataa

SEQ ID NO: 220139 - DNA, 1098 bp, Klebsiella pneumoniae
atgaaaaataatatattatttataacttccagaacagatatgggagggggaccaaaacatttacttcagctcatagaaaacatcaatcaagaaaaatataatgtttacttggcttgcccaaaagatgaaccgttttttagcaaatatcgtgaaatagttcctgatgaaaatttttattttttaaaacataggacgtttaaccttgggtatttcaaaggactcctaaatttttgtaaaaaaaataacatatcaataatacactctcatggaaggggggccggggtcttctccagattacttaaagtattcatgagaaaagttaaagtgattcatacatttcatgggctaaatctatctcaagataaggaccttaagacgctattaaaaaatattgtctatgttatatctgaaagggctttttcgtatcttaccgatgagtttatatatgtatctaatggtgaatgtagcatcgctaaaaaaagaggtatatctagcagaacagacaaagataatattattataaatggtgtgagaattccaagtgaacatcaaacaaaactagtaagtgattcatttaaaattgttgtcatttcaaggtttgattatcaaaaaaatactgatcttttggtagacgttattgaatgtttagaacgtgctaacgtgaatccttcgataaatattataattgatgtgttgggtgaaggtgatgatatttacaagttgcataatattactgggttaaaacgagtaaagataatacaacatggaaatgtaaataatccctatgtgttttttgataatgcacattttgtgttaaatacttcaagatgggaagggcttccattgagtgtaattgaagccatggcacgaggatgtattcctattttaacagatgtcgtggggaatactgatattattgggcatactaaattaaaaactaatcttttcacttccgcgttacaggtggcttcattaatgagtcaatatgaagaggaggtttcaaaaatagatttagacgcaaaggaagcgcgggatattattatccataattttaacgaagttataatgtgccataagacatttcttctttatgaataa

SEQ ID NO: 220140 - DNA, 2163 bp, Klebsiella pneumoniae
atgacttcagttataaataagaaagtagataatgattccgaggatatagatttaggccggataattggagaggtgatcgatcatcggaaattaataatatcaatcacagctttgtttaccttgcttgctctaacctatgctttatttgcaacacctatatatcaagccgatgcactaattcaagttgaacaaaagcaagcaaatgcgattcttagcaatttaagccaaatgctaccgaatagccaacctgaatcagcgccagaaatatcattgcttcaatcaagaatgataattggaaaaacagtagatgatttaaatctacaggcgagagtacgacaaaactacttcccaattttcggtaaaggtttttcacgtattacaggagaaaaacctggttcgatcgaggtgtcacgactgtttatcccaaacgtaggcgatgacactccagagatcatagtaaaaataattaatgaaaacagtttcgaagttaatattggagatgatactgtacaaggtaaacgaggggaaatagttgatatcaatggtgccactctcaagattgataaaattgaagctaaaccaggcactgagtttacaattgattatgtatcaagattaaaagctattacggacttacaggaaaatttaacaattgtagatcaaggtaaggatacggggatattgtccatttccttgacaggtgataataaagagctaattagcaagattattgataatattagtgataattatttagcgcagaacatcgctcgtcaggcagctcaagatgcaaaaagcttagattttttgaatttacaattaccaaaggtgcgcagcgatttagatattgctgaaaataaactgaatcaataccgtcgtcaaaatgattcagttgatttatctttggaagcaaaatcagtgcttgatcaaatcgttaatgttgacaatcaattaaacgaattgaccttcagagagtcagagatctcacaattatatacaaaagagcatcctacgtataaggctttattagagaagagaaaaactcttcaggatgaaaagatgaaacttaataaacgagtttcatctatgccagaaacgcaacaggaaatattacgtcttagccgggatgttgaatcaggtcgcgctgtttacatgatgcttctaaatcgtcagcaagaactaaatatcgcaaaatcaagtgcaattggtaatgtgagaattattgatgaagctgtaacgcaacctaagccagtgaaaccaaaaaaggttttggttgttatattgggttttttactaggatgtattgtttcagtaggaatggtcttactgaaagtcttcttgcgtcgaggtattgaatcaccggagcaattggaggagcttggtataaatgtctatgcgagtattcctgtatcagaatcatttgcaaaaaatataactcgtgatagccctttgaaaaaaacaaagtctcaagagacatatacctttcttgcagttgagaacccagcggatcttgctatagaagctattcgagggctaagaactagcttgcattttgctatgatggaagctcgaaataatgtattaatgatttcaggagcaagtccaaatgcaggtaaaacatttataagcacaaatttagcggcaattattgcccagacagataaaaaggtccttttaatcgacacagatatgcgtaagggatatacgcacaaattattcggcaaaagtaatgaacaaggtttatcagacgtactttcaggaaaaattgctatagaaaccgcagtgcaaaaagaactgaatattggttttgattttatttcaagagggatggttcctcctaatcctgcagaactactgatgcacaagaatttcgggcagttaatcagttgggcaagttcaaattatgatattgtaattttagacacgcctccaatccttgctgtaacagatgctgcaattatcggtaactatgctggtacaacactacttgttgcaagatttgaagttaatactgcaaaagaaatagaggttagtataaaacgattcgagcatggtggagttatagtaaaaggatgcatattgaatggagtggtgaaaaaagccagtagttattacagttatggctatagtaattatggttatacttatgactctaaggattaa

SEQ ID NO: 220141 - DNA, 2571 bp, Klebsiella pneumoniae
atgattacaaaattcaaattatctccatgctgtttagctcttataagtatcggtgtgttaaccatatcttccgagctatatgcaagagaattttttaacccagcatttcttaccgatctaaacggttcagacgtgagtccggacctttcggcttttgaggtagcaaattctcaggcccctgggaaatatcgggttgacatcatcatcaatggtaccgttgtcgataccaaagacgtcgattttttttctacggcagaacaaaaagcaagctatcttaacgaggcgggagaagagcttaaactatacccatgcttatcaacagaggaattaagtggttatggtattaaggtaaaagcaatctcttcattaaaaacaaacgctaatggttgcgtcattatcagttccattccagaagcctctgttgattttaactttaacttacagaaacttgagttgagtgttccgcaggccgcagtatcctcgacggttcgtgggtatgtttcacctgatgaatttgacaatggtattaacgcgttctatttaaattatagatataatggaaccagtagctacgcacgagataacggattatcagatcaagagaaccatagtgtcaatttactaccaggcttaaatatcgggccatggcgtattaaaaactacactacgtggaataaagatagttatgataatgatagcaatggtaaatgggatactatctatacctatgctgaacgaaatattatttcactgaaaagcatgttgacattgggtgaaagcacttcggatgctgatatttttgatagtgtgccatatcgtggtgcgcaattaaactcagacgattacatggatgcggaaagtatccagggatatgcacctgtagttcgaggaattgcgaaaagtaacgcaaaagttattattaaacaaagtggatatgttatttatcaatctttcgttcctccaggggcctttgagatcactgatctgtattcgacaggtggcaatggggacctcaatgtcacgatcgaagaagctgacggcactcaacaaaattttgttgtagcttatgcttcacttccagtattacgtcgtgaaggtagcctaaaatacagcattacatccggccaataccgctcctccgacggtagcgttgattatactccgttttcacaagcaacggccagctatggtttaccatacaacaccaccctatacgggggattccaggctgcttcgaaatatcaatcagtggccattggcgtcggtaacaacctgggcgtacttggcgctgtttctttagacgtaacacaggcctggtcgacgaagcaagatcaagataagatatcgggtcaatccgtgcgtatacgctacagcaaaaacctgaacgatataggcacaaatatagctattgcaggctatcgttactcaacgagcggctttaataccctttcagatgttcttgaaacatatcgtgatgactataaatactactacaacgatcgcgttaaaaatagaactgaaattaccgtaagtcaaagcctcggtgataagttaggctattttaacatcggcggtgtaatggaggattactggaatcagcgtcgcaggaataactcacttaacgtaggttacagcaatagctggagcggtattacatataattttaactattcccactcccgctcctcaactgactatgagggttacggtagaaactattctactgataatatcttttcgttcaatatcaatgtgccattgaatttctggatgcctaacacctgggctacttatggtttaaataccagcgatcctggttcgacaagcaacagtgttgggctttcaggtcttgcattggccgataataatttaagctggaaccttcagcaacaatacgataatcgcgattatagtagcggaaccgctggtgttgattataaaggcacctatggagagatttttggtagttataattatgatcataactggcagcgccttaattatggtataaacggtggaattgtcgctcatcgtgatggtatcaccgcagggcaatcattcagcgataccagtgctctcgttaaagcccctggtgttaatggtactcgagtagtgggtaacaccggcgtaaaaactgactatcgtggctacgctatcgtacctaatattacaatgtatcgtagaaatgatgtggtattagatactgaaacgatgcctaatgatgttgaccttgacactacggtagccaccgttgtcccaacccgaggtgcgatcgtacgagcagaatattcagggaaaaaagggatacgcgcgctgctgcagctagtggatacacataataagtttataccttttggtgcaatggtaaatcttgcttccgaaaattcgacgaataataacagcgggatcgttagcgacaatggtcaagtttatctggctgggttaccgacaacgggagtactgcttgtcaaatggggaaatagtatatctaaacagtgtacggtaaattatcagttccctgggtctgaaaaggtcaatggtatcaaacagggccagtttatctgccgctaa

SEQ ID NO: 220142 - DNA, 2181 bp, Klebsiella pneumoniae; identical to SEQ ID NO: 186045

SEQ ID NO: 220143 - DNA, 816 bp, Klebsiella pneumoniae
atgcccgtcgattttctgaccacggagcaggaactgaattatggtcgctatgttgcagaacccaatgacgtgcagctggcgcgctattttcatcttgatgagcgggatcttgccttcattaaccagcgactgggaaggcataaccggctgggaattgcgcttcagctcaccaccgcccgttttctgggctcttttctgacagatttaacccgggttctgccgggtgttcagcattttgtcgcggtacagcttaacatccgccgtccggaagtcctttcccgctacgcagaacgggatactaccctcagagagcatactgcgctgattaaggaatattacggttaccatgaatttggcgatttcccctggtctttccgcctgaagcgcctgctgtatacccgcgcatggctcagtaatgagcgacccggcctgatgtttgattttgccaccgcgtggctgcttcagaataaggtcctgctgcccggagcaaccacacttgtgcgtctcgtcagtgaagtacgcgaacgggcaaatcagcgactgtggaagaaactggccgcgttgccggacagctggcagaccgcccgcgtgacggagctgctggacattcctgaggggcagcgtatttcaccgctggagcaactgaaaaagggacctgtcaccgtcagcggcccggcatttaccgaagcgctggagcggtatatccggctgcgaaacctggagttttcccgactgaattttaccggtctgcctgctatacaactgcgtaatctggcccgttacgcaggcatgccgtcggtaaaatatatcgcttga

SEQ ID NO: 220144 - DNA, 636 bp, Klebsiella pneumoniae; identical to SEQ ID NO: 186046

SEQ ID NO: 220145 - DNA, 2097 bp, Klebsiella pneumoniae
atggaatttaatattacttcaaagtctaatccgtttggcgatacaacagcagaaaatgataagaaaatgttgagcagtgctttcatcgaaactgctgactttagaactttaattgaaacagatgaccgaactattgttgtaggcagacgagggactggtaaaagtgctttattcattcagctaaatgagcattggaagaaagataaaaaaatattaatcctaagtttttcaccagacgacactcaaataattggctttagatcaatgttgaagccatttacaggctcattcaatttagccagggcagccacaaggttattatggcgatatgctatgttaatggagatagcatcatatatatcttctcattataaattatcatctcaaatttcgacagaaacattgttgaatgagcatttaaagaaatggaatgctgcacaaggtgatattttaagaaagtgtaggattgtagcaaaagaatatttagatgaaaacaatcctgaagaatcaattggtgaccttcaatttaatttgaatatttcagaaatcgaaggcaatatagtttcacttcttgagcgctcagacaggaaaattgtcatattgatggataagctagatgaagcatatgaaccggataatataggaatcggaatcatagctggtctggcatatgcctcaattgaattaaatcaaaaagcaaaatgcattcgcccaatcatttttttaagagataatatatttagatcgctatcaaaggaagatcctgactactcaagaaatatagaggggcaagtcataaggctgcattgggattgggcacaactcttaatgctatcggctaaaagaatgaaagtggcatttaatctagatattgagaaagatcaacgggtttgggataggtgtacagccgatgacctcaaaggaaggagtggttttaaacgatgcttgcaatttaccctttaccgccccagagatttactgtcattgttaaatgaagcttttttctccgcatttagagagagtcgagaaaccattattaacactgatctagaatatgcagccaagtcaatttccatggccaggcttgaagacctttggaaggagtaccagaagatctttccttcaatacaagttataactagcgcattccgtagtattgaacctgaattaacagtctacacttgcttaaaaaaaatagaagcatctttcgaatcaatagaagaaaatgaagaccccaaaataatctctgaaatacaattactaaaagctagtggaatcctccaaagtttgtatagcgtaggatttgtgggtatacgtgataaaaacacttcatcttattcattttgccatgatggacgaaccccagataaaggttttgaaagcagtgaaaaactattaattcatccatgttattggcttggtttgaatttaaatcgcaacgctcttgctccagaggaagttgaggaaataaatgacgaatatgatatcaatgttgtttccgataattcagccattagaaataaaacaataggtcaaataaccactcatctggatcaaataccgacaggaaatgaaggggctaatgaatttgagcaatggtgcttagacgcactaagaattgtatttgcatcccacctgacagatataaaaccgcatccaaacggtaacgcggttcagagacgagatattataggtaccaatggtggaaaatcagatttttggaagcgtgtattagaagactataaaacaagacaagttgtttttgatgcgaaaaattttgaagaattaggcccatctgagtacagacaattacaatcatatttaacaggtccgtatggaaaattaggatttattattaatagagaagaaagtgaggcattgaaatcagggagagatttggattggacaaaagaaatgtatcaatctcataattcattaataataaaattacctgcgaaatatatatctaaattgttgcaaaaattaagaaatcctgagaagcatgacgctatagatagtcagatggggaaacttttaactctatatgaaacatcatatatggctattaaaagtactcaaaagaaacgaagaaaatag

SEQ ID NO: 220146 - DNA, 1005 bp, Klebsiella pneumoniae; identical to SEQ ID NO: 154540

SEQ ID NO: 220147 - DNA, 219 bp, Klebsiella pneumoniae
atgaccaacagaaaagcaattcctgacaaagttcaggctaagataatggacaaaagcgcggcgcggtgcgctatctgttacagcacgcggatgaataccgatgtggtgtatcccgttcctggcttccagagtgcacacattgaccaaaacgccgccaactgcgcggagaataatctataccggggttcgaggttcaatcgtgtaaaaaaaccacgttaa

SEQ ID NO: 220148 - DNA, 3009 bp, Klebsiella pneumoniae; identical to SEQ ID NO: 121760

SEQ ID NO: 220149 - DNA, 558 bp, Klebsiella pneumoniae; identical to SEQ ID NO: 121759

SEQ ID NO: 220150 - DNA, 558 bp, Klebsiella pneumoniae; identical to SEQ ID NO: 86000

SEQ ID NO: 220151 - DNA, 372 bp, Klebsiella pneumoniae; identical to SEQ ID NO: 85999

SEQ ID NO: 220152 - DNA, 501 bp, Klebsiella pneumoniae; identical to SEQ ID NO: 85998

SEQ ID NO: 220153 - DNA, 2805 bp, Klebsiella pneumoniae; identical to SEQ ID NO: 101631

SEQ ID NO: 220154 - DNA, 426 bp, Klebsiella pneumoniae; identical to SEQ ID NO: 180720

SEQ ID NO: 220155 - DNA, 435 bp, Klebsiella pneumoniae; identical to SEQ ID NO: 180722

SEQ ID NO: 220156 - DNA, 351 bp, Klebsiella pneumoniae; identical to SEQ ID NO: 121654

SEQ ID NO: 220157 - DNA, 276 bp, Klebsiella pneumoniae; identical to SEQ ID NO: 121653

SEQ ID NO: 220158 - DNA, 246 bp, Klebsiella pneumoniae; identical to SEQ ID NO: 108023

SEQ ID NO: 220159 - DNA, 1647 bp, Klebsiella pneumoniae; identical to SEQ ID NO: 180726

SEQ ID NO: 220160 - DNA, 366 bp, Klebsiella pneumoniae; identical to SEQ ID NO: 121650

SEQ ID NO: 220161 - DNA, 237 bp, Klebsiella pneumoniae; identical to SEQ ID NO: 121649

SEQ ID NO: 220162 - DNA, 615 bp, Klebsiella pneumoniae; identical to SEQ ID NO: 108024

SEQ ID NO: 220163 - DNA, 474 bp, Klebsiella pneumoniae; identical to SEQ ID NO: 104970

SEQ ID NO: 220164 - DNA, 681 bp, Klebsiella pneumoniae
atgaaccccatcgtaattaatcggcttcaacgaaagctgggctacacttttcatcatcaggagctgttgcaacaggcattaactcaccgcagtgccagcagcaaacataatgagcgcctggaatttttaggtgactccattttaagtttcgtgatcgcgaatgcgctgtatcatcgctttcctcgtgtcgatgaaggcgatatgagccgtatgcgcgcgacgctggtgcgcggcaacacgctggcggagatcgcccgcgagtttgagctgggcgagtgtctgcgcctcgggccgggagagctgaaaagcggcggtttccgtcgcgaatcgattctcgcggataccgttgaagcgttaattggcggggttttcctcgacagtgatattcagaacgttgaacgcttaatcctctcctggtaccagacccgtctggacgaaatcagtccgggcgataagcaaaaggatccgaagacgcgtctgcaggagtatctgcagggacgtcatctgccgctgccgtcttacctggtggtccaggttcgcggcgaagcgcacgatcaggaatttactatccactgccaggtcagtggcctgagtgaaccggtggttggcacaggttccagccgtcgtaaggcggagcaggctgccgccgaacaggcgctgaaaaagctggagctggaatga

SEQ ID NO: 220165 - DNA, 579 bp, Klebsiella pneumoniae
gtgctgattggttatgcgagggtatcaaccggggatcaaaacctcgatttgcagaaaaacgcgctgatccgtgcagaatgtgagctggtttttgaagacacggccagtgggaagaatgccaggagaccagggctaaaacgcgcgctgcggcgactccgcccgggtgatgtgctggtggtctggaaactggaccggctgggccgcagcgtgcgtgatctgattacgctcgtgtcggagttgcaggctcgtggggtaaatttccgcagcctgaccgacagcatcgataccagtacgcctgcaggccgctttttcttccacgtcatgagcgccctggcggaaatggaaagagagctgattgtcgagcgtacacgagcgggtttagccgcagcgagggagcaggggagagtcggcggccgccgccgggtaatgactgaagtagtggtggagcggtgccgcagaatgctggagaacggcgctacccggcaccagatcgcagatgtgataggggtgggagtgaagacgatctacaaatactttcctgctgccgtccgcgatcaaggattcctgcccttcccgtga

SEQ ID NO: 220166 - DNA, 234 bp, Klebsiella pneumoniae
atgtattgtccttaccggcacctttcgtactgcgtatcccgtaactacgtggccccgcaggaaagtgactatacccactacgcattcagtatcgcggcagaggattttgagccgttctcatataagctgaaacagtcgggagtgacggtctggaaagacaataaaagcgaagggcaatctttctattttgttgacccggatggccacaagctgggctgcatgtgggagatttag

SEQ ID NO: 220167 - DNA, 363 bp, Klebsiella pneumoniae
atgaaaacgactctgtataaagatttcacatttgaagccgcacaccgactacccaatgtacctgatgggcataagtgcggacgtttacacgggcactcgttcgttgttcgccttgagatcaccggagaggtggataaacacacggggtggattatcgatttcgcagaattaaaagcgatcttcaaacctacgctggataggctggaccactactatctcaacgacattcctggacttgagaaccccaccagcgagatcctagctgaatggatctggaaacagattaaaccgcagttgcctctcctcagtgcagtaacggtaaaagagacctgtacggctggatgcatgtaccgcggtgaataa

SEQ ID NO: 220168 - DNA, 2172 bp, Klebsiella pneumoniae
atgcaggcagattggctggaaaaattttatgctgatgatacatacttggatttcggtaaggcgatgcgcggggggtacaacacaccgcaaatcaatacgctaatccaaaaggccaacgcgcagcagatgccttgcataattccttcagcccgcaaggggcggacggtattttatggcctggcgcaaaacgggcgcagtctagatgaattgcggcgggtgctgacggcagcgttgggctctgcggatacaagtgcggatatcaaaacgctgtatcacccaaccgagccctgggaacaattgctgtttgagcgctctcctaatgggatcctgtctttccattttttacaggttgccgcgataacggcggaagagaccacgaagttgcggggggaacgggctaaaagagtgtattccatgctggaaacggtcatggaactctaccgtcaacggccggttctaaatccgctgattagccgacagacagggcgtattctgcgtgacttttacaccgcctgtcatgcccatgacggaaaagccgctgagctctacctacaggagctacggggaaatcaggcactgtcgccgctgaacctgctgtttctcgaactccaggggatggccgcctcggcgaaatgggaagcgattctgaccttcccccgcctggacgtgctgcttcagggacgagtgcctgaacgtattcagcgcctgcttttgcgttcgaccgggcattacatgatgaatgctattcagaaggcgaatttcccggaggatttaagggatggtgcccgccgactggcgcttgatatgctgccactgtacaaaacaaagccggggtttgcccatcacgacaacttcctcccggactggcagctttgggcgatgggggcggcactgctgggtattaatgggtggcaaacggctagtcctatcctgcaacaggggtggcttcagcaggttgagtattgggtcaatggtgccagcgcgctgccaactgttgtgcaggatgccgaacagaaactgattcaggccccggtagtgatactgctgagcgttgacgatgcgatagccttattagccgaagctttcatggcggatgtggagcgcgaaagcgaaattttcgctcagatgagcgctatgcctgaggttacgcaacaggcgttacgggcaacgccgaaatactgggacgcttggctggggctaaagaaacgctgtgaaccacagggctatggctggcatcactggctgcttgacgttcagcaggcgacggacaaccagcagtatgaatcattacgtcaacagttgacgatacagtttatggactggctccctgcgacctttgatgagcagcaatggatgcaactgctgagccaacagccgacgggcatgctgggccaggcgctgcgtgacgctttacctagcgtgctgcaatggcttaatgagtatggcgtcaacgtctcgtcctctttatggtctgagtggctgatgttgcttgcgctggaaggcgtcagttccgttgaagatgtccgacttggcggtatgatccttgatacgttgctttctggcagcttcagtcacaaggagtatcttgacgcgcttgatgctatcgaggaactttgcgcgaaaaatgaatcatcgcgcacgatagagtacgcgcttgatattgctgaaattctgtatgaccgagtgagtgccgatgatgctcgccggttacgctactgggtggacgttcaaacgatgctggtgcgtcgttgggaaaggctggataacagcatgcagcttctggctcgcatggtggagcggctctacctgcgtaatgatgccggcaacaccttcccgacagaaatcacgccagcgggtgtagcctctccgttacatcgcgatctcagcgggaaaaaactggtgatttatagcctgacggaaaccgctgcccggcgtggtaaagaggcgttgatgcaactgtatccagggctgtctattgagcttaacgatgatcatgtggcgacggatgcgttaatcaatgccgccagaaaagcagactactttatcttcgccagcggaagctcaaagcatcaggcgttttatacggtgaccagttgccgcaaagagattatctatccggccggcaaaggtgcttcgagtatggttgccgcctttattcgtgaactgggctaa

SEQ ID NO: 220169 - DNA, 546 bp, Klebsiella pneumoniae
atgacaacgaaagccaaccagcgccagattttcctccatggcgcgaccggacagcgagtccttagagaggtgctaagcgcgcagttggtgggattgattctgcagcctgaacctatctggctggtatctccctgggtgagcaactttatgctattggataatcgcgccggaagctgggacagcattgagccggcttggggagggcgcgaggtcgactttatagagttgctggccagtgccatcaacaacggggcgcaactgtcgttggtgacgcgcgatttaccgcaaaaccgcagctttatgaaaggtcttgaaaatcgactcaatagccatgcggaataccgtctggaactacgcgaccaactgcataccaaagggctgttaacatcacatttcttcctgaagggctccatgaattttacgtggagcggtgtgaatcgaaacgaagagtatgtcgaactgagttgcgatccgcatatgatcggcgaggcgataacggcattcgaaagtcagtaccattttagtggatcacaggaagcgttctga

SEQ ID NO: 220170 - DNA, 4515 bp, Klebsiella pneumoniae
atggcggaagtcgaactatctctgctgcatcgcgtgctggatgcgctggaagagcaggaaaatgcgctgctggtatggggtgataccggcggtttttttaatcttgaggagttgctggagattattgctcggatagcgcctgatgacgattctgaagaggtgctggagggtttgcttgataccggcatgctgattcaggcgccccatattagcggccggccggtctggcgcacccgcatgggggaaacggtacatctgctgcgtaacctacgtcagtggatgcccaataagtcgctggaagagagtaaaacgctggtctctgactatcgctttattcgccgtccgcgtagctatccgcagcgcgttgctgaaccggaagcattgatcgctgactggaagatgcggctgaaactgagcccgagtatgtgcgagatcatgcggcaggcgctggcatccgcgaagccgtttcggctggcgaagttccaggcgcgcgcaaccgagcgcatcatccagcactggcgcatgcatcagggcaacagcaaaaccgccagcgcgaccatcgtctgtgccggtacggggagtggtaaaaccctgtcgttctatcttcctgcactcaccagccttgcggatgagatctgccgtaattctgcgcgcaaggtgcgtattctggcgatctacccgcgaacagagttgctaaaagatcagttcgctgagacgtttgcccagtgccgtaagctggatggatacatgcaggccaatgcggggcgaaagatccgtattgccgcattctttggcgatacgccggtgaaggcggaatggagcaaaaaagatgttaaaggcaaatctggtcttcccttcggactgatgaaatgccagcagccccagtcaaaagatccgcagcagcaatgcggtggagtactggaatggcggcgtgatgatatcttctctcttcatgaagtgctgacctgtacccagtgccagcaccagttggatgacagcgagatcctgctcacccgtaatacccaacagaccaaaggcaacgggccagatattctgtttaccaccacggaaatgctcaaccttcagatgaactccggctggagtaatcatctgtttggcgtgggggaaggtcaggggccgacgctggtcctgctggatgaagttcatacctacagcgggacgaccggagcgcaaacggcgctgttgttgcgccgctggatgcagcgtacagactgcctgccgcacttcgtggggctatccgctaccctggcggatgctcagcatttcttcgcgaatctggtgggggctcccgaagaagaggtggcccttatcgaacccgaaccggatgacatgatcgaagagggggccgagtacctgctggcgctgcgcggtgatccggtatctgagacggcgttactgtctaccaccattcaggccacgatgttgatgtcccgcatgctggactgcgatgcggataaatccagaggtacgtggggcacgaaaacctttatttttaccgataccctcgacggtaataaccgcctctatcacgaccttagcgatgcggaaggctgggaaacgacaatccctccacgtatcgatcacgcaccgctggcggcgctgcgtaacccgtacgatttcagaagcgatgaacgttcaaagatcgaactgggccagaactggaaagcggcgatggatatcggccatgatctctctcagaacaaggtgatttcacgcacgtcaagccaagatgccggggtcaatgcgcaggcggatgtcgtggttgccacttcatcgctggaagtggggtataacgatcctctggtcggtgccgttttgcagcataaggcgccgaatgatgtagcctcttatctgcagcgtaaagggcgtgccggtcgccctcgcggcatgcgtccgtggatgctggtggtgctatctgaatttggccgcgaccgggtcgcattccagcgctacgaagggttgatgaaccctgagatcaaacgccaggggctaccgctgggtaaccaacatgtacagaagatgcaggcagcgatggcgacgctcgactggattagcaagaccgggtcattcaaggatgtctgcggcatgctcaggaaaccggagcgcgattcgcagaaatttaaacgttattacaccccgctgattaccctaattgaagaggtgctaaaggggggcagaaagcagaatgaactgattcgctatctacaggatgcgctgcaactgctcgaaaatgccattcagagcattctctggagcccgccgcgttcgattatgctggagtttctccctaccattttacgcaacctgaagtcacactgggcggtgaatggcgttgagtgggcggccctgcgcgcaccacaggcagatgacgacggtgagcagtataaaacgacctctcccgcgccggaatttattccgcaaaatctgtttagtgaactgaatctgccggaactggatattcgtctgatgcgcggccgcgataatgttgaacagtgggaaacgctctctttctggcaaggattgcgagagtttgccccgggacgactgtcaaagcggtatgcgattagatcaaacagcagtaccgactggctggtacctgaaacctacgtgccggtggcaaccgatggccgtcagtacgttgattttccggttgcggaggcatttggcgacagctatcaggaagagtgtacggtggaacaccagggaaagatgatcatggtcattaaacccgcgaaggtgctgacgacacgtgcggatatccgaaaactgacggataaaagtaacgctcagttgcagtgggcgttgagcttaatcaacccccatgttgcccatccggatggggtaccaaaaggtgcctggaaaggcacgctctctgacgttacctttttcaaccatcagcatatgactccgctggagctcgtgcgtttttcaacggcatcgcaggcatcgatacgcttccagaatcgcgatcgggcccacgttgaatttagctgggtgaaagagggggaaaaggtcggagtaggcagtcgacagtgggtcgacgccatgcgcctgcgttttcgcctcccgaatgtaaatgtcctgagcttgctacagcaagacgatattctgcgtggcctgcgaccggtttatttccagcataaagtcagacaacttccggaatttgagttcgacagttttaaagctgattgggtgattgaatgctttatgacgctgttggccgaaacgctggtggcgggaagcagtgcctccgttgtctcagcgctgcgagtcatggggacagcgcaagggatggagaggctcgttgatattcctgcgagcctgttccagcctgatgccaacaacgccaacggtggtgatcaggcgctgcagcttaacttacgtgaactgctgattcgtccggagatccaacagttgctgctcgattgcgcagatgcgctatggaagccggtagaagagcttgagggctttgttgactgggcgcgccaggtgctggcggatactctggccgctggtgtccaacagacgttgagcacacaccttccggacgttgatgaacgcgcggtggtgaccgattccctctggtcgaaagattctcgaaccggggaagaaatactggaaatctggctctgtgaaattgaatcaggtggcagtgggatcctgatcaggctgcagcaaaaatgggcggaagatcccgtcaccttcctgaatgtattggtgcgaaatctctctgccagtgactatgagcagatcgactatgacctgcgcatggtgctggcgctgcttcaaaccgatgagacgttgcgccaggccgtaagggacgtgcgcgaggccagtaatatggacgcgcgtcgagaggcgaataaaaatctacatctgcagctttcacgccgcggttttcgcctttcccatagcttcactacggtactgtattcgcgtctgctgcgagctggcagcggggatggcactgatgaccagcttcaccagatgctgacggagtggacctcgcttgaggcgcaatctggcgttgagtttacgctgaatacgatggcgcacgcgctggccgttaaggctcaaggggcggattcagaagcggcggttatctttggcttgcagtgccggaatcagaatttactctggccgcgtgggtacacgattcgtcaggctgagcttggtttctataatatgttctgctcgcgtgccgtggtgactgaacgcctgttggcgggggcgctgttcagcgagcgcattgaaaagctatctctcgatcggcctgactggttagcattgttacatgtcgcgctacgtaaacacgggcgtgcagagctgattctgcctcgcgagcagctaagccagctccatcaagtgataactactgtgcagattgaagccgtcgatcatctgggcctcttgctgtatccgcgcttgggtgaggtccgacgtgagcaggataagttgatattacgtattgaacttgcggagatggtgcaatga

SEQ ID NO: 220171 - DNA, 738 bp, Klebsiella pneumoniae
atgatgacaacgcttaagacacagcttgccggattacgggagcagtaccagttaaaagagcagctgcaatccatgcaggatgtctacgaacagtaccggacgatccgcgatagattgctggatgtcgccgagccgctgcaaaaagcctgcgctcagcttaatgtactgaaaacactgccagaattgcaggagctgctcgatttccaggaaaatgccgccgcattttttggtgtacgggctgaactgcaggccttgaccgcaagcttcaaagagagcggagagcgcatcgaacagaacggtctgggcgaactgctggttcgcctgtcgggcgtgcatgaccgtatcagcgagaaagtcgtgcaggcctgggcggcgtttgtggcggaactggaagcgcgcgcggtgctcgcgcccgtctttcttgagcagcagaaaacgctcggcaacaccatggcgtacaccagctaccgtaacgcccttgataactttaatcgccagaagaccagcgcgccggatagccaggcggttgtcaaaaagctgcaggggtactgcgacgagatggttgaactgaaaaaggggatggaattcaacgctcctgatgatgtgctgcgattcttcgatgctctcgataaacaacatcaggcctcactggcgctgctgacgccagaggtgttgtcttggctaaaagaaaaagcgctgctccagtccttcaacgttacccgtaagagaatgatttga

SEQ ID NO: 220172 - DNA, 3159 bp, Klebsiella pneumoniae
atgaagatgatggaatactggccttcctcgcaaaatattatcgattgtatccgcaccgaggcggaagagttggcggaacatacgctactggccgtgcaccagccggttcgcctgttgcgcatggataaagacggcaacaggcaagggtacggaaaggaagaggatctgctaaaccatttcctcgccaccccgcgtcctatccctattgtgggcaaggccggcgtcggcaaatcgcatatcattcgctggctcgatgccaagctgcgcctgcgcccggaatataaaaataaccaatggcatatcgtgcgtattcccaaaagcgccagcctgcgcgaagtactgacgctgatgctcaaagggctggaagggcagatttttgatgaagcccgggaagacatcaacaaagtgtcagaaaagcgtacgcctcgcgagattgccgattggctgttgatgctgatgggccaggagttgcgtaacctccatgagcgcaacaagctggatatggaagcgctcaaaaaacggatgcaaggtagttcgcctgagcagcaacatatgatgaagccggaagcgatccgcctgcaaaaaatcaacgtgcatgcggaagataaagcgctggcgacgctgatcaacgacgcctatttcaaacagtttttgctaaaagacgagcactgcctgttccgtctggccagccgcctgaccaatggtgcaaacagcaacgatctggacgaaggggagcagcagcttcaggccagcgatctggacttcagctttaacatcaatgacctcagcttaccggcgcgtcagtacatccagaaaagccgcctcaacacccatgaggatgggcgtaaagatgcttcggagatcctgaatctggtactgggaaaagcgacacaggcgctattcaaccaactcttcaacttccggggacgcagcttttccgatctgttcacccaaatccgtgaagcgctgcatgaaaagcagatgacgctgatggtgttggttgaggacatgtcgctgatcacggccattgaagatgtgctgatcgacagcctggagagggaaggtatccgtgacggtaaagcggtgctctgcccggtgtgctccgcgattgcggtcaccgatggttatcagggctatgctcgtcgtcgtcaggggatgctggaccgcgcgaaaggcgagtgggtgattgaagaagtggggggcggtcgcgaagagacccggcagcgtatcgtcgatttttgtggtcgctatatcaacgccgcccgttttggcagcgaggccttactgcagcgttgggaaagtaccgaggataaatcgcactggccgccagactgggaagcaaccgctgatggcgatgaaatggttgaagtttttggccgcagtagccaggggttctcgctgttccccttcaatgctcgcgcgattcacgcgctggcggaaagcttctgccgcgacgatcgcaatgagttgaaattcaacccccgtcagatcattaaccagttgctgctgcgggtgctgcagcattgccgtcgtgacgccgaagaggggcacttcccgccggcacgtctggccgatattgccgctccggcgggactgcgtagttggctgttccgtcaggggttggtggacgtggaacgcgcggagtccgtggtagcgctgtgggggtatccagcgaattccggatcgaccctgagcagcgcgctgccgcctgatgtcgcccgtacttttgatttcgccgatctggctcaggtgttggaaaacaccaagagtgagcccattggggaaactccgtctgaaccaccaagcgtccatagccaagaagttaaagaagacgttaagaaaaagaaagtcgtcatcgagaagtcgacccccgcgccacaagcggtgcccgaggataaagacacgctggcgatcagagaactggatgccgccgtgggcgactggatgctcaaaggggtcaagctggatcgcgactctgcgcgttttatccgcgcagctttagcttatttctttgaaaaacgggccgttttttcctgggcggggacaagtacacgaccaacgctgtatgccggtaatacgggatttgtgaatattgaactgcctgaagcacagggtaaccgtggcgtacacgttgtgaactttattccacaatcggaatacgaaaagcgttccgtgatcctgacggatgccgcaatggcgcttgcccgctttggctactatcgggaaacgaagggaaaaaccgaagattggagctatccgcagggtaaagaggactatctggttatccagagcttctgcgatcgctgggttagctatgcgctggcggagttggttaagcataagcgcaacgatctgcctctgctgctgggcgaacaccttaagctcgctcgctcgctgggcatgaaaaccagcggtggggtgaccgagatgctggggcgactgctgcaaaaaagcgccacgctgaaaaaacagttccgcaccggcttgacgccatcgattatcgatctccgtaaggacgccctcgcgcgctgggatgaagctcaggctaactggttgtcgctggtggcgctaaacgatcatgcgctggaaggcgatgtgttgcacaccgcactgcaaacggcgatgaaagcgaaaccggacggcagcctggcgtcggttgtgaaaaaatcactgtctgaaattcgttcggaggtgggcgcggccgagctattcgcggactgtaaaaacgcggatgattttgctgacctcatcagcggtatgacccagcaagtgaagtcgctggcggacagcggtgactatcccgctgatatgacgcctgacagcctcactctgatggaatctcttaccgggctcaccgaaggcggcgtatggctgaccattactaaattgcggggcattacgcaatcggaagatacgcaacgtcaatggcagtcactttgtgaactggacggtgccttaattacccggctaatgatcgcgatgcagtactggcaactgatgtataaacgggtatctggcgcgatcgctacctacaacaatagccacggcgggcaccggattaacgaatgtcgggctcagattgacaccacgctgcaggaactcgatctggttctggaggagttgcagcaggccgcagggaaacatgatgacaacgcttaa

SEQ ID NO: 220173 - DNA, 900 bp, Klebsiella pneumoniae
gtggcaatcacaaacaacgccgccgcaggaagccagattcgtctgctgtgtatgatcgatcgtgtgctgaacagacggatgggggagccgatttctaagacggcattggtcgacctgctcaggccagagatgctgcctgggtctaacggagcgagtaaaaggctgcctgttgaaatttcgttctgggctaaagaggggctgtggaaggtggaagaggccggccttagccagcagtcgccgctgtgcagcgaacgcgatctgccgagccgtgtgctgcgcaccctgatcaacaccgaaaagacggtcccgctgctgacggggacccgcggccaaccgtttttaatgagcgtgacctcggtgctggcgcaggataaatataccctgcgcggcaatggaccactgaccaaagatgccgtgccaacggcggtcgggccgatgattaacgataaaatggctggcgtggggcgacgtaatcttaacaccagtaacgaagcggaaccgttccttgattacgcctacttcctcggttttaccgagccgtatctggatggctgggtgatggaccctacgcgtgcgattgaaggggtgctggataacctgcagctggccccggccacgccaattcaacagttccttgatcggctggcggagcaattaccgatgctggaccgaggaaaataccgtgagctcgttgagccgctgattatcgccgaaaactggcagccgctggaggggcgtatcatcagcgcatcgctgagtcaggcgttactgcgccttgaactgaccatgcagttaacattcaacaccctatctgatgatcctgatgactggatactgcaggacacggacggctctcagcgtcgtatcagtaccgttagcctcggggaggcacgaaaatga

SEQ ID NO: 220174 - DNA, 2451 bp, Klebsiella pneumoniae
atggatactcagtggctacaactccgtgcggtgctgaacggcgagcacgatgaaaaagacgggattagcgggcaattttttacccgcctcctgtactgtctggatgatgatcaggctggagagagcgaccgcctgcatgcgttctatgatgctttgcagtgcgctcgggtgcacggtctggttccgttaatgcttccgtatcggcatctaacggaaaataccgcactgagccgttttggtctgtgccggcatcgagattatcccggcgaactcctgctggagcgtggtgctgaagcgctggatgcgaatttgcttgcggtatggcagggagaaaagcgccgttttcttgagtctcctcccttggatgcgattctccccgctgtactcaatgatccgcgttacacgcactacacctccgtcgggcagcagcaggcggtgcgtacggtactgaccagcccgcaggataagacgctgttggtgaatctgcctactggggcggggaaaacctttgttattcatgcccagatgctgacatcaccccgccggcacctgacgctggtgattgtccctaccgtggcgttggcgattgaacaagcgctgcgtgcgaaagaggtgatgcagcgggcgggcaaggatcacggcgggagttacgtctggcatagcgggcttggccccgaggcgcgcagtgagatgaaggcgcgactggctgcgggcgagcagcgggtgctgttttgctccccagaggcggcaaccgggggactgctgctgcaactcttttcgctggcccagcgcggcctgcttggcgcggtgatggtggacgaagcgcacctgatcgatcagtggggggcggaattccgcccagagtttcagttgctggcgccgctggtgaaatcgctgatggcgacctcaccggatcccatcaaagtggttctgctgtccgcgaccttcagccaaagtacgcaggatacgttaaaagcgctgtttgcgagttcacgtgcggacgccgttattgatattaacggtagttttttgcgcccggagcccgcctggtttgtcagcgaagccgctcactatgacgattatctggttcaggtggaagcggccatcgctcgtctgccggcaccgatgattatttacaccactgaagtggagcaggcgaagttctggcatcagtacctgcgtggacgtggctaccgccgctgcggtttgttccatggcgccaccccactgcatgaacgcgaaggactgattcatgcctggcgtgacgatgcgctggatatcatgatcgccacgtctgccttcggcgtagggatggacaaaagcaatgtccgcacggtgctgcatgtggcggtgccggaaaacctcgatcgcctctatcaggaaagcggtcgtggcgggcgtgacggcaacgcttcggttgcccagattattttctaccatcagcagttgcgggtggcgcgcaccttaaaccgcaccaaattgattggtgctggtaagggcttcttgcgctggtcgaaaatgcaccagcatcgtaaacaacatcggccaggcctctttaccgtgccgttgcgggctaagcaccacgatatccgtatggattcacagggtaacgtcgactggaatctgcgtaccctgctattgatgcagcgagccgggtttatcgatatcgcctaccccgcgccggatttaagcactatcagcgcggacgagcgcgatgatgagaaggtgcaggcctggttcgacgactatttcagccatattcaggtttctgttcgccgtgacgggcatctcgatgaaacgcagtggcaagccggcattcaggcgcatcgtgcacatgaactctctatgcgccagcgcggctttagcgtgctgagcgaatggttaaacaatttgtctaatccgctgtgccagcagttagccgagttttatacccttgacggctacgtacccgagcaggcgtgtggcgggtgccctgcctgccgtgagcaggggcggccgccgtttactcctactcttgggcgaatcgctcatgttatcggcaatgtttcacatgtgtcagtgggatacgatcggcgcgtgcgctaccagaccaccctgaccagccgactgctgctgcgtcagtggacagactggatcgcgcgcctgctggccggtcaacaggttcaggcgatccgggcaagtcaaagtacgttgagcctgttgagcgcggtgctgcccgccgggctaccgttctggtgctcgctggctcctgatgaagagaacaaccgctggcatgaactggtgttggttcttcctggggaagccctgcctgagctggatatttttgccagcatcaatcgaattatcgtcgcccctgaacagttgcaggagccgggctatcgtggtcgccgctggtgggaagtcgatcagggcgccgtgacgttagaacaatttcaaaggagcattttctag

SEQ ID NO: 220175 - DNA, 3051 bp, Klebsiella pneumoniae
atgactacacatactgtcgcgtttgctgaaggtgacctggtaatatcgccattatttgacggtattgctaaaattgtgagtattctctcaactgagcgtgctgagattgcctggttctactctcctttagaggaggagattaaccgtcaggaggtggatatccgcgcactgacggcagcgacgctctatgaggaaagcaccgtttattttcgctctcctgatagtggcatctggtgccgaggccgctatggcgggccccgtccagacaataagcatttgctgattatccgttcgggcgaccacgcggtcgttgatttggcggaaatgtactaccccaactatgggcaagggcaggcaatgaaccccgctcattttctggcggcacgctcaaatgatgccccctatttctatccgctgagagagcgattcattagcgcctgggttaaccaacgggcggcctgtcgttcaatgtcttctcttatcagcagtcgcgtcgagatagaaccgcatcagattgcggttgttcgacggattttgcaggatccgaatcctaaatacttgctggctgatgaagttggattgggtaaaaccatcgaagccgggtttgtgatccgtgagcacgtgctggagtgcaaactcgatgctcgagtgctagtcgtggtgcctggcgccctgcacgggcagtggatgcaggagttgattgaccgctttgcgctgcaggatgtgatgcgtggcgggcgtcatcatcagattcgtctgtgccaacctgatgagattgacgatcctgaactgctcgactggcgcccaacgctggtcgtgattgatgaagcgcaccagttagccgcgctcgcctggtctcacgatgctggcgaccgcgcgcaatatcaggcgatggcggccttgtgccatcaggcgcatatcacgctgattctgtccgggacaccgatgcacggtaacgagcgtaacttcctggcgatgctgcactgtatcagtccgcaggcatggcaactcaaccagcagggcgtcgagaaatttatgcagcgcgtgtccgagcgtgagcgattaggcgggatctacagcgccctgacgccagacaccccgaacatgatgctggaagaaagtctgaatgaattgagcgatttgttcgcggatgatgcccgtttgcaggcattgatcgacacgttacgaccgcacgtggacttctttgcgcctgacgaaagcgcagaacgaacggaaagcattctggcgctacgctactggatcggggagcactatcgcctgtttcatcgcctgctgcgcaaccgtcgtgaagatccttcgctcatctgcctgttcccagggctggacggtctggaaaaagtcacctggccggtcagcgccgaacaggtcacgctggatgaaatccttgaagcctaccgcgaggcttctctgcgcaaccctgaacgttatcggcatctgaatgccgatacgttggctgactgggtggatgcgctgttcctcagtccgttgacgctatctcgccgcgctaaagagtgccagaccattggtgccggcagcgacgaggaattccgtttcctcgaacaaattattgaggtggctcagcatgagcaacgtgcaaaagatacggcgttaatggcatccttaacccgctggtttgaaaccaatccagaaggtaaggcggtaatcttctgcagtgcaaaaccggaagccgcacacctgtccaccaaactggcgattcaggcaccctggcaggtcgttcgtcatacgcctgaggtgcttttgcaaacggaactgctggatgacacctggcaggtgctgatttgcgataaacggggtgaagatggactgaacctgcacggcaagcgtcgcctggccattcactatagcgtaagccgcgatttcaaccggtttgagcagcgactgggacgttttaaccgttactgcggtaaccttcacgttaagccggtgaaaagtctggtgctattgccggagcgtgaaggcctgactgccgactggttggcgctgctggatgaggggaccggactgttcaagcgcagcgttgccagcctgcagtttgttctgacggaacaactcgatgccgtctggcgagactacggcaaccaggggcctgcggtattccgtgagaaaatctcacatctggctggtgaagacggctttgttaatcaggaacgtaagcgggtattggcgcaggagaacctgctgtcgatggagcacgaggtgattgcggctcgtgatttctccgagcaactggcggataaagaagaagatgccgatgctcaggctgccgatatgctgaggtggatacgcaacgcgctgggcttcaagcgtgagaaatatgaagaaggcggtttccgcctgtgctttgaacgcggacagaatcagcgtcagacgctggtcgatgtgaaaacctttgtcgacaattgcctgatggggctcgatttttcggaaggatatccgccatcgacagcgatgatgagcctgtcgcgcacggaggcgagcagccacaagctggtgtatccattacgctatggtcagcccttcgtggaaacggtctggcagctcatgcaggccgatccgcggggcgccacgatggcgctgctgcgggtgttgacctcactccctctaaagcagccgcgcacctatttccatttccagtggttaaccgaagcgcagcacgacggtgaggattctctgacggcgcagcgcagtggcgatgagcgcttcagcccggtggtgaatcaattctggctggatgacagcgggaaccgcgcggaaccacagattgtcgtttccctgctggataagccatacgatgaggacggcaacgtgttattccaggatatcaacctgcgtgaagaggtgtggacgcaaatgccggactggtttgaaccgttcaactggaaggctaccgtccttgccgtgaaagagcaggcctaccaacaactgcagcaatcctacggcgaacaatccgtgcgccatcagttgctggccgtgaaagcgataatgctttgtacccgggacatgttgtaa

SEQ ID NO: 220176 - DNA, 1128 bp, Klebsiella pneumoniae
atgagtgagtttcgtgtccccgccctgcgtattcgtcagggtgagaagagacagctttacagcttggccattgaaggcaaacaaatcagcaaaattgctgcgatttcacgcattcgacgcggagatgagaacctggttggttatcagcgtccggaagtacgtagccatattaaggaaatccagcgctatattgaaagcgcgaatccgatgatccccaaccccgtcattatcgctttcgatcagcgcgtacgctttgaaccgctgctggaaaacagtgatatggggcatctcgttattccgtattctgaggaggcaaacttcgacaaaccggggtttatcgttgatggacagcaacgtacagctgcgttaagagaagcggacatcaactcttttatgatgccggtatcggcatttatcgccaatgatgcagaagaacaacgcgaacagtttatgctggtgaactccaccaaaccgttgcctaaaacgctgttgtacgaactggctccgcatacgcatggccgcttgccttccgatctgcaactgcgcaaattcccttcactgctgacacagcgtcttaactttggtgaggggccattggctgggcgaattaagactgcgaccaacccggacggagtgattgctgacaactcaatgatcaaaatgatcgactctagcctacgtgagggggcgttgtatcgcttccgcgattcggcgactggtttgggcgacgaagcgaagatggtgaagctgctgaataacttctggtcagctgtagaaactgtgtttactgacgattgggataaaaaacctcgttactctcgcttgttacacggtgtggggattcttgctctcggtagcctgatggatgaaattgatcaagtgcatcaggagtacaaaggggaaccaggatggaccgagatcccttcctattcccgctttgtggaagagttaaatcgtatcaagccgctttgtgcatggagtagtggagtgtggaacttaggcacggatattgatggtcatccgatcgttcgtaagtggaacgaggtacagaatctatcgaaagatatatcgttggttacagattatttggtaaccaattatattaaaacagctaatgctgatatttaa

SEQ ID NO: 220177 - DNA, 1008 bp, Klebsiella pneumoniae
atgaaacatttctttcgtttgccagagacgatgcaaacaatgggagactgtggtgcatttacttatgtaaatcaagatgttcctccatatcgcgtcgaagacgttattgaattctatgaaacatcccgctttaactacggggtatcacttgaccatatcatttttggctacgaaaaaccgggagaatctttctcaggtgaggtgctggcagaatgtcgtcgtcgccaggatatcaccttgactctggcgcaggattttttagttaaatcgcagaagagttgcttcacgccctttggcgttgcgcacggttggaacaaggcatcttacagacaatcagtagaagcactgctggctatggggtataagaatatcaccatgggggggatggtgcccctgaaaacggcgcagatccttgaaaccttggaagagattaaaccacttctcaaaagtgatacccgggttcatctgcttggtattgcacgtccggagagctttacggatttcattcgtcttggtgttaccagtatcgactcaacaaccccccttcagcaggcgtttaaagatcgcaagaataactaccatacgcctgagggacgggcttatacagctgtgcgtgtgccgcagttcgatgccaaccctagtctcagtcgtaagataaaatctggcgttattgaccaggatgtggcgcgtcttctggaaaaagatgcgatgcatgccttggttgaatacgataaagacgcgttgtcgctagaaaaagttctggaggctgtaatggcctatgaacgtctacactcgggtgaaaaagaagcggagaagatccgtgccgattacgaacgtacgcttgccgaccaaccttggcggaagtgccagtgcaatatctgcaaatccattgggattaacgtgattattttccgtggcgccgagcgtaatcgccgtcgcggattccacaatattcaggtgctgtacagtcgcttgcagcacacattgtcattacgctcagaggattaa

SEQ ID NO: 220178 - DNA, 957 bp, Klebsiella pneumoniae
gtgagccgactaaatctgattacaagttgcactaatagcaagcataataacggtcattcagtactgaatcttgccatcttttctgaaaaatataaaacgccgaaaggtttgattcatgcctggggtgaggccgtaaattcggctctatcgacgaagttagttgttcctgtagaaaagttatataagggggggcattggtcaacggcaatgtcaatatatgacgctcaacctattgaattatgggttctttcagctggttttggactgttgaaacatggggatgctatagttccttatcaagcgacatttgctacaggacataaagattccatacctcttttttccgataaatatggaaagaaatccttttatcaagaatggtggggaaaattaaatgaagcatccccattaaaaaaatctcatcctgtatccttatctgacttaatgatggataagtccgatgagtattttattatctgtgcatcacctgattatataaacgcaataaacatggatttaatgaaaggcatctcttacttaaaggatgtcgatagacagttaatcattatatcttcttcgcaggctaaattttctttgaaaaaaaacctattggtaagcaataaatcaatcgctgagttttttaacagtaatatgcttatgttaaatattaaaatagctcagtatgtaattgaacagtttatgagtatggatgatggccatttagggttgcttgctgagcgtcttcgttcaacattttcagtactgcctaaaaagcatactgttcgcggggtgcgcaggagaccagaagaggtaactatttggatttcttcgtatatacatgcaaatccagatggaagtgcttcccgggcacttcggtcatttcgtgatcaaggcaatagttttgaagagaagcggtttcgaacgctgtaccaggcagttttgttgactaatcgataa

SEQ ID NO: 220179 - DNA, 270 bp, Klebsiella pneumoniae; identical to SEQ ID NO: 136048

SEQ ID NO: 220180 - DNA, 369 bp, Klebsiella pneumoniae; identical to SEQ ID NO: 180747

SEQ ID NO: 220181 - DNA, 204 bp, Klebsiella pneumoniae; identical to SEQ ID NO: 136047

SEQ ID NO: 220182 - DNA, 1398 bp, Klebsiella pneumoniae
atgacggcatacggaacggagtttttctcgatgaacgatgtaaaccgactcaggatcctgcaggacgttatcgaccggcgtcttaccacgcgtcttgcagcaacccgacttgagatctctgacaggcactgccgccggctactcgagcgctatcgtgaacacggaccgctatcgcgggttaaccgccgacgtggtcagcctagtaaccgacagttgatgcctggcctcgctgagcgtgcgctgcgcatcattcgcgaacgttacgccgactttggcccgacattggcctgcgagaagcttgctgagattcatgacctttatcttgctaaagagactgtacgtaagcttatgacccgggatggcttatggatccctcgtaagttacggccacctcgtgtgcatcagccacgcccacgtcgggcctgcaccggcgaactcatccagattgatggcagtgaacatcgctggttcgaggaccgtggtccggcctgcacgctgctcgtttacgttgatgatgcaacaagtcggttgatgcagcttctgttcgtcagttcggagtccacgttcacctattttgaagccacccggggatatctggagcgctacggtaagcctctggcattctacagcgacaaagccagcgtcttcaggatcaacaacaagcaggccaccggcggagatggccagactcagtttggtcgtgccatgaacgagctgaatatcactggtatctgtgccaacaccagttcagccaaggggcgtgttgaacgggctcatctgacattacaggaccgcctggtcaaggaactgcggctccgcggtatcagcacacctgaggctgcaaacgcctttgctgatgagttcatggaagattacaaccgtcggtttgcaaagccgccacgtcacgattttgacgtacatcgccagctggataatggcgaaaacctgcaggcgacattcacctggcgcgagcagcgtaaggtctcgaaaaacctgacattacagtatgataaaaagctttatctgcttgaagataatgaagaaaaccggcgttttcaggggaagtacatcgaggtatggcaatacccggatggtgacattgagctccgggccagcggcacttccctgccctttaccacttacgaccgactgggagaactggaccagggcgccatcatcgacaacaagcgtctgggacgtgccctggaaatgataaagctggttcaggacaaacgggacaacacccgctcacaggccctgccatcactggacggccagacctcacgcagaaagaaacaacccggcaagaaatcacaacgaagtctggaccataacgacatgctggaagccctgcagcaacttcagacccggagtaaagacatcttcggcaaaggctga

SEQ ID NO: 220183 - DNA, 279 bp, Klebsiella pneumoniae; identical to SEQ ID NO: 101140

SEQ ID NO: 220184 - DNA, 567 bp, Klebsiella pneumoniae; identical to SEQ ID NO: 101141

SEQ ID NO: 220185 - DNA, 1644 bp, Klebsiella pneumoniae; identical to SEQ ID NO: 180769

SEQ ID NO: 220186 - DNA, 2448 bp, Klebsiella pneumoniae; identical to SEQ ID NO: 180770

SEQ ID NO: 220187 - DNA, 1407 bp, Klebsiella pneumoniae; identical to SEQ ID NO: 180771

SEQ ID NO: 220188 - DNA, 1284 bp, Klebsiella pneumoniae; identical to SEQ ID NO: 180772

SEQ ID NO: 220189 - DNA, 1116 bp, Klebsiella pneumoniae
gtgaaaagaaaaaccggtttcttttttgatgaacgttgtttctggcacagtaccggtctgcacgcggtgacgctgccagtgggcgggtgggtacagccgcccgccggcggcggtcatgctgaatcgccagagaccaaacggcggatgaaaaacctgatggatgtctccgggctgacgccgcagctggcgctgcgcagcgcggcgccggcgagccttgaggacctgcggcggatccaccccgacagctatctggagcgcttcaaggcgataagcgataacggcggcggcatgctcggcaaagaggcgccgctggggccgggcagttatgaaattgcctgtctttccgccgggctggcctgtgcggcggtggaagcggtgctgaagggggagctggataacgcctattcgctgtcgcgcccgcccggacaccactgcctgccggaccagtcgatgggattttgtttcctcgccaatattcccattgccgtcgagcgagcgaaagcgcagctggggctgggcaaggtggcgatcattgactgggatgttcaccacggtaacggcacccagcatatctacctgcagcgcgacgacgtactgactatctccttgcatcaggacggctgcttcccgccgggctactccggggaggacgatcgcggcgttggcgcgggcgaaggttacaacatcaatattccgctgctggccggggcgggcgacgacagctggcgctatgcgctggaaactatcgtcattcccgcgctggcgcgttttgaaccggagttgatcattgtcgcctgcggctatgacgccaacgcgatggatccattagcgcggatgcagctacatagcgacagcttccgcgcgatgaccgaacaggtccagcaggcggcggatcgcctgtgcggcgggaaactggtgatggtgcacgagggcggctacgccgagtcctacgtgccgttctgcggcctggcggtgatggaagccctgagcggcatccgcaccgaggtccaggatccgctgctggaatttattcaacagcagcagccgcgcgccacgttcgcgcagttccagcgccaggccatcgatcggctggcgcagcagtttggcctgctataa

SEQ ID NO: 220190 - DNA, 135 bp, Klebsiella pneumoniae
atgatgatctcatatcaggaacttgttcgcaccttccttagcagccatgcttatgcattacagctaataaatatcatatttattattttgatgcctgtcagtaaagataaacgtgatatgcaaaccagcggctaa

SEQ ID NO: 220191 - DNA, 681 bp, Klebsiella pneumoniae; identical to SEQ ID NO: 139460

SEQ ID NO: 220192 - DNA, 405 bp, Klebsiella pneumoniae; identical to SEQ ID NO: 102211

SEQ ID NO: 220193 - DNA, 369 bp, Klebsiella pneumoniae
atgcttcatactaccaatcccgttatcaaacacaaagccggtttgctcaatctggcggaagaactcagcaacgtatcgaaagcctgtaaaatcatgggcgtttcacgtgatacatttcatcgttaccgcgaactggccgatgaaggtggggtggatgcgctgataaaccggagtcgtcgcgcaccaaaccttaagaaccgtattgatgatgccactgagcgggctgttgttgattatgccgttgagttcccggctcacggccagcaccggaccagtaacgagctgcgcaaactatctgctgaagcaattctgggaaacccaccgaaccgattggtgactagcgctacggtgttcccactctcaagttga

SEQ ID NO: 220194 - DNA, 2799 bp, Klebsiella pneumoniae
atgaagggatgtgaagaaaaatctacgccggatgttctggactctgcccagttggtacgtattgaagccgtacaccggggattcctttatcagcacttgtatgccgttggctgcttgctgctggcacagaaaaccagcgtggagacagtaaccgttgagctggatgaggatattgagctcaactctgggcaggagcgcatttacgttcaggttaaaacccgcctgaaacccatcattcccagcgatgtgtctggcgcgctcgtgcggtttgcggagctgcgtaacgagcacactgatgggcgccgccagggtagcgcttctttcgttatcgtcactaaccagccgccaggtccacacctgcagaggatgattgaggataagacgctttctgctgatgtccgttttatctggccccagtcaaccgctgagcgccatcccgcacttccccctgcctgggactccatggctgatgcggcagcctggtgcatcgtgcaagcagagcagctgaatttttcgttattgtcgccagaatccctgatctggaagctagccggtctggtccagctcgccgccaccggaggtgatgccgacggacagcatgcgttttataccagggatcttcctgccctgttcgaacagctcatcgttcagttacaggacttccctgcaccgccaacactctaccggccacaaagagaggaaccctcttttgtgtcgaatgagaggatgcgcatcatttgcggcttgtccggtgcaggtaaaacagcatgggcagcacaggccgcccagcacagtacccaggtgtgtgcgtattacgatgctggcgaccttccaggccctgcacttgccagtacgcttgttcgtgagctggcagcccggtttgcgactcaggagcaaggtggcctgcgaagaatactgctccctggtgccagtggcgttgaagcgctgagaacgttcgacaccttcttgcagaaacggaacgacaacctgctgctggttctggataacgcgcatcgtatccctgttgagaacttgcgggatgttctgcacgccacaacccgtatccattttgtgctgctgtgccagcctcatgacaatgtccgtcaactggaggccatgaccgggcttcagcgtgaatcgttacagggatgggatatcgacacagttgctgccgcagtggccgacctcggtgggcacgccagtgcgctgggatatgagcagctacgaagctacaccggagggttgccgctgtatgtcgaaagcgcggcgagagttgccgcagaggaatacaaaggggatatagacacgctgtgtgctgaactgcggcaacaggaaaacagcacggaaaccgcgcaggaagtcattctcagccgtgtctatcaggggtttgaaccactggtccagaacgctctggcgttgttcagtctgtccgatgtggggctaagccgcgatgaagtttcagggtaccttgcccgctcattaaatatcccttcaaacggggcagccacattaattaaaaaaatgcgggccaccggaaccattgaaaactatggaaaccagacgttaaaggtacacgatgctgtcagggcgctggggctgcagcacctaaccatgatggacgtggatatcgtaaatgacgcgttactggcgttaaaagatcttttgattgagagccttcagcaagaacgcgacacttcgcgattttctcttctgacgcagatttacatcaagcttaacgatgtcatgacgctcatcgctctatctggtgaagagctgttttatgagatgggcattactgtcgacattatggaaagcctgaaacaggcgacagcttcggactctctggcgcctttgcaaaagttctgggcactcgatggtctcgttttttccgagcttaaagacggtatttatgagcaaattgcacaatggctggaagcgatgggagccttgcttacagaacatgagtttggttaccgggaacgcacagcctacaccatgaaacggatgcttttcttatccgtaaagggagaccttagtgaagtgcaaacgctggctgaagatgcccgcctcagccttccggatgaggagcatgcgcgtatttttgactataaccatgctatcgcgctctggagactgaaaagatacaaacaagcagaaacgctgtgtctgagcgtagttaatcgctactacgcgttatttggtattaccccacaggatgtcatgggtaaaaactcggatgtgctgtgggcaatcatcaaccagcctgaaaatgttcacgagcacatcaaacatctggccgatgccctcgagttactcgccagaattaatgacgcacagggaaaaatgtcaccgtttctgcgcattcacgcgatgaaattttacaacatgactgcagcccccgaatctctggtccgggtaggacaggatctagctgatgagtttgtcgcaagaaaggactatgtcggtgcaaaagaggtgttggagcaatatgtcctgcccgtggtcaatgaagctggtctgatacagcgactggttcaggtccgaagccagtacgccgttatactggcacttgcaggcgaacatgagcaggcagaagcggagatgtgtcggctagcccccttttttgaagggttaacaggtgagcagcgactagaggttaaaaatcaatcgaactacatcgcacatcttgcttacaaggcggctaaatccgaagtaacgcgattgttcggggcggtaggcagaaatgaaccttgtccctgcgggtcgggagtaaagtataaaaaatgtcatggagcatga

SEQ ID NO: 220195 - DNA, 4674 bp, Klebsiella pneumoniae
atgaaagttaaaaattctgcgattatctatacaggttatgattatcagactctgcagggagtaaagttacttgctgaatggcttcatagtccgactcagtatgatagggtggcatttgaagccgacacggatagtaatgaaacgcctgaaggtatagacgatattgtctgtgaacgaccagatggtgttagagattattggcaagtaaaattcaccccctccccggagaaggatgaaaaccgcctcacgtgggaatggttgttgaagatctcaggtaaaacagctaggtctcgttccattcttaaaaagctctatgatgctattagcgctgtgtctgctgaaaaactcggggatgttattcttttgaccaacaaacggccggacagatctatggaatcctgcctgctcggttcgaaaatagactttagtcaaattgatgatgactcacagcttgtgattactcgccaactaggaaataaagaagctgccatttttcttttttcgaaattgactgtccagcatagtgatggtgactatcttgctataaaacgtagtcttcgggctgagcttctgaaattttcagacgatacaggcgtcgaacggcttgtagcaagagcacgtgaatgggcaatgtttaaggacaatccaccagagcaaggttggatttatcttcatcatgttagagaggtcttatcacccaaaagaccagagcctatacctgaaattttttctgtgcccgaagagtactgcctccccgattcagactttcacaaacatctacttgctcaaattaaccgctcaaatggggaagtcattactctaacaggtaaacctggtgtaggaaaaagtacatatctatcgtacttgtgtcaaaagctggaagagcatggagtcccgttaatacgtcaccactattttttatctctgggagacgcaactgaagacagattaagcctaagagttgttgctgagtccctgttgcatcaaatcaatagctttcataaagagtcaaatgccaacacatctcaaccggaaaatttacgtgatgcactcataacctgcgcaaattactacaaaggtaaggggaaaccatttgttgtgttgattgatgggctggatcatgtttggcgagataatgctaaaaataaaaaaccattggatgaaacctttaggcaattacttcctgcaacagacaacttagtagtgcttgtcggaacgcaaccagttgacaatgaattgcttccttgcacactgcttactcactctcctaagaatgaatggcattggttgcctgaaatgtctggaaattcaatatacgaatttttaaaacttcatattgaatctggtcgattgtacttaaattgtcatgaaaatcaagttgatgaagagattcagaacagtgctggcgctttattagaaataacaaatggctaccctttgcatgtaatttactcatctgagtatctgtctcatcatggattagcactttcttcttggcaaattgaaaagcttcctccgtgctccgatggcaatattactacttactattctgagctttggcgtaacctcaattatagacaaaaagatgttcttcacctatgcagtggctttcagtttgcgtggccgagacaggcgatcggtgtcgttgtaaaagacaatcatgaatatgcaccgagtgtagatgcggttgcacatatgctctcggagggaatttgtggcgtaagacctttccacgaaagcctagtagtatttgttcgaaatcaggaagagcaccaagagcgaataaatgctttgttaccacctgtatgtgaatggcttagttttagcgccccaacacatctcaaggataattggctttggtctagtttggctcgaggtggcgactcttccaagttgcgacagggggttactcgagattgggtgcttgataggcttataattggcatgcctgttagatcatgtattcgactgttatctgaggctgaaacttatgctttccaggcgcttgattatgcggaggcatatcgacatagagctctaaaaactaggcttatcaatggccctgaatttcagacatgggactccattaacttggagatgctctcgctactgatcgctgatgagcagtctctgaacgaaataatctcaggacaaaacgagtattcaccaaccaagttatctatattggcaattgcattatggtatagaggggcggttgctcaagcagagctattatcgcagaaggcaattgatcgatatcgggctaaaaccaaactcttgtcttcacgacactctcaagataatgaagctgaagcaactgcattgataaaagcaggaatattaactgacagtcttaactatgatgcgatttttgaagaaggaaaattctctaattggcctgatggatatgtggctagctttagacatgcatgtcgcacaaaaaaagaacttggtctgctcttcagggcttggaagtgcttgccccctgattcaaatcatattggtcaaatcgaacttgatgcaattagattaagcataatagagggtgctgatattatctgtaggccagaatatggctctttttcctcgcagcagctatctcagttcatagatatcttttctaagaaaatcttcaccaatattgagactcattatttttatggtcagtcggcgaaagtcttcaaagttgaagctacaggcagctaccattgctggtttttttcttcactttgtatcaggttaaatgcagaaggtgactattcttggttaccagtaagtgcaacctcagacagagcggatgtatcagctcattatgatttactcaatgagttggcagatttagtcgcaaatgaacttatcgcaggaaataaactaaactttgacgtggtttgtgcgatgtttccgcttgttccaatattagatgagttccaatgggaaacacggagagccgacatagttttcaagcgcgattggattgaaattgcagctgattgtcacctgataacaaccaaatctgaaatttcgagtgatgaactaaggcaaacagttgatgatggtttatttagaattgactggctaaggctatggtataaggacgcagggcttaagctattagacgatgatgccgcagagttacttatcaagcttgaagataatcgacaattaaatgagttagagcaaacaattgagaattctaatgcttatcttgagctagcgcaaatagcatttcaacatgataaattagctctttttgcaaaatatttgagaaagacatgggactttgtgcttggttatgggcatcacaaagaccccaccatctttgatgtattgaaagctgtggaatacctttctgaatctgaccgaggttctgccttggaaatattagaacgaatatcaccgatagttttcaatatatccgactttactgatggggatgaaactaggcactctaagcattccatatcttcattattagcaaaattaaacccgcaaacagctgcttcagtttatgagcaagagcttagcgatggcgaatggtattatgctgaagagacaatttctaggttgcttgaaaggtgtgactttgcttcgccgattacaaaatatttatatcttacaggtttgcactctagctgctaccgagtgctcatagaaaatattgagaaaggagaacctcatgccatttgtattgccgatgaaatagagagccttctgggtattaatgttcaaaatatgtctgaagaaaaacattcatcaactgataaatctgatggaaaagttttgttacagccatcggattatccgcctgaaaagttcgaagaactgactttattgctcaaagggaaatatagcattagtgatttttggaaaaactggtacacatattggtgtacccaaggtaaggagcctgagttattgcaactgctaattccacaggtgtcgaagcttattgattgttttgatgataaacgatacttgttagatcttctttttttcagtgttaaaaaattagacggtaaaacgaaagcctttgatcttttggttgcagctcacaaggcaatgagaggatggtctgattggtatgagcgttcagaaaatagcctcaatcggcttaagatagttgcagagcaataccctcaaaaaattgacgaatttattaaattaacaacatcacaaccggataattggaaagataagtttggcaacttaattattccgaatgacaagctagtttttttgctttctcatggtgacaggaaagatgaggcacttaagctaacgttagagatggttacaagcttggaagaaagcgtccgcaatcttcaacttgcaaaaccggtatgggattggcgtcatgatgattctctcgaggatgcaattctcaagacgttagtttcgaggctaaagctacctataccctctgtaaaattgtgggtagtagaacagctttcacgacttttaatagctcaacatccaagagttgaagaattactaaaggaagacttagcaagtaggaagcaagagtctgagtgcgtagaagtgctatgtgtattttttattgcgaaatctaagggttatgtctgcccaaatgatctggggcactacataagagcaaggtccacactgtcagatataatactcacagagctagggaaggtgcgaacaagttcctga

SEQ ID NO: 220196 - DNA, 837 bp, Klebsiella pneumoniae; identical to SEQ ID NO: 137381

SEQ ID NO: 220197 - DNA, 864 bp, Klebsiella pneumoniae; identical to SEQ ID NO: 217112

SEQ ID NO: 220198 - DNA, 447 bp, Klebsiella pneumoniae
atgtatacgtatttcaaaagtaaggatgagcttgttaaggctattgtactggaagaacagaactccgcgctgactgcccataatgcgacctatgcaggctcttattttgatcgcctttgtgcacaagtcacgtcctgtattagcgagatcggttaccctatcacgcatcaactttgggttgaaatcatggctgagtctgcgcgtaatccagaactgcgaaaaacgtatatctccagtgatgacatcatgcggaaaagcttcgcgcggctcatccaggagggtatcgctgccggagagtttcgccgtgatattaaccttgaagaaatcacgatcattatttttgcccttgttgacggtttaatcgctcgtcaggcaataaacacgaccttctcattcaaggatgatctgccaatgttttttgacgttatggcaaaattgcttaaataa

SEQ ID NO: 220199 - DNA, 906 bp, Klebsiella pneumoniae
atgcaggatctcaatgacttcgcctggtttgtccaggtggtagaccatggcggtttcgccgcggcggggcgagcgcttgaccagccgaaatccaaactcagccgtcgcattgcgcaactcgaggagcggttgggcgtgcgtttgattcagcgaaccacccgtcagttcgcggtcaccgaggtcgggcagaccttttatcagcattgcaaagcgatgctgattgaggccgaggcggcgcagcaggcggtcgagacgctgcgcgccgagccgcgcggtagcgtcaggatcacctgtccggtcaccttgctgcatgtccatatcggaccgatgctggcgcgatttatggcgcgctatcctggggtaacgctgcatcttgaggcgaccaaccgccgggtggatgtggtcggggagggcattgatgtggcgatccgcgtccgtccccggcccatcgaggatagcgacctggtgatgcgcgtgctggcggaccgcgggcaccggctggtggccagcccagatctcattttccggctcggacgtccgcaggcgccgtccgagctgagcgcctggccgggcctcagcctgggtgcgaacaagcatcagcataaatggcagctcaccgggcccgggggagcgagagcggaagtgtatttcacgccgcgaatggtgaccaccgatatgctggcgctgcgcgaggcggcgatggccggcgtaggcgtggtgcagcttcctttattaatggtgcgcgatcagctggcgtcaggtgaattagaggtggttctggacgagtggcagccgcggcgggaagtgatccatgcggtatttgcctcacggcgcgggctgctgccctccgtcagggcgctggtggactacctcagcgaagagtatcagcggatggaggaagattga

SEQ ID NO: 220200 - DNA, 861 bp, Klebsiella pneumoniae
atgaaacagatcacaggagtctacaccgcgcctgcgcagcattgggtaggcgacggcttcccggttcgctcgatgttttcctatcagacgcacggccagcagctgagccccttcttactgctcgactatgccgggccgtacaccttcccggcgggcagcgaaaaacgcggcgtcggtgagcatccgcatcgcggatttgaaaccgtcaccatcgtctacgccggtgaagtagagcatcgtgactccaccggacgcggcggggtgattggtccaggcgacgtgcagtggatgacggcgggcgccgggatcctgcacgaagagttccactcggaggccttcacccgcagcggcggcgagctgaagatgatccagctgtgggtcaacctgcccgcgaaagacaaaatggcgacccccggctatcagagcattaccgccgggacgatccccaccgtggcgctggcgaacggcgcgggacaggttcgggttattgccggccagtatgacgacgtcagcggcccggcccataccttctcaccgcttaacgtgtgggatctgcagctgaatcaggggcacgacctcacgctgcgccaaccggagggctggagtaccgcgctggcggtgctggaaggggaaatgatcattaacggttccgaatctgctcgcgaaggccagctggtcgtcctgagccaggcaggtgacgcagtgcatctggaggcgaccgctccggcaaaagttctgctgatggccggagaaccgctacatgagccgattgtgggctatggcccgtttgtcatgaataacaaaacgcagatcgcagaagctgtacgcgattttaacagcggccgctttggccaaatctaa

SEQ ID NO: 220201 - DNA, 678 bp, Klebsiella pneumoniae
atgtctactcccgctaactttaacggtgctcgtccggtgattgatgttaacgataccgcaatgctgttgattgaccatcagagcggtctgttccagaccgtcggcgatatgccgatgccagagctgcgcgctcgcgccgccgcgctggccaagatggcgtcgcttgccgggatcccggtgatcacgaccgcctccgtgccgcaggggccgaacggtccgctgatcccggagattcatgaaaacgcgccgcatgcgaaatacatcgcccgtaaaggtgagattaacgcctgggataacccggaattcgtcgccgcggtgaaagcgaccggtcgtaaaacgctgattatcgccgggaccatcaccagcgtctgcatggccttcccggctatcgccgctgtcgccgacggttataaagtgtttgccgtgattgacgcttccggcacctacagcaaaatggcgcaggagatcaccctggctcgcgtggtacaggccggcgtagtgccaatggataccgccgccgtcgcctctgagctgcagcgcacctggaatcgcccggacgccgcagaatgggcggaggtgtacaccaaagtcttcccggcctaccagctgctgatcgaaagctacagcaaagcgcaggacgtcgtgaagaataacgaacagctggattcccagcgctaa

SEQ ID NO: 220202 - DNA, 666 bp, Klebsiella pneumoniae
gtgaatatccccgtttacaatggtcggcacacaggaaaacctgccgttaccggctgtatttccagttgtgattgctgcagcagcggtaccggaataggctggagtcgtcccgtttttataaataacattagagctaatagttgccccacacatcttaccaacaggaatatcctccagggcagtcaccatgtttttcacaacgacaattccgtttttaaaaatgcggaagcgagtggtggccttaataatgcctgccgaataaacggcactggcggcattgtagcctgtgcgctcaatctcggtaaaaagcgggccggtattgatgaccttcagcgtaacgttgtaggtgaaatactcgataacctgagcgcctgcagtcacgtagcgatgctgcgggctcagcgtgcatctgatacggttgatatcatcatttttagcagcatcaatggatgtgagaccataggctccaccggcaaaaccaaagcggtaatacaaatcacccactttaatgttataacgcttcagggcatcagaaggcgcgtagtactccaggccttcggaatagatcgtatcatcatagcgataaccaaaaacatccacgttataatatttcttttgtcccgccgatacggaatcgacgatccacacggcccccgttttgaatga

SEQ ID NO: 220203 - DNA, 1023 bp, Klebsiella pneumoniae
atgcatttaaatttaaaggtcatcgggatttatgtgtttgggattatacaattgttaatgattggcaatgctaatgcatttaattcaggaatgaatgtgcatccagcgactttcccaaacgaaccatttgtcttattgcaaaccctgaaaaagtacaatatcgattcttttcgagttgattattcatggcaaggtgtagagaaaaaaaaaggggtatataaaattccagattctaagctggaaaatgctattcaattagggattaaggagggggttaccccactaataattctaaattatggtaatagtaactataaagagaatacaggtgggcacaaaaatattagattaagcagtgatgaagaaatcgaaggttttattaattatgtcgattgggtttctaaacactttggtaagaaaaagataatttttgagatctggaatgaatggaatcatagtaagccaaaatacaataataatagcctcgagtcagctttagattatgttgctttagttaagaaaagcagcgcaattattaagagaaataatccaaatgccattattattgcaggtggcttcaaccccctatcaagaaaagaaatgaattggggtaaagaaattgtgttaaatgggatcatgacgtatgtcgatggtttatctattcatccatacgattggactcataaacaaattacaccggctaatattagtttagataagattcgcaaggcacatgatgagctattgtcttactcatctggccatgaagttaatttatacattacagaggttggggtttcatctttttcgaaaaatctttttaccgatacagatattggtcaatatttggttagttactatatagaagcaaaaaaaaataatttcataaaaggtgtttggtggtactgctttgttaataagggcactgatccttctgattttgaaagtaatttcggaatattaaacgttgatggttcgcctaaacctgcggctagttttttatattcccttccaaaaaactaa

SEQ ID NO: 220204 - DNA, 510 bp, Klebsiella pneumoniae
atgaaaattgatgttgaaacacttataaaacacttaggaaaaccgtaccaggagatttttgagaaaggattgattccttataaaacaaaaccccatggtcctattgatgaagatgaagctgacctggatatgagacgtgaaggaatgcttttggtctttgttaatgattcagaaaagaaacttaaagaagtcacactaagattagaagatgagggtaagacagattggttatttcctaaccctatgccgtttggtctgaaaccggtgatgacccagcagtgggctcgtgagaatttaggcttgccgatggttcatgttgaggcaaagattgttatgactatttatatgggggttaaagaaatttacgctttaccaatgcccaaccagcatattgcagcagcgctcacatatgataaagatttttttgtaaaaaaaatcactttttattctttggagcgagccaaagagatacaggtcgcgttacagaaaaagcgacttggtggtaaatga

SEQ ID NO: 220205 - DNA, 327 bp, Klebsiella pneumoniae
atgaatattgatatcgaaacacttgtgaagcaattgggtaaagattatcaggaaatttatgatagtgggctaattaaatataagacaaaaccaactgccacagtgggctatgatacagctacattagatacgaaacgagaaggattatttttatctttcgagaatgataaaaataaaaccttcaaaggaattacattaacattagaagatgatgacataacagactgggtctttccgaattcaatgccttttaatcttgaacctgtaatgactcaaaactggatgcgtgagcgttttgggttcccaatgatttatggcgagccataa

SEQ ID NO: 220206 - DNA, 1218 bp, Klebsiella pneumoniae
atgattggtgggattacagatttctatcgatcatggcgaggagttcgtatatcaactgagttaaccttaatactgaaaaattggtcgcttagcatattattaaatttaagtataatatctttatatgcggatgataatttagggttcagcttttttatgcaatggtacttagtagtatcgttgggattcatttgttgccgtacaactattaggctcggagctggtgtattaaggaaacttggatacaatacgagaagagtagcagtagtcggaacattacctgcaggtataaacttactaaaaggttttttggaagaaccttggcttggtttcgttgtaaaaggtatatacgatgaaaatcctgctaatgacctaaatggaataccttttgttggagatttatcgaaattaatttcagatgcaagacacggtgaattagatagaatctatatcgcaatgaatatgcatgatgaagcgaaaattaaaaaagttgttagtgaattatccgatactacatgttctgttctattaattcccgatattttcacatttaatatattacaatctcggactgaagagataaatggtgttccagtagttcctttgtatgaatccccgttaagtgggatcaatatggtttttaagcggctagaagatataattgtttcattatctatattgattgttatttctccagttttattaattattgcttgtgcggtcaaattcacatcaccaggcccagtaatatttagacaaattagatacggtatggacggtaagtctattaaagtttggaagtttaggtcgatgactgtcatggaaaatgataataacgttactcaagcaactaaacatgatcttagagttactaaagtaggaaaattcttgcgtagaacatctttagatgaattacctcaattttttaatgttttatttggacaaatgtccgtagttggtccccgtccacatgcagtttctcacaatgaacaataccgtacacttatcaaaggttatatgttacgacataaagttaaaccgggcattactggtcttgcacaagtaaatggttggcgaggagaaacggatacccttgataaaatgcaaaaaagggtagaatacgatctcctttacattcgtaattggagtatttggttggacttaaaaattatttttctaaccatttttaaagggtttgttaataaatctgcttattaa

SEQ ID NO: 220207 - DNA, 153 bp, Klebsiella pneumoniae
atgcaccagattggcgttccgtacaaaaataacgaatattcttcccttctgcaattaattcgtttacataatctgctgtaccatctgttgaactatcgtcgcatattaatatttcaatgtttttatagtcttgtaataagacagattgaatag

SEQ ID NO: 220208 - DNA, 144 bp, Klebsiella pneumoniae
atgatgatgatgaatttatgcctgacagaattagttcttttgtatctgcttgggatgaaaaatattcgttcctatgtagtgattatattgataagtatgcagatggaaatgagaaaagattcaaacaaagaagacataagttaa

SEQ ID NO: 220209 - DNA, 924 bp, Klebsiella pneumoniae
gtggcaaagcaaaagttcaaaatcaccaactggcccacctacaataaagccctcatcaaccgtggctccataactttctggctggatgatgaagctattcaggcctggtatgagtcagcaacaccttcttcacgaggcagacctcagcgctattctgaccttgccatcacgactgtgctggtcattaaacgcgtattcaggctgaccctgcgcgctgcgcagggctttattgattccattttttctctgatgaacgttccgctacgctgcccggattacagctgtgtcagcaggcaggcaaagtcggttaatgtcagtttcaaaacgcccacccggggtgaaatcgcacacctggtaattgattccaccgggctgaaggtcttcggtgaaggcgagtggaaagtcaaaaagcatggccaggaacgccgccgtatctggcgtaagctgcatctcgccgttgacagtaaaacacatgaaatcatctgcgctgacctgtcgctgaacaatgtgacggactcagaagccttcccgggtcttatccggcagactcacagaaaaatcagggcagcatcggcagacggcgcttacgacacccggctctgtcacgatgaactgcggcgtaagaaaatcagcgcgcttatcccaccccgaaaaggtgcgggttactggcccggtgaatatgcagaccgtaaccgtgcagtggctaatcagcaaatgaccgggagtaatgcgcggtggaaatggacaacagattacaaccgtcgctcgatagcggaaacggcgatgtaccgggtaaaacagctgttcgggggttcactgacgctgcgtgactacgatggtcaggttgcggaggctatggccctggtacgagcgctgaacaaaatgacgaaagcaggtatgcctgaaagcgtgcgtattgcctga

SEQ ID NO: 220210 - DNA, 357 bp, Klebsiella pneumoniae
atgaagcagattacccggctgattgaggtcatgctcgttggccgcggtggtgaccaggctgtgggtcaggccactcttggcatcgacaccaatgtgggccttcatgccaaagtgccactgattgcctttcttggtctgatgcatctccggatcgcgttgctgctctttgttcttggtagagctgggtgcctcaatgatggtggcatccaccaaagtgccttgggtcatcatgacgcctgcttcggccagccagcgattgatggtcttgaacaattgacgggccagttgatgctgctcgagcaggtggcggaaattcatgatggtggtgcgatccggcagggcgctatccagggataa

SEQ ID NO: 220211 - DNA, 1305 bp, Klebsiella pneumoniae; identical to SEQ ID NO: 121187

SEQ ID NO: 220212 - DNA, 273 bp, Klebsiella pneumoniae; identical to SEQ ID NO: 121182

SEQ ID NO: 220213 - DNA, 645 bp, Klebsiella pneumoniae; identical to SEQ ID NO: 121178

SEQ ID NO: 220214 - DNA, 618 bp, Klebsiella pneumoniae; identical to SEQ ID NO: 83370

SEQ ID NO: 220215 - DNA, 324 bp, Klebsiella pneumoniae; identical to SEQ ID NO: 83371

SEQ ID NO: 220216 - DNA, 1269 bp, Klebsiella pneumoniae; identical to SEQ ID NO: 83373

SEQ ID NO: 220217 - DNA, 228 bp, Klebsiella pneumoniae
atgcatattacctacgatcttccggtatctattgacgatattctcgaagcgaaacaacgcctcgcgggaaaaatatataaaacaggcatgccccgttcgaattattttagcgagcgctgccagggcgaaatatttcttaaattcgaaaatatgcagcgcacgggttcatttaaaattcgcggcgcctttaataaactgtgcggtttaaccgcggcggaaaaacgctga

SEQ ID NO: 220218 - DNA, 201 bp, Klebsiella pneumoniae; identical to SEQ ID NO: 214892

SEQ ID NO: 220219 - DNA, 312 bp, Klebsiella pneumoniae
gtgtttatggcattgaagtgggtacaaagtcaggcagattataacaatatcatgcagcatttgacgttgtcgccaggggagaagaaaggcaataaagaactgaatgaaaaagatgtgattaagtttttaggcattggagaacgaaaattgtttttctataccaattatggcgaaaagctcaccttattgcataataaccttccggtttccgttggcccggatgaaccatttagacctattccggatatcctgatgtcagaatatcttgccatggttgacgagcagcatccaactaatacaatgattgcttga

SEQ ID NO: 220220 - DNA, 267 bp, Klebsiella pneumoniae
atgtccaaaggttttgtattactcggcgataaaaccacgcacggcggtgctgttatttccgcatcctccaccatgattgtaaatggaaagcccgtagcgctggtgggggataaagtcagctgcccgattccgggacatggcactaatgccattattgagggagcgccggaatggtcttccgatggtaaagccatcgtggtcgatggctgcaaatgtcagtgcggttgccaggtgatttccggcgcgccggaatgcgcgataggataa

SEQ ID NO: 220221 - DNA, 945 bp, Klebsiella pneumoniae
atgatgtcgacaatcaatgatgtttcacgacttgccggggtttccaaagccacggtgtcgcgagtgttgagcggctcacgtggcgtgaaggaagccagtcgtcaggcggtgctgcaggcggcggaagcgctcaattaccggccaaacatgatagcccagtcgttgctcagccagtccaccggctgcatcggcgtcatctgcgcccaggacaacatcaatcaaaccaccagctatctctacgccctggaaaaacagctcagccagcaccagaaacacctgctgctgcgcttcgccaacaccagcaacggcgtgatgaactctctggaggagttgacctgcgggctgtgcgataacgtgctaatcatcggtgcgcgttttcctctgaatattaaccgcccggacgtggtgctggtggactgcctcgatagcgaaggcgacaacagtattcagttcgatcatgctttcgccgccgaaaccgcctgtcactatctgattagccaggggagacggcagattgcgctgattcatccgcagagcagcggctttgccgaccaggtgctgctgggctacaagcacgcgctggaaaaaaactttttgccgtttaatcgcaacctggtgtttctggataacacctcgccgtcggtggcggtgcaggagctggtcaataacgccacgacgctgaactttaacgcgctgctggtgagcgatgaacagcaggcgcagcgcgtggtgccgcagctacaggcgtttaaccgcgccgttccgcaaaatgtcatggtgtttagcctcgccggatcgttacagctgcccggtatcccgactatcccggcgattgaatattccatggacgcgatggcgtcgcggatcgtcaactggctgaccgagaaaacggacaacccgggcggcagcccgctgcgcggcgatttaattattccgaagcactaa

SEQ ID NO: 220222 - DNA, 270 bp, Klebsiella pneumoniae
atgaatcacacgaacgttgtcgatgtgaaagcgtggatagatacccgcccggtctcgcgctttcaatggaacgtgctgctgctctgtttcatcatcattatgctggatgggtatgacgccgcggtgatgggctttgtcgccccggcgctcatcgaagactggggcatcagccgggctgaaatggggccgatactcggggcggccatgttcggcgtcgccattggcgccctggtagcgggtccgctttctgaccgctacggccgaaagtga

SEQ ID NO: 220223 - DNA, 1263 bp, Klebsiella pneumoniae
atggctaacattctcggcggtatcgccgtctctcataccccgactatcggcttcgcggtcgatcatcataaacagcaggatccggcgtgggcgccgatcttccagagcttcgaaccgctgcagcgctggctggaggagaaaaaaccggatgcgctggtgtacatctttaatgaccatgtgaccgcctttttcttcgatcactattcgacttttacgctgggaatcgacagtcaatatgacgttgccgatgagggcggcggaccgcgctgtctgccgccggtccagggcaacgcggcgctctcaaggcacattggcgccagcctgatggccgacgagtttgatatgtcgttctttatggataaaaagctcgaccacggccttttctcgccgctttcggcgctgttgccctgggatgaagcgcaggggtggccgacggcggtgatcccgttacagatcggcgtgctgcaatttccggtaccaagcgcgcgccgttgttacaaactcggccaggcgctgcgccgggcgattgaaagcttcccggaagatatcaatgtggcgattgtcgcaaccggcgggctctcgcatcaggttcatggcgagcgctgcggatttaataatcccgactgggatgcccagtttgttgatatgctggttaatgacccggaaaagcttaccgaaatgacccttggcgaatatgccgagctgggggggatggaggggtccgaagtgatcatgtggctggtgatgcgcggcgcgctatcagccaatgtcaccgaaacctggcgcgactattacctgccgtcgatgaccggtatcgccacgctgatccttgagaacaatgcgcgcctgccccccgtcgataccctgacgcgccatcgccagcatatggcgcagcagctggccggggtggagaaactgccgggaacctatccttttacccacgagcgcagcctgaatggcttgcggcttaaccgtttcctgcatcggctgattgagcctgcctggcgtgaacgttttctgcagtcgcctcagtcgctttatgccgaagccggactgagtgaggaggaacagcagttgctcaacgcgcgcgactggcggggattaattcaatatggcgccagcttcttcctgctggagaaaatgggcgcggtggtcggcgtatccaacctgcatatttacgccgcgatgcgcgggcagacgctggaggcgtttcagcaaacgcgcaaccagcaggtaacctattcggtggcgggtaaacgttaa

SEQ ID NO: 220224 - DNA, 531 bp, Klebsiella pneumoniae
atgttctcccgtttcttcgtgcgtcgcccggtctttgcctgggtgatcgccattctgattatgctcgccggggtgctggcgatccgcaccctgccggtaggccagtatccggacgtcgccccgccggcggtgaaaatctccgccacctataccggggcgtccgccgaaaccctggagaacagcgtcacccaggtcatcgagcagcagctcaccggcctcgaccatctgctctacttcagctccaccagcagctccgacggctcggtcagcatcaccgtcacctttgagcaggggaccgacccggacaccgcccaggtgcaggtacaaaataaagtgcagcaggcggaatcgcggctgccgagcgaagtccagcagtccggcgtaacggtggaaaaatcgcagagcagctttctgctgatcctcgcggtgtatgacaaaaccaaccgcgccaccagctccgatatctccgactggctggtcagcaatatgcaggacccgctggcgcgcgtggagggcgtcggcagcctgtag

SEQ ID NO: 220225 - DNA, 489 bp, Klebsiella pneumoniae
atgagtgacatcgtgatacgccatgctgaaccgaaagatattgacgcgattcgtcaaattcacgcccagccggaggtgtatcacaacacgctacaggtccctcatccatccgaacatatgtggcgggagcggctaaccgatacgcccggcgtgaagcaactggtggcctgtatcgatgagcaagtcgtcggccatttaagcattgccgtcgtccaacgtccccgccgtagccacgtcgccgattttggtgtcagcgtggattcgcgctggcacaaccgcggcgtcgccagcgcgctgatgcgtaccatgattgatatgtgcgacaactggctgcgcgtcgagcgtattgagctgacggtgttcgccgataatgccccggcgattgcggtgtataagaagtacggctttgagatcgaaggcaccggcaggcgttacgcgctgcgcaacggtgagtatgtggatgcgtattatatggcgagaatgaagtag

SEQ ID NO: 220226 - DNA, 654 bp, Klebsiella pneumoniae
atggacaaacagtatctcgccataaacggcgccctttttttctggcttctcgcgctgatcgcctggtctgtcgatgcaagcgcgctggcgcgcctggcggccgcctgcgcgcttatcgctttcctcctccatagccaacggaacaagattaacgcgatgtttattaagaaaaataaaacggaacctcagatatcagaagcagccacgcctccggcaattaacccagaacccgaagcggtcgccagcaaaaaacacgagactacggtcatcgccagcggggtgcatttcgtcggcaatatagtcgccagcggccatgtctatatccacggtcaggtcaccggcaacattgaggccaaagagcatttgattaaggtaatgcgtgaaggccaggtggagggcaacgtcagctgccgggagctaataattgacggcaaggtgcaggggcagtgtcatggcgacagcatcaccatcgaggagcacggccatctggagggtaccctcgcctatcgcgcgctggcgatcaagaaaggcggcgtttttagcggtcgcgctgaaatgctggccgccgcggagaacaaaagtcatattctcggtctggtagcagacgcaccctccaaaaccgacgcggagcccgtcaggccgcagagcgcctga

SEQ ID NO: 220227 - DNA, 1038 bp, Klebsiella pneumoniae
atgactctgcactgcgcatttattggctttggtaaaagcaccacccgctatcaccttccttacgttttgcaccgcaaagaccgctggcaggtcgcgcacatttaccgccgccgggcgaagcccgaggagcaggcgccgcagtattcccatattcatttcaccagcgaccttgatgaagtattaaacgatccactggtcaagctggtggtggtctgcactcacgccgacagccattttgaatatgcgaaaaaggcgctggaggcaggaaaaaacgtgctggtggaaaagccgttcaccccgacgctggaggaagcaaaaactctgtttgccctggcgaacagcaaaggcctgacggtgacgccctatcagaaccgccgtttcgactcctgcttcctgaccaccaaaaaggtgattgagagcgggaaactcggcgaactggtggagatcgaaagtcattttgataactaccgcccactggcggagaccaaccccggcggtccgcaaaacggcgagttctatggccttggcgtgcataccctggatcagatcatttcgctgttcggccgcccggaccatgtctcttacgatctgcgctcgctgcgcaataaagccaacccggatgacacctttgaagcccagctgttctacggcgatatgaaggccatcgttaagaccagccatctggtgcagatcgattacccgaaatttatcgttcacgggcacaaaggttcgtttgtgaagtacggcattgaccagcaggagaccagcctgaaggccaatatcatgccgggcgagccgggatttggcgcggacgacagcgttggcgagctggtgtatgtcaacgaggcaggggagatggtgcgcgaagcggtgccgctggagagcggcgattacggtcgggtgtacgacgcgctgtacgacaccctcgtcaacggccagccgaattacgtcaaggaaactgacgttctcaccaatatggagatcctgcagcgcggctttgagcagccttcaccggccaccattacccttacccgataa

SEQ ID NO: 220228 - DNA, 696 bp, Klebsiella pneumoniae
atgatctatttacgcaaagcgaacgaacgtggccacgctaaccatggctggctggattcctggcatactttctctttcgccaactattatgacccgaactttatgggcttctccgccctgcgggtgattaacgacgacgtcatcgacgccggtcagggcttcggtacccacccgcacaaagacatggagatcctgacctatgtgctggaaggggcggtggagcaccaggacagcatgggcaacaaagagcaggtgccggcgggcgagttccagatcatgagcgcgggtaccggggtgcgccactctgagtacaacccgagcaaaaccgatcgtctgcgtctgtatcagatctggattattccggaagaaaccggcattaccccgcgctacgagcagcgccgcttcgacgccgcccagggcaaacagctggtactgtcgccagatgcgcgagatggctcgctgaaggtgtaccaggatatggaactctatcgctgggcgctgctgaaagatgagcagtcggttcaccagattgccgcggaacgccgcgtgtggatccaggtggtcaaaggcgaagtgaccatcaacggtaccaaagccaccaccagcgacggtttggccatctgggacgagcaggcgatttcggttcatgccgacagcgatagcgagatcctgctgttcgatctgccgccggtttga

SEQ ID NO: 220229 - DNA, 240 bp, Klebsiella pneumoniae
atgaaaaagaaaagacccgtacttcaggatgtagccgatcttgtcggcgtgaccaaaatgacggtcagtcgctatttacgcaacccggagcaggtctccgaagcgctgcgtggcaagattgccgttgccctcgatgaactgggttatattcccaatcgcgcccctgacattctttccaacgccaccagccgcgccatcggcgtgctgctgccgtcgttaaccaaccaggtcttctcgtaa

SEQ ID NO: 220230 - DNA, 756 bp, Klebsiella pneumoniae
gtgctgcgcggtatcgaaagcgtcaccgacgccttcggctatcaaaccatgctggcgcactacggctataagccggaaatggaagagaaacgcctcgaatcgatgctctcctggaacattgatggcctgatcctcaccgaacgcacccatacgccgcgcaccctgaagatgatcgaagtcgccggcattccggtggtggagctgatggacagccggtcgccgtgtctcgatattgccgtcgggtttgataactttgaagccgcccggcagatgaccgcggcgatcatcgcccgcggccaccgccatgtcgcctatctgggggcgcgtcttgatgaacgtactatcatcaaacagaaggggtacgagcaggcgatgcttgacgccgggatgacgccctacagcgtgatggtggagcaatcctcgtcctattcttcggggattgagctgatgcgccaggcgcgccgcgaatatccgcagctcgacggcattttctgcaccaacgatgacctcgcggtcggcgcggcgttcgagtgccagcgtctgggactgaagatccccgatgatatggcgatcgccgggttccacggccatgatatcggccaggtgatggagccgcggctggccagcgtcctgaccccgcgcgagcgaatggggcgcatcggcgccgaacggctgctggcgcgcattcgtggtgaagcgattacccctaagatgttagatttaggtttcacattgtcaccgggcggatcaatttaa

SEQ ID NO: 220231 - DNA, 1533 bp, Klebsiella pneumoniae
atgttactcaccgccagaacaccttcccgatacgccagcgccctggccgcgctttctgtctttatggcggccttgctgctgccgttatgttttaccggcggcgtcatgaccacccccgcgatacagcagtcgctgggcggctctcccgcagcgctgtcgtggctgaccaatggctttatgctgactttcggcagctttttgctggccgcaggggtgacggcggatgccatcgacagaaaacgtatttttatcgccggcgccgcgctgttttgcctgagcagcctgctgttttgtctgacgcacaatctcttcctgtcaggcgtgttgagggcgctgcagggcctggccgcggcgatgattttagccagcggcagcgcggcgctggcccagctgtatgatggcgcccagcggaccagggcattcagcatcctcggcacggtgttcggcattggcctggcgttcggtccgctgctgatcggcttcatgatcgacgcggtgggttggcgcggcgtatacgccctgtttgcgctgctctcggcaggggttctgcttataggcctggtatctctgcctgcgacagaaaaaagcgagccgcggacacccgacaacctgggcttaaccctgtttacgctggccctgatgctttttactgcatcgcttatggtcattccggcccgcggttttttatccctgaccacgctggccttgctcatcgcgtcgggggggctgttcgtggcgtttgtcgtacgctgccggagggtgaacaacccggtgctggaactctccctgctgcgtcatccgcgttttgtcggcgtactgttgttgcctgtcgccacctgctgttgctacgtggtcctgctgattattgttccactgcatcttatgggcggagaggggatgagtgagtcgcagagcgcactgtatctgatggcgctgaccacgccgatgctggttttcccatccgttgcggccctgctcacccgctggttttcaccggggcaggtgtccacggcgggactgatgatggcctccgccgggttgctgttgctgggcgatgcttttcacagtaaccacctcccgcagctggtgctggcgctgatcctctgtggggcgggggcggcgcttccctggggactgatggatggcctggcgatatccgctgtgccggtcgccaaagccggtatggcggcaggcctgttcaacaccgtacgcgttgccggcgaggggatcgccctggcgatagtctccgcggtattaacggcaagcaataccctgaccctgcagagtcgcgtacacgggtatgcgcctgaggtgattgaccgcgccgcaggctggctgggggccggcaatatgccgcaggcggctgcgcttttgcctgacttttccctccgggcgctgcgcgagagctatgactctgcttatacgctactgtttagcgggctggcggtcgtcaccctgctgtgcgccctgatggtctggcggacgctatgccggaaggggggcgctatccaaacccgcgacagtggatcctga

SEQ ID NO: 220232 - DNA, 516 bp, Klebsiella pneumoniae
atgctctatgtcgtcgaatgcgcctacaccgatccccaaagcgaagcggcgtggaataccttttacaatcaggaaaaactaccggcgctggtctctgtgcccggtttctacgcctcccagcgcttccgcgctctcagcgagggctgcccctgctacctggcgctgcacgatatccacgatgctaccgtcatcgacagcgacgcctaccgccgcaacggcggcggccattttgcccgctggcaatcggcgatcgccgactggcatcgccacctctatctaacgaataatacgctgcgggaggttgccccggatgaagtgctgctgctgggcgataccgcggaggacttgcccgtcgctgcgccgatactcctgcagccaggcggcctggcgaccgaacaaaaccggtatgccgccatcgtcccacgagacaacctgcatcacctggccacgactgccgccgtctttatctatcagcccatcaccgcccggttacgcaacccggcgcagcgcgcgtga

SEQ ID NO: 220233 - DNA, 2106 bp, Klebsiella pneumoniae
atgtctccagtacttaaacatagcgtcacaaaagatacggatgaaatagatataggccgaattatcggtgaattaattgatcacagaaaactaataatttctgtgactgcattattcaccgtactggccttagtatatgcgctttttgctacaccaatatataaagctgatgctttagtacaggtcgagcaaaagcaaggcaatgctattttaagcaatcttagccaaatgcttccaaatagccaaccaatgtcagcacctgaaattgctcttttacagtcaagaatgattttaggcaaaacggtcgacgatttgaatctgcagtcaaaaattgaaccaaagtattttcctatttttgggaaaggtttatcgaggttgatgggggaaaaaaatggtacattagaaatcacaaggttatatattccaatagttgataatgaggcatccgaattagaaatagaagtcaaagatcaatcgcattattttgtcaaatataataataaagttatagaaggaactgttggaatagcaatagatgaagaaggagtttcattaaaagtttctgaaatctcggcaaaaccaggcagtagattcacggtcaaatatgaagatagactaaaagcgatttcagacttacaagatgtatttacggtagctgatcaaggaaaagatactggaattctcacactttctttaacgggtgacaatccaattctcattcgcaaaattgtcgatagtattgcacaaaattatttgtcacaaaatattgcacgacaagctgcgcaagatgaaaaaagtttggagtttctgaatatacagctgccaaaggttcgtaaagatcttgatattgcagaggacacattaaatcagtatagaagacaaaaagactcggtagatctttctcttgaggctaaatctgtattagagcagatagttaatgttgacaatcaactcaatgaattaacattcagggagtctgaaatatcacaactctatacgaaagaacatccaacctataaagccttactagagaaaaggaaaactcttcaagacgaaaaagaaaaattgaataacaaagtttcagctatgccaaaaactcaacaagaaatattaagattgagtagagatgttgagtcggggcaggctgtttatatgcaattattaaatcgacaacaagagcttaatattgcaaaatcaagcgcgattggtaatgttagaattattgatacagccattacgcaaactaaaccagtaaagccaaagaaaatactaattgtcttgatcggggtatttcttggatttgctacttcagtaggaatagtattattacgcgtgttcttaagacgtgggattgagaatccggagcagcttgaagagttaggcataaacgtatatgcgagtatacctgtgtctgaaacattcgctaaaagaatggttcaaacgccatcttggaaaaaaaatcgaaataaagatacttatggttttctagcgattgaaaacccggctgatcttgcaattgaagcaattcgaggtttaagaactagtcttcactttgcaatgatggaggctagaaacaatgtattaatgatttctggagctagtccaaatgctggtaagacgtttgttagtacaaacttagctgcaattattgcgcaagcaggaaaaaaagttttattaatagacacagatatgcgtaaaggctatacccataaattatttgaagtttcaaatgaatatgggctctctgattttctatctggtaaaaatgatttaccaaagtcagtaaaaaaaataaagaatgtagaattcgatttcatatctcgtggagttgttcctcctaatccagctgaactgttgatgcatagacgatttggcgagttaattacttgggcgagcaataattatgatattgttatattagatacaccacctatactagctgttaccgatgcagccatcattggtcattatgctgggacaactttgctaatagcgcgatttgaacaaaacacgcccaaagaaattgaagtgagttataagcgttttgagcaaagtggcgtaattgttaaaggctgtattcttaatctgtctcttatacacatctga

SEQ ID NO: 220234 - DNA, 906 bp, Klebsiella pneumoniae
atgaccgtttctctggattcgccgctttcgggtggtgcgggcgaaggccgtcagcggctgcaacgcgcggcggcgcgggccgtcgggtttatcggcaaaatggcgcgcaatccgctcacggccatcggcggaggaattatctttatgctgctggtggtggcgattttcgcgccgctgattgcgccttataacccgctggtacagcacctgaatagtgcgctggtcgcgccgaatgcgcagcactggttcggcaccgatgagtttggccgggatatctttagtcgcctggtgtacggctcccgcatcacgctctatatcgtgctgctggtctcagtgaccgtcggtccgctcggactgctgctgggcgtcagcgccggttatttcggcggtaaagtcgatatggtgctgatgcgcgtcaccgatattttcatctccttcccgagtctggtcctggcgctggcgtttgtcgccgctttaggaccggggctggagcacgtggttatcgccatcacgctgaccgcctggccgccgattgcccgtctggcgcgcgccgaaacgctctctctgcgccaggctgattttatctccgccgtgcgtctgcagggcgcttcatcggcccgcgtcctctggcgccatatcgtgccgctgtgtctgccctcggtcattatccgtatcaccatgaatatggccgggatcattctgaccgcggccggcctcggctttctcggcctcggcgcgcagccgccagagccggagtggggagcgatgatctccagcgggcgcacttatatgatggagtgctggtgggtcgtaaccattccggggctggcgattttgatcaatagcttagcgttcaacttcttaggagatggcctacgtgacatcctcgatccccgtagtgaataa

SEQ ID NO: 220235 - DNA, 1035 bp, Klebsiella pneumoniae
atggcaagaaagaaaatttgggcatacgccatcgataacaaagaggaatacattaaaaataaagaaacaaataaagagcgattattctttatttgggaggttattaagatgcgaaaagaaaaccctaaagagctttctttgctaacctttatgagcacacaatctaacaaggataaacgagcagaattaacaccagttaaaaaaacaaaaaccgcctttttcagatataaatctgattcaacaacatttaccgaaagccatgattctgattcagaatacatatctcatgaaactgcaattctagttttatcggaaatgaaaaaaataaattttcaagataaagataaaatttatgagattgaattcgacaatataaaaaaagacgacttacaaatcaaattcgaagatggatcaatttattatcctgatctagtaggtttttttagcaaaccaatagaattagccaggaaatgggggggaaaagtagccattgaagttaaagtaactcataaatgcagttatgaaaaaataaaagattttcaagaccataacatacccataattgaagtttcattatcggataagatgaggctcaattcagaattaaacaatactgatatcgatgaagatgaaatggaacgatattataactttttaaagagcaaatttaataacattgtttatatgaaaatattatctgaccctataatgttaaatgagcataaatttataattaacaaaaaaaatgaaacgattattaaggctataaaagagattgaatcatttaaaggccagctggcaaaagaaactgaaaaaaaagaattatttgaatcaacaataaaagaaatgaaacaggaaatatttaagctaaaagaatcaatcgataatacaaaacatcttaataattctttgctaacgcaattagataatgaaaaaaacagagctaattcattcaatgaaaaaattaatgaattaaaactcaaggattatgaaagcatgaactttctagagcgttttaaacgacttttcaggtaa

SEQ ID NO: 220236 - DNA, 1818 bp, Klebsiella pneumoniae; identical to SEQ ID NO: 217086

SEQ ID NO: 220237 - DNA, 918 bp, Klebsiella pneumoniae
atgaatcgcgacgattacttgttcgttctaagtgagcgggactcaatcctgtctcttttagaaaccactactgatgatgacattattggcaaaatgagccttgaaagcaggctccatgagctaaatgatgagatttctcatattgttatcgatgagcatccgccagttaaagccactttaacatttagaggagcccctgtacttggtacatatggcatagctgcaaatttcggaaccaaaatagttaacgcctttaatgatgcggtttctcatgttgcatcttcattttcagggaaattaccggccaaaggtaaaattccaaatcttgaaaataatttgcttatgattactggaacagccaaaggttcttttggatttacacttgaggaatttaggccagatgccccgcttaactttgatgaggaatcttctgttcaaaaagctctgaaccagactcaatctatcctgcaaatgagtataaggggagacgatgatggtctagctgaggcgattagtgatttggatgaccgagctttagataaaatacgtggttttatacaaatactatttgataacaaagcaacttttactttaaggcataacaaccaagcgcttgttgcaaacaatatcaatgatattgaaagagcggtcctcaagctaagtaaagatagtgttaaagaagatttgcagttattagaagttagcttcttgggagcccttcctcataaacgtcaatgcgagtttattatggagcatgatgaatctaaatcaatttttgtagcgaaaatcagtaattacatagacaatccagacattatcaacgatcaccgcggagaaaaagttattgcaaaattcctctgcactcaggtaggtaatggaaagcctaagtattctttgcgtgagctaccgaactggtag

SEQ ID NO: 220238 - DNA, 588 bp, Klebsiella pneumoniae
atggtgattcaggaaattcctaactggaatgaaattggtgtaatcccaccaatggatatggagcatccaaccagcgcctatcgctccccatataagacagatatattaaaatttgtagagcggtacgctacaagcccacaaaggatcgagatcctactcggtttcatcaaatttcgtaaagaaattaataaaactgggttaacggatggttttcaatggatcgatggtagtttcatagaagatgttgaactcattgaaaaacgtccgccaaatgacattgatgttgtgactttttttaatttggcgtttaacgaaacgcagcaagatgtcgttatgcgtaacccgaatctgtttgtgccacatatgggtaagtggagaaagcaagagtttagagttgattcttacttccagtcactgggcgtttctaaggaacagcttgtagaaaggactgtatattggtacagtatgtggtctcatagaagggatcttacatggaagggattcttgcagattcctctagatattacactggatcaacaggcattaaccattttagaaacaatgctatcagaaggaggtgagcaatga

SEQ ID NO: 220239 - DNA, 603 bp, Klebsiella pneumoniae
atgaagttgacccctaaggccgtaagcaaatggttcaatggagagtcgattccaagacgcggaacgctgaaagcactggcgtctcacattggtacgtcagcgtcgtatctgctcggtgatgtcgatgaggatggaatcgatacagaggcaacccaaacccttaaggatgtctttcgcattgacctattggatataacggttagcgctggccccggggttatcaatcaggagttcgtggagattctccactccgttgaatatgcgccagcggaagcgcgccacatgttcgatggacgtaaggctgaaagcatccggatcatcaacgtccggggcgacagcatgtccggtacgattgagccgggtgatctgctgttcgtcgacatcagcgttaagagcttcgacggcgacgggatatatgcgttcttgtacgacgacactgctcacgtgaagcgcctgcagaagatgaaggacaagctgctggttatctcagataacaagagctatgcagcctgggacccgattgagaaagacgagatgaatcgggttttcgtgttcggcaaggtgatcggcagcatgccgcagacgtacaggaagcatggataa

SEQ ID NO: 220240 - DNA, 228 bp, Klebsiella pneumoniae
atggcaccgaatagtcttggcgaaatcatcaaaaagattcgggttcctgtcgtagctgaagcctgtggttgctcgccgcgcgcaatttacaaatggattgctaacggaagcctgccgaggacggattacaccgacgaaaccaactacgcagaaaagatcgctctcgcttctggcggccagtttaccgctgctcagatccgggaagtcagcaagcctaaagccgcctaa

SEQ ID NO: 220241 - DNA, 222 bp, Klebsiella pneumoniae
atggagagttcaacgacacgcaacaaagtggaggctcgcaggatagaaagctggttacacagccagatagctgaactgggaaccacgaatatcgccaaagtggccggagtgaataagtcgacggtgagtcgctggcgggaaagtctgctgccgaacatgtcgctgctgctggccatcctgatttctaacaggccgggagagaaaggtgattttgaagcatga

SEQ ID NO: 220242 - DNA, 147 bp, Klebsiella pneumoniae
atgcctaagagcaacagattttaccaggcacaaacacacaaaaatgttacccgcgatcgcttcattcgctcggttaacccggtggttggcatgaaaatgcgcgccatcctggaagagctgaaacggaaggaggaaggccgtgagtag

SEQ ID NO: 220243 - DNA, 1086 bp, Klebsiella pneumoniae
gtgagtagcctcgcaaaagtaatacctatcagaccgtctgtaacggtcgtggagcgtcaggtggcagatatcgatgatgggtatacccgcatcgctaacgagctgctggaagcggttatggctgctgatttaacggctcgccagctgaaggtcgttctggcggtgatccgcaaaacttacgggttcgggaaaaagtttgaccgcattaccaatacccagattgcagaaatgaccggcattcaccatacgcatgtctgcaaggccaagaacgagatgattgcaatgaacatcatcgttaccaatggcctggcgatcggggtgaataaggtgatttctgactggaatttcagcattagccaaaatggcaaatcattagccgaaacagctaatgaaacattagccaagtcagctaatacccataagccaactcagctaaacacaaaagaaactattcaaaagaaagaaagaaaagatccccctaaatcccccaagggggaaaactcactcgctcaggaagtgatggattacttcaacgagctaacgggtagtcgttgtgctgcgctggcaccttttgagaaagctctctccacggtgaagagcaaagaccagtgctacaccgctgaagagctgaagcttgttatccgctgggcacatgtgaactggggtcacagcttcaagccagagaacctgtgtcgtatgacccgatttgatggatacctgtcagacgccctgatatgggcagatggtcatggaagcaacccgaaagcctgtccgcacgaagagatcatcaagctctggaatgaaaaattcccttcgaaggccgtttcactgcatgagtggaaccgccgccgtccggcctatcgagacctggaagctgtgtggaacggcaaaaccacccagggcaactggcgagaactgaagcacatgggaatggccttcgagctgattagcaagtcttccctgttcagcaccagaggcgatcagccatggctgactctcgactggatactgaatccgaagaactggggatctgtctacgagcaggccatcaacgagcaccgtgagcgcaagggagtcaaagcatga

SEQ ID NO: 220244 - DNA, 1374 bp, Klebsiella pneumoniae
atgagccgttttattgatttatacgttgagcaggccgtcattggcggaataatgcttgcagcaggtcgcgcagatggcgccgacatggctaccgatgcgattgaggggctgactgaggaccacttcacagcaacgccccataaagtggctcttcggtcatataagcgactcaacgaatccggttcgaagatagacctgcttacgctgaccagcgatcttgaacggcttggcgcgctggaaagtgcggggggattcgcttacctggctgaatgcagcaaaaacacgccatcgttcgctaacctgtccgcctactgcgaaaagctacgggaaatgcaccttggacgtcgtatgaccctggccctgcaggtaggtatccagaaactgtccgaaccatccagtgagggtatcgctgacatcatcggcaacatacaggccgatatctccggcattgagcacagtgcggactatggcactgagcacatcaccaccgggatcgacatgtcgttagaggccatccagtcgattattagcggcgatatctggaagcacaaaaccgagcttggcatggcaaccatcgacagcgcttttggcgggtttaacaacacagatttcatcgttgttggcggtcgaccgggaatggggaaaaccatgttcagcaccaccgtgaccgagacagtcggcctgaaaaacaaaaagccggtgctgttcttcagtctcgagatgccagtggaacaaatctctgagcgagtcgctttccaccgggcgcgggtaagcaaagaagatctgttgagcaaggttagcgggaaaatggacgaggcatgggggaaggttagtcactgcatgagggagttcatcgactctccgatctacatcaacgataagccgtccctaagcgttcaccaggtgcgtgcggaagcgcggcgtatgagtaagaagttgggcggactgggcgtgataatcgtcgattatctccagaagatgcgcatgtctgacccggagaacatgaaccgcagcgtaggggagatcgccactggtctgaagaacctggcgaaagaattgcgttgcccggtcatcgctctggcccagttgaaccgaaacctggagcagcgcgctaataagcgtcccgttgccgcagacctgcgagagtctggcgtcattgagcaggaagcagatgtgatcttcatggtttaccgggatgagaagtacaacgaaaacaccgaactgaaaggcatcaccgaaatcatctgtgtgaagtcccgccatgcgccgggggcagaaaagacctaccacttcagcagccgctactcaggcctggacccggtagatttcacctacagcggccagatgcaacaggaggctgactatgagtgctaa

SEQ ID NO: 220245 - DNA, 315 bp, Klebsiella pneumoniae
atgagtgctaagacgatgaaaggcaaacaggcaattctgcgttatctcgaaacgcaccggaccttcactgcgaaggatgtgtccgcagagtgtggtatgaccatcaactgcatcacgaagaacgctatcgacctggagcgggccaggaagattgtgcgcgtgagtaaggtctggcgaacggtgacttatcgcctgtcgacaccggaagagcaggccggaaccgcgcgcagctgcactaacggaatatttcaggagtgccgtaacagtgcggcgatgaagcgggtactggctgtttacgggagaacatcagcatga

SEQ ID NO: 220246 - DNA, 453 bp, Klebsiella pneumoniae
atgactatcacactacaggcagtaaacgagctcatcgcctccctgcagagcgcaggcgagctgtcgatcagagagcaggagttcctgaagctggcgaaagcgtaccagcagctggctgcggagaatgtggctattcgtgaacagtctgaggaagtttacgcagcaggttacaaccacgggcacctgaacactgttgacggtatcgcatatgctggttgcgtaaaagacgacttctacagcttggctctccaggtaatggctgaagtcgaaaccccagccaccgatgcctacctggccgggattaaggctgatggggtggaagagttcattggtcgcctgcagcagcatgtcgatgagggtgattttgtaggcgatgaagttgccgtaattgttggcgctatcgactgcggtaaggagtttttcgagcaactgcacgagggggccgacaaatga

SEQ ID NO: 220247 - DNA, 774 bp, Klebsiella pneumoniae
atgaccaaatcaaccataaccagagagcagttactcgatattattgaaaccgatcatgtgcagtgcggtgaggcatcttatctagccagaatggcgctggccgcaatggccagcgagtctgggtgtttgcctctcgactacctgcagggacacaaagacggtctggaatgggccgcccaactggcagaagccaatcaccctgaaataggagactggctttacgatgaccctatcgagctggcaaaagctattcgcaaaggtccagatatgccgccagcgcagccggtagcggacagcgagccggtggcgtggacttggcaacatctcaagcaatggtacgtcactaatgacgaggaacgcgcaagggaattggcgtgggatggcgtcaaggttgagcagctctatcgccacgcgcagccggtgccggtagccagcgcagacctgcttcataccgcagcctcagcgatagaggacctgttggagcataccgaccctaacactagttattattctggcgtgtgggctgatgtacctggtaagttgcgagcagccgccccgcagtcacccggcagtgaacccgctaccgtgccgggtaaatggattccggtaagcgagcggatgccagaacgcggggattggcttgttactgatggctgcgacttcgatgtgcagttgtttaatggtgagcagtttattcctggctttgtgtgggaggacaaaataacacactggatgccgctgccagctgccccgcaggaggtgaaaggtgagtaa

SEQ ID NO: 220248 - DNA, 306 bp, Klebsiella pneumoniae
gtgagtaacgtacgcgatgaaatcagaaccttcgaccttgaccgattacgctctcttcgtgagttcgttggtgaccttatagccagaaaagaagaagaaccgcgcagaacggtatggcgtgtctgctctgacggtatctgctacggcaatttcagggaagaggaatacctcaaggcagtagcgtttctagcggagaaggccgcagaaattgatgcggacccgacatcggacaggcgggacaggagcatggagattttatctcatcgcgtcatcgagtcagaatacgagggatggtttgatgcctaa

SEQ ID NO: 220249 - DNA, 141 bp, Klebsiella pneumoniae
atgagccgtgacgttatcgaacgcatccgcgaccgctggcaaaagctccgcctcctgcgtagccgcggcaccgtactggttgactaccgcatactgagaaatttcgttcgcatctatcagaccctgggagagacagcatga

SEQ ID NO: 220250 - DNA, 315 bp, Klebsiella pneumoniae
atgcaacgtatgaacccaaccgatggtcacaatctgccttactggtggtcagccttgcttggtatcttttccgtcctgagtctgcaggattatgtcttcatcattggcgccctgatctctgccttcttcacaatcaagacgtattacgcaaagcgcaaggaagagcgagagcgactggatgaagagaaaaaacgcacgcagctgttggccagttatctggctgatgtctccgcaaagcctggaggtgaccgcccggcttcagccgaagtggtaaccgaggccttgaagcggatcgcaagtgatacacaggggtga

SEQ ID NO: 220251 - DNA, 504 bp, Klebsiella pneumoniae
atgacgccatcaatgaggaataaactgattggcgtgatcgccggcggcggtggcgccatagccattgcctctgcgctcatcactggcccaaccgggaacgatggtcttgaaggtgtgcgatacaacccttatcaggatgtggtaggcgtctggactgtctgctatggccatactggcaaagacatcatgctcggcaagaagtacaccgaggctgaatgccgtgcgcttctcagtaaagacctgaacgccgtcgctcgccagattaacccatacatccagaagccgatccccgaaacaatgcgtggggcgctttactcattcgcctataacgtcggcgctgggaacttccagacctccactctgctgcgcaaaattaaccagggcgaccagaaaggtgcatgtgaccagttgcgccgctggacttatgccaagggaaagcagtggaaaggcctggtaactcgccgcgagattgagcgcgaagtttgtctatgggggcaaaaatga

SEQ ID NO: 220252 - DNA, 465 bp, Klebsiella pneumoniae
atgagccgattgaccgccattatcagcgccgttgtgatctgccttgttgtttgccttgggtggctggccagtcactaccacagcaacgccaccgagttcaaaaggcagcgcgataaagtgactgagcagctcagcctggcgaaagacactatcgctgacatgcagacccgtcagagagacgtcgcagcgctcgatgccaaatacacgaaggaattagccgatgcaaaagctgaaaatgatgctctgcagcgcaagcttgataatggtggtcgggtgctcgtcaaaggcaagtgtccagtgtcagcctcaaccaaaaccgccggcgccgccagcatgggcgatgatgccaccgtcgaactctctgcagttgctggacgaaacgttctcggtatcagagccggcatccagcgagatcagacggccctgaagacgctgcaggagtacatcaacactcaatgcaattga

SEQ ID NO: 220253 - DNA, 210 bp, Klebsiella pneumoniae
atgattttatctttctgctcgttgcttaggcctgaccatatggaggcaaaaaaaccgaaaattttcagaaaaatgtttatcactgcaatacctcatggctggatgataggggcgacattaataagtatcttgcatgccattactttgaataaaaatgacattacttcacaaatacagatattggataacgcttacaagtgttttcagtag

SEQ ID NO: 220254 - DNA, 273 bp, Klebsiella pneumoniae
atggcaaaacctgatgagccgtatcgtaagttgattgttgagagctactacccagccagtacctctggtagaaaaggtaaggttcatatcaggccaatacctggacaatgggcaagtccatcactcgctgtcgaatgttccaaaaagttgtcagacttgaagttgtacccaatagggagtcagttcgaaattactgccaaactgaccgacagagaagagggcggtgaatacatttacagctcattccgatgggagtttaaacacattaaatag

SEQ ID NO: 220255 - DNA, 573 bp, Klebsiella pneumoniae
atgtttagcgaagaaaaagtggctcagatggctgcttacctgctacttaaacgcggcgggcgcatggcatatctgaagcttatgaagctgctatacttggcaaaccggcagtcaatgattcgccatggtcgcatgatgggtgaagacaagctttactcaatgccccacggtccggttatgtcaactacactggatctgattcgtggtcgcgctgacattgatggtgactactggtatcgtttgataaaaaccgatcatcatgacgtctgcttacgaaccgaccctcgagagatggacgctgatgaagtcttcgatgaattgagcagggcagatatccgcattttggatgaaatatatgcacaatatgggcatatgaacagatatgaattgcgcgatatgactcatcttagaaacgtttgccctgagtggcatgacccgcatggctcacgaactcttatagatgtacgtgaaatatttatcgatgctgggaaaactcctgaagaagtagagaatatacttaggagtatgcgtgagtcacaagaacttaaggagttttcttctcaattgtcatga

SEQ ID NO: 220256 - DNA, 219 bp, Klebsiella pneumoniae
atgctcaatgatggtggtctatcagcgatcctgaacgtccaaactataaagcttcatcgtgacgcagtggtcgtactcgaagacctgatcgccatttcaaacatgaacgacgaacagaaggaaaaagccaagtcgactctcggcgaaatgtcgacggaagccattaaaaccgtggtacaagccgtgacgactgcagggttatcaaagctgctcgggtaa

SEQ ID NO: 220257 - DNA, 366 bp, Klebsiella pneumoniae; identical to SEQ ID NO: 140951

SEQ ID NO: 220258 - DNA, 366 bp, Klebsiella pneumoniae
atgagcgcacgttccagttatacaacccgaacggagggctataacgtggggtttccgtcgccagcagcagactatgtagaagggcgtctgaccgtcgataaactctgcggtaccggccccaatactcggatagtacaaacagaaaccggctataccgtagtggattgctccgtaaaaccaaagcaaggagataccgttttaattcaatacggcggcggcactgactttgcaaaaattatgggccgggcatttattacacgagacggtgaagcgctggaaggtgaggccctggatgatgttacagttgtcggggtagtgacattcgttatcaatcgtacagggagggatgatgattgtccggtatag

SEQ ID NO: 220259 - DNA, 240 bp, Klebsiella pneumoniae
atgccgcgaaactcagatatcgaaatagcctggcgtcaggcaattgtcattgagcctaatggccgtcgcaccgtgacaacgtccggttttatccgggaactcgccaaagttaactggatatggtcaccgcgccaggctaaccaatggattgagcactatgtgaccactttccgggatgtctcaacccaggaaggcgatgagcgcacgttccagttatacaacccgaacggagggctataa

SEQ ID NO: 220260 - DNA, 513 bp, Klebsiella pneumoniae
atgactgacgagatcgatagcgacgcaaacaatacgcatgaactaaccgctgaagtggctcgggcgctgatcgcgcgcggttggcgactgaccacggcggagtcttgcaccggagggaatctggcggcagcgctctgtgcccaggcggataccgcggcattttatgataccggcgtagtgaccttcagcgatgaagccaagcgcaacgtgctgcaggttcgcgcggaaaccctggcggtacacagcgccgtcagcgaagcctgcgttcaggagatgtcctctggtattctggcgctcgccggggccgatatcgccatcgccgtcagcggctacgccggaccggagggcggggaagatggtacccccgccggcacggtatggtttgcctggaattttcgcggccagactgaaaccaaacggatgtgctttgccggcgactgtgagaccgtggtggcgaaagcggtacgatatgccctggcggcgctgagcgaaaagcttgcccactggcagtga

SEQ ID NO: 220261 - DNA, 1359 bp, Klebsiella pneumoniae
atgactacctctaccctgcaacacaatgataataaagccgttgaagtagaaaaccgggtgatcaaaaagctgttccgccgcctgatcaccttcctgtttgttctctttgttttctcatttttggatcgcattaatatcggcttcgccggcctgacgatgggcaaagacctcggcctgacctccaccatgttcggtctggcggcgacgctgttctacgtcacctacgtgctgtgcgggatccccagcaatatcatgctggcgaaagttggcgcgcgccgctggatcgccgggatcatggtggtctgggggatcgcctcgacctgcaccatgttcgccaccagcccgcatacgctgtacatcctgcgcatgctggtcggcatcgccgaagccggttttctgccggggatcctcgtctatctgacctggtggttcccggcctaccatcgcgcccgcgccaacgccctgtttatgatcgccatgccggtgaccatgatgctcggctcgatactttccggctatatcctggcgctcgacggcctgtggaacctgaaaggctggcagtggctatttctgctggaaggcctgccgtcggtggtgctcggcgtcgtcacctggttcttcctcaacgacacgccggataaagccaactggctggacaacgaagagaaacaggcgctgaaggcgatgatcgatcgcgaacgggaacatgcggcgatcgtcccggcttcgccgcgttccacgctgcgcgaagtactgacgccagcggtgctgatgtataccctcgcctacttctgcctgaccaataccctcagcgccattaatatctggacgccgcagatcctgcagagcttcaacaccggcagtagcaacatcatgattggcctgctggcggcgatcccgcagttctgcaccattttcggcatgatctggtggagccgccgctccgaccggcgcaaagagcgcaagatgcataccatcctgccctacctgttcgccgcggcgggttggctgctggcttcggcaacgcaccacagcctgatccaactgatcggcattattatggcttcggtgggatcctttaccgcgatggccattttctggaccaccccggatcgggtgatcagcctgcaatcgcgcgcggtggcgctcgcggtgatcaacgccatcggcaacgtcggctctgccgtcagcccgctgttgatcggcattttgcgcgataccaccggcagctttagctccgggctgtggtttgtcgccgggttgttgatcgtcggcgcgctggtgctcacccgcattccgatgagccagcgcgaggacgccgccgccgcgccgggcttagcggcgcaaaaaggccactaa

SEQ ID NO: 220262 - DNA, 891 bp, Klebsiella pneumoniae
atgtgccagcattcaatcgccaacatcgacatcaataaagattacgacgagagtctgggcaccgaagaggtgcactatcagtcgtttgcccgcatggcggccttttttggccgcgacatgcaggcgcatcgccacgaccgctattttcagatgcactttcttgataccggacagattgagctgcagcttgatgaccaccgctattcggtgcaggcgccgctgtttgtgataacgccgccctcggtaccgcacgcctttattaccgagtccgatagcgatggtcacgtgttgacggtgcacgaagaactcatctggccgctgctggaggtgctttatcccggtacgcgggagaccttcggtctgccggggatctgcctgtcgctggcggataaacccgacgagctggcggcgctggcgcactactggcagctgattcgccgtgaatccaccgctcagttgccggggcgcgagcataccctggcgctgctggcgcaggcggtatttaccctgctgctgcgcaacgccaggctcgacgatcatgccgccagcgggatgcgcggcgagctgaaattattccagcgctttaaccagatgatcgacagccacttccatcaacactggacggtaccggattacgccagcgagctgcatctgaccgaatcgcggttgaccgatatctgccgccgcttcgccaaccgcccgccgaagcggctgatattcgaccgccagctacgcgaggcgaagcggctgctgctgttttccgatagcgcggtcaatgagatagcctggcagctggggtttaaagatcccgcttattttgcgcgcttttttagccgccaggtcggctgctcgccaagcagttaccgggcgcaaaaagtaccggtgtcgtaa

SEQ ID NO: 220263 - DNA, 1563 bp, Klebsiella pneumoniae
atgaaacctgaagatttccgcgccgacgcgaaacgcccgttaactggcgaagagtatttaaaaagcctgcaggatggccgcgaaatttatatctacggcgagcgcgtgaaggatgtcaccacgcatccggccttccgtaatgccgcggcttctgtcgctcagctgtacgatgcgctgcataaaccggagatgcaggattccctgtgctggggcaccgataccggtagcggcggctacacccataaattcttccgcgtggcgaaaagcgccgacgatctgcgccagcagcgcgacgccatcgccgagtggtcgcgcttaagctacggctggatgggccgcaccccggactacaaagccgccttcggctgcgcgctgggcgccaacccggcgttttacggccagttcgagcagaacgcccgcaactggtacacccgcattcaggaaaccggcctgtactttaaccacgctatcgtcaacccgccgatcgaccgccacaagccggctgatgaagtgaaggatgtctacatcaagctggaaaaagagaccgatgccgggatcatcgtcagcggcgcgaaagtggtcgccaccaactcggcgctgacccactacaacatgatcggcttcggctccgcacaggtgatgggcgagaacccggacttcgcgctgatgttcgtcgcgccgatggatgccgaaggcgtcaagcttatctcccgcgcctcctatgagatggtcgccggcgcgaccggatcgccgtacgactatccgctttccagccgtttcgacgagaacgacgcgattctggtaatggataaggtgctgatcccatgggagaacgtactgatttatcgcgactttgaccgctgccgccgctggaccatggaaggtggtttcgcccgcatgtacccgctgcaggcctgcgtgcgcctggcggtaaaactcgactttatcaccgccctgctgaagcgttctctggaatgtaccggcaccctcgaattccgcggcgtacaggccgaccttggcgaagtggtggcgtggcgcaacatgttctgggcgttaagcgattccatgtgctcggaagcgacgccgtgggtcaacggcgcatggctgccggatcacgccgcgctgcagacctatcgcgtgatggcgccgatggcctacgccaagatcaagaacatcatcgagcgtaacgtcaccagcggcctgatttatctgccgtccagcgcccgcgatctgaacaacccgcagatcgaccagtatctggcgaagtacgtgcgcggctccaacggtatggatcacgttgaacgtatcaagatcctcaaactgatgtgggacgccatcggcagcgaattcggcggccgccatgaactgtatgagatcaactactccggtagccaggatgaaattcgcctgcagtgtctgcgccaggcgcagagctccggcaatatggacaaaatgatggcgatggtcgaccgctgcctgtccgagtacgaccagaacggctggacggtgccgcatctgcacaataacgctgatatcaacatgttggataagctgctgaagtaa

SEQ ID NO: 220264 - DNA, 1041 bp, Klebsiella pneumoniae; identical to SEQ ID NO: 100197

SEQ ID NO: 220265 - DNA, 1812 bp, Klebsiella pneumoniae; identical to SEQ ID NO: 100196

SEQ ID NO: 220266 - DNA, 1935 bp, Klebsiella pneumoniae; identical to SEQ ID NO: 100195

SEQ ID NO: 220267 - DNA, 876 bp, Klebsiella pneumoniae; identical to SEQ ID NO: 100194

SEQ ID NO: 220268 - DNA, 1368 bp, Klebsiella pneumoniae; identical to SEQ ID NO: 100193

SEQ ID NO: 220269 - DNA, 753 bp, Klebsiella pneumoniae; identical to SEQ ID NO: 100192

SEQ ID NO: 220270 - DNA, 240 bp, Klebsiella pneumoniae
atgattctgtcgtgtacctcggcgatgcacgatcacatctggaaatactgtctttgcctcaacgtcttcgctgtctggataaagttccaaatgtctgagccgtttaggttcaatgctgtcccggttgtattcgcaatctacagtccaaccggggaaacattgctggaggtacatcgcaaagcgaaaggtaatcgaccgttcgttagcatcgataccgagaagatcatgatcaatgaatag

SEQ ID NO: 220271 - DNA, 2127 bp, Klebsiella pneumoniae
atgactaaagacttaaacacgctggttagcgaattacctgagatttatcaaactatttttggccatcccgaatgggatggcgacgccgctcgtgattgtaatcaacgcctcgatttgattaccgaacagtacgataacttatcccgtgcgctggggcgcccgcttaacgttctcgatctgggctgcgcgcagggcttttttagcctgagtctggcaagcaaaggcgcgactatcgttggtatcgatttccagcaggaaaatattaacgtgtgccgcgcgctggccgaagagaaccccgattttgccgccgagttccgggtaggcagaattgaagaggtgatcgccgcgctggaagagggcgagtttgatctggccattggcttaagcgtgtttcaccatattgttcaccttcatggtatcgatgaagttaaacgtctgctctcgcgcctggccgatgtcacccaggcggtgatccttgagctggcggtgaaagaagaaccgctttactggggcgtttctcagccggacgacccgcgcgaactgattgagcagtgcgcgttttatcgcctgatcggtgagtttgacacccatttatcccccgtaccgcgcccgatgtacctggtcagcaaccaccgggtgctgatcaacgattttaatcagccgttccagcactggcagaatcagccctatgccggggccggcctcgcgcataagcgcagccgtcgctacttctttggcgaagattatgtatgcaagtttttctattacgacatgccccacggcatcctgacggcggaagagagccagcgtaataaacatgaactgcataatgaaataaagttcctggcgcaaccgccagcgggctttgacgcgcccgcattactggcccacggcgaaaatgctcagtctggctggctggtgatggaaaaactcccgggtcgtttgctgagcgatatgctggcagccggggaggagatcgatcgtgaaaaaatcctcggtagcttgcttcgttccttagcggcgctggagaaacaagggttctggcatgacgatgtacgcccgtggaacgtgatggtcgatgcccgacagcatgcccgcttaatcgacttcggctctatcgttaccacgccgcaggactgcagctggccgacgaaccttgtccagtcgttcttcgtgtttgtgaatgagctgtttgccgaaaacaaaagctggactggtttctggcgctcggcgcctgttcatccgtttaatctgccccagccgtggtctaactggctgtatgcggtctggcaggagccggttgaacgctggaactttgccctgctgttggcgctgttcgacaagaaagcgaaactgccgtcagctgaacagcagcgcggggcgacggaacagtggatcatcgctcaggagacggtgctgttggagctccagtctcgggtgcgtaatgaaagtgccggttcggaagcgatgcgtggggagatccatgctctggagcagcagatcgttcagctgcaggccgcacaggatgcgttagtcgagaaagctcaacagccggtggaagtcagccatgagctgaactggctgaatgaaaatatggcgcagctgaccgcgctcctggaatcggcgaaggcgcaaccgcaggctgatattcagcccgagttgccccctgaaaccgctgagctactgcagcgactggaagccgctaaccgggagatccaccatttaagcaacgaaaaccagcagcttcgccaggaaatcgaaaaaatccatcgcagccgttcctggagaatgaccaaaggttatcgttatctgggcctgcagatccatttgctgaggcagtatggtttcgtgcagcggtgtaaacattttattaagcgcgtcttgcggtttgttttctcgtttatgagaaaacatccgcaggtaaaacataccgcggtaaatggtttacataagctgggcctttatcagcctgcctatcgtttgtatcgtcgtatgaatccactgccgcacagtcagtatcaggctgatgcgcagattttatcgcagactgaactgcaagtgatgcatccggagcttttacctccggaggtttacgaaatttatctcaaactaacgaaaaataaataa

SEQ ID NO: 220272 - DNA, 1161 bp, Klebsiella pneumoniae
atgcgaaatcaaatgaatgttggattggttgctgactggcttgtaacttttgctggttctgaaaaggtaattaaggaattcataaatatattccctgattcagaattgtattctgtcgtggattttctatcccaatcagatagagacttgtttttggggaagtcagcaacaacaaccttcatacaaagactaccttttgcaaaaagtaaatatcaaaaatatttacccctaatgcctctagcaattgagcaactagacgtttcaaagcataacgttattttgtctagtagtcatgctgttgcgaaaggaatattaactggacctgatcaactacatattagttatgtacattcgccaattcgttatgcatgggacctacaacaccaatacctacgtgaggctaagctagataaaggaattaaggggctaataacaaaatggttattacataaaattagaatgtgggattacagaacagcaaatggagtagatcattttatagctaactctaaatttattgcgcgtagaataaagaaagtctatggtcgggatgctgatgttatatatcctcctgttaatgttgatagattcaatatttgtgagcgaaaagatgattattttttcactgcctcacgcttagttccatataaaaaaatggatcttattgttgaggcatttagtcaaatgccggataaaaagctagttgttataggtgatggtagtgaaatgtcaaagataaaacaaaaggcgacaaaaaatatcgagattttaggctatcaacctgatgcaacaatgactgattatatgaaaaaggctaaggcgtttgtatttgctgcggaagaagactttggtatcacacctgtagaagctcaagcttgcgggactcctgttattgcttttggtaaaggaggtgtattagagacaattaaagggttagatcaagagtcaccgacgggggttttcttttatgaacagaaagttgattctctcataaatgctgttcatttatttatttcaaatcaaaataaaatcgaaccaaaaacttgtcgtgtcaactcattgcgttttagtgaacaaaggtttagatatgaaatcaataattatgttaatgaaaaatggcttcatttttcagacaaaaaaataaaagcaacaagctactaa

SEQ ID NO: 220273 - DNA, 978 bp, Klebsiella pneumoniae
atgaggcttcattatcttgattctttgaaaataattgctgttttttgtattgtagtctttcactccggtacttttccagagtttggttatctcgttggagggttattagagaattgtactcgatgggcgctcccttttttctttttaacttcaggatttatgcttggtcttgcgagagaaattaatctaggaagaaaggtaaataagattctccagattctattctggtcatctattatttattcgcctattatatttattaaatctattgttatgcatgactcttttattgaacgtattgtaaatcttcagactttttttggcggaggagtatacttttatttgtggtttttaatttctttaattgttgtttttctttttgttaactatttttcctccaatctaaaaatcactcaggctttgagcatttcgtttgtaatcatcttgatatgctggattacggatttattacgatcttgtggtatagggcatcaagaattttatttattcagaatactaatgtgtgcttcattggtatacttagggtatttatattccgataacaaagatagatttcattttaaccaaaccttccttttatatatcataatttttggaatagtttctgttttagcagaatcattattaatgtattactttttcggttccgaaattcatcaaagacaacttccaattggtgctgtaatccttgcaattggtttgttgttatttggcataggaagaaaaaaagcaaataaaacattttggtcaaagtgtggttcaaagtattcgttaggtgtctatttacttcatccattcattttgacatttacatctgaattatttaaaagaataggggtcccttattcaactccaaatctgctaatagctttctttggctcacttgcagttatgatctttgtggaaagatatttttcatggttttataatacactcaatggagttacagctaaataa

SEQ ID NO: 220274 - DNA, 1245 bp, Klebsiella pneumoniae
atgatactttctcgtcggaaatcactaatgtttctgctttctggtttaatggttttatcatgctatcaaatatacctctttagaatagctggttcatatattcccatttcagcattatttatggcaatgtgtataccttttgtcaaggttttaaagctaaaagacccactggttgtattattcagtatgtcgcttcttcttaacgctataagtattctttggtctcctgttattggtttatgggagtaccaaatggtttttggttatatttttttaatcacatacgccacattcaaagaaatacaagatacagaacttgctggtaagctgattaaactttttttaatggcatcggctgttaatggtgtactgattgttatatttagattaaggccggaaatcgaagctgtatttatccttaattttctaaaactctttaaaaatccagatcgtttaggttttgatacctttttaaatgtatgggatgtcgacaaagccggtggagtgtttgataatgcaaacactggagccgcattgcatttggtatgtgtaggtttagttttattaatgaagcctttttttaggtctttaccttttattgctttattaattattaatgtgtgcgctgtctttttttcaggttcaaaatctgctttaataattcttgtgcttagtagcctattttccttttccttgtattttttaagaccggggtctaaggaacgctctcttagatggtttattattataattctattatttatatcgtgtattttactttattacattaacgattttttaacctcatctacttttgctaaagatacatctgcaacttcagaggatcgctttaatttaatttccttcgcatatgatatgttttggcaacatccattaattggattaggttacggtggttggcaaataaaaataggaattctgggggctcaatatggtgtaagacctgattggccaccacataatagtattatcgaagcatgggccactgcagggatatttaactctctcatttgcatttctatcataattattattttaaaaaggagtatcatatttgttcacaaatctgaatcaatcccttctatcggaggagtaattgctgttttaggagcagtaattatgcctttaggtgatccgcaaccttttttaggtacaccacaacttgccgctcctctaggcatcgcatgttgctatatatacagaaaactacgagaattacactaa

SEQ ID NO: 220275 - DNA, 1179 bp, Klebsiella pneumoniae
atgcctcttactgaccttgagatccgccgcgcgaagcctgcggaaaaaacgtataccaaagccgatggcaacggtctgtctctacaaattgagcccaacggttcaaagggatggcgattccgttaccgcttcgaaggtaaagctaaaatgctttctttagggacatacccgaaggtttccttatccgaagcgcgtagacggcgagatgaggctcaggatctgctggctacgggtatcaatcccagtgattcgcgtaaagagaagaaactggctcagcaggacaggctggggaatacctttgaggcgattgcccgtgagtggtatcagcggcgttacgatctttgggccgagtcgtaccgcactgaaatgatcgctacttttgagaaggatgtctttcctcatatcggtcatcgtccaatagattcgattacgcctatggagctgatggcagttttgacccgccttgagaaacgaggtgcaacggagaaaatgcgcaaagtacgtcagcggtgtggtgaggtatggaaatatgcaatcgcaacagggcgtgctctatttaaccctgcgccagatcttgccagcgtgatgatgccccataagaaagaacattatgcgcacctggaagtttcggagttatcagacttctttaccgtgttgcaggcgtacacgggaaatatactcgttaagctggctatgaggcttctgatactgacggggactcgtcccggtgagctacgtaaagcggaatggtcagagttcgactttgaaaataacctctggagcattcctgaagagcgaatgaaaatgcgacgaccacacctcgttccgctatcccgacaggcgctggctattctggaagaactgaaaacgatgacgagtggttatcaatacgtttttcccggtaggcttgagaaggttaagccaatcagcgatatgtctcttaacgtgctaattcgtcgtgtcggttacggtggcagggctaccgggcatggtttccgccacacgatgagtaccattttgcatgagcagggctttaattcagcatggattgagctacagcttgcccatgtagataagaacagcattcgcggcacttacaaccatgcgcagtatctggatggcaggagagagatgatgcagtggtatgcggattatctagactcactgaaagcttcgtaa

SEQ ID NO: 220276 - DNA, 483 bp, Klebsiella pneumoniae
atgaggtttttaaatggaattaaatatgtgactactctgggagtaattactatctcctgttcagtaatggcatcaccttatggagattcagatgtcttgttcgggtgtgtcataaaaggtaaaaccactaaagaggtggctgtgttaaggaataataatgaggtcacttatttattcggtaaatcggacattaacggaggtagtggggttattcctgaaatcactttggtaaaaaatgtgagtcagttaagtcagacctggaattacagtcgagctgagggtgtgtcgatacatacattgaacataccagaaaacgagtatacttactctattttctatatcgatgatgggaaaaatactgatggagaaataacagttttaaaacaggggaaagaaatcagcacgataaaatgcgatgatatctgggaacaacatctgggtgacggcaatatgatgaatggtatccccgatgagtcagattga

SEQ ID NO: 220277 - DNA, 1083 bp, Klebsiella pneumoniae
atggaaaaaaaatccttaagaaaaataaaaaaatggataatcgcggctgcaatatttactcagactttagggtctgcatatggaaatttaaacttccaagcaggagcaatggaggatggaacgtttctacttaccgtaaatggaagtatttcttcaggagatgcatacattttcgcaaaacaaatcgactcatttaagcaagataacatgccactcagtcagatttggttaaatagtcttggtggtaatgttgccgacgccttaaagatgtcattgattatatcaagtaataatttaacaacggtagtgccaaatagatgggagtgtgttagtgcttgcgttcttttatttggcgcgggaatacgacgccatgcttttcccgaaagtataattggtgttcatcgtataagcattaatgaaattgataatgaccaagcaagatcattatcacttgatatggacactgtatacaccgcaatgaacttcccagaaaacattaaatacaaaatgttaacgacgccccctaatgacgtatattatctaacaacaatagacaaaaagaacatatcaacgacatactcaaatactaagcaggttgatacatcgtatagaaactctggaatctcagcaccacgggtaataatcactaaaaaagatcgttcagaatcaagagcgctaaatcaaaaggctattatacaaattaggtcaaatcagttcatttctgctatagctaatcttgaaacagcaaaaaaaatatacccgtcagatgctgaagtattagggaaccttggatatgcatattacatgatcggcgattatactgcagcacaaatgaatctgacatcatcacttaaactagctccacgtagaggttcatcatggaataaccttggattagttttagcatcgactaatcaaatagaatgggccgtaaattgctttataaattactggaatttttcaaaaaataaaaaagcggcaacaaatcagttcttttcatgggagcaagaacgtccaggaactggtattgatatagcatcaaaaagagctcgttctacccttgggatttattcacccgagtga

SEQ ID NO: 220278 - DNA, 279 bp, Klebsiella pneumoniae
atgaatgtctcccacgtcacacgcctgcacggtattcagcccagtttgctgttcaagtggaagaagcaataccaggaaggcagccttacccccgttgcggccggagaggaagtcgttccagcttcagagcttactgctgctctgaagcatgtccgggagcttcagcgccttctgggcaggaagacgatggaagttgagatcatgaaagaagccgtggagtacggtcagtcgcgaaaatggatatcgcacgcgcccttgttgccaaaggacgggaaatag

SEQ ID NO: 220279 - DNA, 1275 bp, Klebsiella pneumoniae
atgccagccagacgggtttatatccctaaaagcaacggcaaactgcggcctctgggcatccccacgttgcgggatggtattgttcagcgggccatgctgatggcaatggagcccatctgggagagtgattttcatacgctctcgtatggctttcggcctgaacgcagtgtccatcatgcgatccgcacggtgaagttacagctcacagactgcggtgaaacacgggggcgctgggttattgaaggtgacctatccagctacttcgacaccgtacatcatcgactgctgatgaaagccgtccgccgcagggtcagtgacgcccgctttatgagcctgttgtggaaaaccatcaaggccgggcatgttgatgccggtctctttcgggcggccagcgaaggcgtgccgcagggtggtgtgatctcgccattgctgtcgaacatcatgctcaatgagttcgatcagtatctgcatgcatgctacctgagcggaaaagcccgaaaggatcgctggtactggaatcacagcatccagcagggccgaagtactgcggtcagagaaaactggcaatggaagcctgctgtggcgtattgccggtatgccgatgacttcgtacttattgtcaaaggcaccaaagcacaggcggaagccatcagggaggagtgccggggcgtgctcgaagacagtctgaagctcaggctgaacatggacaagaccagaatcacccatgtaaacgacggttttatctttctgggtcacaggatcatccgcaaacgcagccgttacggtgatatgcgggtggtctcgacgatcccgaaggagaaagccagaaactttgcggcatcgctgacggcacagttatcaggcaactacagtgaaagcaaaatcgatatggttgagatgctcaaccggaagctgaaaggctgggcggcgttctatcagttcgttgattttaaggccagagtgttcagttatatcgatcgtgtcgtgttctggaagctggctcactggctggcgcgtaaataccgtgctggtatcgcatccctgatgaggtggtggtgtaaatcaccgaaaccgggtcagagcaaaacgtgggttttatttggtaaaaccaatcatggcaagctcagcggtgaagtactgtaccggttggtggggcaaggcaagaagctgttccgctggcgtctgcctgagggaaatccctatctgaggacggaagccagaaacacatatacatcgcgttttactgaagtggcaatggcgttcaccagcgtttaa

SEQ ID NO: 220280 - DNA, 366 bp, Klebsiella pneumoniae
atgacagcgcagctggcctgcgatgcgctgcagatggcactctggcgacgtaagcgcccgggaaatgtcattgtccatacagatcgtggcgggcaatactgttcggcggactatcaggcgctgctgaagcggcataatctgcacggtagcatgagtgccaaagggtgttgttacgacaatgcctgcgcggaaagcttcttccactcgctgaaggtggaatgtatccacggggaacgctttatcagcagggaaatcatgcgaacgacggtgtttaattatatcgagtgcgattacaatcggtggcgccgacacagtgcctgtggcggtatcagcccggaacagtttgaaaaccagaacctcgcttag

SEQ ID NO: 220281 - DNA, 3006 bp, Klebsiella pneumoniae
atggcagaagccctaagccaggccacaggtcaaagcgttgacgcctcgcgtcaatgggtggaacagctggataagaacttcccattagatatcaataatttttgccagtgggtcaaagagtggctggatgaaaacggtaaaaacatcctcttcatggtggatgaggttggccagttcatcggtaaaaatacgcagatgatgttgaagctacagactatcactgaaaacctgggtgtgatctgcggtggacgcgcatgggttattgttacctcccaggcagacatcaatgcggccattggtgggatgagcagccgtgatggacaagacttctctaaaattcagggccgtttctcgactcgcctgcagctttcaagctccaacacctccgaagttatccaaaaacgtctgttggtgaaaactgatgccgcaaaaccggcgctggctaaagtctggctggaaaaaggcgacatcctacgcaaccagcttgcttttgatcccaccacaacggcttctttacgcacctacacctgtgaagaagaatttattgataactacccgtttgtcccgtggcactaccagattctgcagaaggtttttgagtctatccggaccaaaggtgccgccggtaaacagttagctatgggtgaacgttcgcagctggaagccttccagactgcggctaagcaaatcgcacagcaagggttagattctctggttcccttctggcgtttctatgctgcaattgagagcttcctggaaccggcagtgagtcgcaccattacccaggcctgtcagaacggtatcctggacgagttcgatggtaacttgctgaaaacgctgttcctgatccgctatgtcgatttactgaaaagcacgcccgagaacctggttaccctttctatcgacaaaattgatgccgataaagtcgagctgcgccatcgtgttgaaaaaagcctgaatacgctcgaacgcttaatgttgatcgcacgcgttgaagataaatacgtattcctgaccaatgaagaaaaagagatcgagaatgagatccgcaacgtcgaggtcgacttctccgcgatcaacaagaaactggcatcgatcatctttgatgacattctgaaaaaccggaagtatcgctatccggcgaataagcaggacttcgacatcagccgcttcctgaacgggcacccgctggacggcgcaatgcttaacgatctggtggtgaagatcctcacgccaaaagatccgagctatacgttctataacagcgatgcagcctgtcgtccttatacttcagaaggtgatggctgtattttgattcgcctgcctgatgaggggcgcacctggaccgatatcgatttagttgtccagaccgagaaattcctcagagacaacgccggacagcgcccggaacaagccagcctgctttcagaaaaagcccgcgaaaacagcgttcgcgagaaaatgcttcgcgtacagctggagtcgcttattgccgaagcggacgtctgggcgattggcgagcgcttaccgaagaaatcctcgacgccatccagcatggtggatgaagcctgccgctatgtgattgaaaacacgtttgccaagctaaaaatgctgcgtccgttcaacggcgatatcgcacgtgaaatccatgcactgcttacggtagagaatgatgcagagctggatctgggcgagctggaggaatccaatcccgacgcaatgcgggaagtggaaacctgggtcagcatgaacatcgagttcaataagcctgtctatttacgcgatatcctcaaccacttcgcccgtcgtccttatggatggcctgaagaagaagtgaagctgctggttgctcgcctggcacgcaaagggaaattcagctttagccagcagaataacaatatcgagcgtaagcaggtttgggagctgttcaataacagccgtcgccacagcgagctacgtctgcacaaaattcgtcgtcacgacgaatcacaaattcgcaaagccgcccaaaccatggcggagattgcccaacaaccgtttagcgaacgtgaagaacccgcactggtcgaacatatccgtcaggtcttcgacgactggaagcaagagctgaatgtcttcagagcgaaagcggaaggtggaaacaatccaggcaaaaatgagattgagtcaggtctgcgcctgctgaattccattttgaatgaaaaagaagattttgccctgattgagaaggtcaccagccaggccaatgaactgctggatttcagtgaagatcgtgaagatttggtcgatttctaccgcaagcagtttgccacctggcaaaaactgggtgctgcactgaatggcagttttaaatccaaccgcagcgcgctggaaaaagacgccgtggcggtaaaagcgctgggtgaactggaaagcatctggcagatgccggagccttacaagcatctcaatcgcatcacgccgctgattgaacaggttcagaacgttaaccatcagttagttgaacagcaccgccagcgcgccctggaacgaattgacgcccgcatcgaagagagtcgtcaacgtttgcaggaagcgcatgccacatcggagctgcaaaacagcgttctgctgccgatgcaaaaagccagaaagcgcgctgaggtcagccattcgattccggaaattctggcggaacagcaagagacgaaagcgctacaaacggatgcagaaaagaagattaaccagtggatcgacgagctgcgtaaaaagcaggaagcccagctacgagcagcgaatgaagccacacgcgctgcagaatcacaacagacctatgttgtggcagaaaaacccgtaatccaaccggtaccgaaaaaaacgcatctggtcaatgtcgccagcgagatgcgcaaagccaccggtggtgaagtgctggaaaccgccgagcaggtggaaaaagcgcttgatacgcttcgcgctgcgctgctggcagccattgaggcaggtgaccggattcgtcttcagtaa

SEQ ID NO: 220282 - DNA, 522 bp, Klebsiella pneumoniae
gtggaactaatcataatttgtgcaattattgggtgcatacctgcggcgatagcgagcagtaaagggcgctcgttttttgcttggtggttatacggagcacttctcttcatcgtagctctaattcactcactggtaatcaagaaggacattcgcgccctggaacagagccagcttgatagtgggctggttaaatgtccatattgtgcagaaatgattaagcctgaagccataaagtgtaagcactgcggtagtgatgtaaaagaagcgatagaagttgctaggctcaaaaattttaagccgagcgacattccatttgatgcttttttcatcaggaaaagggtaggctttgatgttaatgaagaggcggtaactaacttggtatcacgcttgaaacaagctaatccagaattaggccccgagggcatcaaagaaaaatattttatgcaaattgatgagttggtaaatcagttacctagtggggttcgtgatgaattcatacgaacttataatgcaaagctttga

SEQ ID NO: 220283 - DNA, 168 bp, Klebsiella pneumoniae
atggccggagtgccgctccctctatccctgaacgatattgagctttacctggcatcgcgcaccatcctgatcgaccgcattgagtttgacgcagcgatactggctcttgatgatgcctggagggctgagtgggccgaagatcagaaaagacaggcaaaagtgaagtag

SEQ ID NO: 220284 - DNA, 258 bp, Klebsiella pneumoniae
atggctggattaaccaaagagcagcgtgctgaacgtgctgcagcaaaacttgcggccgcgcaggttgatgccaatgatcctgaacagcaggaacagcaggaacagcaggaacagcaggaacagcaggaacagcaggaacagcagctggtggcgatgattaccgatttcccggcattccccggcggccccaataccgccaacgttcaccctgatgaagtggagaactggaaggcgcacggctggaaagaaatggagtga

SEQ ID NO: 220285 - DNA, 1137 bp, Klebsiella pneumoniae
atgtcgaacactttgaccgggttgatcccgactatctataccgctctggatgttgtttcccgtgagcaggtaggttttattcctgccgtcgcccgtaacaccaaagcagatgccgcagcaaaagaccagacggttaccgcaccagttgccccggtagcagtaactgaagacatcgtgccgggcccttcggctcctaacacgggtgatcagaacatcggtaccgttgatgtcaaaatcactaaatccaaaatggctccggtcaaatggaatggtgaagagcaactggccctcggtccggctggtacttacaacaccatccttgctgaccagttcaagcaggcattccgcgcactggcgaacgaagttgacgcagatctgggggcgctgtacttcaacgcatcgcgtcaggttggcacgccgggtactacgccgttcggtatcaaggaagacctcagtgatgccgcgctggcccgtaaagtgctggaggacaacggctcaccgactaccgatctccagatggttctcggatcggctgccatcgcaaacctgcgcggcaaacagtcagtgttgtttaaggtgaacgaagccgggacggaacaactgctgcgtgaaggcacgctgggtcgcctggaaggctttaatatccataactccgccggcgttaaaactcacacggcctcggctgccgcaggctacctggtgaatggagcaaaagctgaaggcgatcgtatcattgccattgatactggcacagggtctttcaccgctggcgatgtggtgagttttgctggcgacgacaacaagtatgtagttgcagctgcgaccgcaagtactatcacccttgctcagcctggtctgcgtcaggatttggcagataacactgctattacccgtggtgcaggttatgtggcgaatatggcgtttgaccgtaatgcgctgctgttggcatctcgcaccccggcaatgccgcaaggtggggatactgcggatgatgtgatgaacgttaccgacccggtatcaggcattaccttccaggtggcactgtaccgccagtatcgccaaatccgttatgaagttggtctggcgtggggtgtcgctgcgccagttccgcgtcacagcgtcattattgctggctga

SEQ ID NO: 220286 - DNA, 1005 bp, Klebsiella pneumoniae
atggcaaaaccggactggggcgagcttcagcaacggttcctgtccgatcatgccgcaaccggcgtatcaccaaaggattggtgtgaagcgcagggactcaattacgctactgcccgccgatatatcaagaaacccactgcgcaaactgcgcaaaaacctgcgcagaagaaattgcgcactgcgcaaaaggaaaagtgcgcagaagagttggtggatgatgatggcctcaccgatcaacagcgtttatttgtcgcggaataccttaaggacaacaacgccacgcaggccgctatccgtgccgggtacagcaagaagacagcgaatgagcagggagcaaggctgttagcaaaagttagtatttcgcaggccattgcgcagcagcaaaaagcatccattgtgcgcacgcttggaagtgctgatgaagtgcttgagcagatgtggcgcctggcaaccttcgatgccaatcagctttctcagtatcgccgcgggagctgccgttactgctggggcttcggtcaccagtatcaatggcgcgatgccgtagagtacgaagagaaacgcctcgaggcacttgagcgtaaacgtcgagaacctttggatgatggcggatacggctacgaccacaccagcgcacctaacccggaatgcccccgctgcaatggtgatggagtaggccagcctttcttcgccgatacgcgcaaactggcgcctgatgcagcgcttgcctattccggcgtgaagctcggaaagaacggcgtggagataaccgctatcagccgcgagcgaatgttcgaggcggtgatgaaacgtctcggcctggctgatagtgaattcgcccaacgtctgcagcagattgaaatcgagcgccggcagctggagatcgacaagctccgcaaagaactggccgctgacccggaggatgacgaaccaacgccagttgcaatcaatatcaacgtagtcgatgcacgagtgagggaagaggatggcgatagcaccgacgcttaa

SEQ ID NO: 220287 - DNA, 189 bp, Klebsiella pneumoniae
atgccggtatgcacgatttcaatagaagtaaaaagccgctggtggctaccgttctacgtcaagacactgactttattctgtctgatgttccagcgcgagcctgattacgaaaagatttccgcattcatcgcgaagtatggcatcggccagaaagtgaaggcgggaccagtgcgaaagaatacggagtaa

SEQ ID NO: 220288 - DNA, 294 bp, Klebsiella pneumoniae
atgagtgaagcaaaaccgcaggatggcagcactgtaaaaggctaccgcacattaaccgatggcgacattgagcggatgaaccgcctcaaaggtgtcagccggcatttttgcagtctgctcgatacagagcgaggtgaattgttggctgtccgcaatggaccggcaatgttaagcgctgagcaggcatgggagattgatgaagctatgcgcagcctggcactcgcgcgcaccaaaatgcaggaagcctgtatgtgggcatgccgcgcagttgcccggccagatgctgactgttaa

SEQ ID NO: 220289 - DNA, 312 bp, Klebsiella pneumoniae; identical to SEQ ID NO: 175179

SEQ ID NO: 220290 - DNA, 822 bp, Klebsiella pneumoniae
atgaccaaatcaaccataaccagagagcagttactcgaaattattgaaaccgatcacgtgcagtgcggtgaggcatcttatctagcccgcatggcgctggccgcaatggacagcgagccggttgagatgcctctcgactacctacagggacacaaagacggcctggagtttgcctcccaactggcagaagccaatcaccctgagaccggggactggctttacgatgaccctatcgaactggcaaaagctattcgcaaaggtccagatatgccgccagtgcagccggtagaggacagcgatccggatcgcaatcctgtgctggcgtatgccgacagttatcgtgatatggcgaaacaaggcgttgagtcagtcccaatttggagcgtcattaccgacatagagcgaaacatagcgccgctctatcgccacgcgcagccagcgctggtaattcctgacgagatgacagcagaacaggcatatgaaataggatattactatggagacccggtagacgtgtttgcgcgtggagctaactggatgcgccagcatatcatcgactccacattggcagccgccccgcagtcacccggcagtgaaccggctaccgtgccgggtaaatggattccggtaagcgagcgcctgccagaagatagtggccgttactggtgctatgtggaagagcaaaatgacctggggaaatcacactatcaatggaactgttcatggaatggcgatcggtggtgggttgaaagcgagtgcggcgggattgtcacccactggatgccgctgccagccgccccgcgggaggtgaaaggtgaataa

SEQ ID NO: 220291 - DNA, 408 bp, Klebsiella pneumoniae
atgactgatatcaccgaactggcgcagagcctgaaagcggcggcagagaaggccactcaggggaactggagagcattccaataccacgacggtcgttgtggtattggcggaggccatcacgatgaaattatggtgtgtgagcacatcagcaaagagcgcccgcatgatgctatgttcatcgccctggctaaccctgccaacgtcctcgcgctggtagaggcgctggagaaggcgcagcagcgcatcgacgagctggagtcccgcaccgtcaccgctgaaaaactgcaggaaagtgcctacagggctggcctaaccgctggctggaatcttgggctggataataacaacgacgggttcaataaatgcctggctgctcatgccgctggcatcaaggtggaggctgaatga

SEQ ID NO: 220292 - DNA, 792 bp, Klebsiella pneumoniae
atggctaagaattcaatcgatgtatacggtgccagcggcaaaacaaacgtgctcaatttcgagcctgaaaacctgcacctggtcaccgacaaaacgcacccgctttacgatgagcgtatccacctgcctatcagcgaggcaatggtgctgaacatcatggatcagggcgttcttgagccgattatcgtctggaaagacccggaaacagggctgtcttgtgtggtcgatggtcgccagcgtgtgcgccatacactggaagccaacaagcgactgttgaaagagggaaaagaaccgttactggttccagcagtcgctaagcgtggctccgccgttcgcatggcgcaggcgatggtaagtgctaacgaaatccgccaggcagatacgccactgggccgagcaaagaaaatggctgatgcgctggaacgcgggcacgatgaggacgatttagcgctgatgtttggcgtgagtgtccaaaccgtacgcgcaactctgtcactgctggatgccacccaggctgttcgcgatgcagtggagtccggaacggtcaccgttacccaggcgcgtcagctggcatcgcttaaaccagaagagcagcgggagaaggtctctgaaatcgaagcggcgacagctggtaccaccggccacgaaaaagcccgtcggcagcgccagattctcggtgatgcaaagcctcgcctgaaaacccgcaaagaaatcacaaaagccctggaatcagccgagggtgagtatgcaagcgcacttcgttgggtgcttggggaggccagccatgactga

SEQ ID NO: 220293 - DNA, 420 bp, Klebsiella pneumoniae
atgaatgatgaaatgttatacgccagaattgcgtatattatcccatttcaaaaaggccccggtgcaagtagagagccggttttattaattcgcgcgaaacagcatgaagaaatagcattcgatatatctttattttttatagggttaaagcctagtcaagtctatctcgcgtcttattctatccgcccagccaaagaagaggagttatatcctcaatttttctttcaaaaaaaattcagagttgatgatattgaggctattggcggatttttgccagtttctttcgacgctccaattaccctaccccacggtattccaaccggccaatatcgcatcgatgccacactgaatgttgagggcgggaatgaagctgaaactagggcggcggtgtctttcattgatgtaaggattgaaggctaa

SEQ ID NO: 220294 - DNA, 249 bp, Klebsiella pneumoniae
atggaatcgcgaatcgctaagcttgaatctgatgttgagtacatcaagcgtgatatagctgaactaaaaacagacatcaggtctgtagatagcaggctggccaatatcgaaaccggtatctcgtccatgaaaacaacgtttaaagcaacgggcgtcgttgtagctggagttttctcattctgcgtttacgttttcggtagctacgtatccaagattattgatgctttgaatgaattagttcttaagtga

SEQ ID NO: 220295 - DNA, 2544 bp, Klebsiella pneumoniae
atgccaaataagaataatggattattcaaactatccaccgtctttatcgcaatgcttcctgcattgctttctggtttgaataataaagcgcaagcacgtgactttttcgatccctcattcattagttcattgaatggtagcgatccatcaaccactcccgacttatccatttttcaaacccagaatgcacaggcgccaggagattatcgggtcgatatcatgtttaatggccgctacctggataccaggacgataaagtttgtcgccaacaatcgcgccagcagcgataaccgcgaacccgctctggttccctgcctgagtctaaaagctctcgcggaatatggcgtaaggataaaatcctttccagagttagccgaggatcaaaacggctgtgcaaacttttctgtcattccggacaccaaagcggattttgactttaccgcccagcgcttaaatatttctattccgcaggcggccttatccaccaccgcgcagggatatatcccaccggatcagtttgatgacggcatcaacgccctgctggtgaactaccagttcagcggctcgaacgacatgcaggccaatgatgaatactacagtttgaacctgcagtccggcctcaacgttggcccatggcgtatccgtaacctcagcacctggaataaaaacaatagcggtgccggagactgggattccgcctatctctatatgcagcgcagcattcgcccgatcaacagtaacctggtaatgggcgagagttcatcgctctcgaccatcttcgacagcgtgccgtttaccgggatacaactggcgaccgatacgtcgatgctgccggaaagtatgcgcggctatgcgccgattattcgtggtatcgctaaaaccaacgcccgcgtaacgattaaacagaacggttatcaggtctaccagacctatgtggcgcctggggcatttgaaatcaccgatatgtacccaagcggcggtagcggcgacctttacgtcagcgtggaagagtccgacggatccaaacaagaatttgttgtgccgttcgccaccctgccggtcatggtgcgtgaaaatcaactggagtatgagattacttccggtaaatatcgtccttacgatggtggagtcgatgaaacgccatttactcaggccaccgcgacctacggcgtctccagcagcctgacagtatatggcggcatgcaggcggcctcgcgctaccaggcgctatcgacgggtctcggctataacctcggcgagctaggcgccgcctcggcagacgtcacccaggcgtggtcaaaaaagaaagacgatgaaaagacctccgggcagtcctggcgcgtacgttacgggaaaaacatcgtcgaaaccggcaccaacgtcaccatcgcgggctaccgctactctacccgcgggtttaataccctctccgaggtgctggatagctactctaatgacggtaattatacctctcgctcactgcgcaatcgcaccaacctgacggttaaccaaagcctgggtaaaggcctcggtagcctgtcgataagcgggttgattgaagattactgggacgataagcgcaccaacaagtcgatcagcgtggggtacaacggcggcttccgcaatgtgaactactatctgggctacagctataaccgttacacctggagcggagatagctccggtaaagacgcccaggacgatcagcgcatcactctgaccgtaacgctgccactgagcaactggctgccgggtacctataccagctatcagttaaccaacagcaacccagggtctaccgatcagtcggtttccatcggtggtaatgcgctggagaacgatagcctggagtggagcctgcagcaagggtacagcaaccgggaatactacagcggcgatatgcgggcgacctataacggtgcccgcggcagcgtcaacgctggctacagctatgatcgcagcagcgagcgcattgactacggcgccaacggcagtatcgttgctcatgccgatggcatcactctgggtcaggacatcaccgacgcagcggtactggttaaagcgccggggctggataacgtcagactgactaacgacaacaccatttctaccgactatcgcggctacgccatcgtcccatatgtaacaccataccgtcgcaccgatattacgctcgacagctccacgcttggcgaagatatggagctgccggaaaccacgcagagcgtcgttccgacgcgcggcgcaatcgtgcgtgcaaactatgccggcaatatcggccagcgggcctttgtgcacctgaaaacagccagtgggcaggatgtgccttatggcgcgatggtcctgctcgccggagatagtaaatcgcagccaagtatcgtcagcgacgctggtatggtttatatgtctggcctgcagcagaccgggatccttaacgtccagtggggcaaaagcgccgcgcagcagtgcaatgcttcatttactttaccgaccagggaaggcaaagcgtctggcatcagccaaatcgaaacggtttgtcgctag

SEQ ID NO: 220296 - DNA, 369 bp, Klebsiella pneumoniae; identical to SEQ ID NO: 214604

SEQ ID NO: 220297 - DNA, 315 bp, Klebsiella pneumoniae
gtgcaattagtgtttcgtttttattatgagttagttttttataatagcttcggagttggctatcttttcattgattacctcaatctgtgctgcactgacattacctgttgtggtatttctagatacatcaagctcataaagcgtctgtccttttttgacaacgtctccaatttgaacatactgattgacgacaaacccttgttgcggagagaaaacgtttacggagtgagggagagtgataacctcgcctttgacatcaatgcgttgtgtaaatttacagaatataagggcgcagataagagcgcagagaaataa

SEQ ID NO: 220298 - DNA, 567 bp, Klebsiella pneumoniae
atggaaaaagcgcagcagattcaggcagctctgggtgcgcaggcgggtggcaaaacgctggtgagcaatgacttcaaccagttccagctgactctgaaaggggccattaaaacggctggcgtaaagctggatgcgaaagagaacaaacagtttatcgatgctatcaccaccaaaaacccggatgccgagccggtggtgaagaaggtgctgaaagaagccgctcagccgctgtacggtgcatttgaatacaaaggtaaagtggtggagttcgaacaggacggagacctgcgcgataacgagaacgtgccgctgaacccggcagtatctaccagcgacctgattgaaaactacttcaaagcggaagtactgccgcatgtgaatgacgcgtggatcaacgccgataagcgcgatgcgaaagatggcgaggtggggattgtcggttatgaaattccgtttaaccgccatttctatgtctatcagccgccgcgcccactggaagagattgatgccgatctggacgcagtcagcgccgagattatgaagctgctacaggaggtacattcctga

SEQ ID NO: 220299 - DNA, 432 bp, Klebsiella pneumoniae; identical to SEQ ID NO: 177727

SEQ ID NO: 220300 - DNA, 351 bp, Klebsiella pneumoniae
atgaaaatcaaaaacaccctttttgtaatattaatgttatccctgccagccatttctgctgaacattcggaaatgaaaatgtcagatatgcactcatcggcatcatcacaggaatatatggctggcatgaaaaatatgcatgaaaaaatgatggccaccgttaatgaatccaaccccgataaggcctttgcaaaaggtatgatcgcacaccatgaaggggcaatcgcaatggctgagaccgagctcaaatacggaaaagatcccgaaatgaggaagcttgcgcaggacatcattaaagctcaaaaaggtgaaattgagcagatgaataaatggcttgacaatcataaataa

SEQ ID NO: 220301 - DNA, 144 bp, Klebsiella pneumoniae; identical to SEQ ID NO: 126359

SEQ ID NO: 220302 - DNA, 909 bp, Klebsiella pneumoniae
atgattgaaaaaatatgtgaagtaattgatggtgaatacgtctgtgatatagatattagcgttgaagaatggaagattttattaagggataaaaaagtttttgatgacaaaagtattgcagcgttaaaaaaatggttcattgagccagaccattcctgtacatgtttcgatatcggcaagaagtacgacctgcacagtatgagtgctaatggtgtaatcaatgggttgggtggaagagttcagaagcagcttggccgattcgaggttaaaggagtcggaaagattgcttccgggacaaaattcattacagtcatgaaaagtagagaaattaaaggaaacccaaagcgaaatttatggactatccgtgaagaacttgttcaggcaataaaagaactagatttttttagtacgaacgaaagctcaagcattgatttttactcagataatgatttgatcactgctctagaagaaagtaatcactttgacgttactcagacatttgagtatagcgaaaaagcgaaacctaagaaagctgcaatagaagtcaaaaatggactctcatacccaagaagtaaatctgtttcaaaaaatgcgcttaacaaagctgattataaatgtgaaattaattgcgaccatccaacgttcagaaggcgaaactctcctctaaattacacagaacctcatcacattgtcccgatgtcaaagcaagactattttgagaattcactggatgtggaagagaatatcatatcactatgttgcaactgccataaacaaattcatcttggcaaggggtttgaaaatatgttgaggaaaatatatgccgagcggaaagatgtattaaaaaaagcgggaatcgagatattattagaggatttgattcttttttacaagatggaaggtaattaa

SEQ ID NO: 220303 - DNA, 969 bp, Klebsiella pneumoniae
atgagtcagccaaatccactttgtgtgggcatcgatgtttccaaagccacactggacatcgctgccagcagtgatgttgctcagtttacagtcagcaatgactctgatggctttaacgcgattattaccggactgagacggcactccgttgctctggttctgatggaggccactggtgggctggaagttgcggtggcctgttcgcttcaggccgaaggttttgaggttgccgtggtcaatcccaggcaggcccgtgacttcgcccgtgcaatgggatatcttgcgaagaccgaccgaattgatgccagagtcctcacgcagatggctgaggttattaatcgtcaccctgagcggaaacgctttatcagggcactgccggatgctgaacgtcaggcccttgctgcgatggtggttcgcagacgccagttgattgcgatgttggtggctgagcgtaaccgactgcatccatcccatccgcagaacaagaaaagcattaataccatcattaaagcgctggaagatgagcttgtcaggctcgagaaagaaatggacagtcacatccgtaaccactttaaagagattgctgagcgcctgagcagtatcaaaggtgtaggcaccatgaccgtttccgcgatgttggcggagattccggaactgggaacgctctcccggcgcgaaatcagtgcgcttataggtgttgctcctgtcaaccgggactcagggactatgcgtggccggcgaaccatttttggcggcagggctggcgtaagatcagcactgtacatggctgcgcttgtggcaacccgctttaatccggtgataaaaacgttttatgtgcgcctgcttgcagccggaaaggccaaaaaagtggcgctggtagcctgtatgcgtaagctgcttaccatcctgaacgcaatgctcagaaagaacgaagaatgggatgagtcgtaccaccacgttgctccataa

SEQ ID NO: 220304 - DNA, 174 bp, Klebsiella pneumoniae
atgattgatgttttaggtccagagaagcgcagacggcgaagtgttcaggaaaaaatcgccattgttcagcagagctttgaacccggaatgaccgtgtcgctggtcgcccgtcagcatggtgttgctgccagtcagctgttcctgtggcgtaagcaatatcagcaactgtcttga

SEQ ID NO: 220305 - DNA, 453 bp, Klebsiella pneumoniae; identical to SEQ ID NO: 192592

SEQ ID NO: 220306 - DNA, 483 bp, Klebsiella pneumoniae
atgagaaaatacgcacttcttgccgcccttgtccttacgggttgtactacgtctccccaggactgtgatttacacgcacaagatccaagctttattaccaaactgagctgcgccacgtcgggtggttatcgtcagcaggttgatcaaaaagaacagcaggttcgcctgagccaatatcaaaatgaatcggccaggcaacagcaggattatacccaaaacagacagcagaccttaaatcaaaagctggcagatgaacaagcaaggctaaatgccgtgcgttcggatctgtcgaagacgctcgcaaaactgaaatcaagcaagattcaaagccgcgaacgccagcaggaaattgccaaattgcaggagctgcagcgccagtcacaaacggcaacgagcgccagcgaaatttcagcgattgagaaaaaggtcgccgaagccaagcacaaaataaaagttctcgaagaagcaaatacgctccgctaa

SEQ ID NO: 220307 - DNA, 1146 bp, Klebsiella pneumoniae; identical to SEQ ID NO: 107915

SEQ ID NO: 220308 - DNA, 1449 bp, Klebsiella pneumoniae; identical to SEQ ID NO: 192589

SEQ ID NO: 220309 - DNA, 3069 bp, Klebsiella pneumoniae
atgttgcccgagattgtatcttttgatcgtcaagtaaccctggtaggcgactccgggatccagtttatggattttggtttgtctccaggacgtttgcccgccggtgaatttgttaaattagccaatggcgtattgacccgtttaatctacaacgaacagcgtgattactatttttatcagcccagcccggcaaatatcgagaaggctaaaagccagtacgatattcccgttgagcagagtcttaagctgtttgacgggacatggttgccgcttcccctactccgtttcagcccgcctgacgtctatcaggaagggccgctaaactgggcgcgttttcgtatcgtcaagctggacaagcctgatatggatgggcatagccatcgaatgacgttggctatcgatactcgcgtaatggccaaacagcaggccgccgccgacctcagcccgaaccaggaagatgtcaatgccggggcaacctttgcggtggcgacagccacctatgccctcaactggtatctcacgcaagagtggattgtcgactggctgaaagaggtatttaaagaggcgagcaaaggccgggatatcgacgaacgtgagcaggagcttaaccagcagtatccgctggcgcactaccttaaccttctttcactgatggcgattcccgtcgaaggtttgcaaagtcagaccgcccccatcattgaattgccgcagttcagggtcatcgccaatcgggaaactaacgctatcaagcctattcccgttgatttgatcctcgatgtcggtaactcacgcacctgcggtattctcattgaagatcatgggcaatcaggttcaggtatgcagcacaactatgtgctcaaattgcgcgatcttagcgcgccggaacatatttataccgaaccctttgaaagccgggtcgaattttcacaggccttcttcggcaaagatcactgctcggtgcgtagcggccgccacgatgccttccagtggccgacgatcgctcgtatcggcggagaagcgggtcgtttagcggcgcgccgaaaaggcagcgaaggttcaaccggcctctccagccctaaacgttatctttgggatgaaaaatattacggtcagggctggcgattcaacggtagctacgtgcaggacagtaatccactcgccaccgctgcgccgttcgcgaatctgatcgatgaacggggcgaggcgttacacaccatcgaagatgagatggatcgcatcccggtctttacgccacgctattcccgcagctcgctgatgacctttatgctcgcggaagtattaacccaggcgattagtcagattaatagcccggaacaacgcatacgtcagggacacgcaggtattccgcgtcagctacgccatattattctgaccgtgccgcccggtatgccgatggctgaacgttgcgtactggatgaccgtatgcgtcaggcggtcggtttagtctggaaagcgctacgctggcacaacggcgaaaacgatccttatgaggatgagcaagaagatcatagtcagacaaacattaaaattccgctgccgaaaatcagggtcgagtgggatgaagcgtcctgcgcgcagttggtttatctctacaccgagataaaccaaaactttgccggtcacccggagtcgtttttcgacgcccttagccgacccgacagcacgcaacgtgaaagaatatccatcgcatctatcgatatcggcggcggcaccaccgatctggtcatcaccgattatcatctcgatcgcaatggtcatagtgggggcggcgctaacgtccatatcatcccgcagcagcgttttcgcgacagttttaaaattgccggcgacgatattctgctggatgtcatccagtcctatgtgcttccagcctttgagcaggcgctgcgtgaaacgggggtcatatccgttgagacgctgatgtctcaactgtgcggctcgcaaaatattagcgcggcggaatccgtgctgcgccagcagctcaccctccaactcttcgttcccctcgcgttgcacattctgggtaaatacgagcaattcgatccgctggacgagcaaacgcatatcgtgattaaccaacgtgtcggcgatctactgccggtaggttctctgcgtgatgaagtcgagagctttgttcgccgcgaagtacaaaaagctggtggtccgaccgatttcaaactagcggaggtaatgctcactctaccgctcgccagagtgcataacgatttgtgctcgggtaagttcaacattgataaagtgctaaccgcgctgtgcgaagtgctgagctattatcattgcgacctgctactgctgacgggccgcccttcgcagctgccgggcattcaggcaattatccgtcgcaacctgccgttgccgccggggcgtattttacctctgcacggttatcagaccggcacctggtatccgttccataaaaatggccatatcgacgatccgaagagcaccgcctccgttggcgcgatgctcacgcaactgtgcgcaaatcacagcattcctaacttccatttccgtacctcggcgctgaagccttactcaacgattcgccatattggcaccattgatatggataacctgattcacagtgccgatatcgtttatcgccatatcgaatcggagaacgggcagataaaattgccgacattcaccgacgaaaatggcgagaacaccacgcaaagtatcatcatgcgtggcgatttgcggctgggttatcgtcaactggatgccgaacgttgggccgccgcaccgctttataccttacgttttagcgaagaaggccgtaagaagttttccgccgccttctccgtggataacggttcaccgtacctgaaagtgagactggctatcgacaaaggcaaacgggcgcgccaactgggcttaatcagcgatcggctgatgattgcggatatcaccagcaacaccgataagtcattcagcaagcgtgatgtagatctggaactcaatactatgcccgatacggggctcattgatagccgacactggctcgatagcgggagtgttaaaaaataa

SEQ ID NO: 220310 - DNA, 2715 bp, Klebsiella pneumoniae
atgaatagcgatcaaaaatctctcactcagggctgggcagctatcgctcagggctgtcaggacgcacttggctgggttgatgcagtgcgttccggttcacgtcgcctcgacaacgaggcggataaactcaaccttagcttgctccgcacgcgtaaccaggccaatagcctgacgctggtcgccagaacgccaatgaccttcggttttttcggcatttctcaggccgggaaatcctatctcatctccgcattggcagctggcagcaatggttcactggaagccctttatggcgaacggcgcgtcgactttatcaaagaagtgaatcccgtcggcggcggtaaagaggccaccggcctggtcacccgcttcacccgccaggcccccgccgcgcctgcgggctatcctgtgcctctgcgcctgttcagtgaaatcgatctggccaaaattctggcaaacgcctggtttaatgatttcaaccacgagcagctgagctttcaacttgatgaagccagggttgaagagcgactgcgccccttcctgcaacgcgccacacaagcaaaaagctataacggcgtgagccaggaagatgtggttgccttatgggattacctgaacgcctcgttcagaaaatcggttgaaaaacttgaacacgcctattggccgcaggtgttgaaaattgcccctgcgctgagtcctggtgaacgcgcagagctattttctttattgtggggagaactgccggccctcaccgagacctatcgttcattagccaatgtgctgaccaaactcaatcatgcccggacggtgttcgccccgctggagacgcttatcgatcacagtaatggcagcattatgaacgtcgacagccttaaccggctaggctccagccaggatcgccacgtggagatccgctactggaaagaggagcagcaaatcggcagcgccagcttaacccaggcggaactggcagcgttaaccaccgagcttatcttcccgttagcggaagtcgaggccgacagcgtcgtggagcaggtcgatctgcttgacttccctgggtatcgcgggcgtcttaaaattaccgcactggaagaggccggtagagaggggcttaatcccatttgccagcttctgctgcgcggtaaagtcgcctatctgtttgaacgttacaccgataatcaggagatgaacgcgctggtcgtgtgcgccagctccgccaaacagagcgatgttgctgacgttggtccggtattaaaccgctgggtagaaaaaacgcagggtaaaagcgccgaagaacgtcagggccgtaaccctgggctgttctgggccatcaccatgtgcgatatgcgcatcaacagcagtctgcaactcaccaccgaacagttaaaagaaggctgggaaggtatgctgcacatgaccttgctggagcgtttcgcccaatatgattggctgcagcaatgggcgcccggccaggcgtttaataactgtttcctggtgcgaaaaccggggctggataatccgttcatcgacctaaaagacggtacagaacaggagcgaaacaaggaagcgtgcatcaccgagcgctatcgccagaagctcgacgaaatgggcagcaccttcattagcgctaaaaacgtgctgcaacacgtcaccgagccgagcaaagcctggcacgcgatgctcgagctcaacgatggcggcatgggacgcttaaccaaagcgctgcgcggcgtcgcgcatctggaattcaagatggcacgtttgcagcaacaacttgagcagtgtcgcgaggagaccggcaatcgccgcctgggccgctggtacgaaaaagacggcgacgggcagctcgtgaaaaaacaggccatcgcgaaagagctatggcaggggctgtccgcctgctcccacagtatgggagagctaattaatcgtctggatctgccgacgcaggagcttaataacatctatttaagcattcgcgaccgcaacccggaaccgtcaaacgatggcgacagcctggcggcaaacgcgtttaccgccagcccatttggcaacaaccccttcggtgataacccgtttggcagcgatcccttcgccgacgcaccggctgaaatcgccgtggttgacgcgccagcgtcaactgcccaggaaagagtcggccaggacgatgatttcgcccatcaggcgtttaaagcctgggtcgcgcatttgcgtgaactgccgcagcaagcgccgcagtggcgtcagttggggatgaacagcgaactgattaatcatctcagcgaagaattgatcaccgcagccacgcgcctagatctggaaggcacgctgaaacgcgcgctggcgggtcaggagcaagcgggtacgcggcgtgaacatcttatggcacgccaggttctgcgcgcccaactgactatgcgtgattttatcgcctggtttggttatctcactctaccgcctgaaaaggtgcccaacagctatgttggcgagaaaaataaagtcttcctgcgccagaaaccgctgatgaacgacgagctgccgcagctcgccgccgttgcgccgcagccgggtgtctcttatctgggagactggctatccgccctgatgagcgtcgtacttgataacgctggtcatagcgccacgcgcgatatttccgtcgaacataatcgccaacttggtcaaattatcagccaattgaaacaagagaacatgccatgctag

SEQ ID NO: 220311 - DNA, 1020 bp, Klebsiella pneumoniae; identical to SEQ ID NO: 107911

SEQ ID NO: 220312 - DNA, 1968 bp, Klebsiella pneumoniae
atgacccggacttttttttgccgtctggcgctgcccttatgcggcctgttgttcagcgggcacctctttgccgccgagggcgataaaccgctgcttcaggaagggaagaaaacgctataccagcgcatcctgacgacgccaggctgtaagcttagcgacaacgccggggatgaaaatgggcagcttcagcctgcctttagcagcctttatgtttatcaaaaggaagaggctaaggggcaaagctggcttaaagtcgggccggatagctatggcaaaacccttggctggttgccgaaatcctgtaccgtagactggaaaatgcagttgacgctggcgtttaccaacccggccaaccgcgatcggttactctttttcaaagagaaagaaagtctggataacattctttctgcccccgatcctgtctctctggtggcgccgctgcgcgccaaattgaagcgtgacggccacgctgaaggtattcaagcccaggagccggaatattttgtcgatctgcaaaagcaattttatctgctgccaatcctgagcggcgaagaggtcatgaccgaagatggcttctatacgcgcctgctcaacgtggcctccgtcagcaaggcggatgataacgcagcggcaaaacaagataacgacgtaaaccagttgaaaggctttaacgcttcggtggtgttcgttatcgattcaaccatttcaatggggccgtatattgagcgcactaaagaggcggtcaataagatctacgacaaaattaaacaagagcatctggatgggcaggtcaagtttggtttggtctcttatcgttcaaataccaaagccgtaccgggacttgaatataacacccgcattttcgccgaccctaaccaggtcaaggacggcgcggattttctgcagaaagtcgccgatcttaaagaagcgaaggtctcaagctctttatacgacgaggatgcctattccggcgtgttatcagctattgatgacattgactggagtccattcggcgcccgctatatggtgctgattaccgatgctggcgcgattgagggcagcaataaactttcaggaaccggccttgatgccagccagctccgtctggaagccggtaaccgcggcattgctatttatacgttgcacctgaaaaccgccagcggcaaagcaaaccataccaaagccgagagccagtaccgcgatctctccaattttgatagcacgcaatctaacctttatcaggcggtgaatgcaggcgatatcaaaatgttcggtcagcaggttgatgccctggcgtcagccattacggaacaggtgaaagccgcctatatgggggatgccgccattggcagcgcgctgtatgccaaagatgaggggcaaaagctcacggcggagcagaaattgctccaggatacggcgttaatcgggcatgcgatgcagttagcctatttgggcaaacgcaacagcacccaggccccgctagtgttccaggcctggattagcgatcgcgatctgattaagcagaacatccccacaacagatgttcgcgtgctcttaaccaagggacagctgagcgatttaagcgatgccgtcagccagattctgaaagccgctaatgaagggatgatctcgcccactaagatgtttgaacaactgcgcaccgttgcggcaacaatggggaccgatcctaaccagttgaaacagcaagacagcgcgagcatcggcgatcttggcgtgctgggcgagtatctggccgatcttccctacaaaagcgatgtgctgaatctcgatgaagaaacgtggaaaagctgggatgggctgtcacaggagaaatttatccgcacactgtcatccaagctgcgtcattatcaaaaatataatgcagatgtcgaccgctgggtcgagctggcgcaaggtagcgatccgcgcgatcgcgtgtatcccatcccactggaaatgatgccctga

SEQ ID NO: 220313 - DNA, 726 bp, Klebsiella pneumoniae
atgctgcacattgaagacttgtgcgtggttcgtggtcaggatcatcaggctcaccgtgtttacctgccgcagctttcgctgcggccaggcgaggtggtggcggtaacgggtgaaagcggctgcggtaaaagcacgcttctggaagccattggtttagtgttgcatcccagcaaaattgggcgttacacgctcagcaaagggtcacagcagcaggatattgccgcgttgcttctgggcgagcgacataatacactcgctgcgattcgggcacgcgaacttggctttgtattacaaaacggtggcctccttccctacctgaacgtcaaagataatattctcttgccgtgccagctgctgggagcccgccctgacagcaccatgctggatagggtcatcgaaacgctaaaactgtcgccactactggcaaaatatcctacccagctctcctttggcgaacggcagcgcaccgcttttgcgcgcgcgatattacatcgcccggcgctggtactggcagatgaaccgacggcggcgctcgatccctacaatgcccagaaattatttagcctgtttatcgaactagtccgtcaggaagacatgatggcgctggtcgtttgccatgactggcctctggtcaaacacttcaatttaccctgtttagctgcgcagccagaatcgctgacggcgtcatcacagagcgaacggggaggtacttactttgtcctttaa

SEQ ID NO: 220314 - DNA, 1215 bp, Klebsiella pneumoniae
ttgtcctttaatcgtgcaagactgctcggtcgccttgcaatgcaagacctgtggcacgatcgcatcatctctttttgcatcgtctcctctcttgttgcggtcatcgcccctttactgctcctttttggcctgcgctttggcattgtgaaccagttacaaaacgatctggccaacgatccccgcaatctggagatccgcatgttgagcagcggaagctacgatcagcactggatcacgcagctacggcagcggcctgatgtcggcttcgccatcgggcaaacgcgctcgctcaatacgctgactgacttgcagacggacagcacacattttattgaaaatgcggaagtcattccgacagaggctggcgatcctttgctcggcacgcaggtgctccatcatgaccatgaagttgttattactcaggaagcggcacgcaagctggcggtgaaaaccggtgatacgctcacgctacgcgtgagtcgtatgctcgatgaacgccgcgaatggggacgtaagcgcgtgaccgtggtggggattttgccagccacctattttaatcgccccgctatctttacccgccccgcgttattaatggctcttgaacattttcgcgatggctatgcggtaacagcgttaggggtcgccagcggcgctcagcttaacggtaacgcgccgcgctacgcccgcgcaaggttgtacgcacgcgatattgaccatgtcgctagccttgaacgcgatttgcgcgcccaacgcatcgaaaccaccagtcggctggcggatattgagaatgtaaaaagcattaaccgtgtgttgggcatcatctttaacacgatcgccatcaccgcgctcattggctgtatcgcctcgttaatcggctcgtttatcgccaatgtcgatcgtaaacgtaagcatattgctgtacttcgtctgctgggcttcacgcgaccagccgtaggcgtttacgtcattagtcagggcgctttgctcagcctgatggcctatatcggcggttttggcatctattttttagccagccagatatttaaccgggcgctgtccacaagccaggccaccggtcagatgatttgcaagataacgcccttacacggccttatcgccctcttactgacgctggttgtggcgacgctggttgccggtatcggtgcctggcgcgcgatccatattgaacctgcgcagagcctgcgcgaggcataa

SEQ ID NO: 220315 - DNA, 1569 bp, Klebsiella pneumoniae
atggcctttactccttccacattatcgcgctgcctggcgctagccctgctggtgaagatctcccccgcgctggcagaaccgtgggcagagaaaacctataatccgaagccagatagcgatgacgtgattttgcctatgccctgcgaaggttcgatggtatttcgtcgggtagaaattccagtagccggtcctctggatgatattcccatcaccttaggggaagatggcggtgaatggggctttgtggaacacagttatcccacgtttatcgccggtagctttactgaaacgccccaaaataaaggccgttattatttaatggcgaaatatgagctgacggcattgcaatatcaggcattaacttccgatacttgcccgacaccatcgcgtaaacttagcctccctcaaaccagcatcagttggtttgaggccgttaatttctccgataaatataaccagtggttacgcgcaaacgcgctcgacaagctgccgaaagaagataacaagccaggttttttacgactgcccaccgaagtagagtgggagtttgccgcgcgcggcggtctgaaagtggataccgcacagtttcgtgattcccgttatccgatggacgacatcaaaaattatgagtggtattccggttcgcagtcctcaaacgggaaacttcagctcatcggtctgttaaatcctaacccgctcggcctgtacgatatgttaggcaacgtctctgagatgatgtttacccccttctacctcaataaaattaatcgattgcatggccaggctggcggttttgtggtgcgtggcggcagcgtgatgtccagtgagacggatatccgcagcgctagccgtaaagaaattaactattacgataatgcccagccttttaccagtaaaacaatgggcctgcggttggtgctggtttcccaggcaattacctcaacggaccgggtcaaacttcttgagaaaaactggtcgactctcggtgatgataaaacgggcgcagagagcagcaaatccgggtccaatgatacggcgaaagcgttaggtagcctggcttctggcgttgaagacggcgagctgaagaaaaagctgaaagatctggaaaaccaacttcgtgccagcaaccagcagcagcaagaagaaagagcacagtctatccgcgccagcctgaatctgggctcttttctctgtaccaaattacaggacgatggtcgtttccttgacttcctcaatcacaattatgagctgctgtgcaaagataaagacagcagcgatgccaactgtgccatccgcaaaaataagctggcggaacaaaccgatcgtctacagcagctaacgagctactacgccagcagtctggtggattccggcaccctgtatgggcaagcagggctaaaaggcgaagtgaacgtgttcaatcagatgctgatgctgaataaacgtctttccggtcttaagccgttcctcgctgctcattggcagaatcagcaaaaatacctagcgaacggcaaaattgatacagctggctggctggatacctgcaaacaagtaaagaacggccactaa

SEQ ID NO: 220316 - DNA, 504 bp, Klebsiella pneumoniae; identical to SEQ ID NO: 107906

SEQ ID NO: 220317 - DNA, 147 bp, Klebsiella pneumoniae
atggttctggacgggatcaacaactcagggctgggtaaagtatggtttgctggtagaggaattgccccggaatggccgatgaaacgtgagatgccttcatcggcatataccacccgctggaaggagctgccggttgcccgtttctga

SEQ ID NO: 220318 - DNA, 705 bp, Klebsiella pneumoniae; identical to SEQ ID NO: 8686

SEQ ID NO: 220319 - DNA, 186 bp, Klebsiella pneumoniae
atggctttgcgcgaagatatcgatgtaagccgcaattcttctctccgcgcttttctcagtcgcctctatctgctcaaatacgcgttgtgtatcagagaacgcctgtattaccacctgctcacccagaatatctttggtcgggaaatggtgatgaatactggccttggtgatacccactatttttga

SEQ ID NO: 220320 - DNA, 969 bp, Klebsiella pneumoniae; identical to SEQ ID NO: 120944

SEQ ID NO: 220321 - DNA, 1662 bp, Klebsiella pneumoniae; identical to SEQ ID NO: 104011

SEQ ID NO: 220322 - DNA, 561 bp, Klebsiella pneumoniae; identical to SEQ ID NO: 120942

SEQ ID NO: 220323 - DNA, 477 bp, Klebsiella pneumoniae; identical to SEQ ID NO: 95283

SEQ ID NO: 220324 - DNA, 267 bp, Klebsiella pneumoniae; identical to SEQ ID NO: 95284

SEQ ID NO: 220325 - DNA, 621 bp, Klebsiella pneumoniae; identical to SEQ ID NO: 95285

SEQ ID NO: 220326 - DNA, 258 bp, Klebsiella pneumoniae
atgatctccctcccgtctggcacccgtatctggctggtcgccggcgccaccgacatgcgtaaatccttcaacggtctgggcgagcagatacagcacgtactggatgagaaccccttctccggccacctgttcatcttccgtggccgccggggtgataccgtcaaaattctctgggcagatgcggatggactgtgcctcttcaccaaacgccttgaggttggtgaacttctgccgtggaacgtggctatacctgcctga

SEQ ID NO: 220327 - DNA, 810 bp, Klebsiella pneumoniae
gtgattaaggcgtttgatttgcagcaggggaacctgccgctgctggtcagtatgccccacgcgggaacgttattaacccccgaagtcgcccaggggctcacgccgagggcgaagcgtctggaagataccgactggaatattcccttgctctatcagaccatcacgaacatgggggccagcacgttatgcgcccgttattcccgctatgtagtggatatcaatcgcccagcggatgataaaccactttacagcacggcgacaaccgggctgtttaccgatatcttttttgacggcgaagccctgttcgtgccgggcggtgcgcctgacgcggcggcgaaggacgcgatactaaaacaggtctggcagccttatcaccaggcgcttgccgctgaactggcacgcctgcgtgagaaatttggctatgcgctgttgtgggatgcgcactcgatcaaatccgtggtgccgcgcttgtttgaagggcgcctgccggatctgaactttggtacggcggacggcgccagctgttcgacgcagctcagccaggcgctgctggcaagctgcaatgcgttcccgcagtatagccggatactcaatggccgctttaaaggcggatatatcacccgtcactatggcgatcccgtcaaccatattcatgctgttcagctagaaatggcccagtgctgctatatggatgaggagagctttgcttatcttccggagaaagggcagcaggtgcaacaactgctggagaggttgattaatactgcgttgcagtggggacgagatcagtacggcgaacccggaatgtga

SEQ ID NO: 220328 - DNA, 1209 bp, Klebsiella pneumoniae
atgtataccctttggcaccactgccggatcgccaccatggccgctgggcattatcagttgtttgacgatggcgcgatgctgaccgacggcgcagtgctgttatgggtcgggaaccgggcagaattgccggacttacccgttgcgcagcgggtggatttgcagggcagggtggtcacgccgggactggtggattgtcatagccacgcggtgtttggcggcgaccgggcccgggaatttgaaatgcgtctcaacggggcgagctatgcggagatcgcggctggcggcggtgggatcgccagtacagtcaacgccacgcgacaggccagcgaaagccagttgctggagagcgcgcggcagcgtatccgggagctgtgccgggacggcgtaacggcgctggagatcaaatccggctacggcctggatctggctaatgaacgtaaaatgctgcgggtgatccgccgtttatgcgacatattgccgctgaccgtgcgcagtacctgcctggcggcccatgcggtgcccgtcgagtatcaggagcgggcagatgcctggattgactatatttgcgaacgactgctgccggaactgcatcaggaagggctggtggatgcggtggatgcgttctgcgaacacctggcattttcgcccacgcaagtggagcgggtctttcagaaggcccgggaactggggctgccagtgaagctccatgctgaacagctaacgctacagcatggggcggcgttggccgctcgctaccatgcgctgtcggcggatcatctggaatatttgtgcgaagaagatatcgccgcaatggcacgccatgggacggtggcggtgctgctgccgggcgcctattacttcctgcgtgataaacagctaccgccgctggatctgctgcgtcagtaccgggtgccgattgccctcgcaagcgatttaaatcccggcacctctccggtgttgtccctgcgtctgatgatgaatatggcctgtacgctattccgcatgacgccggaagaggcgttggctggcgtgacgcttaacggcgcgaaggcgctggggctggatacagtttgtggttctctggaagccggaaaagaggccagcttcgtggcgtgggatatcgctcacccggcggagctaagctactggctgggaggctccctttcgaaacaggtgatttatcaaggtaaggaggtttattgtgattaa

SEQ ID NO: 220329 - DNA, 1395 bp, Klebsiella pneumoniae
atgaataataacaacacaacatacatcgaaacacgttctattgaacccatccctgacggtgaacgccacggtagtatttttagccagttcaccctgtggctgggggctaacctgcaaatcaccgccatggtcactggcgcattaactattgtattcggcggggatgttttctggtcgctggccggtctgatgctggggcagattgccggtgggattgtaatggcattgcacgccgcgcaagggccgcagctggggataccacagatgatcagcagccgggtacagttcggcgtctacggcgcctgcctgccgattctgctggtctgcctgatgtaccttggttttatcgccaccggggcggtgctgtccggtcaggcgatctcggcggttttccataccacggaaaccagcggcattctgcttttcgctgccgccacgctggttatcgcttatgtcggctatcggttgatccacctgttgggtaagctggcgagcctggtggggattatcgcgtttatctacttgctgtggaaaatcagttcttttccggctattggcgagctgctgagtgtccggccctttagctggagtacgtttttaaccgccaccggccttgcggcctcctggcagatcacctttggcccctatgttgccgattattcccgctatctgccgcgcagcacctctcccgggaaggtctttttcgccgtcgggagcggttcggtgattggcgcgcaaatcgccatgaccgtcggggtgctggctgccgccctctctcagggaaaactggtcggtcatgaggtggactatatcgtcggcctgggcggcaccggtgcgattgccacgctgctatatctgagcatcgcgtttggtaaactgacgatcaataccctgaatgcctacggcagcctgatgtgcctggcgacggtgtacagctgcgggaagcagcgagtgcgcgtaagccagtcggtacgtctgctggtgctggcggtgattattaccctggcgaccgctatcgcgattatcgggcaacactctttcctgtcggcgtttaaatccttcctgttgttcctgttgactttctttacaccgtggagcgcgattaacctggtggattactatttcttcaaccatcaggcgatagacatggaggcgctgaacgatccgaacgggaaatatcgggcgtggaatgtgacggggctcggggtttatctcgttggagtggcggtacagacaccgtttattgatagtggattctattccggcccattcgtgaagatgctgggcggtatcgatatctcctggctcattgggctggtgctaccggcagggctctactatgtcctgcgcaaagcgcagtccgcagcggcggctggcgccgccatcagtcgttaa

SEQ ID NO: 220330 - DNA, 1677 bp, Klebsiella pneumoniae
atgagtaaacaagcaacccgttttcgcgatgttgaaatcagagccccgcgaggcactaagctgaacgcaaaaagttggttcacagaggcgccgctgcgcatgctgatgaacaacctggatcccgatgtcgccgaaaatccaaaagagctggtggtgtacggcggtattggccgggcagcccgcaactgggaatgctacgacaagatcgttgagaccctgaagcagctcaatgatgatgaaacactgttgatccagtccggtaaaccggtgggggttttcaaaacccacgacaatgccccgcgggtgctgatcgccaactcgaacctcgtgccgcactgggcaaactgggagcacttcaacgaccttgatgcaaaaggtctggcgatgtacgggcaaatgacggccggctcatggatctacatcggcagccagggcattgttcagggcacttacgaaacgtttgtggaagccgggcgccagcactataacggtagcctgcgcggacgctgggtgctgacagcgggtctggggggcatgggcggcgctcagccgctggccgctaccctggcaggagcctgttcgctgaatattgaatgccagcagtcgcgtatcgacttccgtctgcgtacccgctatgtcgatgagcaggccagcgatctggatgacgccctggcccgtatctcccgctataccgcaaaaggagaagcggtatccatcgcgctgcatggcaacgcggcggaaattttaccggagctggtaagacgcggcgtgcgcccggacatggtgaccgaccagaccagcgcacacgatcccctcaacggttatctgccgctgggcatgagctgggaagactaccgcgctcgcgcgcagtctcacccggtggagacgatccacgcggcgaaagcctcaatggccgaacacgttaaagccatgctcgccttccagcagcagggcattcccaccttcgattacggcaacaacatccgccagatggcgaaagagatgggggtggaaaacgcttttgacttccctggctttgttcccgcctatattcgtccgctgttctgccggggtattggcccattccgctgggcggcgctttccggcgatccgcaggatatctaccgcaccgacgcgaaagtcaaagagctgatccccgacgacgaacacctccaccactggctggatatggccagagagcgcatcagcttccaggggctaccggcccgcatctgctgggtcggactggggcagcgcgcccgtctgggcctggcgtttaacgaaatggtccgcagcggcgagctgtcggcgccggtagtgatcggccgcgatcaccttgactccggttccgttgccagccctaaccgcgaaaccgaagcgatgcaggacggttccgacgcggtatccgactggccgttgctgaacgcgctgctgaataccgccagtggcgcgacctgggtttccctgcaccatggcggcggcgtagggatgggcttctcccagcactccggcgtggtcattgtctgcgacggcagcgatgcagcggcggaacgcattgtccgggtgctgagtaacgacccggccaccggcgtgatgcgccatgcggatgcgggttatgacatcgcgattgaatgcgccagagagcaagggctcaacctgccaatgattgcggattaa

SEQ ID NO: 220331 - DNA, 1098 bp, Klebsiella pneumoniae
atgattaccttccagaatgtgactaagcactacgacaacggttcggtcgtagtagatggccttagcctggtagcgccgggtggcaaaattacggtatttgtcggcccttcgggctgtggaaaaaccacctcattgcggatgattaaccggttagtggaaccgtcatcgggccggatcctgcttaacggcgaagccaccgagcaaatggatatcgtgcaactgcgccgccgtattggctatgtcattcaaaatgcaggtttattcccccacaaaaacattatcgataacattgccaccaccgcgattctcaacggcgccgccaaaagtaaagccagagccagagccggggaattactggaggtcgtcggtctggatccgcaaatcgccaaacgcttcccctggcagctttccggaggccagcagcagcgcgtgggcgttgcccgcgctctggcggcagacccggagtttatgttgatggacgaaccgttcagcgcggtcgacccggtagtccgcgaacagctgcaggaagagtttttgcgtattcagaaagaggtgagcaaaaccatcattatggtcactcacgatattgatgaagccatgaagctcggcgacctggtcgcagtacttaaacctggcggcaagctggcgcagatggcctctccaggcgaactgctcaatacgccgcaaaacgcctttgtggcggactttatcggcaaagacagaggctatcgcaaactgagtttccacgccgccgacacagaaaccgggttacgcaacgagccctatgccgagctggactgttccttcgagcaggccagagagatggccatcgaccgctggctgctggttacccaaaacggcaaagcgtttggctggttcgacacccaccagccggcaacagcgattacccacgacaacatcaatctgggggcgacgttccaccagcagggaagcccgttgcgccatttgctggacgctgcgctgagctctcccaaccaccgggccgtgatcgttgatgaacagcaaatcccgcaggggaccatccacctcgatcaagtactcgacatgtgtaaattcacgcgccaggagggagcatga

SEQ ID NO: 220332 - DNA, 645 bp, Klebsiella pneumoniae; identical to SEQ ID NO: 197190

SEQ ID NO: 220333 - DNA, 681 bp, Klebsiella pneumoniae; identical to SEQ ID NO: 197189

SEQ ID NO: 220334 - DNA, 876 bp, Klebsiella pneumoniae
atgaatatgaaaaaacgtattttgacgctgtgttcagcgctgctgctgtcggcgacctcatcggcctgggccgcgccgaaagtcattgtcggttctgcagacttcccggaaagccaactgctgggcaccatttatgcgggtgcgttagaagcgcaaaacatcccggtggagaaaaagctgaacatcggcagccgcgaagtgtatatcccggcgctgctggacggttccatcacgctgatcccggaatacagcggcgcgctgttgagctatctggatgcgaaaaatgcggcacacggtagtgaggacgtcgccagagagttggccgctaagctgccggagaaagttaaaatgctgcagatctcccaggctcaggatatcgacgttctggccgtgacgcagaaaaccgccgataaatataaactgaaaaccatcgccgatttgcagcctgttgccagccaactggtgctgggcggcccggcggaatggaaaacccgccatgaggggctctccggcctgcgcgacgtgtacggcctgaactttaagaattttaaagtgctggacgtcggcgggccgctgacgctcagcgccatgaaaaataaccaggtccaggtcgccgatctgctttcaacctcgccagcaatcaaaaaagatcgccttgtcgtgctggaagacacaaaacatctgttcgcggcgcaaaatattgtgccaatcgtcgccagtgaagcgctgaatgacgccgtaaccaccacgctgaacaaagtctctgctcagctaacgactgaagatctgatcgacatgaacgagaaaattgccgaatttgtcagcatcgacgatatcgcgcatcagtggctggtaaaacacggatttagccaataa

SEQ ID NO: 220335 - DNA, 1533 bp, Klebsiella pneumoniae
atgacaacgccactgaacgacagcattaccctcgggcaggcgccgggtactgtggatgagatagtgcggattgccgacggcgcgccggtcgcgctggagaaggccgcgctggataatatggcgcgggtcagcagccgtattcagcgcgccattgaacaaggccagacgatctacgggctgacgaccggcgtcggcgatctggtcaccacccggctttctccggacaggatgacggatactcagctgaatatgctgcgcagccacgcctgcggagtcggtccggacctgacggtgcgtgaagtgcgggccatgatggcggtgacgttaaaatccctgctgcagggatacagcggcgtcaccccggcgctggcgcagcgtatcgccgatatgttgaaccgtcaggtcacgccgtggtcacccgccggcggctccgtcggttacctgattgccaccgcccatataggccttgcggtcttcggcgagggcaaatgctggtatcagggagaactgctgccggcgcaacaggcgctgacgcgggcgggtatcccgccctatgttcccggccccagagagggtcacgcgttggtcggcggcacctatgagatcaccgcggtgggctgcctggccgtggcggatttccagcgtctgctccccgtcgccgatatggcgggcgggatgtgcctcgaggccatgcggggcaatacgcgcggctacgatgcccgcctgcacgccctgcgccctcatcccggacagcaggaaaccgcgcaaaacctgcgccgcctgctgaaaggcagcgagatcctggcgcgttatcgcgaccaccgggttcaggacgcgctgagtttacgctgtatcccccagatccacgacgcggtgcgcgaccagctggcccactgtcggcagattatgaccatcgaactcaattcggtgaccgataacccgctgtttctggtagaagaagacaggcttatcgtgatgccagggggcaacggtcacggtgcgccaacggcgctggcgctggatgcgctggccgttgcgattgcccagttgagcaccgcttcccaggcccgttgcgaccgaataaccaatacgcatctcagcgggctgccggcctttcttatctcgccggattcggggtactccgggatgatgatcccaccctacgtcgccgctgcgctggcgggcgataaccgcagtctggccggcccggccagtatccacacggtatccacctgcgccggtcaggaagatcatgtcagcatgggggttgccgccgcacgtaaagcgcttaaggcggtagaaaacgccgtggacatcgtcgccatcgaactgctgtgcgcctgtcaggcgctggagttccatcgcccgctgcgtgccgccgtgggcagcgaggcgacgctggagagagtgcgtcaggcggtgccgttccgggataaagatacgctgctctaccccgatatacatgcgctacgcgccctgattaatcagggcgaactcagcgcgatgctgcaggtattgtgcgaagaggagtga

SEQ ID NO: 220336 - DNA, 558 bp, Klebsiella pneumoniae; identical to SEQ ID NO: 197186

SEQ ID NO: 220337 - DNA, 762 bp, Klebsiella pneumoniae; identical to SEQ ID NO: 197185

SEQ ID NO: 220338 - DNA, 1368 bp, Klebsiella pneumoniae
atggcagtctggttggcagaaaaagcgctgttgcctgatggctgggcaaataatgtcggcataaccgtgtccgaagaaggcatcataaccgcgctggaaaagaactcagcgctgaatccgcaggcgacgcgcatcaaaggggtcgtcgtgccgggtatgccgaacctgcactcccatgccttccagcgggcgatggccgggttaacggaggtggcgggaaacccgtcggatagcttctggacctggcgggatctgatgtacaggctggtagataaaattacgccagaacagctggaaaccatcgccagctatctgtacatcgaaatgctcaaagccgggtacacctcggtcgccgaattccactatctgcatcacagcagcagcggtgcgccttatgaagagcggacggaattagcgctgcgtatcgccagcgcggcgaaacataccggcatcggcctgacgctgctgcccgtcctctacagttacgccgggtttggcgcgcaaccgccctccgttggacagcgccgctttatcaacgatagcgacagctacctgaatatgtacgagtcgctcacatcgcggctggccagcgagccaatgcagcgtaccggtctgtgcttccactcattacgggccgttacgccggagcagattggcgccattctggcctgccatcctggccagcagccgattcatattcatattgctgaacagcaaaaagaggttgatgactgccaggcctggtccggcgagcgcccggtggagtggctgtacaaccatcttcccgtggattcgcgctggtgcctgatccacgccactcatctgacgcctcaggaaacgatgaagatcgccacatccggtgcggtggccggcctgtgcctgaccaccgaagccaatctcggcgatggcatattccctggcccacaatatctggagcataacggcgtctggggaataggttccgacagccatattagcgtcagcgtcagcgaggatttacgctggttcgaatacgggcagcgcctggtagcccagcgacgcaaccggctcatcgtcccaggcgagcctcacgtcggcaacgtgctgtatcaaggggcactacgaggcggcgccagagcgctgggccaaaacattggccagctaagtgtaggatatcgggccgatcttgtcgtattggatagccagaatccctttatcgccagcgcagaagaccagatgttgctcaaccgctggatcttcgcctgctcatctaatcccattaccgcggtgatgactggcggacgctgggtgattgaggatgggcatcaccataaagaagaatctgtctctcaggcatttattcaggtaatgaaagatcttgcagcctga

SEQ ID NO: 220339 - DNA, 159 bp, Klebsiella pneumoniae; identical to SEQ ID NO: 197256

SEQ ID NO: 220340 - DNA, 924 bp, Klebsiella pneumoniae
gtggcaaagcaaaagttcaaaatcaccaactggcccacctacaataaagccctcatcaaccgtggctccataactttctggctggatgatgaagctattcaggcctggtatgagtcagcaacaccttcttcacgaggcagacctcagcgctattctgaccttgccatcaccaccgttctggtcattaaacgcgtattcaggctgaccctgcgcgctgcgcagggctttattgattccattttttctctgatgaacgttccgctacgctgcccggattacagctgtgtcagcaggcgggcaaagtcggttaatgtcagtttcaaaacgcccacccggggtgaaatcgcacacctggtagttgattccaccgggctgaaggtctttggtgaaggcgaatggaaagtcaaaaaacatggccaggaacgccgtcgtatatggcgaaagttgcatctggcagttgacagcaaaacacatgaaatcatctgtgcagacctgtcgctgaataatgtgacggactcagaagccttcccgggtcttatccggcagactcacagaaaaatcagggcagcatcggcagacggcgcttacgacacccggctctgtcacgatgaactgcggcgtaagaaaatcagcgcgcttatccctccccgaaaaggtgcgggttactggcccggtgaatatgcagaccgtaaccgtgcagtggctaatcagcgaatgaccgggagtaatgcgcggtggaaatggacaacagattacaaccgtcgctcgatagcggaaacggcgatgtaccgggtaaaacagctgttcgggggttcactgacgctgcgtgactacgatggtcaggttgcggaggctatggccctggtacgagcgctgaacaaaatgacgaaagcaggtatgcctgaaagcgtgcgtattgcctga

SEQ ID NO: 220341 - DNA, 414 bp, Klebsiella pneumoniae; identical to SEQ ID NO: 197250

SEQ ID NO: 220342 - DNA, 420 bp, Klebsiella pneumoniae; identical to SEQ ID NO: 150548

SEQ ID NO: 220343 - DNA, 312 bp, Klebsiella pneumoniae; identical to SEQ ID NO: 150549

SEQ ID NO: 220344 - DNA, 561 bp, Klebsiella pneumoniae
atgaccagacggttcacgctgtacgcttactcagaaactgacgacatggcggtgatcaatgccaaacgcgtataccgcatcatgcgtcagaatgcgctgctgcttgagcgtaaaccggaaataccgccatcgaagcgggcgcatacagggaaagtggccgttggagaaagtaaccagcggtggtgctctgacggcttcgggttcagctgtgataacggtgaaaaactgcgggtcacgttcgctctggactgttgcgatcgcgaggcactttactgggcggccagtaacggtggatatgacagtgaaaccgtgcaggacgtcatgctgggtgccgtggagcgtcgcttcggtaacagcctgccgacatccccagttgagtggctgacagacaacagttcagcctaccgttcttatcagacgcgtcagttcgccagaatggtaggactggagcctaaacatacggcggtacgtagcccggaaagcaacggggagcaggtcacctcctgcttttggcttaactcgtcggttagccacgcatcaaaacggcccatatgcccttaa

SEQ ID NO: 220345 - DNA, 1665 bp, Klebsiella pneumoniae
atgaatcaggtaatatttaagagagtcgccatattgtcgctttcagagaaaaaagcttttacttttaatttctcagaaggtttgaacttcattcatggtacgaatgatactggaaagtcaagtctaatcaagagcctgtacttttgccttggtggggatttaaggcttgatgacagttggaagaagcaagagataattactaagctaacattagcttatcaagatgaaattataaactttatcaggaaatcatcctatttcgtagttactgtgcataagaatggagtgaaaaaatcagaaaagatttttagcaaagtatctgagttaacaagtgaaattcaaaatttatttggatttaatcttctgttagctcttaagaagaataaagaaacaataattgcaaatccggcttcttattacttcccattttatattgatcaggatgatggttggagtaatgtacttgattcatttaacggcctaaagatgtatgtggattggcaaaaaaatgctctgcaatatcactcaggtatcaagccaaaagagtattatgctctcaatggggagcaaaaaatattagcattaaaaatttcagagcttgagcaagaagcggaacttatacgaaaaacaaagcttaggtttgaaaagtatttcgaaaacattagttttgatattgatgtgaatttttatcttaataaaattgattattttataaaacagtgtgaggaattggagcagcaagaaagagcatatagattaaaagcaatgaatctatactcgaggagaaatatattatctgatctcattttcagtattgaaaacgagagggctgattcctctggcaatacaagtgaagaggatgatatttcttttgcgttaaaaaaatatgatattaacaaaaataaagttgccttattcagccaaaaagcaagtttatatgatgaaaagagtaaggttgatgagcaacttatgactatcagaagtaaattattagagcatgctgaaatgagtgatcatattaagtctatgcttaataatgtacatgataatttctcgattaaagaaattattgactctgaggcttataaaagtgcagccttagcatttgaagaacaattatcggagatccgagaaaagataaatgcattagccttagaaaaggcagtccttgatactaaaataaaaacctttaacaatgtgaaaagaactagaataattaacgattattttctttctatgctcaatagggcgcaagtaaaactgcacttaccaatcactgaaaaaggtggtgttataaattataaagctttaactacaggtaaaacgggtagtcggagtccaagagcaatatttgcatatcattacgctttgttaatgacaattaaaaaatactctacactaccgattttaccaattgttatcgattcaccaaagcaacaagacctggatgatgaattaacagagcaactaattcagttttgtttggatgatcttgctgaggtatctcaagtaataattggcgcagtcaagccagaaaaaaatatggtcggttatcattctattaatttagttaagaagtttagtctacttcaacctgaggcttttagtgaggtttatcaagaggttgtgccgcaatttaatgccatgttcagacatttgaactaa

SEQ ID NO: 220346 - DNA, 1074 bp, Klebsiella pneumoniae; identical to SEQ ID NO: 204449

SEQ ID NO: 220347 - DNA, 288 bp, Klebsiella pneumoniae; identical to SEQ ID NO: 182627

SEQ ID NO: 220348 - DNA, 468 bp, Klebsiella pneumoniae
gtgtcggataacctgtttaacggacgacgtttccgggcgctgactgtagtggataattttagtcgggagtgtgtggcgatccatgccggaaagtcgctgaaaggtgaggatgtggtcggtgtgatggaaaggttgcgggtgccgggcaagcgcctgccggtacgtattcagacagataacggcagcgagtttatctcgaaaagtctggataaatgggcgtatgagcacggtgttacaatggacttctcccgccccggaaaaccaacggataacccgtttattgaatcatttaacggcagtctgcgggatgaatgcctgaacattcactggttcctgtcgctggaagatgcgcaggacaaactcgacaactggcgcagggaatataatcatgagagaacgcattcatcattaaatgacatgactccggctgaattcatccgaagtctccggaaagacgaagctctctga

SEQ ID NO: 220349 - DNA, 147 bp, Klebsiella pneumoniae; identical to SEQ ID NO: 182597

SEQ ID NO: 220350 - DNA, 1098 bp, Klebsiella pneumoniae; identical to SEQ ID NO: 182596

SEQ ID NO: 220351 - DNA, 684 bp, Klebsiella pneumoniae
atgagcaggaatatcgtgactgagcctgaagtgttaaccggacaaaacggtatgatttgctccaccagcattgaacgtattgtcacaggccgtaatgctgcgttgacaaggattgaaagccttattcatgcgcttgatgatatctccattcttactcgtgacatcggcggcggtacagcacaagtgtgggggatgcgggagggccatcgctacgattgctggtttacggaaaaacccgataaagcgatgaaaacgattacccgcaatattgatcgccgtatctggcgcgatctgatgaataaatcaggcatgttgagcctgatggatgctcaggctcgtgacgagtggcacaaaagcctggagaaagacgatatccccgcgatatctgaagaaaatatccttagtacctttgagcaactgaatcacgacaaacaggccgtttttgagcgtggtgttatcaacgtttttaaagcgttatcgtgggattataaaacgaactcaccctgtaggtttggaaaaaagatcatcatggatggtctggtttcttacaaccgctgggggtttagcttcacacatggctatcgacgcgaccagattgttgatctggaacgtatgctgacactacttgatggtaagctgcttccggacaatcgggctgacattgcctgtagactggccccatga

SEQ ID NO: 220352 - DNA, 390 bp, Klebsiella pneumoniae
atgcaaaccaaatcaccccccttcatgcgggcggcatcgtcacgtccgtctcccgtgggcgtctggcagaccctgctgacctgcctgctggaacaccactatggccttacgcttaacgatacgccgttcagtgatgaactggtgattcagcaacatatcgaggcgggtatctcgctggccgatgccctgaattttattgttgaaaagtatgaactggtccgcactgaccggccaggcttcagcatcagggagcagtctccgtttattacatccattgatatcctccgggccagaaaggcaacggggctgatgaattgtggcacgtataaagatgtgacggccattaccagaggactgcatagacaggtcagcacccccggtaaacgctga

SEQ ID NO: 220353 - DNA, 222 bp, Klebsiella pneumoniae
atgaaaattatcagtaagcgtcaggcaatggcgatataccgccagcatccacagtcccggttgtttcgcttctgtacggggaaatataaatggtccggcagtatctgccactatgccggtcgcgaggtggacgatatcagcggtgtactggccgtattcgcagagcgccgccaggaccgcaatggcccgtatgtcgtattacgcagcgtaagcctgaattaa

SEQ ID NO: 220354 - DNA, 633 bp, Klebsiella pneumoniae
atgtacgaatatatcacctctcacggaaaattaaatcaataccatttaaagaaaatagaacagactattgataaagcattgagtgaacactcaagagtattggctgtaagaatagatttacatactcctgttctcaaaccattaaatgacatgcctgatgaggctaatttcgcaaggacagattcatcagtaatatcccgctttgcggattctctgaaagcaaaaatttcacattatcttaacaagcgggagaaagagggaaagcgagttcgtaagacatcattacgcgttgtctgggccagagagtttgcacctgattcacataaaaaacattatcacgtattactgttactcaacggggacactttcaatacactgggagcgtacgatagtaaaaaaggtacactcctccgccttatacgtgagtcatggatgagtgctgtcagtttcatatatccccccgataaagagttagtccacacacccaggaatccttgttattacctgaatgcaaaggatggcaagcaaagtgagtcatattgctcgctgatttaccggacaagttactttgcaaaaaagaaaagcaaatgttttacagatggtgaacgtaatttcggatgtagctttaaataa

SEQ ID NO: 220355 - DNA, 1446 bp, Klebsiella pneumoniae
atgagtgttggagttataaaagacaaaaaggctacttacccagtagaatacttccctcaaataatgcggaatgcaattgaatctatagtaagggatgttcaggctcctccggagctggtgggtagcgccatactgggttttgcatcacttgcattgcaggggttaaaaaaaattcgttatcctgacgggcgagtcaggcccatctccttatatcttaccgtgattgcagactcaggagagcggaaaactgctgtatataacctggtgggtcaacctgtctttgcatttgagaaagcctgccgaaagaaacatgaaatgctaatagttgattacaatgcagaacttcaatcatggaaggtacaggaacaatccatattgaagagtatccgcaagaaaacggagaaaggtgtcagcattgaaagtgaaaatgagcggctgaagctccattacagaataaaaccgaaaagtcctgttctgcctaagatgatttacaacgatactacccctgaagctttacagtcgggattatacaacaatataccttctgcgagcctgatgtcagatgaagctggggtattctttaagggaagagctaagagtaatttaggttttttaaaccagctatgggatggctcttcatttgatgtagaacgcaaaacaggcagtttcacagtagatgattgcatgttcaccatcttacttatgatccagacagatgaattcgaaaaatatgttaaaaaacaaggggattatgcagtaggctctggttttttctctcgattcatgattaccggagtcacctctatgcaaggacgtagggacaccaagacagtacaaaatgcaggaggagatagccttaggttatttcatgaaaaaatcgaagaggcgctatccagttttgaagaaatgtgtaacagtggtactgttacacatgaatactatacactttcagaacaagctcagactgttttatccgagtaccagaaaaaggctgaagacgctataattcaacacaaagacaaatcccctctttttgaaggcatgttttctaaattgtcagaaaattttataagagtggctgccttatttgaatattttgacggtaacaattcaggaactatttcctcaaaaaatgttgtaaatgcttcaaacattgtgaatttttattattcttatttattaacttcgggtggtttacgtagtgaaacagtggagcagaatgctgatttactctatgcctggctgctctctcacaaagagaaccactatagttataccacccatataaacaaaacggaaataagaagaaaaggaccttataaattaagaaataaaatcaaactcaacgccgctttagaattccttgagcaagaaaggaaggtgagtatccagaaattgagaaacaacaatggaactatgagcgaaataatcactatccatcgataa

SEQ ID NO: 220356 - DNA, 723 bp, Klebsiella pneumoniae
atgaaaaataacgactttgatatcctttttgaagaggttttaaatgagtttgagaaagcggtagtgaaagtgaaaacttccactcactttgagccgtgttctggcgaagagatggtgcgtaagctcaaggaagatgcccatactgccattactgattaccaaaaatgcaggattcagtcttacaaacatgcttacagggaacgtactgttgaagagtacataagcagtatgaagtctcaagctatgtggacgggtacacccggcaaacttctggaatgcgcttttgtatcacataaatggggaatatctcagtacagacagggccgcaaagctgaaggtcgtaaacatgttttgatggcactaaatttgataaacatgtggaatggagcctgctgggctctggaaatggtagaatttaaagaagagtctaataagttaaaacgagaagcagcaagcctcggtggtaaaagaaagtcgcagaaatacaggccagtcaaggatgaagtcattaggctattaaagaaaaataagcctgaagacgggtggaaaagtaaagctgctgctattaattctttagaggaagagatttctaagtttattgaacttgatttccataaaaatagtgattggacatcatgggataaattatatagaaccattagcgactggtctagaaatgacatcgaattgaagaatgctttcgctgatgttgtaaagagataa

SEQ ID NO: 220357 - DNA, 252 bp, Klebsiella pneumoniae
atgaaagaacaggcatcaacatttaatcagaaaaataataatcatatgtcagatacagacttcacaaaagatcgccttgtagatatggcttttattactgcttacaccggattaacagacaaatggttttataagctcatcaaagacggtgaattcccaaagccgattaaattgggccgcagctctcgctggactgaaagtgaggttaaaacgtggttaaaacaacgtattgaagcatccagaggacattag

SEQ ID NO: 220358 - DNA, 846 bp, Klebsiella pneumoniae
atgttacgtggttccgaaagagaaaccgctttatcaaaacttaaaaaagcaactgaccgttatgaggctcaggcaaaaggtacgcaggaagagattacaaatctattcctgttgcgtcagaaatgcagtgaacaacttattacacacgtcgaaaactatgtgagtcaactggcaaataaaccaaaagaattcgataaatcctggagtgaactaaaagcagaaattgttgagttcgacaatgttgttgaaaaactagaggaggaatatcgcacatcgcacgttggtaaagggactgcaacggcgggagttgccgtcggagccggtgttgcagcatttgcacctacggcagcgctggcagtcgctacgacctttggtacagcatcaaccggaactgcaattgccacattgagcggtgctgcagctacaaatgcagcactggcatggcttggcgggggggctttagcagctggcggcggtggtatgtctgcaggcggtgcgctgctagcgctggcaggtcccatcggttgggggatcggagttgccggtattgcagggggtactcttctggctcgtcgtaagaacggcaaaattattgacaaagctcagcaggaagagcgtcatattcgggctaaaactagcgaattgctggtaatggaacgtggtgcgaataaattgaaggcactaacatctgagcattatcatggcactgaaagcattattgatgggctggagaagaccgcaccgcgtgactacaaccagtttaatgcgcatcagaaagatcaactcggggcattgattaaccatatccatgcattatcaaaactgatcaacaagaaaattcagtga

SEQ ID NO: 220359 - DNA, 1065 bp, Klebsiella pneumoniae
atgaaaattattgaccgccatgatgctgtaagtgatcagattatcggtagtgctgttaatgcactcaatcagaccaggatgcaggacgaaatattcgaattagagaggcaagctcgtgcgtttgagaatgcgggcgagcaaatgctgaaggttcgtgattttatcgcttcacccaacaccatactaggctccacaggtaccaagcatggtgaaattgccgagcaagtagaagtaggtgtgcgtaacgcccgtcaggcgctcgaagagagactacaggatgagtccgcttttcgcgcaacattcgacggggttggccggacggcccctgcggactatttaattgatggcgttaaagtgcaatcaaaattcataaacggcatcaataataatctggcacatgtcctgaaacacatggaagactaccctgacttcacccaagacaaagcgttttaccatatcccgaaagatacctggcagacgatacaggatgttatcgacgggaaacctgttgagggaatgaatgagagaagtctgcaggccatcagggaaaaggttgcagaaattgaaaacgcaaccggtcgatcatttgcggacgttgtacgtccaggagactctaattataaagatgtccagtgggggaaaatcgatgaaacactcgataaacatgaccaggaattagctgagaaaaatgaggtaaaaaaagccgaaatcgttgaagaacaccagccttcgctcaacgaagccatgcgagctacggctatgggggcagccttcggggccacttttgctctcggtacgggtatttaccgcaagtatcaagacggtaaaaatatcttccgtggcgaattcgatacagaggactggcaggacgtagggctggatacgctgaaaggagcagctatagggggcgtgtccgcaggggctatttacaccctgacaaattacgcctcaatgggagcccccttcgccagcgcattagttaccgcaaccaagggggtaggaagtcttactatgtcttatcagcgtggtgagatagatctcgataagtgtaagcgtacagcgtga

SEQ ID NO: 220360 - DNA, 321 bp, Klebsiella pneumoniae; identical to SEQ ID NO: 181832

SEQ ID NO: 220361 - DNA, 933 bp, Klebsiella pneumoniae
atgattatttcaattaaaaacaactgggaaaaagcaataaaagcacatacacattatttaaataatttgatatgcaactttttaaataaatccattcctagttctgaaggacgagacgaagctaaaaaatttattctagatgtgcatcacctattaatacttgccggtaaacaagatatattggagagtattgatatatatagagagtacaaacacagattgtcaataacgccggatatatcgaagcaattcgacaaagaaataagatctatttttaattacaataagtttgttaggaaaacaggatcatggaatgcatatactctatgtaaaaaatcaataagcagaacatgtccgtattgcaatcaagcatatgctttttcgatacaaaaaaagaatcgaggttttcgtcctacattagatcatttttatagtaaggatgactttcctcaccttgcattggtaattaacaatttaatcccaagttgtagttcatgtaactcaagccttaaaggcacaattgatttcttcgcaaatgaacatttaaacccactgtgggatgatgaagttataaatttcgttttaactcatgaggatggtgttttaacattaatagacggaatgatttcatcaccagaaaaaataaaaataaacatatcttacgatacaacaaatatttcaattaaaaacacagtaaatacttttttgataaacgaaagatatcaagaaatgacaatagaagcaatagaatttgcaactgccaaattaaatcttgaatatgccgtatctactggaatatcatatttcaaaaacaactcagaaagtagcatattaagatttgacaaaagagaatataaaaaatatttgctcggtaaattatatttagatatatataataaaatgccaaatgcaaatatagttaacactcgttaa

SEQ ID NO: 220362 - DNA, 468 bp, Klebsiella pneumoniae
atgctgctgtggcagttcctgcccgccatcgaagcctggttcagtccccacgaaacgcaggagcgcacggtgacgccgtgcggcgacttggccgccgacgaaaaaaccaccatcgagctgttcgagaaatcgcgcgggtcggtggtttacatcaccacggcacaactagtacgtgacgtctggtcgcgcaatgtcttttccgtgccgcgcggcaccggctccggcttcatctggagcgatgccggccacgtggtgaccaacttccacgtgacccagggggcatcgtctgccacggtcaaactggccgacggtcgcgattatcaggctgcgctcgttggcgccagtcctgcgcacgacatcgcggtactcaagattagcgtcggcttcaagcgcccgccggcggtgccgatgggcaccagtgccgatcggttgaactgggcgcgtggatcagcgtggcatcgacgatag

SEQ ID NO: 220363 - DNA, 339 bp, Klebsiella pneumoniae
atggtgatcaccgacccctttgcttcacggttgagggaacatgttcgcgcaaccgacatggctgcccggattgggggggaggaatttgctgtgttgttggaagcggcatcgatagaaggcgcccaagtatgggcggagcgatttcgtcaggacactgcggcgacagcggtggtgtgtggagaggtgtcgatcagctatagcgccagcatgggggtggctctccttgacccccgtttgcactctgtcgagcaggtgatgctgcaggcggacagcgcgctctaccaggcaaaaagacaagggtgcaaccaagttgtgggcgcacaagtatttcagaattga

SEQ ID NO: 220364 - DNA, 2796 bp, Klebsiella pneumoniae
atggccagaaaacaatgccaggtctgcggccaacccgccaccgtgcgggtggaaaccaatctcaacgggcgtcacagcaccatgctgttgtgcgacgaccattaccgccaattagtgcgccagcaaaagcgcaccgtttcgccgctggaagccttgttcagctcgcgcagcggcctgttcgaggacttcctcggcagtgacttcttccgcatcgacgacgacacgacgcccgttgccgccgataccgatgatgtggtcgatgcctcgttaagtgagcccgccgccgcaggttcaggtgtgccgcgccgtcgcggcagtgggctggccagccgcatcagcgaacagtcggaagccttgctgcaggaggccgccaaacacgctgccgaatttggccgctccgaggtggataccgaacatctgctgctggcactggccgacagcgacgtggtcaagaccatcctgggtcagttcaagatcaaggtcgatgacctcaagcggcagatcgagtctgaggccaagcgcggggacaagcccttcgagggcgagatcggcgtgtcgccacgcgtgaaggatgcgctcagccgcgcctttgtggcctccaatgaactcggccattcttatgtcggtccagagcatttcctgatcggtctggctgaggaaggcgaagggctggccgccaacctgctacgccgctacggcctgacgccgcaggcgctgcgccaacaggtcagcaaggtggtgggcaagggcgccgaggatggccgcgctgagacgccgaccaacacgccagaactcgacaagtactcgcgcgacctgaccaagatggcgcgcgacggcaagctcgatccggtgatcggccgcgcgcaggagatcgaaaccaccatcgaggtgctggcccggcgcaagaagaacaacccggtgctgatcggcgagccgggtgtgggcaagaccgccatcgtcgaagggctggcgcagcgcatggtggcgggcgaagtgcccgagaccttgcgcgacaagcgcctggtggaactcaacatcaacgccatggtggccggcgccaaatatcgcggcgagttcgaggagcgcgtgcagaaggtgctgaaggaggtgaccgagcaccagggcgagctgattttattcatcgacgaggtgcacaccatcgtcggtgccggccagggcggtggcgaaggcgggctggacgtggccaacgtgttcaaaccgatgatggcgcgcggtgaactcaacctgatcggcgccacgacgctgaacgagtaccagaaatacatcgagaaggatgccgcactggagcggcgcttccagccggtgacagtgcccgagccgacggtggcccaggctatcatgattctgcgcggcctgcgcgacaccttcgaggcgcaccacaaggtcagcatctccgaggacgcgatcatcgcggcggccgagttgtccgaccgctacatcacggcgcgcttcctgccggacaaggcgatcgacctgctcgaccaggcggccgcgcgcgtgaaactgtcggccacggcccggccggtggccgtgcaggagctggagtccgaactgcaccagctgcggcgtgaacaggattacgtggccgcgcgcaagcagtacgaccaagccgccgagctcgggaagcgcatcgaagccaaggaggccgagctcaagaagctcgtcgaggactgggagcgggagcgggcctccggcagtgccgaggtcaaggcggaacacgtggcgcagatcgtctcgcgcctgaccggcatcccggtcaacgagttgacggtagaagagcgcgaaaagctgctgcacttggaacaacggctgcacgagcgcctggtgggacaagacgaggcggtccgtgccgtggccgatgccgtgcggctgtcccgcgccggcctgcgtgaaggcagcaaaccggtggctaccttcctgtttctgggcccgaccggggtgggcaagaccgagctcgccaaggcattggccgaatcgatctacggcgatgagcacgccctgttgcgcatcgacatgtcggaatatggcgaacgccataccgtggcgcgattggtgggcgcgcctccgggctatgtcggttacgacgaaggcggtcagctcaccgagaaggtgcggcgcaagccctacagcgtgctgctgctcgacgagatcgagaaggcacaccctgacgtatacaacatcctgctgcaagtgttcgacgacggtcgcctcaccgacggcaagggccgggtggtggatttcaccaacaccatcatcatcgccacgtccaacctgggttcggacattatccagcgacggctgaaggcgcgcggggcggccggcgaggagtatgaaaagaccaaggccgaagtcatggacgtgctgcgcggccatttccggcccgagttcctcaaccgcatcgacgagatcatcgtcttccatgcgctgggcaaggaggagatccgccacatcgtcggcctgcagctcgatcgcgtggctcgcagcgccgccagccagggcgtgacgctcactttcgatcagacgctgatcgaccatttcgcggaagaaggctacaagcccgagttcggtgcgcgtgaactcaagcgcctgatccgcagcgagctggaaactgcgctggcgcgcgagatgctcggcggcggcatcggcaagggcgatcacgccagcgcacgctgggacgacaaggccgaacgcgtggtgttcgaacgcaaagagccaccgcagaccccggccgagccggagcagccggatgccgcgaaggcaagcgacgcatcttga

SEQ ID NO: 220365 - DNA, 282 bp, Klebsiella pneumoniae
atgaaagcgcacctacaggtgattttcacgctcgatgaattggctgcgtacttgaaagtcggcaaacggacgctttatcggctcgccgcgcatggggaaactccggctttcaaggtgggcgggacatggcggtttcgtcaaagtgaaatcgctcagtggatcaatgatcagacccgagccggagcaaagaaggaggtgatgcgcaagcgtgaacagcagaagtcatccgagcagcccgtgtcgcctgggcgcactgcccgtcgcagcaggcaaagggcttga

SEQ ID NO: 220366 - DNA, 699 bp, Klebsiella pneumoniae
atggacagcgcctggttcgtcagcctgcgtgtgccacaggtgcctcgatcaaacaccgatcctcacgttgtagccgagtgcccgcagccccttgctcgtctgcatgttccttggcggaaactcgtctgggcgcgcccagacgacgatttccccgaggctgctcaggccaacgtgcggaattgcccagtcgtcgctgcggatcgcgttccagagtcgggccgaaacacttccgttgccccaggcaacgtagttcaacagtatccgtccggccaacacaccttcccgacaccgccgccgaaggccatggcccatcaagcggattttccatgcgccctcagcgctgtacctacagcaaatctttcaaggcccaggtcattcaggagtgttctgaacccggtgcctccatcgcaaacatcgccttgggctacagcctcaatgccaacctcgtccacaaatggtttcgcctgcttatccagaaaaccacggctatccagccagcgttcatcccgttgccttctcaaatgctcggcgcgggttcgcatgctcaagcgcgctgctgcgatcatgagtttgatccagtcggcccgtaataatgggcacgatccgtatgcctatctcaaggatgtgctgacacggttgccggcgcagcgggcgagtgagattgcagagctgctgccgcataggtggcatccggcatag

SEQ ID NO: 220367 - DNA, 909 bp, Klebsiella pneumoniae; identical to SEQ ID NO: 197182

SEQ ID NO: 220368 - DNA, 966 bp, Klebsiella pneumoniae; identical to SEQ ID NO: 152549

SEQ ID NO: 220369 - DNA, 819 bp, Klebsiella pneumoniae; identical to SEQ ID NO: 152548

SEQ ID NO: 220370 - DNA, 663 bp, Klebsiella pneumoniae
atgaatgttgaaatactttttacctataaagatgccattgccgccggtattttaatgaccctaaaaatgagtctcggcggtatcctgctggggctggcgatcgggctatgtttttttcttctcgaaagacaaaaaccggctttatttaatgtgatatatcatgcatggattaatgtgtttcgcggcacgccgttactggtgcagctctttttagtcttttatggtggaccctatataggtattaatctcgaggcgcaacaggtcggggtactgtgcctgggatgttatggttccgcttattttgcggaaatatttcgtgcgggtcgcaatgctgtctcaggtgggcaagttgaagcggcggcagacctggggttaagtccatggcaaatatttactttcattgtctggccgcaaatgctcgcgcgcattatccagccattgattggccagagcgtcattttggtaaaagagtcgtcggtgctatccattattacggtcggtgaactcaccaataccgccatgaccattgctaaccagacctatgcgatggttgaaatctacgccttaatggccattgtctattgggggatcgcgatcggtatctcccgtctgggtaataaaatagagcgccattattcttattctcaattaagccgaggttaa

SEQ ID NO: 220371 - DNA, 672 bp, Klebsiella pneumoniae; identical to SEQ ID NO: 102389

SEQ ID NO: 220372 - DNA, 849 bp, Klebsiella pneumoniae
atgaaaaataaactgtggctattactttctatgtctgccttacaactttcaccattattgatatctacggcccaggctgatttactggatgatattaagcaaaaaaaagaaatagtgattgccaccgaagcgcgctatgccccttttgaaatgcttgaagatggcaaaatagtcggtctgggaaaagatattctcacggaagtgatgaaaggattacccggggtgaaagtggttcagctggatattccatttcaagggattttgcccggcctggaaagcaaacgatttgactttgtggcaacttctttaaccatcactcgcgatcgtgaagcaaaatttgcttttaccgctcccttttctgacgccagcgtggccattctgaaacgcaaaggggatagccgcattaatagcgccaaagatctccagggcatgattgtcgccagccaggccggggcgccgcaaattgcggtgctaaaagaatatgaagcatcggtacttaaacccaccaccggtcacggcgttaaagaaataaaagcctttattgattataacgaagcctatgcggcattagcggcgcaccgtgttgatgcggttgtgcaatcgctgccgaacctcgcgccgttggtaaagacccgtggtgatacgtttgaaattgtacgcccaccgtttggcccggccacttggtacgcatgggccggaagaaaggatgcggatagcgcctcactggtcaaatttatcagcgacggcattgtgcagttgaataaatcgggaaaactggcgcagctacaaacgaagtggctgggtttttctatggccgttcctgagcaagttccgaccccggcaaactaa

SEQ ID NO: 220373 - DNA, 954 bp, Klebsiella pneumoniae; identical to SEQ ID NO: 102387

SEQ ID NO: 220374 - DNA, 1212 bp, Klebsiella pneumoniae
atgagcatgccagatattattgaattagctaatgggcaaaaagttaaaggaacgttcagctcccatgagatgcagcgtcgactgtcgggattacgggccaccatggaagcagacagcattgatgcagttattttaacctcgattcataatattaattactacggcgattttttatattgtagttttggtcgccagtatgccttggtagtgacaccgagccagtcatttttaattaccaccaatatcgatggaggtcagggatggcgccgcagctacggtgcaaatatcgtttacacggactggcagcgcgataattattaccgtgcagtacgtaaagtggttcctgataatagccggcggattgcactggaaggcgatcatgtaacgatcgaacagcgcgctaaattttgccattacctttctcagacacagtttattgatattgcaccggcgacgatgcgtatgcgcatgattaagtctgccgaagagattgcgctgattaaaattggtgctcaggtcgccgacctcggcggcgcggcatgcgtcgcagcgattgccgaagatgttccggagtatgacgttgccctggcagccacctcggcgatgacccgggaaatcgcgaaacgcttgccgcatattgaattgcgcgatacctggacgtggtttcagtctggcctgaataccgacggtgctcaccatccggtgacgacccgtcgcctcaagcaaggggatattttatcactgaactgttttcccatgattgccggctactataccgcgctggagcgtacactgttcctcggtcagcctagcgatgagcaattgcgtcactgggagatcaactgtgaggtgcaccgccgtgggcaggcgctcattcgccctggcgcccgttgttgcgatatcgccgcctcgctcaatgaaatttatcgcgagcatgacctgctgcagtatcggacttttggctatggtcactccttcggcgtactgagccactattatggccgcgaagccggtttagaattacgcgaggatattgaaaccgttttagcgccgggaatggtagtctcaatggaaccgatgatcatgctgccagagaacatgccgggacacggcggttatcgcgaacacgatatcctggtagtcaccgaaaatgcagcagagaacattacccatttcccttatggtcctgagcataacattatagaaaaatag

SEQ ID NO: 220375 - DNA, 354 bp, Klebsiella pneumoniae
atgaccattgctggccagacattaatccctgtgcctgtattgggagcactgattgggtctatctcagggaagtttctggtcactgttgccaaaaatctggatggcaaaaccagccaggccttgcaggcgaaaatggacgatttcaaccgccgtttgaatgacattgagcagcgggcgcttaagcgtattctgtccgagtttgaggcattaggtgagctgacaactgcagccttcaacgtggaaaacaaccgccagttgctggaagcaagcattacgctggcacaagcttacggtgtcgataaaaacaaaattatcaaaaatgcggacgatttggatgcttttatgatggcgtga

SEQ ID NO: 220376 - DNA, 2649 bp, Klebsiella pneumoniae
atgataactaaacaacctcagcctgttacgcctcattgtgtctcagaaaagatgaactttgatgtagccgaccccttatggcgctacgaaacgtgcagcaccagcatggcggcaaagcaggctgaaggcgtagcgggcctgtggaatttgcttgctgatcagcgggtagcgctgcttgccgatgaagtgggtatgggaaagacctatcaggcaatagcagtgatgctgctaatgtggcaggagaagcctgatgcacgcattctggtcatggccccaaactcgacactgtgtaacaactggaaaacagagttcactacctttattcataagcatcttagaatgaaagataacccctttacttcttataagggaaaggaaaaatacgcgccgcagtttcatggtcggctgaaagaactgagcgcagctgttaaagaaaagtcacactatttctttctgaccactatctattcgttgagcggactggtaccgaaggatgaaaaagacaatgcattttttgtcgctgagaagtatggggagatatatcggcaggaaataaaagacgctctcggtggtacgggttttgatttaattatcatcgacgaagcccactatttccgcaaccgtaatgacagccagcgagctgctgcggcacgtactttctttggggaagggaaagaccggctggcccgaaatgcactgcttctgaccgcaacgccaaatcattctgcggcacggaatatatacgatatattaagttacttcacagatattacgctgaagtatgacatggatgatgtacgttctttgatggagaatttcgccatccgtcgattgcggaagatgtgcgggagcgataatcagcattacagtaaatatgcatatcgtcgggagcaggcaattgccgccagcttttctggtagcgctgaagcagagctgttttttgctttttatcaaaaaaaactggttgaagaactggataaagagaacaaaggcagcggcgacaagaggatgatgtatggatacctggagggttttgaatccactggcaatattgaaaatgagcaggatgaacatgataatgaacatactcaaactgattttagccgggcgctggattcgtctctgttaaccgggctgacgcggcagtttcatgatgtttaccaccgttttccggatcatcccaaatacgatgtactggtcaatgagtgtatgtccgacgatccctttgcatctcaggcactatatagtcgcaagcatctggtctttgtccgccgtatcccgtcggtgcgcgagataactcagcgtattaatgctcgctatgatgagatgatggctgagcgattgattcggctttggcaactgccgccggaggcgttggagaagtggcgcagtacgcgctggtcccgggaagagtatgaaaaccttatatcggaaaagactatcaattctcaggatacagatgagcctgcagagacgtgcttactggacgatgatagcgaagaaaatgaagcaaagctttccagcaggatcgcggcgcttttcgtgaccaaaacgagtggcatactgcggcgcacggactgcagtaacgtcagcctgcgctttcgccgtccggagagtttgttatcgctgtttctggaacctgcccgcgatggtatttcggcaacttatacacagtattatcgcagagagtccggagagcggatgcgtgatagctacagtgatgccgcgagggatattcgtcaggaaatgctggtggagaatgtttcaaactatgcccacccgatgcctacggcctggggaattatgttcgatttacttcctgagcagcatcaacatcagatcaggacatggaaagcgcagccgaacggcatggcgatagtcgagaaccttgccaactatctgcgcattggctacctgtttgccagcccggtgatggtcgaactttactgttggtttactgaatttaaccgtgtatcccagcgcggcgatgcccagcagcgctatctgcaatttattgaatgggtgacgccgaaattcaaggattcgctgatactgcgttatttctcggcagccatccaaacatttgaaacgctgtgtgagaagattgttggccagccgcttgataatagcctttacgcctggcgcgaactcagcagcctgaacagtccggcatggtacgccagcggcgagtctcacaaccgtgagcggcttatacgcggatttaactcgccattcttcccggatgtgcttgtggcgacttcggtgatgcaggaaggcgtaaatctgcatctgcaatgccataaagtccatcattacggcattgcctggactcccggcgataatgagcagaggaatggtcgcgtcgatcgcctctttggccgcgtgaatatgctgcttaaagagagcagtaatgccgagatggttattaattatccttatctcgcaagctcattcgatcaggatcaactggcttcattcattcaccataagtacgtcgtggaggaaaaactggataactgtgaaacgcagagtttcaatcgagaaattgatacgaaagagagtacatcgggctggcgtcggtggctacggaagcctgtcagggatcgcgaagttgaagatccttacccggcaaagtttggtcaccagtag

SEQ ID NO: 220377 - DNA, 1908 bp, Klebsiella pneumoniae
gtgaagctccttgatgcgtttaaagagcaaatagcgcagatggggccgctgaagcgagtctggctcacgacctttaatctcgatatcgcgtttgtcgaaagccggattcttccggcagtcctggatatagacccgcctgtaggccgaatggactatgaagggctacagcgggcattaaatgaaagcaatattgattttcgcgtttattgcgatccgcgaatgatcgccctggataaacctaaaagaacctcaattgcagtttatcccgtatcggtgcgtaagcttgctgcggatgaagcattatatctggacggggagcacagcctgtttcatcccaaggtgttttaccttgaagataagaacaagaaaattgtcctcggagccggaagcgcgaatcttacgctcagcggctgggggcggaatcaggaggccgtggactttcggacggtttccagcaatgcgcagtatcagcagataaaacagtttttcatgggacttgatgaggagcctaaccaagacatattgcctgcagatggtgacatactctatggtgacgatctaaagtggtcgtttattcacagcctcagcgagctcacgctgatggatgcgctaatcgcgaatggtgaactgacaaagctcagcgtctggtctccttatcttgccgataacttgcctgctctgatagcaaagttggctgggccttatctgcgcgttgagctggtgcctgatcttgctgcagggcaattcattcgtacacgctggggagaggagctgcaggcgctaattacggtacagcgattgacgttgtttaaacctcccgccgaacgtgatccgcgattaatgatgacgcacgccaagctgtggctgggagagagttctacgggccgtcacctggcgataggctcctggaacttcaccggaccgggctgcagtagcctgaaggtaaaggggagaaatgttgaagccgggatcgtacatcccgtcagcaaacggaccacattgtgctcgaaggtgtgggccgtgaatgagggggattttgccagtgaagaattgctggaagaggaagccctggtgccgggcagtctcccgcctttcgacttaacggttatttttgactggcagcgctgcgaatacaggcttaccggaaagtggtttctcggcaagccgaaggaggggcaccggctgcttctgcccgggatcaaaacaccggtcagacttacgtggaacacagctgacggtacgctggcatctcctttgctgataaatgtcgagcaaagcgcagcactgctggatagccctttctacacgctgcgtaaaaccggtgaagcggactggactggcactattgttgaaacgggctcagaatatcgccgcgccctgcgctttaaatcactggacgatattctcgacagttatatgaattcctccgaacctgagcaaagcgataatctgatactccgcagcgtggcaggtcatgatgatttattcagcgaggagagcgacgagacagggttcctaaacccggaagctaccagctacttccggctgtttcaggcaatgcagctacgcagtaaagcgttatcagccatggataatagagaacaactacaccgtagcctgttcagcgaacccggttgtctgctggaactggcagaaatggtcaaagcgcgagttgaaaaggatcccgagtcagtgttcaactggtttctgacacatgaggtcaatagcatggttgctctggcacaggcgagatttgatgatatcaataaagaaaatgcatcgagcgccgcagatatttccgcgcatcagtggagctcactgggcgtttctcccccacctctgaaggggaaaaaaagtacccagcgttatctggatatcatccgtaaagagtgtggatatgataactaa

SEQ ID NO: 220378 - DNA, 1164 bp, Klebsiella pneumoniae
atgaaaatacgctatcccaaaaagcagctcaaagagtttatcgcggcaagccttatccacctggagaatatttatatttattcgatgctgggggcggaacagggcgacgtaacgcttgcgggggtgcaggggattaataaggccagggcaaaatggcatacctcagataagaaccctcagctcacttttggccatcagaaggaaagtgaactgctgacaaaccagcttgcgctcggtactaacggccgctataaatcgccaatgatcagtatgcgttttttcacgacgacctacgactatgatctgccggatagtaagcctgtatgggaggccgctgaagcctttattcgccaggtccccgagttacaccaactgcatgctgatgtactgacctatcttaagtcgctgatgtgtgaagcaagcaaggatgccctgacgcccttcttcagtaaaattcccgacagtcttaaaactctctacgccagcgtatttcgcaaccctaaacatgtgggcaactactcgcaggcattctggctcgccagaaccgggctcaataaaaatggtgcaggtgccatttatcgggtactggagcgagaacgaaaataccctgagcaatcacttttgccgatttcgagtgtttttcttgaagcctggaagaatgccgatgcaacgatggaaatggaagaatgcgagcggcaaacgctgggatacattattgaggcagaaccgtttctgtctttaattgacctgatgttcacaggactaaggcggcagagccagcagagcctcgacgacttcgcgctattctggcagcggaaaggactgacgactcagagtttacctcaactgtcgatgaggcttgagcgaaacaatgagctggtagcgtcgctttccggtacacccaacagacgctttcggcaactgcttgcgctagccagtgggccgtctctggaggcgcaggtgcgtgggctgctggcgtatcaccgtggactgatggaagcccgtgggcagtttccatggattatgtttgaaggcaatatcatctcgctgcagactccacctgtagctattgatctggaacgtaaaagtagcgattgggtaaaccattattacataccgcaatttcgtcatttactgaatggattatggggaggtgaagtgtga

SEQ ID NO: 220379 - DNA, 1557 bp, Klebsiella pneumoniae
atgagaattaaaaagcctcatcttcgtccgatagtcataaccttgtccgttggtggtatttttttgacttctatttttatgatagttgtcattatgttttatcaacatgaaaatatagaaaaagatttgcttgatgctaattcatcgtacgctatgaaaatgtcggatgtaatgagcagttatattgaaatggctcagggcgaactagcatatggcgctaagaaaattgaatcaacgactgatgttgaatatcttaaaaatgaggctgataggctaagattgcagtccggcatgtttaattcagttattgttgttagtaatggcgctgttgttctggcaacttctccagaatcacttgatttagttggtgttcacttgaactcaagtgtcagtaaattggctattgagggcaaaaaggcatttatatcgcaaccatacaaatcagttgctgggaatttgattgttttgttgtcacatcctatttatgataagagtggtaattacatagggtatatcggcgggtctatatatctaaaaaaacagagtttatttagcgatgttttgagtcggcatttttttaatggcgacactgaaattaccatcgttagtgatgatggtaatgtgatctttaataaagataacagtgttgttggtcgaccgatggttatgcctgatgatttgaaatcaaagttagcttcgtctgaaagaggcgatggtacctttttttcttcggggcataagtatcttcttggttatgctcatatgaaaaatactgactggaatgtgtttgtttatagtcatgctgacaacgtgaccactattcttattaattatgctaaaaatgtgcttgtgctgctagttgtaataatagttgtgttttcagttgtttcatatttcattgcatcccaaatctcaattcctttagaaaatcttgctatatctaccaatgctaaagatatagagtcctcgctgacttatattaaaggtatcaatgcttggtatgccgaagctgaccgccttaaaaaggcacttttaacgaatgtaaaggtaatgatgaaaagggttaacactctaaatgaagtggcagtaaaagatcccctaaccggtgtaaataatagattggggttttcgaataaaacaaaggattacacgcaaggctcaggggcttcagttattgctattgatgttgacttttttaaaaagataaatgatttcttcgggcatggggtcggagatgaggtgcttatttctttggctcatgttattaattcttgctgccgtagtgaagatattgtttgccggtttggtggtgaagagtttgttatttttctgccgaatacttcagtggtaacagcagagcgtattgcggagcgtatcagaagtgttattgaaagtactgtttttactaatgacttgcgtgtcaccatatctgctggtgtagcaacgcaaactgatccccttagtgggatcgactttttgctgaaaaatgctgatgatgctctttatcaagcaaagggagaggggcgtaataaagtgattgtatatagtgctatttga

SEQ ID NO: 220380 - DNA, 309 bp, Klebsiella pneumoniae
atgagcgagtatatacatgacaagccagagcgaccgaagcgtagacataaggccaaaatcatggtgccagaaagcaatatgcgctggtgttcagacggcttcgagttcggctgcgacaacggtgaaaaactgcgggtcacgttcgcgctggacttctgcgaccgtgggggcatagactgggcagcaatcacgggaggttatgacagttcgacggtgcgggatgtgattctgaaagcgcatcggcgacatgttgccggacacaccagtgcagtggctgacggacaacggttcagcgtatactacgtatga

SEQ ID NO: 220381 - DNA, 1083 bp, Klebsiella pneumoniae
gtgaaaccagtaacgctatacgatgtcgcagagtatgccggtgtctcttatcagaccgtttcccgcgtggtgaaccaggccagccacgtctctgcgaaaacgcgggaaaaggtagaagcggcgatggcgcagctgaactacattcccaaccgcgtggcacaacaactggcgggcaaacagtcgttgctgattggcgttgctacctccagtctggccctgcacgcgccgtcgcaaattgtcgcggcgattaaatctcgcgccgatcaactgggtgccagcgtggtggtgtcgatggtagaacgaagcggcgtcgaagcctgtaaagcggcggtgcacaatcttctcgcgcaacgcgtcagtggtctgatcattaactatccgctggatgaccaggatgccattgctgtggaagctgcctgcgctaatgttccggccctatttcttgatgtctctgaccagactcccatcaacagtattattttttcccatgaagacggtacgcgactgggcgtggagcatctggtcgcattgggtcaccagcaaatcgcgctgttagcgggcccattaagttctgtctcggcgcgtctgcgtctggcggactggcataaatatctcacacgcaatcaaattcatccgatagcggaacgggaaggcgactggagtgccatgtccggttttcaacaaaccatgcaaatgctgaatgagggcatcgttcccactgcgatgctggttgccaacgatcagatggcgctgggtgcaatgcgcgccattaccgagtccgggctgcgcgttggtgcggatatctcggtagtgggatacgacgataccgaagacagctcgtgttatatcccgccgttaaccaccatcaaacaggattttcgcctgctggggaaaaccagcgtggaccgcttgctgaaactctctcagggccaggcggtgaagagcaatcagctgttgcccgtctcactggtgaaaagaaaaaccaccctggcgcccaatacgcaaaccacctctccccgcacgttggccgattccttaatgcagctggcacgacaagtttcccgacttgaaagcgggcagtga

SEQ ID NO: 220382 - DNA, 1347 bp, Klebsiella pneumoniae
atgggctatgttgtgcaaagttcattcggtgaacttgccactgcactagatatgctggcgccaaaaaatgagcgaggagtacagcatcgcgtacggcttcttggcggaccaattagtaccaagtggcgacaattaccgcttttaccagttgaaatacgttcggctatgaaggccacacatgcgagagacatatctgccgttgattcagagagtgcagcttttcgaggtattttagctggagttggcgctcttggtagtacattggctgatatttggattcgaatgggttgggggacatggacttttattgatccagatcggcttcttccacataatttgtctcgccatattgggtttgattgtcatattggagtctcaaaaccccatattattcagcatattgccgaatctatttatccgcatgagcccctccctcaggcgatccataaaagtattcttgatgacgatgatgatattgccaaggcagtgaatgaggctgacttagttgtggatgtcagcaccacctttgaggtgccgaggactctagcgttaaaagatgatatacccagaatagttagtctgtttctgactccatcaggtcagtctagcgtgatgttaatggaggatatagacagacaatgccgaattgatgcaattgaggggcaatactatcgggcaattttgagcagtgagtggggaagtactcacctacagcacaattatggcgatcgttgggtcggtggtggatgtcgggatatttctgtacgtatgtccagtgaatgtattcatgttcatgccggtatcctctcacgccaacttcgccagactgcactcaaaggagatgctcgattgtgtatctgggtatctgatgaaatttcaggcgcgatggatgcacatgaaattgaactccattccgtggtatctataatttctggcgaatgggttgttaaatatgaccagggcttagcgcaaaaattgcagcacacccgtttacaggcactgcctaatgaaacaggaggtgcaattgttggcataacagattttaagaacaaaacgattattctggttgacgtgttccctgaacctatcgacagtaaatcctctccagcctcctttgtccggggagaagcgggacaacaagaagcattagaacgggttcaccagttgaccgctcgtgttgtcgattatgttggcgaatggcactcccatcctcaaggtttttcagcaaaagccagtaatgaagatgataatttaatcaaaaaattacatcagaaaatgcgtgtggagggtttacctgccgtgatgctgattgttgcggaaaacgatatcaatattgtagtcagataa

SEQ ID NO: 220383 - DNA, 123 bp, Klebsiella pneumoniae; identical to SEQ ID NO: 208796

SEQ ID NO: 220384 - DNA, 186 bp, Klebsiella pneumoniae; identical to SEQ ID NO: 10399

SEQ ID NO: 220385 - DNA, 228 bp, Klebsiella pneumoniae; identical to SEQ ID NO: 10398

SEQ ID NO: 220386 - DNA, 450 bp, Klebsiella pneumoniae
atggccatcgtccaggtcatggacttatttgacgaaccaatgaaaatcctgatggttgctcgtcactttggcggggcgtatgtggaagagcaagaacgtgccaataaactgcaggcaaccctgaacatgatgagcgaaccaaaatgcgcgccggcgccagatctctccggagacaatatcggcattgaaagcaaagagcgggagatcgccagccttaagtcttctttaggcatgttaattaccgcctttaaactaatggcaacccataacggcttcaaaatgccagagctaaccggcgatgaacatcccgctgctattcgccagctgcttggtgcgatggcggacaatatggatgaagcgaagagccgtatcgaagacatgatgcgagaacttgcccaccgccacgatctaaatgaccagccgcacaagatgcagcaagtcagccactga

SEQ ID NO: 220387 - DNA, 291 bp, Klebsiella pneumoniae
atgccggataaggccagtatcattgatgcattctttacctatgctcagcgtgaacagcaacgggaagcggaagcgttgattaaggaagaaaacctcaatgaagaggcggcaaggcgctatatccgtacatcactcaaacgggaatatgctatcgaaaatggaacggagttaaatgagacgctaccaaaactcagtccactgaatcctcagtacaaaacgaaaaagcagaccgtattccaaaaaattggggcgtttatcgaaaaatttaaaggggttggaggaaggatttaa

SEQ ID NO: 220388 - DNA, 912 bp, Klebsiella pneumoniae
gtggcaaatggtagctatccagccggaatagttaggcatattaagctatcaggcagaataaaaatgccgaatggaactggaaggccaattcagcttaatggcgtctgcaataaaatcacgctgaaagacctcgaaacagagggtggagacgtacttgtctataatacaacatcgtggacgagtgaaacaggtgagttaaaaatagttctcgataacgtggaaacaaaaggtgttagtcgtttgtttaacgttatgggtggtaatattattcgccttcagtgcgggaataattacataggaacgaaaagctccaactcggcactgtatgtttacgatggagggactgtaattatagagggttacttgaatagccatccagaagcagttgctactgacttagccccatgtgtgacaaaacaaagttctgctgcgatagtttactcattagattttcgcaatcacctagatacggttaatgttgcaacaggacgtcttggtgatatggcctacaatatcaatgctaatgcgacatacggcatcacccccgtatatcataatggttctgtgtggtctcctgtttactacaaggcagaggttcaggttcccgctgataagactcaggcaagctacactcctgtatggaaatatggtcatgtatatcagatgtctccattgggccaaaacgtaacttttgttgcaacttcagactcactgtcatctctcagtgttggcgataaggtatctataattgtcacacaggacagcgtaggagggcgcacggtatcatttagcggcctctttgcatttgcgcagaatatgacggcttcaggtctagcaggaacaacatcggtgtatgattttatctttaatggaagcaaactggtgtgtctctctgcaaattcatgggtgtga

SEQ ID NO: 220389 - DNA, 261 bp, Klebsiella pneumoniae
atgacactcactgcatattaccagctaaggaatacaaaggccgcaggtcttggtttcgaattgctgaccagtgaaccgggagcctttattgtgctggaagaaagcagttatgagaaaccgtatgaaattgcccgctatgggcataatgggagtgcaggcgatcgttcgaatgcgttcagttgcgcgatgaataaagcccgtagcctgcagaattacagtggagcaaagctggattacaacgtttacgaagaaactgcctga

SEQ ID NO: 220390 - DNA, 624 bp, Klebsiella pneumoniae
atggggcctgttaattccggcattctctggaccttgatatgggaatggcggctttatgtttttgttcccatcctgatgatgttgctgtcttatttcaagagcgaaattcttgtcatgtttggtcttttttctttggttttcatgctgtggttggtaggttttttcgatgaaaaaagcgcttcttatatgacgttatttatctctggatttatgacggcaattctgtcgaagagaaaaatatctaaaggacatcaattgatcctgtttttttcaggagcttttttatttgcagtttgccttgttgtgataaggcatgtatataatccagtagttgcgatatctctaacgccaatgttcctttcaatagcaagcggtttctctatttttggcttgcttgccaacgaaaaatttcaacttcttggtgtgactagttttagtgtttatctaaatcacggtgtttttcagtttatatcaaagcattatctgtatgattatggcatgtatttgtggcagggggcatctgttttattaatagcagtaacagcgcctgtactttataaatatgttgaattggcttttcaggcgaaaaaagcatcatcactctcaattatggttaaaccataa

SEQ ID NO: 220391 - DNA, 498 bp, Klebsiella pneumoniae
atggtcttcggtaattattatgtttgtaagcgaataggggtaacagaaaatccatataaatatagaacgatggacggtttaagagggatttgtgcgactctggttatcttccatcattttttctggagaggagggagtagtgatgatttcttttggtcaacggattatcttagcgctaacgtaaaagcaatcgcaatgctcattggacatctgcctgtcgcattgttctttatgatttcaggttttttattttattttgttgctgcatccaaaaagcctttaatccctttttttaaagggaggctgttaaggatttaccctccggttgttttttcgttattaattgcaatgctcgggctggttattgttaatagtgataatacggtttgttctttaggagtgtttaagtatattcctacgccactaggtttttttctggcggagatgtctgtgggtttaagatggggcctgttaattccggcattctctggaccttga

SEQ ID NO: 220392 - DNA, 828 bp, Klebsiella pneumoniae
atgggatacgacgcttccggtgttgttgaagcaaccggaccagatgtgacgctgttcaggccaggtgaccacgttttctatgccggtgtgctcgatcgccagggagccaacgcagagtttcagctggttgacgaacgcattacggggataaagccggcagcactaagttttgaagctgcagcgtcggttcctctgaccggtctgacagcctgggaaatgttatttgatcgtctgcagttgtcagtgaacggagatgctgatcagaccctgttgatgcttggcggtgcgggcggagtcccttgtatggctatacagcttgcccgcactctgagtcgggtgaacatcatcgggactgcctcccggcaggagagtgtcagagcggttcgcgggtttggtgcgcattatgtcctggatcattcatgtgcgcttgcgccacaggttgccagccttgctggactccctcccattacccggattttctcaacgtacaccacgccatctgcctgggaaaatatggccgaaattattgccccacaaggccgtatcggactcatcgacgaccctgaaccactggctctgcgtttgatcaaatttaagagcgtttctgttcactgggaggcaatgtttacccgccccatgcatgctactgcggacatgtctaaacagcatgatattcttaacaaactctcatgcatgctggattccggtaagctcaaacctccgttgctggcagagtatggcaggctgaatgctaaagcacttcgccgggctcatgaggacatggaaaataaaaatgtgaacgggaaaattgttttttcagggttctga

SEQ ID NO: 220393 - DNA, 744 bp, Klebsiella pneumoniae
atgggggattttggaccattagtcggtcaaaaactacctttcagcataaaccaggatgataaggtattacataaggttgtattaagtgatttttcgatatcaaagtttaaagttaccaacgatgattataataaatatctgcaaataacaggaataaaaaaacctcccattaatattctggtaaaagagtacccatccttgcaaaaaggagattattctgttggtgttacctggcaacaggcaaaagattattgtcagtggctaggtaaggagtccgataaaaatattgatttaccgacagaagcacaatgggaatatgcggcaaggtcaagagggcagtatcttcctttttcgactaataatggaaatttcgagcttggttctaatatacctgaacaaaagaaattagatgaatacacagatggttatggttttcctatttatccaattgggaaatatcctccgaatccgctaggtttatacgatatggggctaagtggagccgaatggagtaatgattggtattcaactgattattattcccactcccctgtttatgatcctcaaggtccagttaagggtaatgaaaaagttttaagggggtatgttggcggagatcgtcagtatgccttgactatattcaggcaatcgtcacaacctgtgccaaaatttgctgggcgtgatgattatcaaaagtttggagttagtcctctttttgtatttcgttgcgttattaataaataa

SEQ ID NO: 220394 - DNA, 1077 bp, Klebsiella pneumoniae
atgtcatcatttttgtttattgttttatacttattttctggattttgggttgatgtgcttgctcctggtataaacgaatcaacaagactgatatcgattaacttacttaaaataatggcactatgttgtccattttatctgtgctcggcattaatgaactatgtttcaatggctcataatgatttcaagccaatgtccatgaggaatccagttcaaaatataggcatgctaattggtgtgtttatagcatattattttgaaaaggttgaattcttagcttggggctttacgggaagctatatttatttttttatgtggtcgctggttcgaaaagattcaaaaaaaataataatgctgcctgcaaagtttgagtatgttgaaattaaaggtgtaataggcgatttttggtcgattttaaaacccttattattattgcctcttcttttacaggggaatattacattagaaagagcattgtcatcattagtcagtttagaggcggtatcatcattagactatgctaaatttgtaactgaaacagttgtgttttttttatcagttcctgtcgcttttgcgggcttatctgcttgggttggtttggataccaatatcgttaaaaggaaactcgaagagttgtatacaattttaattgttttggggttttctgtatctgggtttctatttttttatgctgaagatattataaaattattattccagcgaggcgcatttaatcagcattcagtagaggtaacttccgattatttgcgtggtatgtgtattggtctctgggcacaggtcattggttacatttttctaaaagcgttaagcgcgcaattgaaaaataaaaaagtattattctcaatggcaatagcattatttggtaatgctatttttaatttattgacttattcgacttatggtgctttaggcataggactaggttgttcagtgtatggcatattacttcttttaagcagtgcttattttatggggatacacaaaattttattctatcccttcattaaacttttattaggtatgatggtttataatatcttcagcataaaaaaatag

SEQ ID NO: 220395 - DNA, 651 bp, Klebsiella pneumoniae
atgaaaaaagcacctacagctagaattgttaatgctaataaagttattaagattgaaaatggtattgacactgatttatttaagtacagcaaggctctaaaagagagaatacttagtaagttagatattgataaagatgcttttattgttgtttcagcatcaagacttcatttagagaaaggagtagataataacctatcagcatttaaagcctttaacaataaagttgaaaattcctattacctcatttgcggtgatgggcccgaacgagataacttggaaaaattagcaagagactttggaattgagcaaaatgttatattccttggggctctagaacggaaagaattagtcgaagttctttcgtgtgcagatgcgttcttatttttaactaaacgtgttgaaggattacctttaaatgttttagaggctatgagtgtaggtatacctgctataatttctaaacatttaacgtttgcagagtctggtaagttaaaaaaagttgacactaataaccatagcgaagtttccaatttgctaattacgttgtttaaatctaaatctgatattaaagagtcttatattgaagaaagaaatacactaacatatgctgtggataaatattgtcagataattaatgataaacattga

SEQ ID NO: 220396 - DNA, 531 bp, Klebsiella pneumoniae
atgaaatctgcattaatcagcccgctgctggcggggctgctgctgttaaccggctgcgcacagcctgccgcacaggccggaggcggcggtggcggaacaataaaagccatcaaccacacaaaatgggcgatcaaccacttcagtgtcaacggccagtcgggcatcgattcaataggcccgtttcaggggggcggaggcggctgctgcttcagcgtgcccgcccgctggacgccgggtatgacggtgcgcgttgaatgggaaaccgggcagggttcatccgcgggtttcccggggtttgctgatgaggcgaaataccttgcctggaaaaaagggattgatgcccaaaagaggcagcacagcaaaaccgttccgctgcccgactataacggccaggatgtgtgcggcattacggtgcactttttaccctgcgatgacgtgaaggtgaccaccagctgctggtcaccgagaaatgcgaactatccgataaaagagcccgtcaggatgaaggagcccgccgtatgtccgaagtag

SEQ ID NO: 220397 - DNA, 168 bp, Klebsiella pneumoniae
atgtacagaatgaagcagttgttgggagattcactgacgctgcgtgactacgatggtcaggtagcggaagctatggccatggtgcgtgcgttgaacaggatgacaaaggctgggatgccagaaagcgtgcgtattgcggctttgttgaataaatcgaacttttgctga

SEQ ID NO: 220398 - DNA, 483 bp, Klebsiella pneumoniae
atggcgattaccgttgatgttgaagtggcgagcaatacgccacatccggcgcggattggcctgacctgccagctggcgcaggtagcagagcgggtaaactggctcggattagggccgcaagaaaactatcccgaccgtcttactgcggcctgttttgaccgctgggatctgccattgtcagacatgtataccccgtacgtcttcccgagcgaaaacggtctgcgctgcgggacgcgcgaattgaattatggcccacaccagtggcgcggcgacttccagttcaacatcagccgctacagccaacagcaactgatggaaaccagccatcgccatctgctgcacgcggaagaaggcacatggctgaatatcgacggtttccatatggggattggtggcgacgactcctggagcccgtcagtgtcggcggaattccaccttagcgccggtcgctactattaccagttgctctggtgtcaaaaataa

SEQ ID NO: 220399 - DNA, 141 bp, Klebsiella pneumoniae
atgtacagaatgaagcagttgttgggagattcactgacgctgcgtgactacgatggtcaggtagcggaagctatggccatggtgcgtgcgttgaacaggatgacaaagggtgggatgccagaaagcgtgcgtattgcctga

SEQ ID NO: 220400 - DNA, 378 bp, Klebsiella pneumoniae; identical to SEQ ID NO: 182323

SEQ ID NO: 220401 - DNA, 222 bp, Klebsiella pneumoniae
atgctgccacgcgtggaccgtggtaatcagcaccgcgtcggcaagcgtatctgccgtgcactgcaacaacgctgcttcggcctggtaatggcccgccgccttccagcgttcgacccaggcgttagggtcaatgcggccaatgtcattatccagcggtgcacgggtgaactgatcgcgcagcggcgtcagcagttgttttttatcgccaatccacatctgtga

SEQ ID NO: 220402 - DNA, 522 bp, Klebsiella pneumoniae
atgccgggtggcggctgcgccttacccggcctacaaccccaaatcaccgctggcgcaggggctgctgaaactgccggtgctggcggcctcaacatcgctgagacgttcccggaaggccggggcagcccgcatggatgcgggctgagggccgtgttttgcagggacgctgcctcggcccgacccgaagcctgcagggataagtcgaaggcaccgcgcagcggcgatgttgctggccggagcccgggggtacagggggcggcggcgactggccgccccctgtgcgctcccagcgccatgactgccataacgcagacaattaaccgggagcgcaatcggcccggaagtaacatagaagctgtagccctgctaagcgcagcgcgggcagggacatttccggttgcgccgatatttcgccgggtggcggctggcgccttacccgacctactcgttaggctccgactgtctgtaggcccggcaagcaacttggactgcaccccaaaagttggacacccaactgagtaa

SEQ ID NO: 220403 - DNA, 591 bp, Klebsiella pneumoniae
atgcttaaaatgagatttttcgacattttgatagcatctatatttctgataattgcttgtccgttttttatcattctatctattttaatatggacatcaggatcaaagccatttttcaagcataaacgagttggcctcaacgggaaggaattttactgtttaaaattcacatcaatgaaaggcctgaatgaaatagaagaagcagaacaagagcgagttatatttgaactggatcattttggcaaagtcaataatgatccaagagtaacaaaaataggtaatttcatcagaaagacaagtattgacgaaaccccacaattttttaatgttctaaaaggagatatgtcgctgattggccccagacctattactaaggcagagatgaagatttatggtacaaagataaagtcatacttatcagtcaagcccggaatcactggattatggcaaatatcagggagaagcaatacaacatactctcgcagagtggcaattgatcattattacgcattaaaaagaacaagaaggatgaaaataatgataatgatgaaaaccgtatatgtcgttttatttatgaaaggggctcaatag

SEQ ID NO: 220404 - DNA, 240 bp, Klebsiella pneumoniae
atgcttcgacagtcagacatcgccgcggctttccgcgagtcggtattgcgcaacgccaaaggataccagtaccttcacacccgcgacttcgttactgcgcttcgccggcgcggcattcactttaccgaggtggaggcgaactcctggatcgctcgcgagcagacgtattttgtcgataagacgccggaccatagcgaaaacagactgtggatgatggccaacatggggagggtgatctaa

SEQ ID NO: 220405 - DNA, 318 bp, Klebsiella pneumoniae
atgggctttccttcacccgcgacggactacgtcgagcagcgactgtccgttaactcgatctgcaatgtcgggcctaacactcgcgttttcgaaagggatagcggttatgttgtgctggatatttccctgaagccaaagcagggtagtcaggttcttatccagcacggcggcgggactgaacttgccacgctgagagggcggtcgctgataaccgaagatggcgaagcaatagaaggcgaggccctggacgatgttactgtcatcggcgtcgtgacgtttactatctgcgatgttcgccaggacaacgcggttgtttag

SEQ ID NO: 220406 - DNA, 1488 bp, Klebsiella pneumoniae
atgtcgcgtaatactgaagcaactgacgatgtcaaaacctggaccggcggcccgctcaactacaaagagggcttttttactcgcctgcaaaccgatgagctggccaaaggcattaatgaagaagtcgttcgggctatctcggctcgccgcaatgagccgcagtggatgttggagtttcgtctgaatgcctaccgggcgtggctggaaatggaggagccgcactggctgaaagcgcattacgataagctgaattatcaggattacagctactattccgcgccctcctgcggcaactgcgatgagacctgcgcctccgagcctggcgcggtgcagcagaccggggccaatacctttctgaccagcgaggtggaagaagcctttaaccagctgggcgtgccggtacgcgaagggcgcgaggtggcggtggacgcgatatttgactcggtgtcggtggcgaccacctaccgagaaaagctggccgagcaggggatcatcttctgttctttcggcgaggcgatccacgatcatccggaactggtgaaaaagtatctgggcaccgtagtgccggggaatgacaacttctttgccgcgctgaacgccgcggtggcttcggacggcacctttatctatgtgccgaagggcgtccgctgcccgatggagctgtccacctatttccgcatcaacgccgaaaagaccgggcagtttgaacgcaccattctggtggccgatgaaggcagctacgtcagctatattgaaggctgctcggcgccggtgcgcgacagctatcagctgcatgccgcggtcgttgaagtcatcatccataaagacgcggaagtgaaatactccacggtgcagaactggttccccggcgataacaacaccggcgggatcctcaacttcgtcaccaagcgcgccctgtgcgaaggggagaacagcaaaatgtcatggacccagtcggaaaccggctcggccatcacctggaaataccccagctgcatcctgcgcggcgataactcgatcggcgaattcttttcggtggcgctgaccagcggccatcagcaggcggacaccggcaccaaaatgatccatatcggcaagaacacccgctcgaccatcatctcgaaagggatctccgctggacacagccagaacagctatcgcgggctggtcaaaatcatgccgaccgccaccaacgcccgcaactatacccagtgcgattcgatgctgatcggcccggactgcggggcgcataccttcccgtatgtagaatgccgcaacaacagcgcccagctggagcacgaggcgaccacctcgcggattggcgaagatcaattgttctactgcctgcagcgcgggatcagcgaagacgatgccatctcgatgatcgtcaacggtttctgtaaagacgtcttctccgagctgccgctggagttcgctgtagaggcgcaaaaattgctggccattagccttgaacatagcgtcggctga

SEQ ID NO: 220407 - DNA, 747 bp, Klebsiella pneumoniae
atgttaagtattcaagatttacacgtcgccgtcgaagataaagcgatcctgcgcgggctgaaccttgaggtgcgcccgggagaggtccacgccattatggggccgaacggctcaggcaaaagtacgctttcggccaccctggccgggcgtgaagattatgaggtgactggcggtcgcgtcgaatttaagggcaaaaacctgctcgaactcgctgcggaagatcgcgccggggaaggtatctttatggccttccagtatccggtagagatccccggcgtcagcaaccagtttttcctgcagactgcgctgaatgccgtgcgcaattatcgtggccaggaggcgctggatcgtttcgatttccaggacttaatggaagaaaagatcaagcttctgcagatgccggaagatctcctgacccgctcggtgaacgttggcttctccggcggtgagaaaaagcgcaacgatattctgcaaatggcggtgcttgagccggagctgtgcattctcgatgaatcggattcggggttggatatcgatgccctgaaaatcgtctcgcagggagtgaatgccctgcgcgacggcaaacgcgcctttatcattgtcacccactatcagcgcatccttgactatatcaagccggactatgtccatgtgttgtatcaggggcggattgtgaagtcgggcgatttctctctggtcaaacagctggaggagcagggctatggctggcttaccgaacagcagtaa

SEQ ID NO: 220408 - DNA, 315 bp, Klebsiella pneumoniae
gtgaatgccttcacggagtcgctggcgctggagctccgtgcttttaatattcgcgtcgggctgatcctcccgggacgcgccccgcagacccggttcggggaaaacgcccgccggacgatgggacagctccccgagagctatgcggcgctcggccagcagatcttcgacagcatgcaggataacgccagcgtgacgcaggcgaccgatgtcgctcaggccgtctggcgaatggtgcacgatcctgatgccccttcgcggctgccggcaggggaagacgccctggcgatggcgcaggccagtcatcgccttgtctga

SEQ ID NO: 220409 - DNA, 621 bp, Klebsiella pneumoniae
atgaaagagtatctgcctgaaaccgcctcgcagacggcgggaccctatgttcatatcggcctggcgccggacgccgcaggctttcatatttttgagaaaaattttggcccggtcctcactaccgccgataccgccggggagcgcatcaccattgaaggccgggttatcgacggctccgggacgccggtccgcgatgtgctgctggagatctggcaggccaacgccgcgggtcgctataaccatcctgacgatcgtcaacagcagaaagccgtcgacccggccttccgcggctgggggcgtacctgctctgatttcacctccggcatttggcgctttgaaaccatcaagccgggcccggtggtcggtcgcgatggccggctgatggcgccgcacgtcaacctgtgggtggtggcgcgggggatcaatattggcctgaatacgcggatgtactttgccgatgaacacgaggccaacgccagcgacccggtgctgaatctcatcgagtgggaggtgagacgcaaaaccttaatcgccgagcgcgaggttcgcggtacggaagtggtctatcgttttgacattcatctgcagggcgagaacgaaaccgtctttttcgatatttag

SEQ ID NO: 220410 - DNA, 741 bp, Klebsiella pneumoniae
atgaacgacaaatggtccccacgtgaggttgtccatcgcgattacagtagccacccgcccgcttacgcgccgggctataaaaccagcgtcctgcgctcgccaaaaaacgccctcatctctctgcagaactcgctgtcagagatcaccggcccggtatttagccgcgacgacctcggccctctggataatgacctaatcctgaactatgccaaagaaggcctgccgatcggcgagcggatcatcgtccacggttacgtgcgcgatggattcggccgaccgatgaaaaatacgctggtggaagtctggcaagccaatgctggcggtcgctaccggcataaaaaagatcagtatctggcgccgattgacccgaactttggcggctgcggccgggtgcttaccgatgaaaacggctattactgttttcgcaccatcaaacctggcccctacccctggcgcaaccaggccagcgactggcgtccggcgcatatccatttttcactctcgggcgacgcctgggcccagcgcctgatcacccagatgtattttgaaggcgacccgctgattaagcagtgcccgatcgtcaggactattaagaatgacgacgccgtgcgcacgctgatcgccgagctggacctgcacgccgccgtaccgctggattgtctggcctaccgcttcgaccttgttctgcgcggccaccgcgccacgctgtttgaaaatcgcactcagggggccgcccgatga

SEQ ID NO: 220411 - DNA, 315 bp, Klebsiella pneumoniae
atgcaacatccgtcgaaaccgttggcgaaaacccgtcagggaacgctggccgggagcgcagaacaggggattcatatctggcgcggcattccgtacgccgcgccgcccgtgggcccgctgcgctggcgcgcgccgcagccagccgcccgctggcagggggtacgtccagccgagaccttttccgccgccagctggcaggacattgactactgccgcgagctcggcggcggcgatcctggcgccttcagcgaagactgcttatatctcaacgtctgggccccggccagcgcagcgcagcgcagccgctgccggtga

SEQ ID NO: 220412 - DNA, 1413 bp, Klebsiella pneumoniae
atgaaaaagtatcaacagttggcgcagcaactgaccgagcagatcgcccttggcgtctggttgcctggcgatcggctgccgtcgctgcgcgagcaggtgatcagcagcggcatgagctttatgaccgtcagccatgcctatcagctgctggaaagccaggggcgcatcgtcgcccgtccgcagtcgggttattatgttgccccccagccggtgaagctccgccagccggcgccgcctgcccaggtcactcgcgatgaagccgtcgatatcaatacctatatctttgaggtgctccaggccagccgccaggcgtcgatgctgccctttgcctcggcctttccggacccgcgtctcttcccgctgcagcagctcaaccgctcgctggcgcaggtgagtaaaaccgccaccgccatgagcgtcattgagaatctgccgccgggcaatgcagaacttcggcatgccattgcccgtcgctatgccctgcaggggatgaacgtctcgccggacgagatcgtcatcaccgccggggcgctggaggcgcttaacctcagcctgcaggcggtgaccgagccgggagactgggtggtggtggaaaacccctgcttctacggcgccctgcaggcgctagagaggctgcgtttgaaagcattgtcggtagccactgacgtcagggaaggcattgatctgacggcgctggaggcggccctgcaaaactatccggtgaaggcctgctggctgatgaccaacggccagaatccgctcggcttcaccctcagcgctgaaaaaaaagcggcgctggtggcgctgctggcgcgctataacgtgatgttgatcgaagatgatgtctatagcgagctctattttggccgcgaaaagccgttaccggcgaagttctgggatcgccaggagatgacgctgcactgcagctcgttctcaaaatgtctggtacccggctttcgtatcggctgggtggcggccggcaaacaggcgcggcggatccagcagctccagctgatgagtacgctttccaccagttcgccgatgcagttagccctggtggattacctgtccaccaagcgctatgacgcccacctgcgccgtctacgtcgtcagctggcggagcgtaaacagcaggcctggcaggcgctgctgcgccatctgccgccggaggtcatcgtccaccacagcgacagcggctactttctgtggatcgaactaccggaaggggccgacgctagcgcacttagcgcccgggcgctggcgtcgcacatcagtattgccccagggaaaatgttctccacctccgacaactggacctcgtttttccgttttaataccgcctggggctggggggaacgcgaagagcagggggtgaagcgcctgggggagcttattcgcgaacagcttgcctga

SEQ ID NO: 220413 - DNA, 615 bp, Klebsiella pneumoniae
gtgacactgtcacttaagatcgccgccctgtcgaccgccattgccttagtgcttggcacgctggctgcaggagccctgtggcgcagcgccttttttggcaaaaatgcggtgtcgctactgctgctgctgcctatcgccctgccggggatcattaccggcctggcactcctgacggcgttcaaagcggtcggccttgagcctggcctgctgacgatcgtggtggggcacgcgaccttctgcgtggtggtggtgtttaacaacgtcatcgcccgtttccgccggacttcgtggagtatggtggaagcctcgatggatttaggcgctaccggttggcagacctttcgttacgtagtgctgcccaatctggggtcggcgctgctggcggggggaatgctggcattcgctctgtcgtttgatgaaattatcgttaccacttttaccgcggggcatgaacgcaccttgccgctgtggttgctgaatcagctggggcggccgcgagatgtgcccgtcaccaacgttgtcgcgctgttggtgatgctggtaacgacgataccaatcttaggggcctggtggctcacccgcgacggcgataacgacgccggaaacgggaaataa

SEQ ID NO: 220414 - DNA, 210 bp, Klebsiella pneumoniae
atggagtgccggttgctgccggcgacggcggcccagacccagtacgataccctgttcggggaggtggtctctgccgccgccgatgagcgcgcgttcgtcaccggacgctggcaattcgacgacgataagctcaataccctgcatcatcttggcaccggcaattttgtcgccagcggccgtcatgtgcgggcaaactccctcgacgaataa

SEQ ID NO: 220415 - DNA, 882 bp, Klebsiella pneumoniae
atggatattaagcaactcaagtatttgatcgcgctcgatcagacgcgccattttggccaggcggcggcggcctgtcatattacccagccgacgctctccatgcgcattcgtaacctggaagaggagctgaacctgacgctgatccagcgcggccaacgttttgaaggttttaccccggagggagagcggatcctggcctgggcgcgggcggtgctggccgctcatgacggcctggcggcagaggcggccatctgtcgcgggcagatggtcggccagctgcgggtcggtatggtgccgctggcgagcctcaatccgatgcagttgattaaacccctggcggagaaatatccggcgctgcagttcagcctgttgtcgatgacctcggagcagattatcgatggcgtcagccgtaatcagctggatctggggatctgttatctgcagcatctggatgaaggtcagttcaagattgctcgcttgccgcaaacccggatggggctcctgcacgataaacgccatttcgacttcagcgccgggacgccgggatgggagacgctggcgacgctgcccctcggctttctgaccaaggggatgtattaccgggaatcgattgaaatcagctttaaggccaaagggctaacgccgaggtatgtctttgaaagtgattcgacgtttcagattatccaggcggtgcaggcggggatctgctgcgccattatgccgcttaacaacggcctcgaagcgctaagcgataatcttgaaattctgccgatcgccgaaacccatgttgattcacagctggcgctgattatgcgccagcaggaaccagtctcgaccctggcggaaaaatgcttcgccgaggcgcaggggatatttggctga

SEQ ID NO: 220416 - DNA, 579 bp, Klebsiella pneumoniae
atgaagccaaaacaagcggacattctccgccacgccagcacgctgtttaatcgcgaaggatatcagtcgcccagcatcgagcggattgctgaacatgctggcatctccaaaatgaccttctaccgctattacgccgataaagaggcgctcattctggctatcctcaagcagaaagagagcgaatttatgcaggatttggcgcagatcaccgcggataaacccagcgcgcgggaaaagctgtttgccgtgttcgactactaccatcgctggtttacctgcgaaacgttccacggctgcatgtttacccgcgcgctgtttgaatatggcgcgtcatcgccggcgatccgggagcaatgctcccgatttaagtcgctcctctggcagttcttccgcgatatcctcctgcaggtgttaaaaccagagcctgccgagcgggtcgccatgatgatggtgatgctcatcgatggcgctatcgccgcccagcaggccgagtccgccgaatgtcgggagatcccgccggggatgaccgcctggagcgcggccaaagcgcttatttactcagaaggcggtacgctgtga

SEQ ID NO: 220417 - DNA, 321 bp, Klebsiella pneumoniae
atgaaaccacgtctcgccgcgctctctgcgctgagcctggcgttgctgctgaccggctgcactcagtatacctgggtgaagccgggtttaagcgatgccgaaatgcataaaaagctcaccgaatgtgaagcgcaggccctggtcgatctccctccggataacgtggtgaccgggtccagttcagaaaaaacggacaaaaaacataagaaacaggatgttgaaacaagctatacggtagaagacgcgaatgaatatcagcgggagaccttagtcgacagctgtatgttcaaaagcggctgggataaagtcgaagtgcaatga

SEQ ID NO: 220418 - DNA, 1293 bp, Klebsiella pneumoniae
atgcttaagcatatggaaaaactcgctgaactgaaacgcgccaaactgctggcgctgtcgctgctgctgattgcagccgccatttttatcactaccctcgcgctaccaccgtcgccttgggtcggtgcgctaaaagctatttccgaagcggcgatggtcggggcgctggccgactggtttgcggtcgtggctctgtttcgccgtattccgctgccctttgtcgcccgccatacggcgattattccgcgcaataaagaccgcatcgccgacaacctcggccgctttgtcgaggaaaagttccttgataccccgtcgctggtcgcgctgatccgccgctatcagccagccctgatgctcggcaactggttcagccagccggagaacgcccgacgcgtcggccagcacctgctgcaggtgatgagcggttttctcgaactgaccgatgacgcgcgcattcaacgtctgctgcgacgcgcggtgcataaggctatcgataaggtcgacctgacgcagaccagcgccatgatgctggagggactgacccgcgacaatcgccatcaaaagctgctcgattcgctgataaaccaactgatcgccctgctgcagcgcgacagctcccgcgcctttatcgcccgcggcatcgtacactggctggagaccgaacacccgctgaaggccaaactcctacccaccgagtggctcggcgagcacagcgctgagatggtcaccgacgcggtgaataccctgctggacgaggtgactcacgaccgtacgcatcagatccgtcaggcttttgaccgcgccgtgcaaaagcttatcgataacctgaaatccgacccggatatggcgcagaaggccgataacatcaaagcctggctaaaaaatgatgagacctttaaccactatcttggcgaagtatggggcgacctgcgcggctgggtaaaaaacgatatcagcagcgacgactcacgtattaagcagcgtatcgccgaggcggggcagtggttcggtgaaaccttactccgcgacgacgcgctgcgcgaatcgcttaacgaacacctggagcaggcggcgcaccgggtggcgccggagttcgccgccttcctcacccgccatatcagcgacacagtgaagagctgggacgcccgcgatatgtcgcggcagatcgagctcaatatcggtaaagatctgcagttcatccgcatcaacggtaccctggtggggggaaccatcggcctgttgttgtggctgctctcgcagatcccctcgctgctgcatctgcatattggttag

SEQ ID NO: 220419 - DNA, 930 bp, Klebsiella pneumoniae
atgccttatgatttatcgtctcgattggttataggtttagcatcaagtgcgctttttgatttagatgaatcagatgaaatatttcgaacgaaaggtgaggatgagtacaggaaatttcagcgtgaaaatcaagatgtaccattagggaaaggcgttgcattcccatttattaggcgcctgttaactttgaataaaatcaataaaagcaaccctcctgttgaggttattcttttatcgagaaacgatcccgatacaggtttgcgggttatgaattcaatcgaaagccataatttaggtataacacgagctgttttcctgcaaggccgttcgccccataaatatataccagcattggatattgagctatttctttccgcaaattctcaagatgtgaatcaggccgttatggctgggtatccggcaggtcagattcttaaggggaatattaaggatgatgttcaggatcatgaactcagaattgcattcgactttgatggagttatcgcagatgattctgcggaagctgtataccaaaaaagccatgtgcttgcagattttcataattatgaagctcaacatgtcaatgagactcataatcccggaccattgaaagattttcttcaacgtatatctgatattcagaagatggaagaggaattagagagagaagatccagcgtatagacgtattcttcgcatttcaattgtaacggcgagaaacgcgccttcacacaagagaatgatcaatacgatgagagcgtgggggatcaatgttaatgaagcattctttatgggcggggtagaaaagaacaaaatccttgaaattatgcagccacatatgttctttgatgatcagcgtctccatcttgaaccttcagcatctgttttaccttctgtgcatataccatttggtgtgacgaataaaagataa

SEQ ID NO: 220420 - DNA, 906 bp, Klebsiella pneumoniae
atgagactaactgtacctgaaatcgattgtagcgaaggatttacccccgaaaatgatattttcaataggaaacagttcagcatccagttagaaaatataattgaaaatagtgacgatgataaccttgtcatcgctttaaatgataagtggggtaatggaaagaccacatttctaaaaatgtgggaggccgaaatagctaagagtaataatttaagcgttgtatactttgatgcttttcaaaatgactttcaaacagatccttttatagcaatagcatcgcatatatatgctaaaatcgatgatgaagacgcaaagaaaaagtatctcgccgcaaccaaaaaagtagcatctgtactattaaaaacgacactaaaagtaggtgtaagtgcattgacacttggagttgtaaaaggttctgatctcgaaggtgtaggtagtgagatcagctctgccattaatgatcctttagaaagttacatcgaagaaaaaataacacaacttgataaagaaaataatacacttgagcacttccgctgtacacttagtgagatcgccgcagaaaaaaaactggtcttcataattgacgaattagaccgtgcaagacctaactactcacttgaactacttgaaagaattaaacatgtatttaatacaaagaatatattcttcgttctttccacagacaaagaacaattcatgaaagtcatacaaaaaacttatggctcaatagatgcaaacatgtatttaaataaatttgttcatttatggatgagtctgcccaaaaatgacagtcctgaaagaaaatcgtatgttctttcaaaatatataaattacattaacaagagaatcttaagcagagatttaaatcttcagtcggctttgttgaataaatcagatttcgggtaa

SEQ ID NO: 220421 - DNA, 711 bp, Klebsiella pneumoniae
atggcaaaactcactaaaaaagaaacaaaactacatcaacaagtactggatcttgtctattccgataagccactcacatacgacgaaaaagaattcatccttcagaactacgccggggatgccgttggggctactggtgcttttttcactcccgaaatgctctcatgggatttcatcattgatgccgggtgtacaggacgctgcattgaactatgtgccgggatagggcggttgtcattcgatcagtatcaacgcaaccgaccagaacatatcacctgtgtagaactgaatcccgaatacgtcatgattgggcaaagggtacttccagaggctgaatggatcgttggtgacgctctccagtactctaccagtgaacgctacgatgtggtctatggcaatccaccattcggtaagatcaaaacctcagaggcgattacaggccgttatacgggtactgagtttgagtacaaggtgatcacacatggagcgacattagccccttatggcgtatggatcgtaccgcaaggttcagcaggatttcagtacagtggagtacattgctgcgagcgtagggattctgcgaagtacaagaagtttgttaacgatacgggatggtcacttgagccgggatgcggtatcgatacttcaatctataaggacgaatggcacggaacgagcgttgtgtgtgaggtggttactgttgagtattaa

SEQ ID NO: 220422 - DNA, 564 bp, Klebsiella pneumoniae
gtgaaccatttaatgatcgacctggaaactatgggtaataaacccaatgcccctatcgtctccatcggtgcggtattttttgagccgtcaactggtgaacttggcgatgaattttatcgcgttgtcagcctgaaaagttcaatggatgccggtgctgttcctgaccctgacaccattatttggtggatgcagcaaagcgaagaggccagatctgctatttgcgctaagaattcagcgatggctatctcaactgcactcattcaattagtggtatttattcgtggtaattccgagcctggccgagttcaggtatggggcaacggtgcaacttttgacaacgtcatcatgcgagccagttatgatcgtgtagatattccctgcccatggcattttgccaatgatcgcgatgtgagaactatcgtcgaattaggccgcaccattggcattaacccccggcgtgatattccgtttgaaggtgatatgcataatgctttggctgatgccaaacaccaggctaaatacgtttccgcaatctggcaacaacttttacttaaacattggtga

SEQ ID NO: 220423 - DNA, 735 bp, Klebsiella pneumoniae
ttgcgagagctacaggaacgccgcaaggccgacagcgagccggtggcgcttcaacctgagctggcaaaagttatctatcacttccgtgactggaatgaaggatttccggttgagcggttcaaggccgactacgtcattagttggatgctggcaaattatccgccagcgcaaccagcaaaggaccgagagcaggtacgccgcgagcacgcagagtggtcacaggcaacattcggcaatgtgggcccggttggcccgctgaatcacctcagcaaagaagcactggaagccgctgaacagcctggcgacctgtcggaatgggctgatatgcagttcctgctgtgggatgcccagcgccgggctggtgtcactgatgagcagattacccaggcgatgatcgataagctggcagtcaataaacagcgcaaatggccggagccgaaagacggagagccgcgcctgcacatcaaagagcagccagcgccagtagtgcctgatagttacgtgatggtaccgatgaggttaactgctgagaacggtgcaaagggggcgctatccggtgagttttcagaaaccaagttcgtaaactgcccggaatgctttggtgatgatgaatgtgaaacctgtgacggcagcgggagaattgaaatcacggtacctgtcacctggacgactatcaaagaaatctgggctaaaggcgttgagcatttttcagccacagcgcaggagaataattaa

SEQ ID NO: 220424 - DNA, 327 bp, Klebsiella pneumoniae; identical to SEQ ID NO: 137733

SEQ ID NO: 220425 - DNA, 1248 bp, Klebsiella pneumoniae
atgaacagtaagaccgcatcccacaccgcgctggatcgcagcgatgagcgcgttcgtcacgacgaggggctgttcggcgccctacgcgcgcagataacccgcatcaaaaccggcgatctcggcaccgcgccggtgatagccgggctgattgtgatttccctggttttcaccttcctcaacccggtctatatcgcgccgaataacctggtgaacctgctgtttgactgcgcgacggtcgggtttatctcgctcggcatcgtctgcgtgctaatgcttggtgagatagacctgtcggtcggctccatgagcggcctggcatcggctatcgtcggcgtgctgtgggtgaacgcaggatggccgctggcgggagccatcgccgtggcgctggcctgcggcgtggccgtcgggctggtctacgcgctgctgtatacccgcgtcggaatgccgagtttcgtcgccactctcgccggcctgctggcgctgctgggtatgcagctgtatatcctcgggccgagcggcagcatcaacctgccctatacttcgccgctggtgcgctttggccaactgctggtgatgcccggctggttctcacacctgatggcattgctgccagggctggcgatccttatttttggcctgaaaaaacgctcgcggcgcctggcggccaatctctccgccgagggagtcagctcgctagtggcgcgcgcgatcgcgctgacgattatcttcgaggccgcggtgctttacctcaatcaggggcgcggtattccatggattttcggtctctttgtcgcctgcgtgatgatcctcaactacgcgctgaaacggacaaaatggggtcgctcgatgttcgcggttggcggcaaccgtgaagcggcgcgccgttcgggcattaacgtgcgggcgatttatgtgagcgctttcgtcctgtgtaccacgcttgcgaccttcgggggcattctcgcggcgtcgcgactggcttccgccagccagcaggccggcaccggcgacgtcaacctcaacgccatcgccgcggcggtgatcggcggcaccagcctgtttggcggacgcggcagcgcctggtccgcgctattggggatcatcgtgattcagtcgatttcaaatgggctgacgctgttgaacctgccgtcttcgctgcgctatatcattaccggcgcggtactggcgattgcggtaatcattgattctctggctcgccgttcacgcgtgtcgcacggccgcgcctga

SEQ ID NO: 220426 - DNA, 810 bp, Klebsiella pneumoniae
atgccgcaacaacaacacaactccgccgccgggcggccaatactgcaactgcgcaacgtctctaaacattttggcgcggtgtccgcgctgacggatatcgaattagaagtccacgccggcgaggtggtcgcgctggtcggcgacaacggcgcgggcaaatccacgctggtgaagatcctcgccggcgtccaccagccgacctccggcaccattgagtttgacggcaaccccgtcaccctcgatagccccggcaaggcgctggaatacggtattgccacggtgtttcaggatctggcgctgtgtgaaaaccttgatgtggtggcaaacctgtttctgggtcatgaaatttcgccgttccagctcgatgaagtggcgatggaagtgaaagcctggacgctgctgcaggagctggcggcacgtattccgtcggtacgcgaaccggtggcatcgctttccggcggccagcggcagaccgtcgccatcgcccgttcgctgctgctgaaccctaaaatcattatgctcgatgaacccaccgcggcgctgggcgtcgcgcagaccgcggaagtgctcaacctgattgagcgcgttcgcgagcgcgggcttggcgtcatcatcatcagtcacaacatggaagacgttcgcgccgtcgccgaccgtatcgtggtgctgcgtctcgggcgcaacaaagggatcttcacgcccgatgcttctaatcaggatctggtcgccgcgatcaccggcgcgacggaaaacgccgtctcacgccgggttgaacgtaaatcacagccaacgacttccggagcgatgtaa

SEQ ID NO: 220427 - DNA, 1047 bp, Klebsiella pneumoniae
atgaattaccgtaatatttttatcacactcgccgcactatccggcaccgtcacggcttcagcctggtctgcagagtccgccaccgtggcctttttaatgcccgatcaggcctctacccgctatgaacagcacgacttccccggttttaaggcggaaatgagcaagctttgcgcggattgtaaggtcatctatcagaatgccaacgccaacgcgtcgctccagcagcagcagttcaactcggttatcgcccagggggcgaaagtgatcgtcctggatccggttgactcttccgccgccgccgcgctggtcgaaaacgcccaagcgcagggggtcaaggtcattgcctatgatcgcccggtaccagacaaaccggctgatttctacgtctcatttgataacgagggcattggctacgccatcgcaaaatctcttaccgaccatctgaaagcgagcggcgtgccgcaggatgccggcgtgctgcaaattaacggttcgccaaccgatgccgccgcagggctgatccgcgacggtatccatcgcggattgaaagagtccggttacaaaacgttggccgaattcgacaccccggagtgggcgccgccgaaagcccaggagtggaccgccgggcaggttacccgctttggcgacaaaattaagggcgtggtcgcggcaaacgacggtaccggcggcggcgcaattgccgcctttaaggctgccggcgtccagccgctgccgccggtcaccggcaatgacgccactatcgccgcgctgcagctgatcatcgctggcgatcagtacaacaccatctccaagccatcggagatcgtcgccgcggcggcggccaaagtggcggttgattttatccagggcaaaaaaccgcaggccagcaccaccctgtacaacaccccttcccagctatttaccccggaagtggtgacggccaaaaacatcaaagcggaaatcttcgataaaaaaatccagacctgggatcaggtgtgtagcggcgagtacgccgccgcctgccagaagttaggcatcagcaagtaa

SEQ ID NO: 220428 - DNA, 1569 bp, Klebsiella pneumoniae
atgctacaacctgttgttcgcgtcggtgaatggctggtaaccccctctgtaaaccaaatcagcaggaaggggcgccagcttacccttgaaccgcgtttaatcgatcttctggtcttttttgcccgccatccgggggaagtgcttagccgggacgagcttatcgaaaacgtctggacccggaacgttgtgaccagccacgtcgtcacgcagagtatttctgaactgcgcaagtcgctcaaagacggcgacgacgttagccttgagtacatcgcgacggtacccaaacgggggtataagctcacggtgccggtgatctggtgcaccgaagagggggaggagctagccccgtcgatggaggcgctgacgccttcgccgtcgaccgccgttcctgcgccgccggccgccggtgcgccatccgacgtctctgtccctctccctgatgccgccgcgccgccaccggctcctaccgtggccagcgcgccgtcaggccgcaagcgcctcactaccgccctggtgtgggggctgttcctgttggcgctgggcacctgcgtggcgctggtggcgctgtcgagcatggaatcgcggccgccggtcaacaaggcgcgtctgctgctcaatccgcgcgatatcgatatccacctggtgaatggcaactcctgcgctaactggtcgtcgcagcactcctacgccgttggactggccagcctgatcaccacctcgctgaacaccttctcgacctttatggtgcatgacaaaacggactacaacatcaatgaaccaagcagttccggcaaaacgctgaccattgagttcgttaatcagcgccattatcgggcgcagcagtgctttatgtcggtccagctggtggacaacgccgacagctcgacgatgctggataagcgctactttgtgaccaacgataaccagctgaccatccagaacgatctgatgaacagcctgtcggatgccctggcgcagccgtggccggcgcgaatgcaggcgatgctcaggcaatatcagccctcgcaaagcgtggcgttaacctatttctaccagtcgcatcagctgttaatgaagggcgacgtcgattcattaagtaaggccagtagcctgctggatgatgtgattaagcgggcgccggattttatttacgcctatgccgaaaaaacgctggtggatgtattgcgccattcgcaacagccgctggacgataaacagctggccgccctctacagtgaagtcgagcgggtaggggcgatgccgggtataaaagacatggcgatttattatcaaataaaagcggtggattcattggggaagggcaaagtcgacgaagcaaataccgcaattaatagtgcgattgatttagagatgtcatggctaaattatgtgctgttaggcaaagtctatgagatgaaaggtgagaaccgtctggctgccgattcttacatcacggcgtttaatttacgtcctggcgaagataccctgtactggattgaaaatggggttttccagacgtcggttaaccgagtcgttccatatctcgacaactttctctcttcagaataa

SEQ ID NO: 220429 - DNA, 426 bp, Klebsiella pneumoniae
atgagcaaatccaatcttgtagcgttccgcgttccggctgaattgcatggcgcattcaatcaggctgtagcggcggcgggcggtgacaaaacagcttggctgctcgatgccctgcgcagcaaactgaaccagccagaaagcaacccacagctgcgcatgcttgagctggtggagcgaatggaagtggcggcggctgcgctggcgggtggtaagcaggggattccgcctactctgtacaatgaagcggctgttatcgcgattgttgctgatactatccgggaagggttcgacaatggccgcattatcgctgagaggctcaatgcggccggttatcagacaaaagcgggcaaagcgtgggataaggacatttacagcgcctggaagcgtcaggggcacaatgctgagaagatagtagcggcgctatga

SEQ ID NO: 220430 - DNA, 963 bp, Klebsiella pneumoniae; identical to SEQ ID NO: 183849

SEQ ID NO: 220431 - DNA, 186 bp, Klebsiella pneumoniae
atgcctttgctaggccgtgagataacagagctaacaatacccaggctgaacggtgaagtacttgataaccatacccactacaccattcacaatgggccggcacagtcactacagaccaaagagcgccaccaccgcaggatggtagcactagcctaccagtggaagaaaacgaagtatgatagataa

SEQ ID NO: 220432 - DNA, 630 bp, Klebsiella pneumoniae
atgagagagcagacgcgggtttacacctctgcgctatcacgcattaacctccaatttctggcaaaactgcaaagaaagctggtggattcgagcccgaaaacacaggttttttgtgataccgagagcggaagggtgtacttctctctggtctctggcggctacagcgcgacaatcaacggggtaatgcgggttattggcatcacgatcacccgggcagggtttggttaccggcaatggtacatttgcccgcattgtggtggccgggctgcgaaattattcattggccggaaggatgtagggtgtcgcaagtgctggagccttcactatgccagccagagtgaagatgagatcgcccgcttacggcgcagcgtgtggaagcagagacataatatttggggggatgagtacccgcccgcgggcagcctgttaaatagcccgctaaagtttccgaagcctgccggcatgcgatgggaaaccttcgagaaaaagcgctctaggctgctaaagactgaatcagcttactggcggttgaaagaaccgagggacgctaaagggtttgcccgggtgatgcgcaaagcggaggcgtcaattaggtcatttgaacgggcatccaaaaaggctaccccatga

SEQ ID NO: 220433 - DNA, 372 bp, Klebsiella pneumoniae
atgggtattaaaggcaggggcatgaacaacatccggcgcaacatgaatgcgctggtgagggatattactgggcggcgcttacttcgcgcaatgacagccgctttgcatgaggccggactcgtagccgcaatctatacgccagttgataccagcacgctgataaactctcagtttcaagaagtgataaccaacggtacacgcattaccggccgcattggctattcagcaaactatgcgatttatgttgcagatccgaacatcccgcagaccttccggcgcgtcaccgcccgcaaagagtttctacagcatggcgttgctgatgcaaaaccgcagatggcggcggctttccaacgggagttatcaaagcgctga

SEQ ID NO: 220434 - DNA, 2802 bp, Klebsiella pneumoniae
atgacaacccttaattttgataaatacactattgagattgaagctgatgcggccaaacttctggctggtcaggcgagcgcagatacagctttaaagcaaattgaaaactcagtcaaaaagacagctaactctgctgacaagctagataacagcctggataacttgggcggaggtttttcgcgccttgctgtggccgtgaaaggatacatatcaattcaggcgttgatgaagctccagcagctttctgaggaattcacgctacttcaggcgcgagtaacgcgtttatcctcaagttcagaggaaggggcgcggagctttcagcagcttgtgagtattgcttcgacaaccggggccagccttggggataccgtcaacctctggcagcaactcaccgccacactgaaaaccgtaggtgctactaacagcgatgttaaccggctcgtgatgacgctgcaaaagattggcactatcggtggctcatcgtctcaggaaatggctaacgctctcaggcaatttatgcaatcggtagcgtcaggaagaattcaggcggaagagtttaactcggtactggaacaaatgcctgagttggctcgacagatagcagacggcatgggaattccgtttaacgagcttcgacaattgatgctggccggcaagttagatattggtgaagttcttgcggcaattgaaaagcgttctgacgagatcaaccagcagtttgagaagatgcctcgcaccgttacacaggctactaatgccctggttactcaatttggcgtagcagtgtcaaaaatagatgatgctattggggcttctcgctatttggcgaagttattggacggagccgcactcagtatcagcgtcgcaaccggaaacgctccagatgctgtgatgctgactcaaaagcttgagcaaaatactgagcaacttgctgtcgctgagtctgatttagctaaggcgagaaaggcgggcttgggctggggagtaaaacaaactgagcaaacggttaagagacttaaggcggagcgtgccttgatcctaatggctcagcaggcaagtaaagactcacaaagtgtatacacgccgtctaaaggggaaacgccagcctatatcaccaatctcgaaaagaaaacggcagagaataatgccaactccattatcaaatcaggccaaacagtagttgataagctcacccagcagcgtgaacagctaagcaaagacaagtccaaagggctaattgatgataagaaatatgctgatgctgctgctgttctggataagcaaattgccgatgccagaaaaaaacaggataaaacgccgaagaatgcctttgcccgcagcgatgactcaatagacagcctgcagcggcagattgccgttttgacaatgcgctatgacgagaacaccagagaggctgcgcagtttaatgccgtggccgctctcggagctaaggccaccgacacgcaaaaagagcgggtgcgtgaactggctggacagttatttgacgcccagcagcgccagaaagaccttaatgatgcgattagcaatgaccccgtgcgtaaggaaaataaaacttattcagatggtcgagaccagctaaaacgtcaactagacggccagatgattgaccagaaaacctataaccagcaatctgagttaatggagcagcagcatcaagtcaatctggcaaaaatccgtgctcaggagcaaacagcaaacccgatagcagccgcccgcgctgaagttgacccggtacagcaactggtaaacgagaacaaccagaagcttgccctgctgaggcagtatcagcagcaggaacaggcaatactccagcagagctatcaacagggaaaaatcagttacgatcagttcatcgctgccaaatcagctacggatgctcagtatctggccctgagaacagctcaggagaaccagttcaacgagcagatgacagcagcgcagtggcagctattaagccagcagagcctcggctataacatgctgacgagtgcggtggacgcatttagcgggaatgcctcaaacgccattactgggctactcactggcacaatgtcggcgcaggaggcaatgcgttcgctcggtaacaccatcctgaacagcgtgatcaacagcattgcccaggttggtgtggagatgctgaagaacttcatcctgtctcagacattgggcgcggcggctcaagcggcgaatgctgcgtctgccattgcaggaggggctgcggccctcgccgcttggtcgccggcagcaattgccgcctcaattgctactgggggaacagcctcggcgacaggcttaaccgcgtataagggggcgcaggccgctggattggctacaagtgtgctcggtggccgcaaaaatggcggccctgtaactgccggcggagtgtaccctgtaggcgaaggggatctcccggagttcatgcagaccagcaaaggtctattcatgatccctggtgatgatggtcgagtattcagcaataaagacgttactggcgcaacgcccagcattaagagagcgtcaaccggtaaagaatatctcccggcatcctcagcatcatccagccaggcggaaagccgcactgaacgaccgatacaggtcaacataacccttatcgaccagaccaccggcaatcagcacaacatcactggcactgaagctttccagcaaggtgacgttgtgacagttactggatggctaaatgacgtagataccgcaggcccaatgtctacagcattcgcagatgctcacgggcttagacggcgggcaaggggagccttttag

SEQ ID NO: 220435 - DNA, 327 bp, Klebsiella pneumoniae
atggagcaactacagagactggctgaagttattgccgaaacctatattcgcgatctgcgccgggaaactggaggtaacgtaattaccgttgatggcgtcagcggtaatgttgaaaagcaccttttagccgcagggctggtggataattcagtttcagcagccaaaaaccaatacggggggacatttgagcgtgaggcatatcaaatgctattgcggttaatttcacttgatggacaggagtatcggcttactgagcatggtcggcatgtcattacagtcatgagcaccatatcgctgaaaaaaaacaaagtaagaatcatgcattga

SEQ ID NO: 220436 - DNA, 1140 bp, Klebsiella pneumoniae
atgaaaaagacacttttagcatgcgttattgccactagcctcttggctgggtgtgggccaaaggatttaaccccggagcagaagcaggaagttgcaagtctccgtagcgaactggctaaggctgaacaagaaattgtcgaggctaaatcacagcaggggcagtatactgggggattaattagaaatcttataacagccagacttgaagtcttagggactaataaagcccttttggagcagcgtattaacgcgattgagtcgggggctaagattgagatatctgttagcggtgttaaaccaaatcctgaagcagcggcggcattaaaaactgaaattgaaactcttgatacacagattgccgatgctaagaaagatgcaagtcagtacagtggtggtctgctacaggcactgaaactatctgctattgcgacgcaggagcaaacaagggcgatgcttcaacagagatacctttcggcaacgtatgggttagctgaagtgaaagtacctaatgagcaagcaaacgaagcaatcacagaaaaacaagcagacaaagcagaaccccattccaccagaacgccgttacttccaccaggtgaaggaccattcggtttagaggccggtttgtctaagaaaaatattgaagacatgattggtgaagagcttgagccaatggcgaataatgtcaatctttatacggctaactctttacccaaaatgaatgctggctttgaggcgtatgggctgttgatatctccaacagtagggctatgccaaataagagctcttgggaaagatattgatacagatagttatggctttactatcaagtcaagatttaaagagctcatggagtcactatcttctatctatggaaaggccaaggaaaatgatttccttctggctggttcaatatggaaagaccccagagactggatgatgggattgtataagcatgaaagatatttgtcagctgagtggaaaggaactgcagaggctccactaaaaagtaaattaacttccgtatcgatcgaagctagagcaaacagttctgataaaggatatatcttccttcagtataatttcaataactatgatgtttgtgaaactgaggttgcagcagcgaaaaaaagctctctttga

SEQ ID NO: 220437 - DNA, 702 bp, Klebsiella pneumoniae
atgagtcatcctgttgctttgaatgagttcgattttaacggtaatgccgtaagaactatgactgatgaatattcagaggtgtggtttgtagcaaaagatgttgcggatattcttggatatgcagaaaccagcaacatgactgaaaggctggatgaggatgagaaaagaaaacagaccctgcaaaatggacgaaactacacaaatcagacacttattaatgagtctgggttatataatgcagtaatggggtcgcagaaggtagaagcgaaacattttaaaaaatgggttacttctgaggttcttccatctatccgtaaaactggcggatataacatggtgcctcaaacctatgctgatgcgcttcgacaacttgccgatcaggcagaagcgactgagcgtgcacaacttatgctggaaaagaaagatggtcagtttaaatcagtgcgcggcgcctatggtcaacatgttatgcagcacaacaagtatgttcatagcaaaggcgaaggatttaggcacgctacgattgcgcatgttaaaagcgttatgcctggaaagtacagttggcaggcgctggcaaactactgcagctaccacaacctatcagtagaaattcttacacctcactaccaatccgttccattaaactcctaccctgcagaagcatggatggcgatctacaatatcgacatcacaaaattctga

SEQ ID NO: 220438 - DNA, 978 bp, Klebsiella pneumoniae
atgcgactgactacagaacagaaggcggaaatcgctcgcctcaaacgtagtggtgtagggtatcgcaccatcgcgaataaaatgggacttaagcccagcactgtgagtagcttctgccagcgcagtggattgttcgctgataatccggctcacaaggttcttttcactatccctgaggcgcgcttttcgaacgtacctgcgttaacaaaggcactgccgccccaaaaggtcattactggtcataagcagaccgatgcttatttgtgggtgctggaagtgattaagctgaatgagccagcacatctggatgctgcagaggcagcacttgagaagcttaccattagcccaaaagacgtagagaaacggtatcgtgactggatggtcgctaatggtgctgacatattgcaaaccgctttcggtacctttttcatggatgatcctcagcactacctcaagcttgccagggagaatatcaggaaggccagcgaagttcgtgctgtgtttggtagttatgaagctgctatggaaccagtagaagcagagttgctcatctcacgatctgcatttctggtagatgaggattttgggctgacgagggaagaagtcgccgatggaagtatttcaggtatcgagcgatatctggaactggatgatgctcggaaagatgcacatcatggtttcacggatgtactgccttcacctcacacactatccgatgttgtccgcgaatttgattactggacgtggctttattggatacgcgatgctgctgggcgagagttaggtcaccagtattcagaagggctgagtcaggaggtctatgatcgagaggactggcttgatacccaacttgctacgatcagtcctatccaccagcaggaggctattgatgtgctgaaatggttactcaaaagtgaccgacacgaagggcgagatgaggtagatgctattctcatgaatttggttacaaagggttag

SEQ ID NO: 220439 - DNA, 2115 bp, Klebsiella pneumoniae
atgaaactggcacctaacctgaaacatttgccaaaagaaaaatttactgaagcagttatttttgctggaaccgatgcgtatgcacatgcaaaaggatgggaagagggcatgggtaaacaagtcgctgaggacagaacacctcccatttatcttggaccgaagcagctggcggaactggagaacctgcaaattattgataaagggcgtcgcagtgctcgtgtttatctggctggaagcattgagccaataatgattaatgccattggggaaaaacttgctcaggcaggtgtactggaagcgaaattatataagggaattcctgaccaaaaaccggaaaactggaggcaatatctggccagactcagagaacagggcgagcacacaacgacatcaattctgaaagccaataaatctgcgaatagtgacaacctgaagccacatgttgaaagccgagctgacggtattttttgggttgaacccaaatcagacaaagataccggggaaataactacccgtgaaagctggctgtgttctgctctggaggtcataggcactggcatagatgacagtaaaacccggtatctgatcctgcgctggcgcccattcggttcgaagggggatactgtccaggcaataccatttgctgatattggtgaacgcgaaggctggcgaacgcttaaggctggtgggttgaacgtcacaaccaaaagtggtttacgtgcaacgctggccgactggctgcagagctgtgccaatggtgaggtatggcgcattgcgcatgctacgggctggcagtgtggcgcctacatcatgccggatggcgagatcattggtactccagatcaaccggtgctgtttaatggacgaagttctgccgcatccggttataccaccagcggtactgttgagagctggcgagagagcgttggacgtctggcctttggcaactactcgatgatgactggcgtggctgcagcgctgtcagctcctttgattggccttgccggcgctgatggttttggtatccatctctatgagcagtcgagcgccggtaagaccaccactgccaatgtggcatccagtctctacggcaatcctgatgtattgcgccttacctggtacggtaccgcgctggggctggcgaatgaagctgccgcacacaacgacgcgctgatgccgctagacgaaatcgggcagggcgctgatccggtggaagtctacaaatctgcctacgcgctatttaatggtacgggtaagctgcagggcgcgaaggagggggggaaccgtgatctgaagcgctggcgtactgtggccatcagtaccggtgagatggatctggaaaccttcattgcgagcgccggtcgcaaggctaaagcaggccagctggttcgcctgctgaatatcccgatgcgccgggctgttcgtttccatgagcatgccaacggcaaacaccatgccgatgccctcaaagatgcataccagcatcaccatggagtggctgggcgtgagtgggtgaaatggctggctgaccaccagcaagaggcggtgaacgccgtcagagcagcggaagagcgctggcgtagtctgatcccgtcggattacggggagcaggtccatcgtgttggcgcccggtttgccattctggaagccgcactattgttaggtaatgtgatcaccggctgggatgagcagacgtgtcgggatgctattcagtacagctataacgcctggttgcgtgaattcggtaccggcaacaaagagcatcagcaaattattgagcagacagaggcattcctgaacgcttacggcatgagccgctttgcaccgttcccgtatgacccgaccagtctccccatctccaacatggcgggataccggcagaagggcggtcatgagactgacccgatggtgttctacaccttcccggcagccttcgaaggggagatcgcccgcggctttaacactcgtcagtttgcggaggtattgaagaaagctggcatgctgacaccgccgacttcaggccgggggtttcagagaaagtcaccacgcattgatgggcgacagattcgggtttatgtcctgcagtatctgccggacgatggccagccagagtaa

SEQ ID NO: 220440 - DNA, 216 bp, Klebsiella pneumoniae; identical to SEQ ID NO: 183857

SEQ ID NO: 220441 - DNA, 264 bp, Klebsiella pneumoniae
atgaatataaacgctatataccgccatcctgccgaacttgaggccgaggcgacgctatcccgtgtgcagccttatccggaagattttactctggcagagcgtaccgcagaacgtatggcccgcgctcgtaatgggttagttcatgtaatgaccgatttatcaccatacctcgacgttgagcaagcagtcgttgtgcattgctggctggataaagtcctggcgattgtcgatatggtcagaattgatgcggaggtcagggtatga

SEQ ID NO: 220442 - DNA, 318 bp, Klebsiella pneumoniae
atgagcctgtataacgatttagttcgccacgaattcggcaaaggcgccaccgttgatgagctggaaggcattcagaaccgcatggatgaggctgtgagtgatttgttgctcggcattagtgccattggaagtctgatgttctgggccacggacaataacaactacaccgaggagaccgcaaagggagacatgcgcaaaataggcgcaatgctgggtacggttggtgaggtggtgctggcgcttaacgataccgtagcgaatgcgggtgtgtgtcgttctgactgcgtcaaagaatcaaaaatgagggcgggcaaatga

SEQ ID NO: 220443 - DNA, 180 bp, Klebsiella pneumoniae
atgcgtaacaatttccgcatcaccggctacgccgttaataagcgcggtttaaccgttggcatcggctatcaactcacatccagcgacactaaaacagcaatggcccacgcagtgcttcaggcgcagcgtgaaggtctcagccacgttcgcattacacgcgtacaggaggtggcagcatga

SEQ ID NO: 220444 - DNA, 732 bp, Klebsiella pneumoniae
atgattttcaccgtccagggtaaaagcctctctttggctggcctgatgaatgcaaaagctaaagctttgctggtggtgtgtcaccgcgtgaacctgtcaaaacctgtcacattgcgggccactgatagtggcgtacaaaatgcctggcggagtttcgagacaattacgcgcgatggacatcacacctgcagtaatgtgttttcggagtccataaaaaaggacttgatgttctacatcatcccggtctatggttataacgcaccagcaaaatctggtgccgggattggcgtcctggaaaagtacaaggcgacacatgacgcgcctagcgtctttttttgtgtcctcacattcgctcacccttttttcagcgctgcggttataatccgtgccgcttgcagagttatggtgagttggatgggggcggagaaatccgcgccggttaccttgtacgccggttacgccaaccctgttcagctcaccaccagtgaaattggcgtttccggtggtgggattaatccccagtacaaggaggctgccattgtggctactacccctacccaaaatccgcagtttatctggattatcgccgctgttcgccgcgatatgacgacaattaaagcccaaattcaccatatcgccgcaccgtctgaacgtgacgcccgccgttcactggctcgcgatcatgtctgctttttcgctggtcgcatccgtctggaggtggctcatgcgtaa

SEQ ID NO: 220445 - DNA, 180 bp, Klebsiella pneumoniae
atgaataagcccaccagcacaccgttaccaaatcactcctaccgcgacgctcacggccagatggtgaacgtgaccgctgtagcgcataaccgcgtgacgttctaccgcaagggctaccaattcccttgcgtgcagcccattgagcgtttcatgaaggagttctcggaggtaaagcaatga

SEQ ID NO: 220446 - DNA, 432 bp, Klebsiella pneumoniae
atgccaaaagaaaaccgcccattacaggcggctaacacagatactcgcggatctgatgttacgccaccagcctacaccgttcaagcctcaaagcgcattccgaagaaacaccgtgcccgcacctatatgctgcgctgtgggactggtgggtggacagaaaacgatatcctgcgccattgccgactctcatctggccgcaactatgcgagcgaacttgagcgcgagcttgatatctgcctggagcgcttggaagagaaaaaccctgatggtatcggtgcgcacatgcgctacaggtttgcgtgccgtggtgacgtgctgaaggtgattcagttcgttaaccgcatggccgcagtcaaccaacattacgggctttcaaagcaggatatcgccgacattctgaacctctacccggacaacttcaccgccgcataa

SEQ ID NO: 220447 - DNA, 933 bp, Klebsiella pneumoniae
atgaattattcgacttataagaaagtaccaacattagagtattgcaagataacaagagcggctgagctacttgattgctcggttgacgacttattgtattgggccgaagaacgaaaaataaaaatctgtattaaagttcaagaccttaaaggcatgttggttgttcctgccatttcggaaccagaacaattgcttatgtttttatgcgaacttatgcatggagaacacactacaaacataatgtgtagaggttatggtgatattaagccttacccattatcgaaagtttatgctgaagagatttatgatttggaaacagagaatgattttctattgttttcagaagcaaccatcgcacgaaatggttttgatgttcgtattgatggattatgggaacttgcgaacataacaatggggttaattgattattatgataaagaaaatcccccagtcatcggtggggagtgtagtgaaacaaggactatggttaagttattggaggcattagactttccatttgaaaatggcatgaggcatacacttaattcaacctcttttgttttacgcccggcagatactttagatgaagttggtgattttgtatttatggggtatgagcaagaaaaaccgatctcactaagccttgataatctatatgtaacaaaaactcaaattaaaaacattattagcaatctaatgattccatttgatgacatgattaagaaagataatgcaaaaaaaacaaacacgacaaaaaaacaatcagaatttaccgtcgggattttgaaagagattggttttactaatagtgatttgagtggcagtatcagtgaactcagaaaaaaaatagcaagaaaattgccaacggtatcagttcctgcagatgataaatcactgattgattggcttcggaaaggcggtattgaccgctag

SEQ ID NO: 220448 - DNA, 2145 bp, Klebsiella pneumoniae
atgacatctttaaaaaacgaaaaaaaaatagcttcagaaaatgatgattttgatataaatcgttttattggagagattatagatcataaaaaattgataatagcgttcacaacaggatttacgctgattgcgattttatatgcggtacttgcgaggccaatataccaagctaacgctttactgcagattgaacaaaagcaagggaacgtattattaaatagtctgtcccagatgcttccagacagccaaccgcaatcagcacctgagatagcattactgcaatcaagaatgatcttgggaaaaactgtagatgatttgaatctacaggccaaagtgagacgtgaattttttccattaattggggagggattagctcgaataaatggtgaagagtttggaactatagctataagtcatattaaatacaataatgatgatgacaaaataccaaaaattaaaataacgattataaataaagaacagtataaattagaagtggctgatcgagtctttaaaggtaaagtgaatgccttactaaataccggagattttgatattgttatatcttcactaaaagggactccaggatctgtatataatgttacttacatgccccatttaaaagctattgggatgttgcaaaatgcattaactgtagcagaccaaggtaaggatacgggtatacttaatttgacattgcttggtgacgatcctaagcaaacttcaatcattttacagacaattgtcgaaaattacatatcacaaaatatagcacggcaagcagcgcaagatgaaaaaagtttggaatttcttaataaacaattgccaatagttaggaatgatcttgatattgctgaagataaactgaattcgtataggaaaatgaaagattcagtggatctttcaatggaagccaaatcagttttagaccaaattgtaaatgttgataatcagctaaatgaattaacattcagggaggctgaaatatctcagttgtatacaaaagagcacccaacatataaagcattattagaaaaaaggaatactcttcaagaggaaaaaaataagttaaacaaaaaagttagttctatgccatcgactcaacaagaagtattaaggttaagtagagatgttgaatcaggaagggcagtttatttacaactacttaatcgacagcaagaactgaatattgcaaagtctagtgcaataggaaatgccagaattattgataatgctgtaacagatcctaaaccggttaagccaaagaaaattttgattgtactgtttggctttgtattagggcttggcttttctgttttcttcgtattactacgtgttttcatgcaccgtggaatagaatctccagaagagttagaagaaattggtgttactgtttatgcaagtatccctgtatcccaatggctaatgaagaaaacaaataagaaaaataatgaatccaatgtattattagcaacagacaatccggcggatttagctattgaagctatccgaggcctgagaactagtttacactttgcaatgatggaatcaaagaataatattcttatgatttctggtgcaagtccgagtgccgggaagacctttattagtagtaaccttgcttcggtaatagcatctaccgggaaaaaaatattattcatagatgctgatatgagaagaggtaatgtccataaattatttaacgtcacttctgaggtagggctttcaaatatattaagtggtggctgttctatagaacaagctatttttcatattgaaaacagcggctttgactttatacctagaggtatcgccccaccaaatcctgctgaattattaatgagcgataaattagagtatgtcttaaaaacggtttcgggaaaatatgatttaataattattgatacaccacctattttggctgttacggacgcagctataataggaagatatgcaggaacatcgctattagttgcaaggttcgaagaaaatacggcaaaagaaattgctgtgagcattaaaaagtttattcaaagtggtataaatataaaaggatgtattttgaacggcattgttaaaaaagctagtagccgttatggagaggggtacaattattactcatattcatataaagggaaagactaa

SEQ ID NO: 220449 - DNA, 948 bp, Klebsiella pneumoniae
atgattgaatttcaaggggtcagcaaagtgtttgccggccacccggcggtgaaggacctgaccctggagctgcgcgaaggcgctttctcggtgctggtggggacttccggctcgggcaagtcgacgacgctgaagatgatcaaccgtctgctggagccggaccggggcaccattcgctttgccggcgaggacattcgccagcagccggtcctgaccctgcggcggcggatgggctatgccatccagtccatcggcctgtttccccactggacggtggcgcagaatatcgccaccgtgccgcagttgcaaagatggccgcgggcaaggatcgccgaccggatcgacgagctgatggcgctgctggggctggaggcgacgctgcgcgaccgttacccgcatcagctctccggcggtcagcagcagcgggtgggggtggcgcgggcgctggcggcagatccggaggtgctgttgatggatgagcccttcggcgccctcgacccggtgacccgcgaggcgctgcagcaggagatgctgcgcatccaccgtctgctgggacggacgattgtgctggtgacccatgatattgacgaagcgctgcgtctggcggaccacctggtgctgatggacgggggcgaggtggtccagcagggggcgccgctggagatgctcctgcgaccgaaaaatagctttgtacagaccttttttggccgcagcgagctgggtgtgcgcctgctgtcgctgcgcgaggtgggggactatttgcgtcccgacgaacggctggcgggcgaggggctgaccatcaccatgaccctgcgggaagcgctgtcgcagtttgtcgcccggcgctgcgagacgctgccggtggtcgatgccgaaggcaggccctgcggtacgctgcattttgccgatctgctgcgccaggagatgagccatgaaggcgcttcgtga

SEQ ID NO: 220450 - DNA, 207 bp, Klebsiella pneumoniae
atgctggagttactgaaagcgcgcggcgcccagtacccggcggagcataacgtgggtcatctgtatgaggccccggagagcctgcagcagttctatcgccagaacgatccgaccaacagcatgaacccggggattggtaaaaccagcaagcagaaatactggggtgaagcggccccgacgccagcctctccggcggatccgcaataa

SEQ ID NO: 220451 - DNA, 1104 bp, Klebsiella pneumoniae
atgaaagttaaagtactgtccctcctggtaccggctctgctggtagcaggcgcagcaaatgcggctgaaatttataacaaagacggcaacaaattagacctgtacggtaaaattgacggtctgcactacttctctgacgacaagagcgtcgacggcgaccagacctatatgcgtgtaggcgtgaaaggcgaaacccagatcaacgaccagctgaccggttacggccagtgggaatacaacgttcaggcgaacaacactgaaagctccagcgatcaggcatggactcgtctggcattcgcaggcctgaaatttggcgacgcgggctctttcgactacggtcgtaactacggcgtagtatacgacgtaacgtcctggaccgacgttctgccggaattcggcggcgacacctacggttctgacaacttcctgcagtcccgtgctaacggcgttgcaacctaccgtaactctgatttcttcggtctggttgacggcctgaactttgctctgcagtatcagggtaaaaacggcagcgtcagcggcgaaggcgctctgtctcctaccaacaacggtcgtaccgccttgaaacagaatggcgacggttacggtacctctctgacctatgacatctatgatggcatcagcgctggtttcgcatactctaactccaaacgtcttggcgaccagaacagcaagctggcactgggtcgtggcgacaacgctgaaacctacaccggcggtctgaaatacgacgcgaacaacatctacctggccactcagtacacccagacctacaacgcgacccgcgctggttctctgggctttgctaacaaagcgcagaacttcgaagtggttgctcagtaccagttcgacttcggtctgcgtccgtccgtggcttacctgcagtctaaaggtaaggatctggaaggctacggcgaccaggacatcctgaaatatgttgacgttggcgcgacctactacttcaacaaaaacatgtccacctatgttgactacaaaatcaacctgctggacgacaacagcttcacccacaacgccggtatctctaccgacgacgtggttgcactgggcctggtttaccagttctaa

SEQ ID NO: 220452 - DNA, 2658 bp, Klebsiella pneumoniae
atgaccccgaaaaaattctccctgatccccggcaacatcagccgcttcttcattttgatggttattgtcctgctggcgacaatgggggtgatgattcaaagcgccgtcaatgcctggctgaaggagaaaagctatcaggtggttgatgtctcccacgctctgcaccagcgcattgacgcctggcgctatgccacctggcagatctacgacaatatcgccgccacctcagtcaacaccgcaagcggcggtctgcaggagacgcgtttaaaacaggacgtttactacctggagaaaccccggcgtaaaaccgaagccctgatctttggctcccatgacagctccaccctcgaaatgacgcagaaaatgtccgattatctcgatattttgtggggcgcggagaccattccgtggtcgatgtactatctcaacggcctggacaatagtctgatcctggtctccaccctgccgttgaaggacctctcttcgagcttcaaagagtcaacgatcagcagcgtcgtggagtcacggcgcgcggaaatgctgctgcaggctaatacccttgatgagcgcgagacgttctcgccgctgcgccatctcgcctggcagaacgcgcactattttacgttacgcaccaccttcaaccagcccggacaccttgccacggtggtcgccttcgacctgccgattaacgatctgatcccgcccggcatgaccatcgacagcttccgtatcgagcctgacccgtcgcaaaatctcgccaccacgccggataaagagagcgccgatcatatcgggatcacctttaacggcatgcagattgacatcgccaccgacatcagcaccaccggtatgcagttgctgtggacggtaccaatgagcaccatgctgctggagtccatgcagaacattcttctgccgctgctgctcaacattggtctgctggcgctagcgctgtttggttttaccacctttcgccactataaaggacgcagccattcgtctggcgccgggctcccctccgccgccaacagcgaactgcgtctgctgcgcgccattaacgaagagattgtttctctgctgccgctggggctgctcgttcacgatcaggaagccaaccgaacggttatcagcaatccaattgccgaccatctgcttccgcacctgaatctgcagaacatcaccaatatggcggaccagcatcagggggtaattcaggccaccgtcaataatgagcagtatgaaatccgccagtatcgcagccaggtagcgccgcgcacccagatcctgatcatccgtgatcaggaccgcgaagtgctggtcaataaaaagctcaagcaggcccagcgcttgtatgagaaaaaccagcagggacgggccgcctttatgcagcacatcggcagcgccctgaagcagcccgcgctgacgctggcggcagaggcggcggcgctcagtagtacagagaatcggacgctggcccagcatgccgatgagctggtcaaactcatcgatgacattcagctcgccaatctgctggaaagcgatgcctggaaaaccaaccagacgttgttctcggtgcaggagcttattgacgacgtcgtgccggaagtgctgccggcgatgaaacgcaagggtctgcagctgctcatcaacaatgcgctcccggccggcgagcagcgctatggcgaccgtgaagctctgcggcgcacgctggtgctgttaatccaatattcagtgaccaccacgcctatcggcaagatcaccctcgacgtctgtcaggatgagtcggccagcgatcgcctgaccttccgcattctggataccggcaacggcgtctcggcaaacgagatcgacaatatgcacttcccgtatctcaaggagacccagagcgacctgtacggcaaagcaaacgcccttaccttctggctatgcgaccgcatgacgcgcaagctgggcgggcaattgaccattaaagcccgggagtcgctggggacgcgctataccctgcatctgaaaatgccggccagcgaagaggcgccagaggcgggagagcatttgctggatgacgttatcgtcctgctggatgtgacttccagcgaagtgcggcggattgtcactcgccagctggagagctggggagcgtcctgcatcacaccggacgatcgggcgaccagtcaagcctttgatctttatttaacggataatccgtctaatcttactgcttcaggcttgcttttaagcgatgatgaggtcgggatacgcaagatcggcccgggccaactgcgggtcaactttaatattagcacggcgatgcaggaggctatcctgcagcttattgagcagcagctggcggaggaggcggttcagcccgtcacctcaggaaacgagagtaacgccgaactccatgccagcggctattacgcactgtttgccgatacggtaccggatgatgttcagagattgtatactgaaatcgaagcgggcgattttgctgctctggcgcaaaccgcccaccgcctcaaaggggcatttgctatgcttaatctgatacccggcaagcagttatgtgaaacgcttgagcatctgattcgcgaaaaggatgcgcaaggcatagaaaaatatatcagcgacattgacgcttacgtcaagagcttgctgtag

SEQ ID NO: 220453 - DNA, 1941 bp, Klebsiella pneumoniae
atgcccggcgtcgcaatgccctctcttgatgggaatatgatacatccccgagaaacctgtgctgcgaccctcgataatcgacatttgcatgagaagaactacatggatgtctatatgcactggttaaaaaggatatacccacgtcgcttacgcaatcaaatgattctgatggctatcctgatggtcattgtgccgacgctttctattggttatatcgtagaaaccgaaggccggtcagcggtgttatctgaaaaagagaaaaaattatcggccgtcgtacacctgctcgacgaggcgctgggcgaacgcttcagccagcatagtcagctgtcgcgcgctgaacggatccgcatgctgaatgcggaattgtcgccagtcaccgaacgcatcacccacgcgtttccggggattggcgccggctattacaacaaggcgctggacgccattatcacctacgccccttcggcgctgtatcaaaacaacgtcggggtgactatcgccgccgatcatcccggacgggaggttatgcgcgccaacgccccgcgggtgttttccggcaggcaggtgcgcggcgatatcctcaattccatgattccgatagcgcgccatggcgaagttctcggttatatctgggccaatgagctgacggaggatattcgccagcaggcctggaagatggatgtccggatcattgctgttctggcggccgggcttatcagcagcctgttgctgatcgtcctcttttcgcgccgcctgagcgccaatatcgacatcatcaccgacggtctgcctacgctggcgcaaaaaattcccgcgcagttgcccgatctgcccggcgaactggggcagatcagccgcagcgtcaacgcgctggcgcaaacattgcgggagaccaaaacccttaacgacctgattattgataacgccgccgacggcgttatcgccatcgacagagaggggaatgtcaccaccatgaacccggcggcggagatcatcacgggctacaaactggatgagctggtcgggcaaccctatgcgaccttattcgccaacacccacttttatagcccggtgctggataccctggcgcacggcacagagcatctggcgcaggaggtcagttttcctggccgtgaccgcacgattgagatcagcgtcaccaccagccgcatccataacgccaacggcgaactgatcggcgcgctggttatcttctccgatttaaccgcccgcaaagaggcacagcgtcgcctggcgcaaacggagagactcgccacgctgggggagctgatggcgggcgtcgcgcatgaggtgcgcaacccgctcaccgccatccgcggctacgtgcagattattcgccagcagacgaccctgccggtgcatcaggagtatctgtcggtagtccttaatgaaattgattcgatcaataaggtcatccagcagctgctggacttttcccgcccacggcaaagccagtggcagcaggtgcagctcaaagcgctaattgaggaggcgctgatcctggtgcaaacctccggagtccaggcgcggatcgactttagtacgcaattcgacgccgagctgcccgcgatcgtcgccgatcgcgaactgcttaaacaggtgctcctgaatctgttaatcaacgcggtacaggcgatcggcgcgcgcggtgaaatccgcatccgcacctggcgcgatacgtcaacgcatctggcgctgaccatcgaagacaatggctgcggtatcgacagcgatgtgcaaaaaaagatcttcgatccgttcttcaccaccaaagcatcaggaactggtctcgggctggcgctaagccagcgcattatcaacgcgcatcagggcgatatccgtgtggctagccagccgggatgcggcgcgacctttacccttattttaccgattaacccgcaggaaacctcgtcagaatga

SEQ ID NO: 220454 - DNA, 1386 bp, Klebsiella pneumoniae
atgaaaaccagctaccgtattcttatcgttgatgacgaagataacgttcgccgtatgcttgccaccgcgttttcgctacaggggcatgagacccactgcgccagtaatggtcaggcggcgctgcaacactttgccgacacgccgcccgacgtggtgctgatggatatccggatgccggaaatgaacggaattgaggcgctgaaagtgatgcgcgcgcagcagccgcggatccccatcattctgatgaccgcttacgccgaagtggaaaccgcagtcgaagcgttgcgtagcggcgcatttgattatgtgattaaaccatttgatcttgatgagcttaacctgctgattcagcgggccttacagctacaggcgatgaagcaggagatccgcagcctgcatcaggcgctgagcaccagctggcagtggggacatatcctgaccaacagtccgcggatgatggatatctgcaaagacacggcgaaaatcgccctttcgcaggccagcgtgctgatttgcggcgaaagcggcaccggaaaagagctgattgcccgcgccattcactacaactcccggcgggcaaacggcccctttatcaagataaactgcgccgccctgcccgaatcgctgctggagagcgaactgtttggccacgaaaaaggggcgtttaccggcgcacaaacgcaacgtcaagggctgtttgaacgcgcccatcagggaacgctgctgctggacgaaatcggtgaaatgccgctggtgttgcaggctaagctgctgcggatcctgcaggaaagagagtttgagcgtatcggcgggcagcaaaccattcaggtggatatccgtatcgttgccgccaccaaccgcgatctggcggcgatggtaaaagagggaacctttcgtgaagatctgttttaccggctgaacgtgatccatctgctgcttccgcccctgcgcgagcggcgggaggatatcgccctgttagccaaccactttctacagaaattcagcgcggaaaatcagcgcgatatgattgagatcgatcccgccgccatgtcgcggcttaccgcctggccgtggccgggcaacatccgcgaattatccaatgtgattgagcgcgcggtggtaatgagcaccggcgcagtaattttcgctgaagatctgcccgccccattccgccagccggtgagcaaaggcggcgaagtaaaagccgcgcagccaggggagcgcaacctgaaagaggagattaagcgtgaagagcggcgaattattatggaagtgctggaacagcaggagggaaaccgcacgcgcagcgcattaatgttaggcatcagccgacgcgcgttgatgtacaaactgcaagagtacggtatcgatccggccggcctttag

SEQ ID NO: 220455 - DNA, 663 bp, Klebsiella pneumoniae
atgaaaacaaaactgattagcttacagaacgcctctggcttctttcgtgacggcatgaccatcatggttggcggttttatgggggtaggcaccccgccccgccttgtggaagccctgcttgaatccggcgtcagagacctgacgctcatcgccaacgataccgcatttgtcgataccggcgtcggcccgctgatcgttaatggtcgggtgagcaaagtcatcgcttctcatatcggcacgaatccggaaaccggacggcggatgataacccaggagatggaggttcaactggttccgcaaggcaccctgattgaacaaatccgctgcggcggcgcagggctgggcgggtttctcaccccgaccggcgtcggcaccgtggtggaggaagggaagcaaacgctccagcttgacggtaaaacctggctgctggaacgcccactgcgtgcggatttggcccttatccgcgcccatcgcgccgacccgctcggcaacctgacctaccagctcagcgcccgtaattttaaccccctcattgctctcgccgccgacattacgctggttgagcctgacgaaatggtggcgacaggcgagctgcttcccgaccagatcgtcaccccgggcgccgttatcgaccacatcgtcattccacaggagagcaaataa

SEQ ID NO: 220456 - DNA, 651 bp, Klebsiella pneumoniae
atggatgctaaacaacgtattgcgcgccgcgtggcgcaagagcttcgtgatggcgacgtcgtaaacttagggattggcctgccgacgatggtcgccaattacctgccggaaggaattaacatcacgctgcaatcggagaacggctttctcgggctgggtcccgtcacaaccgtccacccggatctggtgaatgctggcggacagccctgtggaatagtgcccggggcggcgatgttcgatagcgcgatgtcgttcgcgctgattcgcggcggtcacgtcgacgcctgcgtcctcggcgggctgcaggtggatgaacaagccaacctcgccaactgggtagtgcccggcaaaatggtgcccggcatgggcggcgcgatggatctggtgaccggctcgcgcaaagtaatcatcgccatggaacactgcgccaaagacggttccgcgaagatcctgcgccagttcaccatgccgctgaccgcccagcatgcggttcatgtgctggtcactgaactggcggtattccgctttattgatggccggatgtggctgactgaaatcgccgaagggtgcgcccctgaaactctgcgggcgaaaaccgaagcacgcttcgacattgccgcagatctgctgatccagcggggtggcgcatga

SEQ ID NO: 220457 - DNA, 1323 bp, Klebsiella pneumoniae
atgattggccgtctctcacgctttatgacgcgggtcgtcagccgctggcttcctgatccgctgatcttcgcgatgctgctgaccctgctgacctttggcattgccctctggctgacgccgcaaacgccaatcagtatggtgaaattctggggcgacggcttctggaacttgctggcgttcggcatgcagatggcgctgattatcgtcaccggtcacgcgctggccagttccggcccggttaaaagcctgctgcgcgccgccgcttccgccgcgaaaacgcccgttcagggcgtgatgctggtgactttctttggctccgtcgcctgcgtgatcaactggggatttggcctggtggtcggggcgatgtttgcccgtgaggtcgcccgtcgcgtgcccggctccgattatccgctgctgattgcctgcgcctatatcggttttctcacctggggcggcggcttttccggctccatgcccctgttggcggcgacgccgggcaacccggtcgaacatattgcgggcttaatcccggtcagcgataccctgctcaccggattcaacatcttcatcacgctcgggcttatcgtggtaatgccgtttatcacccgcatgatgacgccaaaaccgtccgatgtaatcagcatcgatccgaaactgctgctggaagaggccgattttcagaagaaactgccggctgacgccccgccgtcggaaaagctggaagagagccgcatcctcgcgctgatcattggcgcgttggggattgcttatctggcgatctacttcgccgaaaagggattcaacatcaccattaacaccgtcaatctgatgtttatgatcgccggtctgctgctgcacaaaacgccgatggcctatatgcgcgccatcagcgccgccgcgcgcagcaccgccggtatcctggtgcaattccccttctacgccgggatccaactgatgatggaacactccggcctcggcggtcttatcacggagtttttcatcaacgtcgccaacaaagacaccttcccggtgatgaccttcttcagctccgcgctgattaacttcgccgtgccgtcgggcggcggccactgggttatccaggggccgtttgtgatacctgccgctcaggcgttaggggccgacctcggtaaatcggtgatggcgatcgcctacggcgagcagtggatgaacatggcgcaaccgttctgggcgctgcccgcgctggccattgccggactcggagtacgcgacattatgggctactgcatcaccgcccttctcttctctggggtcatttttgtcattggtttgaccttgttctga

SEQ ID NO: 220458 - DNA, 1185 bp, Klebsiella pneumoniae
atgaaaaattgtgtcatcgtcagcgcggcgcgtaccgcaatcggcagttttaacggcgcgctggcgaccaccagcgccatcgacctcggcgctacggtaattaaggcagcccttcagcgcgcgcaactcgatcctcagcgcgtggatgaagtgattatgggcaacgtcctacaggccggtctcgggcaaaacccggcccgccaggcgctgctcaaaagcggtcttgccgagacggtatgcggctttaccgttaacaaagtgtgcggctccggcctcaaaagcgtggcgctggccgcgcaggcgattctggccggacaggcgcaagcgctggtcgcaggcggtatggaaaacatgagccaggcgccgtacctgctggacgctaaagcccgctggggctaccgtctcggcgacgggcggctctccgacgtgatcctgcgcgacggtcttatctgcgccactcacggttatcatatggggatcaccgcagaaaacgttgctaaggaatacggcatcagccgggaaatgcaggatgagctggcgctgctttcacagcgtaaagcgcttgccgccatcgattccggcgcattccgggccgaaattgtgccggtcagcgtcacctcccgtaaaaaaacgaccatttttgaacgtgatgagtttcctaaagccgactctacgacagaagggcttgccgctttgcgtccggccttcgacaagtctggcacagtaacggcaggtaatgcttccggcattaacgacggcgcggcggcgctggtggtgatggaagaatccgcagcgctggcagcgggattaaaacctcttgcacggatcaaagcctgggccagcggcggcgtcgcgccggcgttaatggggatggggccggttcccgctacgcagagagcgctgcaactgagcggactgacactttctgatatcgatctgatcgaagccaacgaagcgtttgccgcacagttccttgccgtgggtaagacgctgggtttcgatccgcagaaggtgaacgtcaacggcggggcaatcgcccttggacaccctatcggcgccagcggtgcgcgtattcttgtgaccctgctgcatgccttgtcagcgcacgataaaacgctcggtctggccacgctgtgcatcggcggcggtcagggcatcgcgatgattgtggaaaggataaattaa

SEQ ID NO: 220459 - DNA, 2637 bp, Klebsiella pneumoniae
atgagcgaccttgcgagagaaattacaccggtcaacattgaggaagagcttaagaactcttatctggattatgcgatgtcggtcattgttggccgtgcgctgccggatgtccgagatggcctgaagccggtacaccgtcgcgtactttacgccatgaacgtattgggcaatgactggaacaaagcctataaaaaatcagcccgtgtcgttggtgacgtaatcggtaaataccacccgcacggcgactccgcggtatacgacaccatcgtgcgtatggcgcagccgttctcgctgcgttacatgctggtggacggccagggtaactttggttccatcgacggcgactccgccgcggcgatgcgttataccgaaattcgtctggcgaaaatcgctcatgagctgatggccgatcttgaaaaagagacggtcgatttcgtcgacaactatgacggtacggagcgtattccggacgtcatgccgaccaaaattcctaacctgctggtgaacggcgcctccgggatcgccgtagggatggccaccaacataccgccgcataacctgacggaagtgattaacggctgtctggcgtatgttgacgatgaagacatcagcattgaagggctgatggcgcatattcctggccctgatttcccgaccgccgccattatcaatggccgtcgcggcatcgaagaggcctaccgcaccggtcgcggtaaagtgtacatccgcgcgcgcgcggaagtggaagtggacgcgaaatccggccgcgaaaccatcatcgtgcacgaaattccgtatcaggtgaacaaagcgcgcctgatcgagaaaatcgccgagctggtcaaagaaaaacgcgtggaaggcatcagcgcgctgcgtgacgagtctgataaagacgggatgcgcatcgtgattgaagtgaagcgcgatgcggtaggggaagtggtgcttaacaacctctattcccagacccagctgcaggtctccttcggcatcaacatggtagctctgcaccatggtcagccgaagatcatgaacctgaaggacatcatcgccgcgtttgtacgccaccgccgtgaagtggtgacccgtcgtacgattttcgaactgcgcaaagcgcgcgaccgggcgcatatcctcgaagcgctggccgttgcgctggccaacatcgacccgattatcgaactgatccgtcgcgcgccgaccccggctgaagcgaaaacggcgctggttgcccaggcgtgggatctcggtaacgtcgcggcgatgctggagcgcgccggggatgacgccgcgcgtccggaatggctggaaccagagttcggcgtgcgcgacggtaaatactacctgaccgagcagcaggctcaggcgattctggatctgcgtctgcagaaactgaccggccttgagcatgaaaaactgctcgacgaatataaagagctgctggagcagatcgcagagctgctgcacattctcggcagcgccgaccgtctgatggaagtgattcgcgaagagctggagctgatccgcgaccagttcggcgacgaacgtcgtaccgaaatcaccgccaacagcgctgatattaacatcgaagatctgatcaaccaggaagatgtggtggtcaccctgtcgcatcaggggtatgtgaagtatcagccgctgaccgactacgaagcacagcgtcgtggcggtaaaggcaaatcggcagcgcgcattaaagaagaagactttatcgaccgcctgctggtggctaacacccatgacaccatcctctgcttctcaagccgcggccgtctgtactggatgaaggtctatcagctgccggaagccagccgcggcgcgcgcggtcggccgatcgtcaacctgctgccgctggaagccgatgagcgcattaccgccatcctgccggtccgcgagtacgaagagggcgtcaacgtctttatggccaccgccagcggtaccgtgaagaaaaccgcgctgaccgagttcagccgtccgcgttccgccggtatcatcgcggtcaacctgaacgaaggcgatgagctgatcggcgtcgatctgacctctggtcaggatgaagtgatgctgttctccgcggccggtaaggttgtacgcttcaaagaagacgccgttcgcgccatgggccgtaccgccaccggcgtacgcggtattaagcttgcggaaaacgacagcgtcgtctcgctgattattccacgcggcgaaggcgcgatcctgacggtgacgcaaaacggttacggtaaacgtaccgcggcggcggagtatccgaccaagtcgcgtgccacccagggcgttatttcgatcaaagtcaccgagcgtaacggttccgtggtcggcgccgtgcaggtggatgactgcgatcagatcatgatgatcaccgacgccgggacgctggtgcgtacccgcgtttccgaagtgagcatcgtgggccgtaacacccagggcgtgatcctcatccgcaccgcggaagatgaaaacgtggtgggtctgcagcgcgtggctgagccggtggatgatgaagagctggatgccatcgatggtagcgcggcggaaggcgatgacgatatcgccccggaagcggataccgatgatgatgtcgcggatgacgccgacgagtaa

SEQ ID NO: 220460 - DNA, 729 bp, Klebsiella pneumoniae
atgaatgccgaaaaaacgtcggtagcccctaatgtcgatcatgctgaaatcgccaaattcgaagccgtcgcctcgcgctggtgggatctggagggcgagttcaaaccgctccaccgcatcaacccgctgcggctgggctatattgccgaacgctccggcggcctgttcggtaaaaaagtcctcgatgtcggctgcggcggcggcatcctcgccgagagcatggcgcgcgaaggcgcgacggtcaccgggctggacatgggggccgaaccgctgcaggtcgccaggctgcacgccctggagagcggtattcaggtagactatgttcaggaaacagttgaggaacatgccgcgaagcacccgcagcagtatgacgtcgtgacctgcatggagatgctggagcacgtccccgacccgcagtcggtggtgcacgcctgcgcgcggttagtgaagcccggcggccaggtcttcttctccaccatcaaccgcaacggcaaggcctggctgatggcggtagtcggggcggaatatgtcatgaagatggtgcccaaaggcactcatgatgtgaagaagtttatcaagccggccgagctgctgggctgggtagatcagactactctgaaagagcagcatatcatcggtctgcattacaatccgctgaccaataccttcaagttagcgccgggggttgatgttaactatatgttgcatacaaccgccaaacaggactga

SEQ ID NO: 220461 - DNA, 2286 bp, Klebsiella pneumoniae
atgaatcagagtctgctggtgacaaagcgcgacgggaccaccgagcgcatcaatctcgacaaaatccatcgcgtactggattgggcggcagaaggactgaataacgtttcgatttcccaggtagagctgcgctcccatatccagttctatgacggcatcaaaaccgcggacatccacgaaaccattattaaagccgctgcggatctgatctcccgcgacgcgccggattaccagtacctcgccgcgcgtctggcgattttccatttgcgtaaaaaagccttcggtcagtttgagccgccggcgctctacgatcacgtggtgaagatggtcgagaaaggtaaatacgatcatcatctgctggaagactacacggaagaagagttccagcagatggacggtttcctcgaccactggcgcgacatgaacttctcctacgcagccgttaagcagctggaaggcaagtatctggtacaaaaccgcgtcaccggcgaaatttatgagagcgcgcagttcctctatattctcgtcgccgcttgcctgttctcgaactatccgcgcgaaacgcgtctggactatatcaagcgtttctacgacgcggtgtccacctttaaaatctcgctgccgacgccgatcatgtccggcgtgcgtaccccaacccgtcagttcagctcctgcgtgctgatcgagtgcggcgacagcctggattccatcaacgccacctccagcgcgattgtgaaatacgtttcccagcgcgccggcatcggcatcaacgccgggcgcattcgcgcgctgggcagcccgatccgcggcggcgaagccttccacaccggctgcattccgttctacaagcatttccagaccgcggtgaaatcctgctcgcagggcggcgtacgcggcggcgcggcaaccctcttctacccaatgtggcatctggaagtggaaagcctgctggtgctgaaaaacaaccgtggtaccgacgccaaccgcgttcgtcacatggactacggggtacagatcaacaagctgatgtacacccgtctgctgaagggcggcgatattaccctgttcagcccttccgacgtcccgggcctgtatgacgccttcttcgccgatcaggacgagtttgagcgcctgtacacccagtacgagcaggacgacagcattcgtaagcagcgtattaaagccgttgagctgttctcgctgatgatgcaggagcgcgcctctaccggccgcatctatatccagaacgtcgaccactgcaacacccacagcccgttcgatccggtagtcgccccggtgcgtcagtctaacctgtgcctggagattgctctgccgaccaaaccgctggaagatgtcaacgacgaaaacggcgaaatcgcgctgtgcaccctgtcggccttcaacctcggggctatcgacagcctcgacgagctggaagtgctggcggtgctggcggtgcgtgctctggatgcgctgctcgactatcaggattaccccatcccggcggctaaatgcggtgcgatggggcgtcgtacgctgggtatcggcgtgatcaacttcgcttactatctggcgaagcatggcaaacgctactccgacggcagcgccaacaacctgacgcacaaaacgttcgaagcgattcagtactatctgctgaaggcctctaacgagctggctatcgagcaaggcgcctgcccgtggttcaacgaaaccacctatgcgcagggcatcctgccgatcgatacctataagaaagatctggacggcatcgtcagcgaacccctgcactacgactgggaagcattgcgcgaatccattaaaacccacggcctgcgcaactccacgctctccgcgctgatgccgtccgagacctcgtcgcagatctccaacgccaccaacggcattgagccgccgcgcggccacgtgagtatcaaagcgtccaaggacggtatcctgcgccaggtggtgccggattacgaaaacctgcagaacgcctacgagctgctgtgggagatgccgaacaacgacggttatctgcagctggtgggtatcatgcagaagtttatcgaccagtcgatctctgccaacactaactacgatccgacgcgcttcccgtccggaaaagtgccgatgcagcagttgctcaaagacctgctcaacgcctataaattcggcgtcaaaacgctgtactatcacaacacccgtgatggcgctgaagacgcccaggatgacctggccccgtccatccaggacgacggctgcgaaagcggcgcttgtaagatctaa

SEQ ID NO: 220462 - DNA, 1131 bp, Klebsiella pneumoniae
atggcatacaccactttttcacagacgaaaaacgatcagctgctggaacctatgttttttggccagccggttaacgtggcccgctacgatcagcaaaaatacgacatctttgaaaagctgattgaaaagcagctctccttcttctggcgcccggaagaggttgacgtttcccgcgatcgcatcgactaccaggcgctaccggaacacgaaaaacatattttcatcagcaacctgaagtaccagacgctgctcgactccatccagggccgtagcccgaatgtggcgctgctgccgctgatctccatcccggagctggagacctgggtagaaacctgggccttctccgagaccattcactcgcgttcgtacactcacatcatccgcaacatcgtcaacgacccggcgaccgtgttcgacgacatcgtcaccaacgagcagatccagaaacgtgcggaaggcatctctcactattacgattcgctgatcgagatgaccagctactggcatctgctgggcgaaggcacccacaccgtcaacggcaagaccgtgaccgtgaatctgcgcgagctgaaaaagaaactctatctgtgcctgatgagcgttaatgccctggaagcgatccgcttctacgtcagcttcgcctgctccttcgcctttgccgaacgcaaactgatggaaggcaacgccaaaattatccgcctgatcgcccgcgatgaagcgctgcacctgaccggcacccagcatatgctgaacctgctgcgctccggcagcgacgatccggaaatggcggaaatcgccgaagagtgcaagcaggagtgctatgacctgttcgtgctggcggcgcagcaggagaaagagtgggcggactacctgttccgcgacggctcgatgatcggcctgaataaagatattctctgccagtacgtcgagtacatcaccaatatccgcatgcaggcggtgggcctcgatctgccgttccagacccgttccaacccgatcccatggatcaacacctggctggtctccgacaacgttcaggtggcgccgcaggaagtggaagtcagttcttatctcgtcggccagatcgattctgaagtcgatgccgacgatctgagtaacttccagctgtaa

SEQ ID NO: 220463 - DNA, 255 bp, Klebsiella pneumoniae
atgaagcggatcttcctgaaaatctctgacactcgccttgagtgtcaggatgaacacccttccctgctggcggcgctggagtcgcataatatcaacgtcgaatatcagtgccgcgaaggctactgcggctcctgccgcacgcgtctggtctccggccaggttgactggctgaccgagccgctggcctttatccagccgggagaaattttgccctgctgctgccgggcgaaaggcgatattgagatcgagatgtag

SEQ ID NO: 220464 - DNA, 1071 bp, Klebsiella pneumoniae
atgaaaatgaaacttaccgcgctgatgagcggaatgattctgtccagttcggcgctgtgcttcagcgcgacagcggctgataaaatggtcatcgcccaccgcggcgccagcgggtatctgccggaacataccctgccggcgaaagcgatggcttacgctcagggggcggattaccttgagcaagacctggtgatgaccaaagacgaccggctggtggtgttacacgaccactatctcgatcgggtgactgacgttgcgcagcgtttcccgcagcgggcgcgtaaagatggccgtttctacgccattgactttaccctggacgagattaagtcgctgaagttcaccgaaggttttgagccgaaaaatggtaagaacgtgcaaacctatcccgggcgattcccgatgggcaaatccgatttccgtattcatacctttgaagaggagattgagtttgtccaggggctgaaccattccaccggcaaaaacatcggtatctacccggaaatcaaagcgccgtggttccaccaccaggaaggcaaagatattgccgccagcacattgaaggtgctgaaggaatatggctataccagcaagcaggataaggtttatctgcagtgctttgacgccaacgagctcaaacgcattaaaaatgagctggagccgaagatggggatggatctcaatctggtgcagctcatcgcctataccgactggaatgaaacccagcagaaacaggccgatggtaagtgggtgaactacagctatgactggatgttcaagccaggggcgatggcgcagattgcgcagtacgcggacggcatcggcccggattaccatatgctggtagcggaaggctcgaagccgggggcggtgaagctgacggcgatggtgaaagaggcgcatgccagccatctgcaggtgcatccgtacaccgtgcgcgcggatcagttgccggagtacgcgactaacgttaatcagctctatgacgtgctgtataaccaggcgggcgtcgacggcttatttaccgatttcccggataaagcggtgcagttcctggacgcgaaacactaa

SEQ ID NO: 220465 - DNA, 1347 bp, Klebsiella pneumoniae; identical to SEQ ID NO: 137154

SEQ ID NO: 220466 - DNA, 1623 bp, Klebsiella pneumoniae
atgacgggacgtcttgatagcgaggtcattatcatcggcggcggagcaaccggcgccggtatcgcccgcgactgcgcccggcgcggattacgaacgctgctcattgagcgccatgatatcgccaccggggcgaccggccggaatcatggactgctgcacagcggcgcccgctacgcggtgaccgacaacgaatccgcccgcgaatgcatcagtgagaaccgcatcctgcgccgcatcgcccgccactgtattgaaccgaccaatgggctgtttatcaccctgcctgaagatgacctggcatggcagcaaacctttatcgacgcctgtcagcaggctggcatagaggccacgccgctctcgccgcaggaagcgctgcgccgggagcccgccgtcaacccgacgctgctgggcgcggtgcaggtcccggacggtaccatcgacccgtttcgcctcaccgcggccaatatgctcgacgcccgcgaacacggcgcgcagatccttaccggctgcgaagtaacaggcctgctgcgccggggcgatcgcgtctgcggcgtccaggtatacgaccgccaacttcaccaggcccgcactctgtacgccgggatggtggttaacgccgccgggatctgggggcagcgtattgcggaatatgccgacctgcgcatcaccatgttcccggcgaagggatcgctgctgatcctcgatcatcggattaacaacctggtgatcaaccgctgccgtaagccggccgacgccgatattctggtgcccggcgataccatctcgctgatcggcactacctcaatgcatatcccttatgacgaaattgacgacaaccgggtaacagcggcggaggtcgataccctactgcgcgaaggggaaaagctggcgccggtcatgggccgcacccggatcctccgcgcctactccggcgtccgcccgctggtggccagcgataacgatcccagcgggcgcggcgtcagccgcggcatcgtcctgctcgaccatgcccagcgtgacggtatggaaggcttcattactatcaccggcggcaagctgatgacctatcgcctgatggccgagtgggccaccgacgccgtctgtcgtaagctgggaaacaccaccccctgtaccacggccgaagccccgctgcccggttcacaggagccaacggaaagtaccctgcaaaagattatctccctccccaccccgctgcgcggctcggccgtctaccgtcacggcgatcgcaccccgtcctggcttggcgacagccgccagcaccgtagcctggtctgcgaatgtgaagccgtcactgccggtgaagtgaaatacgcggtggaaaacctggcggtcaacaccctgctcgacctgcgccgccgcacccggattggcatggggacctgtcagggggaactctgcgcctgccgcgctgccggactgctgcagcgctttaacgtcaccacgcccgcgcagtcgttaacccagctctcggaatttctcaatgaacgctggaagggcgtgcagcccatcgcctggggcgatgcgctgcgcgaaagcgaattcacccgctgggtctacctcggcctgtgcggattgccacaggagcaccgggatgaagtttga

SEQ ID NO: 220467 - DNA, 1260 bp, Klebsiella pneumoniae
atgaagtttgattgcgcgattatcggcggcgggctcgccggcctgctgtgcgggctggccctgaatcagcacggcctgcgcagcgtcatcatcagccgcgggcagagcgcgctgcatttttcctccgcgtcgttagacctgctctcggcgctgcccaacggcgataacgtcactgacgtcgcacaaggtctgcagcaactcgctgaacagcttcctgaacacccttattcccgtctcggcgccgaggcggtgctcgaatacgcgacacagaccgaagccctgctggccgcctgcggcgcggtgatgcagggcgatgcgcgccggccgcaccggcgggtaacgccgctggggacgttgcgcccggcatggctgtcgccccttgaggtgcctgtcgcgcccctgccgtcgcagggcgcctgtctggtggggatcagcggctttgctgattttcagccgcatctcgccgccgccgcgctcggtcaacacggagttaccgccgcggcggtggaaatcgagttaccgctgctggatgtgctgcgtgacaacccgaccgagtttcgcgccgccaatatcgcccgcgtcctggatgatgagaatatgtggccggccctgcatgcagcgctgctaccgctggcgcagcagtatgacctgctgatcatgcccgcctgttttggcctcgccgacgatcgcctgtaccactggctgcaggcgcgtctaccctgcccgctgcgtctgctgccgacgctgccgccttcggttcccgggatgcgtttgcattctcagctgcaacgccagttcattcgcgagggcggcgcctggctcgcaggcgatgaggtggtgaaaatcagccatcgacagaacgccgtcgaggcggtctggacgcgaaatcacggcgatattgcgctgcgtccgcgctttaccgtgctggccagcggcagctttttcagcaacggtcttgtcgccactcgcgatagcgtgcgcgagccgatcctcggcctcgaccttcaccagaccctgccacgggaaagctggtaccagcgcgatttcttcgcctcacaaccatggcagcgcttcggcgtgaaaaccgatgccctgctgcgccccctgctgggcgggcagccgttccataatctgttcgccatcggctcattgctcggcgggttcgatgccattcagctcggctgtggcagcggcgtctgcgccgttaccgcgctgcacgccgccagacagatccacgcccttgccggaggccggccatga

SEQ ID NO: 220468 - DNA, 549 bp, Klebsiella pneumoniae
atgttgattggctacgcgcgggtgtctaccggcgatcaaaacctcgatttgcagaaaaacgcgctggttcgcgcagaatgtgagcagattttcgaggacacagcgagcgggaaaaacgccagacgccctgggcttaggcgtgctattcgtcgtttaaaaccaggtgattctctcgtggtctggaagctggatcgccttgggcgtagtgttcgtgatctcataactctggtctcagagctgcaggatagaggtattcactttcgtagccttacagacagcattgataccagtaccccagcaggccgctttttcttccacgtcatgagcgccctggcagaaatggagcgcgagctgatcgtcgagcgtacccgcgccggtttagccgctgcgagggagcaggggagagtcggcggccgccgccgggtaatgaccactgaggttgtggagagatgccgcaggatgctggatacgggcgctacacggcagcaggtagccgatgtgataggagtgaatgtgaagacgctatataagtacctgccagcctcttaa

SEQ ID NO: 220469 - DNA, 786 bp, Klebsiella pneumoniae
atgatcggtaaagattttgcacagcagctgtttaacctgcgggatcgcgtcgctttcgtcaccggcgccggcagcggcatcggccagaccatcgcctgcagcctcgccagcgcgggtgcgcgggtagtctgttttgatcttcgcgacgacggcgggctggcagaaacggtcagccatattgaatccatcggcggtcaggcttgttcttttaccggcgatgtccgccagattgccgacctgcgcgccgccgttgcgctggccaaaaaccgctttggccgcctcgacatcgccgtcaacgccgccgggatcgccaacgccaatccggcgctggagatggagagcgagcaatggcagcgggtgatcgatatcaatctcactggcgtatggaactcctgcaaagcggaagcggaactgatgctggagcccggcggcgggtcgattatcaatatcgcctcgatgtcggggattattgttaaccgcggcctcgaccaggcgcattacaactgctccaaagccggcgtgatccatctgtcgaaaagcctggcgatggagtgggtgggcaaagggatccgcgtcaattccattagcccgggatataccgccacgccgatgaatacccgtccggagatggtgcaccagacccgcgagtttgaaagccagacgccgatgcagcggatggcgaaggtggaagagatggccggcccggcgctgttcctcgccagcgacgccgcctcgttctgcaccggcgtagacctggtggtcgacggcgggtttgtctgctggtga

SEQ ID NO: 220470 - DNA, 1068 bp, Klebsiella pneumoniae; identical to SEQ ID NO: 137630

SEQ ID NO: 220471 - DNA, 882 bp, Klebsiella pneumoniae
atgaaaagaaagataataataacgatgaagacctcccgtcggcttaccacgttctgcctcaccggcgcgttgactctcgctgcctcgggcggcgcgctggcgtcggggaacgacgcggcgctacaggcgctgttcgctcaggccaactactggcatgagaaatctcatgacgagctggcgttggagtccctgcagaaggtgctctcggtggatgccaacaacacccaggcgctgtatctgatggcgctctggtcgcagcagggcggcgatatgcaggcggcggcgcagtggcgcgcgcggctggcgaaagcggcccctgacagcccgggactacaggatctggacaacgccaaaaagatgtcgcaggtgccgcagggccagctcagcctggcccgccagcaggcgcgcggaggcaatatccccggggcgctggcgacctggcgcagtatgttcaatggcaatacgccgcctgccgggctggcggcggaatattacctgaccatggccagcgacaaatcgctctatccgcaggctatcagcgagctgcgccagtacgtggcgcagcatccgcaggagaacgccccgcgggtggcgttgggcaaagcgttaacctggcgggaagagactcgccgggaagggatcgccctgctcgagccgatggccagcggcaataaagaggcggacagcggcttgcgccaggcgctgctctggctgggcccgcaggccggggatgagcagtattacgacacctggatgcagcggcatccccaggacagcgaagttcagaattactttcgcgaacggcgcagcggtcaggccgcgcggccagggctacgccaacctcaacagcggcaataccgccgccgcgaagcagcagtttga

SEQ ID NO: 220472 - DNA, 2442 bp, Klebsiella pneumoniae
atgaagcgattaaccacgctggcgctgctggcagggatgctttctgcgcctgcgctacacagtgaagaaccgggctccggcgccgctgccccgctgagcttcccgcagctcaacgacgcggcggacagcgagccaggcgacgaacctccggctgcctcgccggaggagggcgcctctccggcagcccccgcccccgccaccgccggcgatgcggcggcgacggcccctgtgccggttatgccggacttacccccgccggtgagcggcacggccgcgccggaggtcattcctgtcgctccggtctggggaggcgatctgaatctggcgcagatggggatgccggacgggattatcctcagcggcggccagcgacagggtggggtcagctttaccctgcctgccgatcaggtggtgatccattcgcagctcagccttgccgttcgcgtatcgccggagatggcgagccgcaacgccaccctgcagctgatgctcaacggtcaaccgctcggcacgctgccgctgggcgccgatggcgaggatgtctcccattatcagctggatattccgcccgcgctgatggtctccagcaataacctgagcgtgaagatcaacgatggcgataccctgcagtgccagcgtgacattcatgatacgtcgcgggtgacggtgctgcccacgtcgcatttcagctgggaaagccagcagctgaacatcagcgacgacctgagccacttcccgcggcccttctttgacagcatgcagatgaccccggcggacattgcggtcgcctatggggccaagccgtcggcggacgtcttcagcgccgcggcgctgatctcctcctggctgggtatccaggcggactatcgcggcatcgccttcagcgctctgcgcgaccgtctgccggaacgccacggcatcgtgattggccatccgggggagcaggtgggcggcatgatgctgccggaaaccgataagccgctgctgcgcatcatcgccaaccccgccaatccggcctataaactgctgctgattgtcggcaaaaacgatacggcgctgcgcatggccgcctggcggttaacccgcggcaactttgcgccgcaaaccgcgacgctggatgtcgaaccgcagaccatcccggttggcaaagcatatgatgccccgcgctggatcaccaccgatcgtccggtcaagctcagcgagctgctgcgtaaggaccaaagcccgaccgtcagcggcgtctggcacgaacctttacgtatcgccttccgcgccgcgcccgatctctatctgtgggatggggagaccattccgctacaggttggctaccgcttcccgtcggaaagctggattaatgaggacaagtccttgctgagcgtcacgctcaacggcaccttcctcaacaacctgccgatgaacaagcaggggccgctggagaaagtctggcgctacctcgggggcgatgcgcgccaggagcgctttaccatcccgctggcgccttacctgatttacggcgataaccagctgtcgatgtacttcaatgtggtgccaaaggacgatgttccatgttcggtgctgctgaataacaatatcaagagccggatcactgacgactcctggatcgatttgagcaagacgcgtcacttctcgctgttgcccaatctctcctactttgtcggcgcctcgttccccttctcgcggctggcggactattcgcagacgaccctcctgctgccggcggacccgtctgaaacccaggtggcgaccctgctgaatctggcggcacgctccgggaacgcgaccggcaccgcgctggcgaataaccgcgtggtgctcgggatgcccaccggcgggggggatttgcagtcgctgcgtgaacgtgacgtgctggcggtcaccgctctcgatcagcaggcctttaaccagagcctgctggccgactcaccctatcgcccggtagataatgtgctgagcgtccgcgagccagacctgtggcaaaaagtccagcgccggctcaccggcgactggacttccgccagcctcgacgccgatcgctacttttcgtcgagcagcgcctggcgcgggttcatcagctatcgctcgccgtggaattccacccgcctggtggtggtggcgctggccagcaatgatgaccagctggcgcgactgaagaccgatctggaatcgccgcgcattaacgccgggatccgcggcgataccgcggtgatcaccagcgataacggggtgcgcagcttccaggtgagtacgccgttccccagcggtcagatgccgtggtacatgatggcggtctggtatgccagccagcactcaggtttcctggcggtgctggggctgattgccacctcgataatgggactggcgctgaccgcgatgtttaaacgtcacgcccgtaagcgtctgggttcgggggataaccaatga

SEQ ID NO: 220473 - DNA, 2112 bp, Klebsiella pneumoniae
atgaaaaagtctcttttttggttgctggcgctggtgctgtcaccggtcgccgtgctggtggtgatcacgccgatggacagccaaaagcagtatatttttggtctgttaagtatcggtattctctttctgatgggcttcagcaagcgccgcagcgtatcggtcattatggtcgtcacgtcgctgctgatgtccacccgttacatgtattttcgcctcacgcagaccctgcacttcaactcgtccattgaagctattctcggcatgggactctttctggcggaagtctatatctgggtgatgctactgcttaactatctgcagacggtctggccgctgaagcgcggcattgttccgctgccggatgatatgagtaagtggccgacggtcgatatctatattccgagctataacgaaccgctggaggtggtgcgcgataccgtcctggcggcacaatgcattgattatccaaaagataaaatgaaaatctatcttctggatgacggtaagcgcagcgagtttgccgtcttcgccgccgacgttggggtgggctatatcacccgcaatgacaacaagcacgccaaagcggggaaccttaaccatgcgctgaccctgactcagggggagcttatctgcgttttcgactgcgaccacgtcgccacgcgcgtcttcctgcaggccaccgtcggcggcttcctgaaagacccgatgctggctctggtgcagacgccgcactacttctattccccggacccgtttgaacgtaacctctccgtcggacgcaacattcccaacgaagggatgttgttctatggcccgattcagcaggggaacgacaactggaacgccacctttttctgcggctcctgcgcggtgatccgtcgcgaggcgctggcgcagatcggcggtttcgccgtcgaaacggtgaccgaagatgctcatacggcgctgaagtttcagcgtctggggtggaagtcggcctttctcgatatcccactggccgcaggcctcgctactgaacgcctggtggtgcacgtcatccagcgtacccgctgggcgcgcgggatgacgcagattttccgcgtcgataatccgctgtttggccgcgggctgacttttcagcagcgcttgtgctatctcagcgccatgctctactaccagttcgcgctgcccagggtggtgtttgtcaccgccccgctggcttacctgctgtttaacctcaatattatttactcgtcggcgagcctgatcgtctcctatgccctgccgcacctgttcctcgctatttacgttggttcgcgaatgaacggccgctatcgctacagcttctggggggagatctacgatattgtgctggccttccacctggtgctgccgactctggtgacgatgattttccccaaacgcggcaagtttaacgttaccgataagggggggctgcttgacgtcggctacttcgatttcaccgtggtgcgcccgcacctggtggtggcctgcctgctggccctgggggtgatcgtcggcatcgtccgggcgattggccatgactattttggctcggatcccaacgttatcgccctcaacgtcgggtgggggatctacagtctgatcttcctgctggcggcgattgccgtggcgcgcgaaacgcggcaggtgcgaaaaaccattcgtatcgatgtcgacattccggtggtgatccattacgccagcggcatcgtctcgcgcagccataccgcggatctgtcgatgggcggctgccgcgtggtcgcgcctgataatcgccatctggaggatgacatcgaagagattgagctgatcctgcagtccggggctatctcgattccggcccagctggtcacctctgacgagcgcttcctgcgcctcaagtttgatgaagatattccgctttcgcgccgccgtgaactggtgcgcgtggtgctggcccgcgcggatgcgtggattaatccgccgcgcccgcaggataacccgttccgctccttcttcaccattttacgctgcgtgttcgaactgttctggctgacgtggaaaacccgtcgcagccagcgcaatcgggcaacagtggcgaaaacggcgcaggaggatgggacgttatga

SEQ ID NO: 220474 - DNA, 804 bp, Klebsiella pneumoniae
atgccgttgatttgcgtctgttcaccgaaaggcggcgtagggaaaacgaccctggcggccaatttagcctattcgctggcgcggacgggcagcaaagttctggcgctggattttgatgtccagaacgcgctgcgtttgcattttggcgtaccgctgaacgatgagcggggctatgtggcgaaggcgctggagctgcacgactggagccagtgcgtgttgagcgccggcagtaatattttcgtcctgccatatggcgaagtgagcgaggcgcagcgtcaggcgtttgatgagcaactgacccataatgaccatttcctccagcgcggtctgtccgcgctgcttaattatcccgggcttatcaccatcgccgatatgccccctggaccttcgcccgcgctaaaggcgctgacggggctggcggatctgcatcttatcccgctgctggcggataccgcctcgatgtcgaccctggcgcacgtagaaaagcagcgcctgaccggcgcggcggtgaatcataagcacgggcactatttcgtcattaaccaaagcgataaccgtcgccaggtcagccgggacgtcaccagcctgatggaagagaaactgggcgagcgactgcttggcgtgatccatcgtgatgaaagcgtggtggaggccaatgcctcgcagaagtcgatcctggactttaacgcttcctcggcagcggccttcgatattgaaatcatggctaaaaaaatatcttcgctgttgggtattcatattggcgatggcacggtgcacagccagccacgcatgtcagggcgttaa

SEQ ID NO: 220475 - DNA, 501 bp, Klebsiella pneumoniae
atgcgctggcaagggcgtcgcgaaagcgacaatgttgaagatcgacgtggacaatcaggctcgccgtttggcggcggcgggggcggcggcttccgtctgccgagcgggaagggcggcattgtactgctgattattgtgctggtggcgggctactacggtgtggatttgaccggcatgttgaccggcgaaccgatgccgcagcagcagacctccacgcagcgctccatcagcccgaaagacgatgaagcggcgaagtttacttccgtcattctggctaccaccgaagatacctgggggccgatctttgaaaagatgggccgccagtacccgcagccaaagctggtgctctaccgcggcgcgacccgtaccggctgcggcaccggtcagtcggtgatgggccccttctattgtcctgccgacagtacggtctatattgacctgtcattctacgatgagatgaaaaataaactgggcgccgacggcgactttgcccaagggtag

SEQ ID NO: 220476 - DNA, 276 bp, Klebsiella pneumoniae
atgaacgtgaagcgcagcagaggatcgaccaggcgcgcaatgatgctcttgatgctgccgctcgcgctggccggctgcagcagcagctcgttgccatccgtgagcagctcaggcagtataacgccactgtcggcgctgggacgtcagccgcagacaccggagttttgcttgccgacgtgctcgaaaaatctctcgaacgaaaccggcaactggcagaatacgctgaccgggcagctgaagccggaagggtctgcgaaagacagtacgatgaactaa

SEQ ID NO: 220477 - DNA, 2355 bp, Klebsiella pneumoniae
atgacagtttcaacgcaggtaagccgtaacgagtacaccgggaacggcgctacaacccaatacgattttacgttccgcattcttgataaaagccacctgctggtgcagacgctggatacctctgaaagcatcgtgacgctaacactcggtaccgactacacggttaccggcgtgaaccgttacaacggggggaaggtggttctgacatcagcgctgccagctggctacaaaatctctatcgagcgcagcacgccggttacgcaggaagccagcatcaggaaccaggggggcttctttcctgagatccacgaagatgctttcgataagctgactatgctggtgcagcaggcgtatggatggtggtctggtctatctctccggaagccatcatggctcgcgaactattacgatgcgctcaacaaccgcattcgtaacttgcgtgacccgtcacaggcgcaggatgcggctacgaagaattatgctgatagtctatacagtgatgcaatatcgcattctgacaaccagtttaaacgcacgctccgcgttccggaatcaaatgttggaatgcttccaggtgtcgaaggtagaaaaaataaattacttgcctgtaatagcgatggcgatccaatttttgtattgcctgaatcaggatctgcttccgacgttcttataagtcttgcatcaaatgatggttttggcctaatcggccaggtttcatcattttctgcacttcgaaccgttataccaaatacagaagggcaaagtattttattgcgcgctcatcctgtcggttgggccgcgatgtctcacggtcccgttggtggcggagaatttatttcaaggcgaggctcagctgaggatgatggtggttatatatgcgtgccgacaggtcaatctgagtactactggcaacgcataccaaaaaaccccggaaaagtttgcgcgacggagttcggcctttatgatggtgctccgttggatggcataattaaaaatgctattaactactgcatcactaattcagcgggttatttatctgtacctcccttgggtccggctgggtatacgatttccggtggccttgaatttattaactcaactaacgggcttatcattgaaggcccaggaatgggaacgaagggcaacattccagtaattacccataccggcgcaaacgtcgccctgacgtttaagcgtactacgcaggctcagagcctttttaatgcggtcattctcaaaaatttcacagtagttgggaatgctctcgctactgcgtttgtcaggttttctgatttttatggcggttcagtatttgactccgtaattcgagattacactactggaacaacaatagatgtatacaacgacaaaggatggactgaagttatcagggtagataatgtcgtcgtaaggacgtcacagcgtgggatctggttccactcaaaccctgcatctactgacgatcaaacgctttcgttttatggcgccagcatttccaactttggcttccagcacggaatcactgcggcgtcatatggcatctatgtcggtgacggctcacgcgcagataatctgtataactgcgacatcgacatgatggggtggtgggaggtcggcggtaacagcacggcactttatgcagctgataaagcgcgcgttgatggttttgccaacttccgatacgacggttttgccgcaagcccaattacatcaagctctcaaccatgccgtcttgtgaggaaggctggtctgacaggctacattaagctgaattgtaaaaattacaagcaccaggctggtcttggattaacttctggagttacgcaattaacgatccgtccgtggctggcgcttgcagaggcagttgctggtgtggctacgccgcatccaactctccctggtgagtcaataatctctacagtcggattgaagtgtaagctggaaggtaccctgtttaaggggcagaactctgtagtatctgttgttgggttgcctccattccatcgatacaaagtgacattgcgctgcggattgtcgagtaccgctcagcagcaatatattgttaacattccaaatggagctaacggtggcatcaccacccgcacggattcagttccttctgtcactaccagcaccgccacgacaataagcggcaccaccgcaacaagtgtatcaaactcaacggcgaagaataaaaacttcgagccagtatttattactaatgctggaaatcttcctgataatacctttagcgaaacaaataagcagggatttgatattcaccttgatggcacacaatcaaacgttattaatgacgaatatcctgtatcaattgaaatagaagcaattgattaa

SEQ ID NO: 220478 - DNA, 258 bp, Klebsiella pneumoniae
atgagaactgatgatgtgttgaaattctcgagccttttcaaagtaaatgtgtgtcacgatactgaagagaatgtatgggtggcatactgtgaagatcttgggctctccaccgaagctgactcttacgaagatctgaccgaaagagtgtgggagatagctcctgagctatatgaaatgaacggatacaaaggcaacctcaaacggctgcatttatccttcattcaggaacagaacttcactgacagaatggcactgtag

SEQ ID NO: 220479 - DNA, 690 bp, Klebsiella pneumoniae
atgaacaccaaaccttccattttcaatttcgaatcagactcagctattcgcgccattatgatcgatggtaatccttggttttttgcatccgatgtttgccgcgcgattggcatagcaaaccatcgtgatgcagttcgcaaacttgatgatgacgagaagggcgtcggttcaaccgacacccttggtggtgagcaagaatcagttatcatctccgagtctggcctctacacccttatcctccgctgccgcgatgcggtgacgccgggcaccatcccctaccgcttccgcaaatgggtaaccagcgaggtgctgccgcagatccgccgcaccgggcgctacgtccgggaagaactctcccaggctgataaagcccgcatgctggcgcaggagatgaccagcagcatgttgccggcgatcatggatgcattgcaggtcgagcagaagcactacaccttccctcttaaccgacgctatcaggatcacatccattcacctgatggcctgcgtgaactggcgaaaagctcaatggtgatgaaactgctccgcgaactcgatgctgacgggcatgatgtatccggcgccgctgcagaggtaacggccatgctcagctacattgttggcatcggcgccgtactgcgcgatatagagacgcatgctcagtacgtgatggctaaggccaagggttactga

SEQ ID NO: 220480 - DNA, 501 bp, Klebsiella pneumoniae
atgcagaataaataccaggggttggttcaccctggtatcttcgggaaggaccctgacttaatccccatcaaagatgcgttcatagaccactggcgatatggacatcacaagcaattcggtaaagatgtgttgtttgccgatcctgaagaagcacgtcaataccatatccgacacgtccatattgatattggaaattacacggataaatttggggaaagtggaacccaagtatgctggcgcaattgggcgtcaggaaagatagataacacaacaggaaagcgcaaaaaaacacctaccagtgatgtttatgttgtttatcttgtaacgtctgagcgtcacgccttcctaattgattattgggatgagccagcccacaaaagggctgagatcgatgcagaaatgatactgattatggatgattgcgataacattttacgccttaaaaagctggaatccatgccccgcgatgctaacctttgggaccctgaattccttgtttag

SEQ ID NO: 220481 - DNA, 2475 bp, Klebsiella pneumoniae
atgcgtcaggaatgtattaacgccgtgcagcaggccgcaagccgccgactcacgcagcaggaaatccagaatattgaagaccgtatttaccggaacatgcgacaactggcccgcaatgatccggcatcctggcgggcgatgactgacgctgaacgcctgcgccgggccgggcagttagcagcgaacgagctgaccaacgaagcagcgcttaagaggcgccgcgttgcgctcaccattgcggccaggcaacgtctcgacgccttcataaagacctaccaggggaaagacggcaagcttgaggcgcttaaccgcaccatcgcttttcacgctgacggtaaatcaaatttcctgtcggtagaatcacgcggcaaagccacccgcgactatgcactaagccagattcaggaagcatttgaagcggtagacccgagattcttccacctgtttgaggacgaggccagcgtgcgcgatctggtttacgagatgcgcgggcaggacactggcaacgtcagggctaagaagggcgcaaaagcatgggctggcgttactgaactgctgcgccagcgcttcaatgacgctggtggtgatatcggctacctggaaaattggggcatccctcagcaccactcaatggagaaagtcggcagggtctcacaggataagtggattagcgacgtcatcggcaaactggatcgcaagtactacatcaaagatgacggccagctgatgagcgatgctgagttgaaaaccttcctgggcgaggcatacaacaccatcgccaccggcgggctgaacaaattaagcgacaccggcatgcgcatttccggcgcgcgctctaatcgcggtaatgcatcccggcagatccacttcaaagacgcagactcctaccttgagtatcagcgcgaatatggcgatcgctctctgtgggaagtaatggtcgggcaccttgaaggtatcagcaaagatatcgctcttgttgagacatacggaccgaaccccgatcacgttttccgctcaatcctggacgaggttacggctgaacaggccactgccaaccctgagcgcactggcaggattaagcgcctggccaacagtaccgagaacctttacaactttatcgccgggaagacgcagccgatcgctaatccgcacatcgcacgatggtcggacaacatccgaaactggatggtggcgagccgacttggttccgcgctgctggcttcattctctgacctgggcacgatgtatatgtcggcgaaggtagcgaacatcccgatgaaccgactatttatgaaccagcttgaggccatgaacccggcgaaccgcacggagcttgcccgcgcccgtcgcgctgggctggctatggaatcgttgctcggcagcgttaaccgctgggcgatggacaatatgggaccgtcggtttctcgctgggcggcaacggcggtaatgcgcgccagcggcctgacagcatggaccgatgctcacaagcgtgcctacggcgtgacgatgatgggcagccttggcgaagtggtcagccgggcgccggatctgagaagccttgatgacagcgatttccgcatactgaagagcaagggcattactgagcaggacttcagcgtatggaaactggcgcaacaggaagactggggtaacggaaacactacgatgctcacgccggaaagtattatgcggatccctgatgctgctgttatgcacttaggactgccggagcgagtcaggtttgaggccatgcgccggctgttggcagcagtatctgaagaagtcgacatggcagtcattacgcctggcgcgcgtgagcagctgcttaccggtggcgggttgcagcgcggcacatggaaaggtgagttaacccgctcggttttcctgtttaaatcgttcccgatatctgttgttttgcggcactggacgcgtgcaatggggatgccttccgctggtggccgggctgcctatatcgccgcattcctcgccagcaccacgatgctgggcgcgctgtctcagcagcttaacgacctggcatccgggcgtaacccacgggagatgaccggaaaagatgctggtaaattctggctcggtgcactactgaaaggtggtggccttggcctgtatggtgattttcttctttctgaccatacccgttatggcggcggtgcgctggcttcaatgctggggcctgtggccggactggttgatgacgtggttaagctggctcagggtatcccgcttaatgccgttgaaggaaagccggagcagacaggtggtgatctggttaaactcggcaaggggcttatccccggtgccaacctatggtatgcaaaagcagctcttgaccatatgatatttaatcagctgcaggaatacttctcgcctggctatctgcgcaagatggagcagcgttcgaagaaagaattcaatcaaacatactggtggcgaccgcaggacgtaacgccggaataa

SEQ ID NO: 220482 - DNA, 1806 bp, Klebsiella pneumoniae
atgagttacttcggacttaacccggtaaaccagaatcagcagctggaccaggccgcatcaaacccagtaggcagccctaaaaacgatgttgggtttttcgatggatcagtcagcggtgcagcatcaggtctttattccggccttgttgcaaagcctgaccagcttttgtgggctggtgttgatgccgttgtatcacccatcgctcagtttgttaatgacaacacatcgtttcgtgacacgtcacctgaatatatcgcccgacagagagagcttgctgcatcacaggttaaacgcctgacgccggatgccgccactaccggcaccgccggacaggtgctgtatggtcttttcgatatgggatcgcaggcagtagtaagtacgctggcagccggtcctgctggcgccgctgctgctgtgaccagcttgcaggggttctccgagtttgagcgactgcgcggcgaaggcgtagattacagcaccgcccaggaagtggcgctggtacacggccttacagctggtgccggtacagtcataccgatgagcatcggcctgcgtgctggtggcgcactggctgaaggtgtcggcgctcagttatcacgatcggcgcttgggaatgctgctggtaccgttgtgcgagctgcgcctgatatcgcttatgcggcaggcacgaacgtcgcctttggtatgtctatgcgcggcagcaccgcctccattctgcgcaataatggctatgaggatatggcctcgcagtatgacgttttcgataagcaggcgatggcgatcgatgcagttctcggactggcattcggcggtgtaggccggttcgtaaactcgcgtggggaaaatgttcgcccgcctgattttatgcctgccgacgtcgatgcagctctggcggccaatgctgctcatcatgctgagtttgatatcgctcctgggattccggttaatgtgctgtcacgcgatgcgcatgcccaggcactaaggcaggcgatgcaggatgtcagtgcaggccgatcggttgatgtggcgagcattgttgagccggcggcattcaccagcataccggcacggcgcagcattatatcgcaggcactggatgagatgctttctcaggcagatgagggtgcaacatccagagctattgaaatgcggacgcttgaggatcaggctgcgcaaattcttccgcgtggcgaccgcaaggtttaccagtcagaaatagccaacagcgaacgcattatcactaacctcactgagcagcgtaaccagatactggcagagcaacccgcgggaagcggcaaagcgctgtcccgtgcccgagccgataagcaggcaaggctgagagatgtcgatcagcggatcagtgaagcacaggggaggctggaattctctcgtaacgcactggccccgcatgagcccggtggtgaattcttcgaggcaagagcagagatcgcccgcatgcagcaagcagaggccgagcttgatgctcaggctctttcatttttccgcacggcagaagtgcgctccgccgatgaagtcgcaccgctggagcccaacgcggctctccgggatatggaaagcgcgccagcgacaagaacggtagagaatcagcaggacattgatgtgatggccgctgaagactcgctggcatcatcgccagatatggtgatcaccgtgcttgacgatgagggaaatccacagtcaagaagcgcgcgcgaggtgcttgatgatgccgcgcgggaaaatgagcaggctatgcaggactccagacttttcgatgtcgctgttgcgtgtttcttaagaggataa

SEQ ID NO: 220483 - DNA, 2499 bp, Klebsiella pneumoniae
atgccaaccgttccgcaatatcaacgccagagccagacgcaaacagcgccggtgatgacgagtaatcttcgtgtcccggaaaatccgctggtgcagggcatccagcaggctgctgatacgtcgatcaatatgatggctgatgcaaagcgcaaggctgatgtagcgcttagccaggatgctctgctgcagtttaatcagttcggtgatgaccagttcaacaatcctgacaatggtctgataacgaagcagggaaaagctgcgctagggcaaagcgatgtcgtcatgcagaacatgcagcagaaagctcaggacttgctgggtaccgtgccggatggcgaggcccgtcagcagttatcttttcaattgcagcagtcgatgcagtcatttcacaaccaggcccgccggtatgaggttggccagttccagcaatttcaggatcagcagttctccgctattaagcaaaacgtggtaacccagtctcaggggctctatggcgatgatgcagcgtttgttaatacggtgaaaatggggttcgatgcgatcgagcagtacgccgctgcccatggatggagccaggaacaggttgtagcggaaaaagaaaagctgaaagagcaggcggcagatagcgcgctgagtactgcagcatcgcaacagtatattcagttcatgcagcagaatggtgagcctggagacaatgagggtgcgccacgtgttacggcgcatggtaattcgtcagccgccagagggctgcgaaataataatccggggaacatcgaagccggttccaattcgtgggatggccaggcgggtagtgatgggcgttttgcgaaattcgtgacccctgagcatggtattcgtgcgctgggtaaaaacctgctttcgtaccagcggcagggttacgacacagttagcgagatcgttaatcgttgggcgccggccagcgatggcaataacacagaagcgtacattgccgcattatgcaaaaagctgaatgtcacgccaaatgaccagcttaatatgagcgacattaataccctgcgtcagctctgcgctggcatcatccagcacgagaacgggaaacagccatatagcgaggatcaactgaacactggcgtttctgccgcgcttggtcttactactctggaatcgcctaagcgatattcagggaatcaagctttcgacgccgcaagcccgcagcagcaggcggcatatttacgccagtctatggagctgcggaaccaggctcgtacgcagttcaaggcccaacttgttgatcaggtgcaggatgcaaccgctgcttatctgaaggggatccagttcgataatccgccttcacagggcgacttcattaacgctttcggttaccgggaggggacacagcgttttaacgatttcgaaaatctgcgcgttgccgggcagtatatcggatctttccgcacaatgccgacggcatccattcagcaatatgtcagtgatctaaagaatcaggttggtaatggagaagggctggcagggcgcgcagcagcattcgaccatgttcaggctgctgctgatgaagttattaagcagcgtaaggcggatcccattcagttctcactttcctctggacaaaccaaaccaattgatatgtccaaccaaaataatttcggtcagagcattggactgcgtgcttctcaggtttctgagttggctagagcatacggaacaccgttgactttcttttccaaagaagaggagagccagatcggtaaattcttccgagacgccccggtttcgcaacaatctgcgtatctcgacacgatccacaaaagcaccggcggcggtaagccgtacatggcagcacttcagcaaatcagcgcgaatgcgccctctgctgctgttgccggaattcttatggacaagcctggcggcgtggttgctgagaaaaactggttcaatcctgacgtgtctgtgtcgccctctaccgcatcgcaaaccattctggctggtgccgcagcacgcaaaggatcgaaagaagccaaaggcattaccatgccgaaagaaaacgatatgcggctcgagttcagcaataccgttaaagatgcatttgccggtgacgcacagggcgcatctatggcgtatgacgttgcgaaagactactacgcaggagtaatggcgcagaagggcgatctctctggcgagctggattctgacgtctgggagcaggcgataaacgtcgctactggcggcgtgcatgactataacggcatgggtaatgtcctgctgccgtggggcatgtcttctgagcagttcgataaagaggttaatcaggcatgggaaacgcaggttaccggtgctggcgttaaggctccgcctgggcagtacggcctgcaaagctacggcgacagccagtatctcgtgaaacttggtaccggataccttctgaaacaggacggaacaccggtagttatcgatctcacgcagcagcgtcagcgcttctctggagatatccctcaatga

SEQ ID NO: 220484 - DNA, 498 bp, Klebsiella pneumoniae
atgtgtgaaccagctaccgcagcactagccgtaaccgcagttgctggcggtctcagcgcttacagtcagatccagacgggccgcgccaatgccgcgctggcgaacgccaacgccaacgcgcaggagcaggccgcccgcgacacggtcaacaccgccaatgatcaggcttaccagcagcgccagcaggcccggcgggttgccgggcagcagaccgttgcgctggcaaccggtggcgccgacctgaccagcggcaatgcgctggacctgacaactgaaaccatgcagcagggcacgctcgacgcgctgaccaccatcaacaatggccagcgacaggccgccgggttgcagttccaggctgataccagccgcgctcaagggaaaattgataagcagtccggaatgcttggcgcaggttcaacactgctcaactccacgctgaccggtcttaatgcatacaagacgctgggcggtacctggaagccgctttccgctaagtaa

SEQ ID NO: 220485 - DNA, 471 bp, Klebsiella pneumoniae
atgcgaaaagttgagatagtgagcgttactgacgagcatatcagcgccattctcccgcatgtccgccaggcagaccacgatgagtttatggctgcagccggtatgactccggcggaagtcatcactcgcgccatgaaaagcgcttcggtagccgctgcagggatgattaacggccaggtggtaaccatcttcggtatatctcctgcatcgatcatcaccgggcgcggtattccgtggcttgtaagcaccgaccacattgagcatcagccgctgacattcctccgccactgccgaccgattcttcgtgacatgtcacgcggatatcgcgtgcttgaaaattacgtagatgcgcgtaaccacgcagcaaaatcctggcttcactggatggggttcaccctggcagatcctgagccatacggattgatgagaatgcctttccaccatttcattaaggaaattgaccatgtgtga

SEQ ID NO: 220486 - DNA, 2391 bp, Klebsiella pneumoniae
atggcctattcactggtgcagccgtcgcttgccggcggcgagatatctccttcactgtatggtcgaatcgatcttgaaaaataccagacgtcattgcgccgctgccgcaacttcatcgtccggcagtcaggcggcattgaaaatcgtcccggtttccggttcctggggagcgcgaaatatgcagaccgttactgccggctaataccgttccagttcagcgtatcgcaaacatatgcgctcgagctcggtgatcactatttccgtgtctggtctagcggcgcgctggttacggacggcggcagccctgttgaagtggctaccccatggccggtgagcgtcatctctgagctgaaatttacgcagtctgccgatgtgatgacagtgtgccacaacgattatcctcctcttgagatccgccgttacggagaggctgactggcgcaccgccgcagtgacaacaaccagcgggccattccaggacctgaacacagacgactcggtaactgtgtacgcctcaggccgaactggatccgtaacgttgactgccagcagtccgattttcaaaagccagcacgtgggaaaactgttctacatggaacagaaagcggtagatagtgttggtcggtgggaaaccgataaagacatcgggatcggtgacgagtgccgatatcaggagaacttttatcgctgtgttgacggcggttctaatggcaccaccggcactgttgctccgacccatacaacgggagattcctgggatggctggggtcttggtggccgtaacggtgtgctgtggcgctatctgcatagtggttttggcgtgtgccgtattaccgccgtcgccggagatggactaactgcaacggccgacgttgtaccacgtcaggatggtgagatcgagctgccggcgcaagtggtaggtagcacattcgccacttacaaatgggcgcattatgcctggaacgatacagacggctacccgggtacagttacctattaccagcagaggctgattttcggcggcagccgggcatttcctcaaactatatggtgtagccgtaccggtgattatcacaacttctatcgcagcaacccgaaggttgacgacgatgcgatcacctataactacgccggtcgccagctgaacaaaatcctgcatcttctcgatgtcggtcagcttatcgtgctgaccagcggcggagagttcaaggtgacaggcgacagcaacggcaacctgactggaaccggtggctttgcgatgtccggtcagtcgttcaacggtagcagcgatctggcaccaatcaacgttggcagcgttgcactgtacgttcagcagaagggctccatcatccgcgacctgttttactcattcgaccaggacagctatcaatccagtgatctgaccctccttgccagccatctgtttaacggttacagcatcagagactgggctttgtctgtacagccgttcagcgttgcatggtgtgcgaggagtgacggaatgctgcttgggctgacttatctccgtgagcagcaggtatatgcctggcatccgcacccgatgactaatggctatgtcgaatcgatctgcagtattagcgaagggcaggaagatgcggtctatgcgcttattcgccgtacggtgaatggatcgacagttcgttatgttgagcgactgaacaccaggcagtttacagaacagcaggatgcatttttcgtggattctggcctgtcttacagcggagaaaacaccgactcttcacgcacaatgacgatcggttccaccggtggctggacgtaccaggatgaattaacgctaacgtgcagctctgcaatcttcgactcatcgagcactgattacgagatccatattccctacaccgaaggcggtgtcagcaagtcgatgcgtttgagcattgctggtgttatctcatcaacagtggctaccgtattagcaaaccgtgatgtgccgacagcgctgcgcaacactgcgcaatcaacatggtcgatagcacgtcggacatttgctggactgtctcacctcgaggggcagacggttagcattcttgccgacggtaacgttgaacctcagcaggttgtctcaggcggcgaagtgacgatcgaaaaccactcgtcagtggtgcatatcggtttgccggtagccgcggttatcgaaactctggacgtgaacgttgcagggcagtctacgctgctggataagaccaaacttatcaatcagctttgcgtaatgctcaacagcgggcgctcggtttgggcaggaacagatgatgctcacttactggagtatacccagcgtgagtgggaattctacgacgacccggtagggctaaagacgggcatcatcgatatgaacctcgatgcaaactggtag

SEQ ID NO: 220487 - DNA, 612 bp, Klebsiella pneumoniae
atggcatcagtgatcaatatctgtaatatcgcgctggcacgtataggcaacagccggacgattaacagcctcaccgaaaagaccaaagaggcatatacctgcaacctgttttacgagtccatgcgcgacgcagttctggcagacaacgactggaactttgccatgtcgcgcgttgtcctggctgaccttggcgaccctgcgccgggatggttgttccggtatcagtacccgaccgactgcgcgcgtatatctgccatattaccgaagtggttcactgggtctcatatcgttctgcaggataagcctgtttttgaagttggcagcaatgaagatggcactggccgcgtcattcataccaatgagtctcaggcggtactgctatatgtgaaaagcattactgacccgacgatgtttgatgccctgttcgctgatgcgctttcgtggcgtatggcggcagaaatagccatgccgatcgcggcaaatgccagtctcggccagcaggcaatggccaattatcagcaggtgcttacggcggccatgcaacgctctcttgatgaggcacatgaaccgcagcaggcgatgtcagaccttgccagtgcgaggatctgctga

SEQ ID NO: 220488 - DNA, 279 bp, Klebsiella pneumoniae
atgcctgagtacaaagtcgctaagcggtcattcatcaatggccgcctgcatgagccgggcgacatcgttacctacgacggtgagccgggaagtaatctggtttccgttgatgccagcctgagcgaaaagattgtcccggccagtgcagaagagttaaccgagctcgaagatttgcgcaaacagtatgaagaaatgttcggcgaagcgccgcatttcaataccaaagcggaaactctgaaggcgaagatcgccgaaaggcgaaaagaactcggggtgtaa

SEQ ID NO: 220489 - DNA, 393 bp, Klebsiella pneumoniae
atgctgctcgaccagcaagcgcttttttccgcagctcaggccattacggccacggctgcttcgactaacgtcattgataccggcagcaataaagatgtcggtaaatatggcgatatcccgctgcttatccaggtggttgaaggtttcaacaacctgaccagcctgactgtgacggtgcaaaccgatgacaactctgcattcagttccgctgcggacgtgctgtccatgacgatccctctggcgtctctggtgctgggctataagtcgccggttatcacgttgccgatgaagatggaacgctacatccgtctgaactatacggtgactggtactgcgccgaccactggcaaagtcactgcgggtatcaccggaggcgtgcaaaccaatgcctga

SEQ ID NO: 220490 - DNA, 1008 bp, Klebsiella pneumoniae
atggctttaattggtcagacgctgccttctcttcttgacgtgtacagccgtaccgacaagaacgggcggatcgctaaaatcgtcgagcaactggcgaaaagcaacgatgtcattaccgatgcgatttacgtgccgtgtaatgacggttccaagcacaaaaccaccattcgtgccggtattcccgagccggtgtggcgccgttacaaccagggcgtgcagcctaccaaaacccagaccgttccggtgactgacactaccggtatgctgtacgaccttggctttgtggataaagacctggccgatcgctccggtaatgcggactcgttccgcgtgtccgagaacatgggcaagctgcagggatttaacaacaaggtttcccgctacaccttctacggcaataccgatgctgagcctgaagcgttcatgggcctggctccgcgcttcaacacgctgagcacttccaaagcggccagcgcggagaacgtattcagcgccggtggtagtggttctaccaatacctccatctggttcatgtcctggggtgagaacactgcgcacatgatctatccggaaggtatggtcgccgggtttcagcatcaggatctgggtaatgacctggtcagcgatgcgaacggcggtcagttcctggcttaccgtgatgagttcaaatggcatctcggcctgtcagtccgtgactggcgttcgatctcgcgcatctgcaacatcgatgtcaccaccttgaccaaagatgctgcaaccggcgccgacctcatcagcatgatggttgatgcgtactacgcgcgtgatgtagcaatgctgggcgatggcaaagaggtcatctactgcaacaagaccatccatgcctggctgcacaagcaggctatgaatgcgaaaaacgttaacctgacgatcgacgaatatgccggtaagaaaatcgtttctttcctgggtattccgatccgtcgcgctgacgccatcctgaatactgaatcagccgtaacggcgtaa

SEQ ID NO: 220491 - DNA, 387 bp, Klebsiella pneumoniae
gtggcgcgcgagcttggtctttctaatgaccaggcgcagaagttggctgggctgtggccacaactgcaggagcaaatccagaaccgccaggctgagtcgtgggggcagcaggttgaacagtgggcagctgacacgaaggctgacaaagaaatcggtggcgacaaattaacggtatccgtcggacacgcgcagaaggcgctggataccttcgcatcgaaagagttccgcgaattccttgactcgaccggcctgggtaaccacccggaaatggttcgggcgttcgcaaaggtaggcaagttgatgagtgaagacagtttcgtcactggccagggtaacggatcgccgaaaaacgatctggtcgaagcgttttatccaagcaaaaaatag

SEQ ID NO: 220492 - DNA, 183 bp, Klebsiella pneumoniae
atggtggggcagctccagcagcatccaaaccatccccgactcctgcggctgagcaatctgaagcagcgcaacaaccagcagcagatccagaaccttcgccagctgatggtgataaacctgagccgactggcgataagccaactccttctgctgaaccatcggttccagaaaaatatgaactaa

SEQ ID NO: 220493 - DNA, 306 bp, Klebsiella pneumoniae
atgactgattacctgagcgaagaagagcgtgaagaactggcagcaaatgagctcaaaaggcagcagttacggcgcgagaacgaacttaatgacctgcgtctcatctgcgggacagaacacggccgccgtttcatctggcgcctgattgagcaggctggcgtgtggcgtacgacttataccggtgaggcgctctcggcagccttcgccgaaggaaaacgtaacacgggactgaacgtcttttccgacgtgatggaagcgtgtcccgatcagtatctggcaatggccaaagaggccagcgaggaatag

SEQ ID NO: 220494 - DNA, 1680 bp, Klebsiella pneumoniae
atggccgaactctctccgaaacagcattacctcaaacacctggggcagctcaaaaatgagcgcaccagctttgaggagcactggcgcgagctggcggaatttatcgatccgcgcagcacgcgctttcttacgacggagagaaacaacggcagcaagcgtaatacccgcatcgttgaccctaccgcctctaaagctgcccgcactctgcaatcaggcatgctgtcaggtatcaccagcccaacccgcccatggtttaagctggcaacgccggatccggagatgatgcaatatggaccggtaaaacgctggcttgatgtggtcatgaccaggatgaacgacgtcatgaaccgctctaacgtctaccagtccctgccgattatctaccggcaccttggtgtttttggtaccgcggctatggcggttctcgaagacgacgaagatgtgattcgtactcatcctctgccgatcggaagttactacctgtcaaactcgcatcgtttgtcagtcgataccacgtatcgcgttttctccatgactgcccgccagattgttatgcagtttggcctggacaatgtcagtaacgccgtacgcggcgcctgggataacgcgaactatgaagcatggttcgatgtggtccatctgacagaacccaatatcgatcgtgtgaacggcaagctgaattcccgtaacaaggcattcaaatcggtgtatttcgagttgtccggagacggtgacaagctccttcgtgaggctggttttgatgagccgcctatcctttcaccgcgctgggagattaacggggaggacgtttacgggagcaactgcccgggaatgatggcgctcggtactggtaaggcgctgcagcttgagcaaattcgcaaagctaacgcgatcgataagcttgttaacccgccaatggtggccccgacaggtcttaaaaataagctgatcaaccttgcccctggcggagttacttatgtcgatgaggttgatgctaccaagctagtgcgtccggcttacgccgtcagcccgcagcttaatgacatgctcggcagcattgctgatgaccgccaaatgattgaagcctgcttcttctctgacctgtttaacctgttcagcaccatcaacaccaggagcatgccagtggaagctgtggccgcaatgcaggatgagaaactcctgcagcttggtccagtccttgagcgacttaatgatgaattccttgatcctttcgttgatcgcacattcaacatcatggcgcgccgcaacctatttcctgagcctccggaagaactgcagggcactcctctgaaagttgaatatgtctccattttggcacaggcccagaaatctatagggatcagcagcgttgagcgctttgttggctttgttgggaatcttgcaaaagccaatcccgcggcgctcgacaaactcaatatcgaccagacgattgacgagtacggaaatatgctcggcgtcccggccacgatcgttaactctgatgatgaggtgcaagccacgcgcgaacagcgcgctcaaatggaacaacagcagcagatgatggctatggcccagcaagctggtgcaactgctaagaccctgagcgataccaacaccgctgaccctagcctgttaaaaaccctctctgatgctgctcagcagccggcggtgacgcaatga

SEQ ID NO: 220495 - DNA, 204 bp, Klebsiella pneumoniae
atgtgcatcagcaagccgaaagtgagttctccgcaggttcaggcggcgccgcaggtttccgattctgctgtacagaacgccgctgatagcgatcgtcgtcgccgtgccgcagcgggcgggcagaaatcaacaatcctgacgtcgagccagggtgtaacgcagccttctggcggcactcagggtaagaccctgctcggggcgtaa

SEQ ID NO: 220496 - DNA, 372 bp, Klebsiella pneumoniae
atgagtgacaaagacattgaatctgaaattcaggctaaaggcttaacggcgccgcgcgttacgcccgaccatatcgaaagcattattgctcaggaggcgtatttcacagcagaagatggtgcctttggcgtagccataaaagcaaaacatactggcggagaggtaaactaccagccgcacgaatcactttctctgctgacgttctgcgtcatggtgctgcgcaacggcttcaccatcactggcgaaagcgcctgcgccagcccggaaaacttcgaccctgagattggacgtaagattgcccgtgaaaatgcggtaaataaaatctggatgctggaaggttacctgctgaagcagagactgagcgaaaaataa

SEQ ID NO: 220497 - DNA, 1476 bp, Klebsiella pneumoniae
atgacagccttagccatgtccccggaagaacaactgatcgacgatatcgccagcttcacccatgacccgctgggctatgcgctgtatgcgttcccgtggggcgaggatggcacagagctggcgcacgcctccgggccgcgacagtggcaggctgacgcattccgcgagataggcgagcacctgcagaatcccgcgactcgtcaccagccgctgatgatttcccgcgcatccggtcacggcatcggaaaatctgcgttcatctcgatgctgattaactgggccatgtccacctgtgaagattgcaaggtggtggtgaccgctaacaccgacaaccagctgcgcacgaagacctggccggaaatcatcaaatggtcgaacctggctatcacgaaagaatggttcacctgcaccgctacggcgatgtacagcaacgatccgggccacgacaaacgctggcgcgccgatgctattccctggtctgagcacaacaccgaggcgtttgctggcctgcacaacgagcgcaagcgcatcgttgtggtgttcgacgaagcatccaacatcgcggatctggtctgggaggttgccgagggtgcgctgacggacgaagacaccgaaatcatctgggtggcgttcggtaacccgacgcgcaacaccgggcgattccgggagtgcttccgcaaatacaagcaccgctggaagtgcgcgcaaatcgacagccgcaccgtcgaaggcaccaacaagcagcagctgcagaaatgggtcgatgactacggcgaggacagcgatttcgtgaaggttcgcgtgcgcgggatcttcccggatgcttcagagctgcagtttatccctaccgggctgactgatgaggcgatgaagcgtgtagtgaccgctgcgcaagtggcgcacgccccgcggataatcggcgtcgacccggcttattctggcgtggatgatgcagtgatttatctccgccaggggctgcacagcaaagtgctgtggaccggcaacaaaaccacggacgatctgattatggcgaagcgtatcgctgattgtgaggaccagtaccaggctgacgcggtgtttatcgacttcggttacggtaccgggctgaagtccatcggcgacggctggggccgcacctggcagcttgtgccgttcggcggcgcatcggcagatccacagatgctgaataagcgcggcgagatgttcaacgcctgtaagacgtggctcaagctcggcggcgcgctggacgaccaggagacggcggatgatctgtcagcggcagagtacaaggtgagggtagacggtaagatcgtcatggagccgaaagaggatatcaaagagcgtctgggccggtcgccgggcaagggcgatgcgctgcttctgacgttcgcctatccagtggcgaagcgttcagatttccctgctgccggcggcaagcagcccaacgtgatcagcgagtacgacccgtgggcgtaa

SEQ ID NO: 220498 - DNA, 330 bp, Klebsiella pneumoniae
atggggtttccatcacctgccgcagactacgttgagcaaacgctaaccgtttcccgcctttgtcagtatgacgccaactgtcgcgccctggagactgccgccggttatgccatcgtcgatgtctgccgccggccaaagcagggtgatcatgttcttatcgcatatgccgggaaaactgaattcgctgttgtccgcgggcaggcgctgatcactgatgatggtgaggcgctggaaggggacgccctggacgatgttgaagtgcggggtgtcgttacctacctgataaaccgggccgggtgggtgagtgatgatgatattccgatcatgtaa

SEQ ID NO: 220499 - DNA, 237 bp, Klebsiella pneumoniae
atgcctaaatcccccgcagaacgtaaagccgctctcgaagagctgaccaaagaggactggaggttcagggagttctttcggcttggccacctccattcaaacaacggcaacattaagcttgctgccaagtgctcatcttcgattaacaagtggaaggctatcacgctaattaatcacgacagagtgctgcatggtagacctgtgcttttcggaaagtcggtgaatgacaatggctaa

SEQ ID NO: 220500 - DNA, 228 bp, Klebsiella pneumoniae
atgggtcgttcaagttttgatgctcgacttgataagcgcgttaatattgagaggcttgaggagcaaggtcttatcgctgacagcatggatgtgcgcaagaaccttgttgagcgcgtcttgagaggtgaaataacacctgagcagtccagggaagagctgaggcgcattcagcgcaatgctaagcggaatggactgaaaacacgcaatcaggcatggagggaaggttga

SEQ ID NO: 220501 - DNA, 714 bp, Klebsiella pneumoniae
atgaccagcaaatttagcatcgataacagagagctgcttcagagaatcagtagcggcgaggctgttgtgggaattgattttggtaatctaatcgtcagggagctggctgcattcaggctggccgcaatggacagcgagccggtggcgtggcttcgtaatcctgaccaggggtttcatctgccaatgcttcggctgggttctaaagacccaaacccaaacttcgttaacgaagagttttaccctgtgtacgcagccccgcagccagagccggtagtgccggatgaaaacactttgcgcattcaaggtattgaggccctggaagaattcttgacagcaactaccgtagaacctgaaatgctgggtggtatcaagctaaccctcgcatgttgcagggcattgaaggctatcattaaaaataaaggttgggctgatttcaacgacggaaagcctgagaaagtaaaagcagagactattattacagctttgagcgaaccccattctgacgcctgccgcgccgccatgctcgcagccgccccgcaaccacaaaacgcacaacaaaatattcctgaaattattccgaatgagctaatcgctgcggttaaccgcctgctcgatagcaacggaagccgtggttgttatagcgcaatcaagtgttacgacgcgcacattgaagtagagcgcctgctcgcagccgcccggcaggaggtgaagtga

SEQ ID NO: 220502 - DNA, 429 bp, Klebsiella pneumoniae
atgactgatatcaccgaactggcgcagagcctgaaagcggcagcagagaaagctaccaatgggcaatgggtggcattcaccgatacagcctcccgcactttctctgtgcacactccagatgacaatcgttacggagacgtcatcaagtggactggcttcgacggtcagcgcaaggcaaaggcaaatgcagagtttatcgctctggctaaccctgccaacgttctcgcgctggtagaggcgctggagaaggcgcagcagcggatttctcggttagagtcccgcagcgtgaaactaccaaaagcaatgagcattgatggcggcgcatattgcagcgctcacgctcattacgactctgatggcgattattacgatcgcgcggatgtggaagagatgctgtccgacgctggcatcaaggtggaggctgagtga

SEQ ID NO: 220503 - DNA, 699 bp, Klebsiella pneumoniae
atgaacctcgaaacagtaaacgagctcatcgcctccatggagagcgcaggcgagctgtcgatcagagagcagaagttcctgaagctggcgaaagcgtttaagcagctggctgcggagaatgtggtgctgaaggctggcgttctggaagcattcgaggagatggaatcccaccatgatacgaacggattgtatagctatgacgctgatggagagcaaatggatgcccttatccggctgtgcgatgcgcaaggtacaatctccgatttgctttccatgttagaaacccccgccaccgatcgaatcgtagccgggattaaggctgatgcgattatcgcttctttggatgcctgctctgattatcttgaaactgactgtgttatggacaggcttgatatcagctacgaagaagccgagaagcgaacctcaggggcaatcgagtttcatgatgcgatggtcgattttgcaaaccagctgcgcgaggggggccgacaaatgagcaaccgtatccctaacttcggctggaaccgcctgaagctggcaacgctcacctatgagcaactcgctcaactggaagagcaagtgaaggctgagcatgcctgcaaaaacggcattcacctcttcgataaagctggccagcgcaaactcgatgcccttagctgggccgtatacaacaagaagaaggcggagcgtacagcatga

SEQ ID NO: 220504 - DNA, 1068 bp, Klebsiella pneumoniae
atgagcaaggtaggcgattatttctttgagttcccggcgtcgagaggtttacagggtagcactgtgacatacatgatgactgtgcctgcccgtactctcgctcgcgttctggcatctgacaatgtcggcagcaccctcgagcgttcgcagcgtgaaatcaatccgacacgcgtgaaaaagttctatcagtacctggttagcgcctacaaaaagaaagagccttttataattcccccactggttggaaactgcaattcagagatcgagtttcaggagttcggcaacacaaacgttggcgttgcgcgcttccctatggacgctgaaatcaagctattcgacggacaacaccgggcggctggaattgcggagttctgccggacctacggtgaaccgatcagcatccctttgatgctgacacacaaccttccacttaaagcgcggcagcagttcttctcggacatcaataacaacgtttccaaaccaagtgcagccatcaacatggcgtacgacgggcgcaatgacgtagctcagggcatggtgtcgttcctgtctcggcacgacacattcgcagaagtgaccgactttgagcataacgtcgttccggcgaaaagtaagttgtgggtgagcttcaaggcgcttagcgacgcgacggccaagtttgccagcgtgggcagtaagacactggaaatgggtgacatcgaatcaatctgggaagcatggctgtcccttacacagattgaggctattcgccacggcaccagccaggccgactacaagcgcgactacattcaattccacgcggtgatgatcaacgccttcggatacgccgttcagcggctgatggatgagcactcaattgttgatatcgtccagatgattgaggagctttcgaataatgcgggctcctctgagatggaagacttcttcctgatttcgcgatggggtggtatctgcgtgaatgccgaaaaagagcgtccaacgatcattgcctccattcctgcgcagaaagcagcggcagaactgctggtacaaatcattcaggctaaaaaattgaaggtggcagcatga

SEQ ID NO: 220505 - DNA, 1086 bp, Klebsiella pneumoniae
gtgaaccgttatttttctctcatcccggttgttattatatttacaaccgcttgcgatcagaaagcacccaccgtcgagtccgccccgcgcatggttaaagtggcgcaggtgaccgccgtgggcaatacccagcagcgaacgtttccggcacgcattgagtctggcgattccaccgaactgtcgtttaagcggggtggccaggtggagtcgctagatattcgtcagggggcaagcgtcgcccaggggcaaacgctggcgcgcctgaatgcccgcgaggcccagcaacgggtcaatgagcggcaaacggcggccactctcgcccagcgtcagttcgaccgcttccagactctggccgggcgccaggcgatttcccaggcggagatggacgtgcagcgcgccaatcgcgatgccgccaatgcggccttaaaaatcgctcgcgaagagctggcgcaaatgagcctcatcgcgccctttagcgggattgccgccggcgtgcatatccgcaaccatcaggtggtcgccgccggccaaccggtgatcaccctgacgcggaccgacctgctggatgtggtcttcagcattcccgaaaatctgttcacctccctggatatccgcaataccgcctaccgtcccgtcgtcaggatcaataccctgccgggccgcgagtttaccgcggaatacaaagagcataccggcagcagcgacaatagcaccctcacctggcagatcgtgttaaccatgccgcggccagatgattttcccgccgtcggcggggtcagcggcaccgtgacggtcaatctcggcaatttaccggccagcgccggacgggaaaccctcattgtgccagcggaggcggtgtttaaccccgataaccggccaaagaacgagccggtagtctgggtggtgaaaggcgataacgcgcatcgatatcttgaggagcgtaaggtcgccgtcggcgaggtgacttcgcagggagtggcgatcaccgacggtctccgcgcgggtgaacaggtggttgcggcgggcgtgagcgagctgcatgccgggcagccggtgcgggtctggacgcgtgaacgaggattataa

SEQ ID NO: 220506 - DNA, 3066 bp, Klebsiella pneumoniae
atggatatttcccgtcagtttattaacaacccgacccgcgtctggttagccattttgctgttaggggtgggtggcctgctcgccctgctcaatatcggccgcctggaagatcccgccttcaccatcaaaacggcggtgatcgtcacccactaccctggcgcgtccgctcagcaggtggaagaggaggttaccctgccgctggaaaacgcgattcagcagcttccctcgctggataacgtcagctccatctcctcgaatggcttatcgcaaattacggtgaatattgcttcgcagtaccattccagcgagctgccgcaaatctgggatgagctacgtcgccgggtcggtgacgccagccgccttttcccccctggcgtagtcccccctttcgtcaacgatgactttggcgatgtgtttggctttttcttcgctatctcgggcgacagttttaccaacccggagctggtgcgctatgccgaacagttgcgccgggagctggtgctggtgccgggggtcggtaaagtcgctatcggcggcgtcattccgcagcagatcaatgtggatatctcgctggcgaagatggcggcgcgcgggatcaccctcaaccagctcgccgcaatcctggcccgacttaacgtggtgtccagcgccggggagatccgcgttggcagcgaatcgatccgcctccaccccaccggtgagtttcagagcatcgatgagctgggagatctgctggtcagccctcacggcgccagcgccaccacccgactgcgggatattgctacgctgtcgcgcgggctaaccgactcgccggccagtatctatcatgccaacgggcgccaggcggtgaccatgggagtttcttttatccctggcgtcaacgttattgacgtcggccacgctctcgaggcccgcctccagcagatggccgccgacaaaccggcgggcatcgacatcgctattttttacgatcaggcagctgaggtggcccactcggtcaatggctttattaccaattttctgatggccctggcgattgtcgtcggcgtgctgctggtatttatgggggtgcgcagcgggattattattgctctgtcgctggcgctcaacgttctcggcaccctgcttatcatgtatatctgggggatcgaactacaacggatctccctcggagcgcttatcatcgccctgagtatgttggtggacaatgccattgtgattgtcgaaggggtgctcatcgcccgtcagcaaggctctccgttactgggcgcgattaactatgtgctccgtcgctctgcgctgccgctgcttggcgcgacgatcatcgccatcctcgccttcgcgccgattggcctctcccaggactctaccggggagtattgcaaatcgctgttccaggtgctgctgatctccctgatgctgagctggttttccgctctgaccatcaccccggtgcttattaagtggtggctgtttaaaaacgccccgtcggccgccgccgcggaggaaaaggccgatccttaccgcggcagcttttaccgtggctatcagcaggcgctgcgaatactgctgcagcaaaagaccctgaccctgttgctgatgggtgcgctgttagccggagcgatctggggctttacctttgttcggcagaatttttttccgtcatcgaatacgcctatattctttgtcgacctgtggctaccctacggtaccgatataaacgccacggagaagatgacccgggatatcgagcggtcgatagccggtcagccgggggtggtcaccaccgtctccaccatcggccagggcagtatgcgtttcattctcacctacagcgggcagcgccagtacagcaactacgcgcagattatggtgcggatggatgatcaacgcggcatcgcccctgtcacccgccacgtggaggactggattgccagaaactacccgcaggttaacgccagcaccaaacgcattatgttcggcccctccggagatagcgcgattgaggtgcgcattaagggcccagacccggatacgctgcgcgcgctggcgagtcagataggcgatatcctcgccgcggacccggcgaccgacagcgtgcgtaatgactggcagaaccgcagcaaagtgatccgcccgcagtattccccggcgctgggacgcgagctgggggtggataaacaggatattgataacgcgctggagatgaatttctccgggagtcgcgccgggttatatcgtgaaggggccgatctgctgccagtgatcgtccggccgccggaagcagaacgtcaggatgccaaccatctgaataatgtgctggtctggagccagagtcgccagcaatatatcccgctgagtaacgtcatcaatggtttcgccctggagtgggaagatccgttgatcctccgccgggatcgtacccgggtactgacggtccagaccgaccccagcccgctaagcggccaaacctcgggtgatattctcgcgcgggtgaaaccgcgcattgacgcactgccgctgccgcacggctaccgtatcgaatggggcggcgatgccgagaactccagtgaggcgcagcaggggctgtttacaaccctgccgcttggctatctggtgatgtttatcataacggtgctgatgttcagttcgctgaaaaacgccgtcgccatctggctgaccgttccgctggcgctgatcggggtcacacccggctttctgcttaccggcatccccttcggctttatggccttaatcggcttgctcagcctgagcggtatgctgatccgtaacggcattgtgctggtagaagagatagagcaacaaaaacaggagaaagatcaacgacaagctattattgatgcggcaacctctcgtctgcggccgatcctgctgaccgccttcaccaccgtacttggcctggccccgctgctgcgcgatgtctttttccagagtatggcggtggtgatcatgttcggcctcgcctttgccaccgtgctgacgctgctggttctgccggtgatttacgcctgctttcaccataaggatatgacgcctcaacgatga

SEQ ID NO: 220507 - DNA, 1155 bp, Klebsiella pneumoniae
atggaaatcaaaactaaaatagcattgactgctgactggttagtatcttatgctggtgccgagcgcgttataaaagaattaatagatctgtatcctaatttggacttgttttctgtagttgactttttatccgatgaatcgcgaacgcactttcaaggcaaaagagcaaccactacgtttatacagcggctcccaaaagctgaaacttcttaccaaaaatatttaccgcttatgccagtagccattgaacaacttgatgtttcagcatatgatattgttttatcaagtagtcatgctgtagcaaagggggtattaacaggccctgatcagatgcatattagttatgtacactcccctatccgatatgcttgggatcttcagcaccagtatttacgtgaagcaaagctcgataaaggtctgaagggtataattgctaaatatttattacataaaataaggctatgggattatcgcactgcaaatggagtaaatcattttattgcaaactcacattttattgccagacgaataaaaaaagtatatggaagaaatgctgacgtcatttatcctcctgttgatgtgcgtcgtttcatattaaacgaaaataaagaagactattatgttactgcttctcgtcttgtgccatacaaaagaattgatctcattgtagatgcgtttgctgccatgcctaataaaaaattgattgttataggtgatggctcagaaatgtcgaaaatcaagagcaaagcaactactaatgttgagatcttaggttttcagccgaatgaaattatgcgggattatatgaaaaacgccaaagctttcgtgtttgctgctgaggaagattttggtataaccccggttgaagctcaagcttgtggaactcccgtcattgctttcggaaaaggtggtagtcttgaaacgattcgtccttatggtgttaacaaacctactggagtttttttcgctgaacaaactgttccctctttaatagatgctattaatttattcgagaacatatttgataaaataacccccgaaaattgtagagaaaacgcattgcgcttttccgttgacatatttaaagataccttttcaaagtatattgacgagaaatggtcggagtttaatgttgcaaaaaaaattcaatactaa

SEQ ID NO: 220508 - DNA, 663 bp, Klebsiella pneumoniae
atgtgtataagagacaggtatttattcaagtcagggtataattttgttatttctgatatttcagttgctttatatacaagactatccttctttattatctcattttttgctagcaaaactgaagttgggatatattctgttgcgcttgctttaggtaattcttgggggtttgttaactcttcaattatttcttctttcttcacaaaaatatattctttgaaaaacgaagccgattctcttattatctctgctaaattaaatttattaatttttgttattggtttaattatcactatagggactttaatatttgctccctattttttactttggttttatggtccattatattccgatgcttatatacctctggtcatactttgtatgtcaacaactgttgctggtttaggtggagtagcgacaagatatattgtcagacattcggggtactcatttttgtccaaaaaaatgttcttcactttaattactagcgtattgctatcagtaccattagtttatttttatgggatagtaggagctgcaatagccacttttttaactgaattcatatctttgactttatacaactatttctttaagaatagagttatatttgatttgcataaatcttcagtattattctttcttaaagttagaacataa

SEQ ID NO: 220509 - DNA, 366 bp, Klebsiella pneumoniae
atgaacatggtcgagaatatgctcgatcaggcattcaaaaagcttaagcctcacgagcatcctattctgcactctgaccagggatggcagtatcgtatgagaaggtatcaaaacatccttaaagaacaaggtattacacagagcatgtcaagaaaagggaattgtctggataatgcagtcgtggaatgtttctttggaaccttaaagtcggagtgtttttatcttgacgagttcagtaatataagcgaactgaaggatgctgttacggaatatattgagtactacaacagcagaagaattagcctgaaattaaaaggtctgagtccaattgaatatcgaacccagacctatgtgcctcgtgtttaa

SEQ ID NO: 220510 - DNA, 522 bp, Klebsiella pneumoniae
atgtcaaagccaaaataccccttcgaaaagcgccttgaagtcgtgaatcactacttcacaactgatgatggttacaggatcatctctgcacgttttggtgtaccccgaacccaggtcaggacgtgggttgccctctatgaaaaacatggagaaaaaggtttaattcccaaacctaaaggcgttagtgctgatccagagttgcgcattaaggtcgtgaaagccgtgaccgagcagcagatgtccctcaatcaggctgctgctcactttatgcttgctggtagtggttctgtagccaagtggctgaaagtctatgaggagcacggagaagctggtttacgcgcactcaagatcggcaccaaaagaaacattacaatgtcagttgatccagaaaaagcggcgttagcattggagctgtcgaaagaccgacgtatcgaagatcttgaaagacaagttcgattccttgaaatgcggcttacgtatctaaaaaagctgaaagccttagctcatcccgcgaaaaagtga

SEQ ID NO: 220511 - DNA, 966 bp, Klebsiella pneumoniae
atgcgaaagccaataaatgtatttattatactgatatcggtgctgatactcaccgcgtgtgataacaaaccagataacatgttatccggttattcacatggagaatttgtatacctttcatattctggtaatgaaaaaatagaacggatcttgatcaataaaggagataacgtcgccgcaggacaggagttagtgaagattgagtccttcgatgcgcaaaatattttcctgcgcgctgaggaaaagctatcagcagagagcgctctattacgaaatctggaatctggcgaacggcctgaagagttggatattatacgttcgcagataaaaaaagcacaatcggcagaatcccaggtaaagcggcagcttgggcgatatcgtaatctttacgccaatcatgccatatcgcttgcggaatgggaggatatccgggatgaattaactcaaaaaggcgcacaggttgaagagttaattaatcaactcaaagcacggcaacttcctgcccggcaggatgagattagcaagcagcgctcaatggtggccgcggcaaaactcgaacgggataaggcgctgtgggatgtccagcaaacgacgattgtttctccggtcaatgctaaagtcttcgatattatttatcgtgccggggagcgcccttctgctggtaaaccaataatcagtctgttacctcctgagaatataaaagtacgcttctttatacccgaagcgaagctcggtaaatttaaaatcggatctaaggtaaaacttatatgcgatggttgcgctgagcccattgctggcgttattaactatatcagccctgaggccgagtttacgcctccagttatttatagtacgaaacgtcgtgagaagctcatttttatggcggaggctatccctgcgctgcagcaggcagggcggatgaaaatcggccaaccgtttgatgtggagattattggcgatgaataa

SEQ ID NO: 220512 - DNA, 864 bp, Klebsiella pneumoniae
atgatccgcagtatgaccgcctatgcccgccgtgaaatcaagggtgactggggtagcgccgcatgggagctgcgctcggtaaaccagcgctatctggaaacgtacttccgcctgccggagcagttccgtagtctggagcccgtggtacgcgagcgcattcgcgcccgcctgactcgcggtaaagtcgaatgcaccttgcgttttgaacaagatcccagcgctcagggtgaactcatcctcaacgaaaagctggctaaacagctggtaaacgctgccaactgggtgaaaatgcagagcgatgaaggggaaatcaacccgattgatatcctgcgctggccgggcgtgatggccgccaaagagcaggatctcgacgccatcgccgccgacattctggccgctcttgacggcgcgctggacgacttcatcgtcgcccgcgaaacggaaggccaggccctgaaagcgcttatcgagcagcggcttgaaggcgtgagcggcgaagtggcgaaagttcgcgctcatatgccggaaattctccagtggcagcgcgagcgtctggtcgccaagctggaagatgcggaagtgcagctggaaaataaccgccttgagcaagagctggtgctgatggcgcagcgtatcgacgttgccgaagaactggaccgtctcgaagcgcacgttaaagagacctataacattctgaagaagaaagaagctgtgggtcgccgtctcgactttatgatgcaggagttcaaccgtgaatcgaacaccctggcgtcaaaatcgattaacgccgaggtgaccaactccgcgattgagctgaaggtactcatcgagcaaatgcgcgagcaaatccagaatatcgagtaa

SEQ ID NO: 220513 - DNA, 1260 bp, Klebsiella pneumoniae
atgccaaaactcacagacatgcagatccgcgcatggataaaggccggggagcgattcgaggggcgggcagacgggaacggcttatacctgcgttaccgtgctgccgacaaaatccctacatggagataccgctataaacttgccgggaagtcccgcgccatgctgattggctcttatgctgaactgtcactatcaaaggccagagagacagccaaagagctatcggctcgcgttgcgctgggttatgacgttgccggggagaagcaggagcgcaaaaccgaagcgctggcgaagatggaagcagaaaaaaacgccatgcgcgtttcagagcttgccgctgaatactttgagcgtcagatcctgccgcgctggaagcaccccgatatactccgccgccgtatcgacaaagatataaacccctgcattggcagcatgaaggtggaggacgtgaagccgcgccatattgatgacatgctgaaaggtattgttgaccgtggagcgccgaccatagcaacggacgtgctgagatggacgcgccgcatattcgactacggaatcaaacggcacgcgctggagattaacccctgttcagcctttgaggtggcagacgctggagggaaggaggttagccgcgaccgctggctaacccgcgatgagttaatccagctattcaaagccatgcgcacggctaaggggttcagtcgccagaatgaaatcacgttcaaattactgttagcgttatgcgtccgaaaaatggagttatgcgccgcccgctgggaggagttcgaccttgatcaagccgtctggcgcttgccagaggaacgcagcaaaaacggcgacgctatagacatcccattagcaccgccagccgtcgaatggctgagagagcttaaaacgttctcatgcaatagcgcatgggtactgccagccagaaagatgcaaaaccgcatgatcccccatattcaggaaagcaccctgcccgttgcgctggcgaaggttcgcgctgaaatgccggacgtgccgaacttcactattcacgacttccggcgcacggcccgcacccatttagccgcgctgggcgttgatccggtagtcgcagaaagatgccttaaccacaaaattaaaggcgtggagggtatctataaccgtcaccaatactttgaggaacgcaaagcagcgttagcacagtggtgtgatttgctggtggcgctggaacaggggcaggaatacaacgttactccgctgaggcatacaaaatga

SEQ ID NO: 220514 - DNA, 627 bp, Klebsiella pneumoniae
atgagcaaaaaaccctcggtgattatgaatgagtttatttcatcgtggcgtaagaaacacaatcttcctcatcaagatatatccgatctaaacaaagagagactggatgggttggcttcctttaagcgtgaggggcctcagcctattgagaccagaaagcaagctatccagaggcttacgactctaaaaaaaacgctaactgaattagccgatcagctggatgacatgccaacattaacttgggttcagatgactagcagatgcaaggacgtgtctggaatgagtaggcgagagactggcaagatccggctatgggcggaggccgcacaagacggcatagatgccataaaatcagaacgccgatccaatgtaacccattttagtggcgctggtagaaagacaaatcactttgcctcattcgtaacaaaaaaaattattgaagtttatatggatgaaaccgggatggagccgccaaataccgagccgactgctagagaaaaccgtgagccgtctgggttttttggggttgttgatggcatattgcaatactatggcgttaggaacgctgacgtgtggtatctcacaaagaagaataagggaattaatcgaaaaaataacacgatttaa

SEQ ID NO: 220515 - DNA, 213 bp, Klebsiella pneumoniae
atgcaccaatcagcagaccacgcattaccaaaaaccggatttattcgccgctaccgcctggctgacgcgctgggcgttcacgttgctactgtagatcgctgggtaaaggctaaggccatgccccagcctgttaagctgggcgagaagattaccgcctttgatgcggtagagattaacaactggctggcagagcgtcggggaaaggtggcctga

SEQ ID NO: 220516 - DNA, 186 bp, Klebsiella pneumoniae
atgaaaaaagaaaaccgccccggacagcaggcggctaacatagatattcgcggatctgatgttacgccaccagcgcccaccacacaagtgaaccataacgccgacgctggtggctatcaggggctttctcagcctgaaatttccgacattatgaacctatacccggacaatctcaccgccgcataa

SEQ ID NO: 220517 - DNA, 810 bp, Klebsiella pneumoniae
atgactatcgaaaaaagccgattcagttcgggggccgccccgcaacccaacgttaacacgggagtaattaacggcaacgactttgccgctattgttcccgttattgccggacgcattggcgggcgtgaagccaatattgcgagcgccagagccttgcataaggcgctgggggtgggccgcgactttactaactggattaaaggccgaattgaccagtacggtttcattgccggaaccgattttatccgtgttgaaaatttgagcacgccaaaacgggcgagcgcaaaaactcgccagcgagtagagcatgattatctgctatcgctggatatggctaaagaagtggcaatggttgaacgcaacgagcagggccgcgccgttcggcgttacttcattcagtgtgaggaagcactacagtgcagcgtgccagagattgccgctcagtatcgccgccagctaaaagcccgaatcagcgcggctaacaacttcaagccaatgtgtgaagcgctagacgccgcccgcgcagaacagggcaaacagacacagcagcgccactacagcaatgaaagcaacatgatcgcccgtatcgtgctgggtggcatgaccgctaaggagtgggcgcaggtgaacggtatcgacggcgaaccgcgcgatagcatgagtgccgcccaactggaacacctctgctacctggagggtacaaacatcacgctgatcgatatgggcatggagtacggccagcgtaaagcggaattaacccgcctctctcagcgttggctggctaaacgtctgggggctaacgatgaataa

SEQ ID NO: 220518 - DNA, 261 bp, Klebsiella pneumoniae
atgaatacagtcgccgtaattgaaccagaaataatcccgacaggtgacgcaacggcagcggtgcggtatgccagtgaattgcttgagttatggaatctttatctggacgggccattacgtgccgccaatccgctttatggcgccagacttgcgacattaatcaccgagttgagatgcgcaaccattagaaccgagcgcaaagttaatcgcctggctgatgaactaacgaagattcgtgagtaccgggagggcagcgcatga

SEQ ID NO: 220519 - DNA, 456 bp, Klebsiella pneumoniae
atgacagcacaactatcagcatacgggcggctggtggcagatccccagaccagaacgacgaacagcggaacgagcatggcaatggggcgtttagcggtatcactgccctgcaatgccgcagcagaggggcaggctactttctggctgggcgttatcgcctttggtaaacaggccgacgcgctggcccgtcacgtaaagggcgatatgttgagcgtatcgggggccatgcagcttaaccaatggacggggaaagatggcgggacacagcagggctatcagatagtggcagacagtgtaatcagcgcaaagacggtaaggccgggcgggaagcgtagcgcgtcagctggcacagataataagggccataccacacaacccgcgccgggatgggaaatatacgataccccagacgcctttgaccagcgcccgccatttgatgatgaaacacctttctga

SEQ ID NO: 220520 - DNA, 642 bp, Klebsiella pneumoniae; identical to SEQ ID NO: 135024

SEQ ID NO: 220521 - DNA, 306 bp, Klebsiella pneumoniae; identical to SEQ ID NO: 135023

SEQ ID NO: 220522 - DNA, 531 bp, Klebsiella pneumoniae
gtgagagaccagacccggcattacacccaccagcttccgcgcttgacgttggcagacctgaaagccatgcggcggatgttcgccgacgggagcacggcgctacagaaagaaaccagcgtgggggtagtgaggtttaccgcaaagggaacggactatcgcgcagagatcggcggaaaggttttgccgttgagattctgcgagacggtgacggggtacggagtgaggttgtggtattgctgcccgcactgtaacagccgcagggcatcgctgttcgttggggcgcgtgatatcgcttgccgggaatgctgggggttacactacgccagccagagcgaagggaaatttaacagaatgcgccgaagaatacggaaaatgcgggcggagttatggcctgactataaacccgccattagcctgtttaatcatccgtacctgttcccgaagccgaaggggatgcgatgggagacattcacagaaaaacggggggcgctggtggcgtatgaggaatcatactggcaggcattccggtag

SEQ ID NO: 220523 - DNA, 363 bp, Klebsiella pneumoniae
atgagaatgaccagccgcaaaaaagagatactcagctactttgagccggataacctcgaatgggtgacgggtgagattggtgcgccgccgctcgatgtgtcgggtgtggcctacctgcttcatggcatggtgtcgttcgataagcgccaccagctcgaatctacacggcgcacgctcgaaagcatggttgccggggggctactggaacgtgtgacagtgtatgaatcgcgtcaggtaaagcgtggcggtgaaactagcgcaacggtcgtgcgctacggtttacccggtcagtgtgccgttgtgcgcgataatggcggcgctgatagtgcgattgacggcgaatgtgagcgagtggtgcgctga

SEQ ID NO: 220524 - DNA, 2010 bp, Klebsiella pneumoniae
atgtctcatttattttatggcgtggcgtattacgatgaatatatgccggaagatcggctggctaaggatatcgccttaatgcgcgaaaccggcattaacgtggtgcgtattgccgagtccacctggagtacgctggagcctgaagagggccagtataatttctaccatatcgaccgggtgctggaggcgatgcatgaggccggcattgcggtcatcgtcgggacgcccacctacgcggtcccggcctggctggcggcgaaacatcccgatattctggtcaccaccgtcgcggggcagcaaaaatatggtccgcggcagatcatggatatcgtcaacccgacctttcgccgctatgccgaaaaaattatccgcacgctgatggcccatgtgcaacaccatccggcgattatcggctggcaactggataacgaaaccaagcattacgacaatattggccgctatatgcaggagggcttcgtgcgcagcctgcaggagaaatatcctgacctccggcagctgaatcacgatttcggcctggattactggagcaaccgcattgaccgctggcaggattttccgccggtggaaaacaccatcaacgccagcctcgcctgcgccttctcccgctatcagcgtcagcaggtcaccgagtatctggcctggcaggcggccatcgttcgggaatacgcccagccgcaccagttcgtcacccacaacttcgatttcgaatggcgcggttactcttacggcgtgcagccgcgggtcgaccattttgcggcggcgcaggcgctggatatcgccggcgtcgatatctatcacccgagtcaggcacacctgaccggacgggaaatcgcctttggcggcgccatcacccgctcgcttaagccgggccagaactacttcgtgctggaaacccaggctcagggcttcgcccagtggacccccttcccgggccagctacgcctgcaggcattcagccatatcgcctccggcgccgccatggtctcctactggcactggcattcgattcataacgcctttgaaacctactggaaggggctgctcagccacgacttctcgcgcaacccaaccttgcaggaagctaccaccatcggcgccgatttcgcccgcctgtcgccgcagctggcggagctgaaggccgaaaatgacgtcgcgttgctaataagtaatgaggcgatggacgctctcaatcacttccttcccggcgacgccaggggcaacatttataacgatatcttccgccgcttccacgatgcgctgtatgaccacaatatcagcctcgacatcatccacgatgtgaacgaggaaacctcgcgctaccgggtgctgatcgttcctggtctgtacgccgccgatgagggcctgctaacgcggattaacgactatatcgcccggggcggcagagcgctgatcggctttaaatcaggctttagcgatgaaaacgtcaaggtgcgcagcagcgcgcagccgggggttttgcgccagagctgcggcgtcagctacagccagttcaccctgccggaagagacgacggtaagctcttgctgcgcagagattgattgtcgcaatgacaatcaggctgagctgtggatggaattgctgacgcccgatgacgggacccgcaccctgctgcgctatcagcacccggcatggggcgaatacgccgccgcaacggaggcggattacggtcagggtcgcgccctgtacgttggctttctgccgcagaagggcctgattagccagctgtttgatgtcctgacggcggatctcacgctgaactcgcgaacttccgcctatcgctatccgttagtggttaaaaagatgcgtaaccgcgccggaaataatatccacttcctgttcaattactccggcgaggcgatggatgttgtcagcgagaccctgggtaccgcgctgctgagcggggagacagtatacgtcggccagccgttgcgcctcggggcctgggaatttactatcatcgaaagctaa

SEQ ID NO: 220525 - DNA, 231 bp, Klebsiella pneumoniae
atggcgccggaggtgtcctgcccggcggcgctgcgcttgccgggcctggggtataggagcttacgtgaggatgccgtaggccggataagcgtagcgccatccggcacaaaggcgggtatggcgccggaggtgtcctccccggcggcgctgcgcttgccgggtcgggagtgggattccgcggagcgtttcgcgaaaaaacacctaccgccctcaaacaggaaggccggttag

SEQ ID NO: 220526 - DNA, 1266 bp, Klebsiella pneumoniae
atggctctgagtgatgtgaaggttcgttcggctaagcctgaagcaaaagcctataaactaactgacggtgaaggcatggttttgctggttcaccctaacggctccaaatactggcggcttcgttatcgcttcggcggcaaagagaaaatgctggcattgggaaaatatcctgaagtttcgctggcggatgccagggcacgccgggatgaagcccgtaagctgttagcaaacagtgtcgatcccagtgagaacaagaaagccgttaaggtagatcaggagcaagaggcaataacgtttgaagtggtcgccagagactggcatgccagtaatcagaaatggtcttcagcgcatagcgctcgtgtattgaaaagtctcgaagacaatttatttgcttcagttgggaagcgaaatatcaaagatattggtactcgtgacttactggtgccaattaaagcggtggaaaagtcaggacgccttgaagtggctgcgcgtcttcaacagcgaacaacggcaataatgcgctttgcggtacagaacggcttaattgactacaatcctgcacaagagatcgctggtgcgatcgcaacagctaaacgaaagcatcgcgctgcgctagatctcaaccgcattcctgagttactccatcgtattgatcgctactccggtaggccgttaactagattagccgtcgaactcacattgttggttttcattcgttcaagcgaactgcgttttgcccgttggtcagaagtggattttgaaacggccatgtggacgattccaggtgagcgtgaaccgctggaaggtgttaaacattctcagcgtggttcgaagatgcggactccacatcttgttcctttgtcgcggcaggctctggctattttggaaaagatcaaaagcatgaatgggaaccttgacctgatcttcgtaggagatcacgatccgcgtaaacccatgagtgagaacacggtgaacaaggctctacgagtgatgggctatgacacgaaaacggaagtctgtgggcatggtttcaggacaatggcctgtagctcattgattgaatcgggtctatggtcgagggatgccgtagagcggcagatgagccatcaggagcgtagctctgttagggctgcctacatccataaagcggaacatctgggggagcgcaggttgatgctgcagtggtgggcggattatcttgatgcgaatcgcaatgaggccacatcaccttatctctatgcaaagattaatgaacccttatcttga

SEQ ID NO: 220527 - DNA, 276 bp, Klebsiella pneumoniae
atgcgatacggcagcctgagcgcacagggctggctgagttttagtgaaatcgcgatgtggggggataaacccttacggctgcggctatcgatgaaagcgatcgccgacgggcagtacgggcgggaaagccgttttactgacatgcagaatatgaacccggaaacgctcgcccggactagcgaagcgccgccgggcgataatcgaaagagcatgttgtctgccaccggtcacgccttcaggctccgcgctctcctcgggcgtgaatttttaccttag

SEQ ID NO: 220528 - DNA, 828 bp, Klebsiella pneumoniae
atgaatgagccaatcactgagcagttatacaataaagttgtaaatttcgttaataaaatggatgggagtgtgcgctttgattatatatctaaggccttgcgcattcctcctgacactcttgatgaaattgtggacaggatgattgctgatggagtcgttgttaatacaggaacggtaggtgaatatttaccagtaaaacacgcatcttccaaaaacactgataaagataatcgattctgtacatctcaaaaaaacaatgatagtagtggactaaaatttcttgttgggagagtagcattagttatagccataatattttttattataacctgcttttatgcttacagagcaccgatatcgtttgtttttctaatcccagccataatggctgcatttgtttttacaaaccaaaatcatggtggagaaggtttcctagggttgagttcaatctctgcatgtttaatctttttgttcctcactaatgcgcagacaccaatatttggagaagcatatgaattaagaaagcagagggatgaaatgaaaaatgaagttactaggaaatcaaaggaagaagatcagcaacagctaaatgatatccttaacgccagggagcatataaaagggatgctaaaagacccctcctcagctaaattttctggtgaattcattggaaaaaatgatgctatctgtggccatatcaacgctaaaaatagttttggtggttacactggggagtctcgttatatattttctgtcaatttttctgcaatagatgaaggcaccacttcctttaataaggagtgggagagacagtgttatcttaattga

SEQ ID NO: 220529 - DNA, 462 bp, Klebsiella pneumoniae
atggctgataaaacttcgcctgaatatgcgatgttgccggcgggcaccattgtgaaatacggggagcctgacgctgccacgtcagcgctgaaaccgctgattaactgtaaagcgctgggtgcaatggggcagacggggggctttgtcgactgcaccacgttactggataagcagaaacagtccattagcgatctgcctgacgggcctgaaaagtcgctgggcttcattgatgatccgggcaataccgattttgccgcgctgctgaacgcagcagaggcccgcaagaccatccagttatacgtcgaattacccaacaagcgaacagcgacgatgctcctggcgctgtccggctggcagatgaatgaaatcgccgctccggcgaatgaggtcatccagatcactgttcagggtaagcagaacaagatcacctgggggaccgtcgctgtctccggcggcgcctga

SEQ ID NO: 220530 - DNA, 402 bp, Klebsiella pneumoniae
gtgatccgaatggaagttaaagggctggatgagctggagcggcagttaatggccctgggcgaaaaagtggcgacgaaggtattgcgggatgccgggcgcgaagcgctaaaggtcgtcgaggaagatatgaagcagcatgccggctttgacgaaacgtctgccgggccgcacatgcgggactcaatcaaaatccgctcttccacccgcaagggtaaagggaacgcggttgtaacgctccgtgtcggccccagcaagcagcaccatatgaaggcgctggcgcaggagtttggcacggttaaacaggttgcagacccctttatccgacccgccctggattacaacctccagaccgttttgcgcgtgttaaccgtggaaatccgaaacggcattgaaaacaggtag

SEQ ID NO: 220531 - DNA, 261 bp, Klebsiella pneumoniae
atggctgcgaaaaataaagcagtggagccggaagaaacagccacacaggacaatcatgcgaccgtggtcgcacaggcagagcgtaaatccgttgtgttccttgggccgcaccaccgttattcccgtggagatatcgcgtgctttgaaggatcgcgcgccgaagaactggttaagcggcgtatcgcggtatggccggaggatgccgaacgtgcgctgaaaccgaagccgggagacagcgattttgatactgacattggatga

SEQ ID NO: 220532 - DNA, 1287 bp, Klebsiella pneumoniae
atgccacatattgaagaattgcgtcgtcagcgtgcgggtatcaacgaacaggttcaggccctggcaaccattgacgccagcggcagcacgctgactgcggagcagctgacggagtttgcgaacctgcagcagcagttcactgatatcagcgccaaaattgaacgcctggaagccgccgaacgtgctgcggcgctggtcgcaaaacccgtgaaagcgactcagcaggcccccggcattattgttaagcaggagccgaaacagtacaccggtgctggcatgacccgactggttatgtctgtcgccgcaggcgcagggaatctgcaggacgcggcaaaattcgcttcagaagagctgaatgaccagtctgtatcgatggccatttccaccgcagcggcgtcagggggtgtgcttattccgcagaacctccacagtgaggtgatcgagctactgagcgaccgaaccatcgtccgcaagctgggtgcccgtcccgttccgctgcctaacggtaatatgacactaccacgcgtggccggtggagcaacggcaagctacacaggagaaaacaaagacgccaagacatcagaaacacgctttgatgatgtaaaactgacggcgaaaactctgattgcgatggtgcctatttccaatgcactgattggccgcgccggattcaacgtcgagcagttggtcctgcaggatattctgaccgccatctcagtgcgtgaggataaagcctttatgcgcgatgacggtaccggcgatacaccgattggtatgaaggcgcgcgcgacgcagtggaaccgcctgctgccgtgggaagctgatgcagcgatcaacctgaatacggttgacgagtacctggacaagatcattttgatggcgatggacggcaacagcaacatgatcagcagcggctggggcatgtcgaaccgtacctatatgaagttgtttgggctgcgtgacggcaacggcaacaaagtctatccggaaatggctcagggattacttaaaggatatccggttcagcgtaccagcgcgatccctgcgaatctggggaccgggggtaaggagactgagatttactttgctgacttcaatgatgtggttatcgctgaagacggcaatatgaaagtcgacttctcgaaggaagcctcttatatcgatgccgatggcaccctggtatctgcgttttcccgtaaccagtcgctaatccgcgttgttactgagcatgatattggcttccgtcatccggaaggcctggtgctgggtaccggcgtcctgttctaa

SEQ ID NO: 220533 - DNA, 225 bp, Klebsiella pneumoniae
atgatgaatacccagaagcttctggatacatacatgttagttggtgccggtctttctcgcgtaaaatatgagattttcacgggagatgaagggtcatatgcatttattacgatttatgcatatgagcctcatttccatattaagggctatgattccttaaagttagacgaaactgttgatgtcagatctcagatcgaagggcatttcgcatatacctaccagtag

SEQ ID NO: 220534 - DNA, 987 bp, Klebsiella pneumoniae
atgaactacaaacatctggggcgtaccggtctgcgggtgagccgcatcggtctcggtaccatgaatttcggcgagctgacggatgagtcggccagcttcaggatcatggatgaagccgtggatgcaggtatcaactttttcgataccgctgacgtctatggcgggccgcagtcgccggatatggcaaagggttacggaacatccgaagaaatcatcggtaactggttagcgcgcagtggtcagcgtgaccgggtagtgctggccacgaaagtttaccagccgatggacacgggtccgaacgacaaatacctgtctgcctaccatatccgccgggcctgtgaggccagcctgaaaaggctgaaaacggaccatatcgatctctatcagatgcaccatatcgatcggaacacgccctgggaggagatctggcaggcgatggaacagctcatccgtgagggtaaaatcagctacgtgggcagtagtaactttgctggctgggatattgccacggcacagtgcaaggctgacgcgcgcaacctgctggggctggccacggaacagagcctgtacaatctgacccagcgcacagttgagctggaggtcattccggcgctgcgtcattacggcattggcctgatcccgtggagcccggtcgggatggggatgctgggtggcgtgctgaaaaaaattgccggtggccgccgggcatcaccgcagttgcaggcacaaatcaaccgcctgcggccacaactggaggcctgggaaacactgtgtgatgagctgggggaaacaccatcagacgtcgcgctggcctggctgctgcagaaccctgtggttagcgccgtgctcagtggtccgcgtacagttgaacagctccgccagaatctcaatgccctgacgctgtctctttcagacgatacgctcaaaaggctggataccatctggccgggaccaggcggtgaggcacctgaagcttacgcgtggtaa

SEQ ID NO: 220535 - DNA, 1029 bp, Klebsiella pneumoniae
atgaaaaaatttacgttagcgctggggctgttgatcagtgcatttgcttcctctgcggcggatatgtcccgtggggccgataatttttataaaagcgataaggtgacgcagcaaaaagtcacctttaaaaaccagtatcagatggccgtggtcggcaacctgtttatcccgaaaacgatgggccagaacacccgacacccggcgatcgtcgttggtcacccgatgggagccgttaaggaacagagttcaaatctctatgcgcagaagctggcggagcagggttttgtcacgctggctatcgatctctctttctggggagaaagcgagggcaaaccggggcatctgatttcaccggaaatctacacagatgatttcagcgcggcggttgattatctgagtacacagtcgtttgtcgatccggataacgtcggtgtgctgggtatctgcggcagcggaagttttgttatcagtgccgccaagattgacccgcgtatgaaagccattgccacggtcagcatgtatgacatggggagtgcgttccgtaatggccttaatcattcccagacgggagaacaacgtaaggcctttatccagtcagccattgagcaacggttagccgagtttaaggggggcgagacggcttatatccctggcaccgtgaacaaactggatgactccacaccggatattcagcgtgagttctttgatttctaccgcacagaacgcggcggctacaccccgcagggtcagaaagaagaactgacgacgaaaccgatgctaagcagtattggcaagtttatgaacttctatccgttcaacgatattgaaaccatctctccgcgcccgatgctgtttattaccggcgatcaggcacactcaaaagagttcagcgaggacgctttcaaacgcgctggtcagcctaaagaattgtatgtcgtaccgggcgcagggcacgtcgatctttatgaccgtaccgacgtaatcccgtttaacaagctgacagactttttccgtaaaaatctgcaataa

SEQ ID NO: 220536 - DNA, 1047 bp, Klebsiella pneumoniae
atgacagttaaagcttacggtgcccatgcgggcacactgccgctggagccgatggatatcacccgtcgcgcccccggtgcccatgatgtgcagattgatatcgcgtactgcggtgtctgccattcggatatccaccaggtacgcgctgaatgggccgggacgctctatccgtgcgtgccgggacatgaaattgtcggccgtgtagtggccgttggcgatcacgtctccggtttttgtacaggggacctggtgggggtcggctgcattgtcgacagctgccgccactgcagtgactgtgacgacggactggagaactactgcgaccatatgacggggacatataatttcccgacgccggatgcgccgggccacacgctgggcggatattcgcagcagattgtggtgcatgaacgctacgtcctgcgcgttactcacccggaagcgcagctggccgccgtggcaccgctgctgtgcgcggggatcacaacgtactcaccgctgcgtcactggcaggcgggccccggcaaaaaggtcggagtggtcggtatcggtggactggggcatatggggatcaagcttgcgcacgccatgggcgcgcatgtcgtggcctttaccacgtctgagtcaaaacgtgacgccgccagagcgcttggtgcagatgaggtggtggtctcccgtcatgccagcgaaatggaagcccatgcaaagagcttcgattttatcctcaacaccgttgctgcgccgcataacctcgacgtgttcactgcgctgctgaaacgtgatggcacgatgaccctggtgggtgcgccagccacgccgcatgacgcgccagaggtgttcagcctcatcatgaagcgcagatcgattgccgggtcgatgattggcggcattcctgaaacgcaggagatgctcgatttctgcgcccaacacggcattgtcgccgacattgagcttatccgcgccgaccagattaacgatgcctatgagcgcatgctcaggggcgatgtgcattaccggtttgtcattgataacgccaccctggcttaa

SEQ ID NO: 220537 - DNA, 1218 bp, Klebsiella pneumoniae
atgagtaataagacagacgaaaacagaaaaaaaaacaccggaagcgggaaacagcctgcgcactggagtggtgtctttgccatgacgctgtgcgtcttcgccctgatcgcctccgaattcatgccggtcagcctgctgacaccgatggcgcagacccttcgtgtcaccgaaggcatggccggacagggcatcgccatttccggggcatttgcagtggtaaccagcctgtttatttccgtgctggcaggcacgcttaaccggaaaacgctgctgctcggcctgacctgcattatggcaatttccggtgctgttattgcgatggcacccaattacctgacctatatggcgggcagggccctgattggcattgtggtcggcggattctggtcaatgtcggccgcgacggcaatgcgtctggtcccggtgcatcgtgttccgctggcgctggctattttcaacagcggcaatgctctggctaccgtcgtggctgctcctctgggcagctggctcggatcggttgttggctggcggggggccttcttctgcctggtgccggtcgccatcatcgcgtttgtctggcaattactcagtctgccttccatgtcggtcacccgtcaggcggcggcttcccgcaacgttttcacgctgtttcgtcgccgggtggtcacgctgggcatgctgggtgtggggatcttctttatggggcaattcacgctatttacctacatcaggcctttccttgagacggtgacgcgggtggatgccgcaacggtgaccctggtcctgctggttattggtgtcgcgggtttcatcggcactaccctgattggccgggtgttaaaacgcggcttctacccgaccctgatggccatcccggtactgatggccatcaccgcgctggcactgattgccttcggcagtcaggtagccatcgtgacggcgctgctcgggctgtgggggctgatttccactgcagcaccagtgggatggtgggcatgggttccgcgtaccttcccgcagaatgccgaagcgggcggcggactgatggtggcgatggtgcagatgtccattgctctcggttcgacggtgggcggcctgcttttcgaccatcacggctaccagagcaccttcctggccagcgccgcgatgctgattatcgcaaccgtactgatctttctgacctcgcgggcagacacttctgccgcagaccattcataa

SEQ ID NO: 220538 - DNA, 351 bp, Klebsiella pneumoniae
atgaaaattgagatcattgtggagggagaaaccgccaccgccaccctctttgatacgccgacaggccgggactttgcgtctttgcttcccctcagcctgacgctggaagactatgacgatattgagcgtataagcgacctgccgcgcaggctttccacggtgcaggcaccggacggcatgacgccggaagccggagatatcacttactacgcgccctggggcaacctggcgatttttgcccggggcagggcttacgcccgttcactgatcccgttagggaaagtggattccggactgccggtcctgcagcgccacggacctcttgcggtgcagatcagggtcgccaactga

SEQ ID NO: 220539 - DNA, 900 bp, Klebsiella pneumoniae
atggccagacgcaatcttaacgacttactctctttcgtcaccgtggcgcgtgagggcagctttacgcgcgctgccgcccagctcggcgtgacccagcccgcactgagccaggcgatttccgggctggaagaacggatgcaaatccgcctgctgacaaggaccacgcgcagtgtgtcagtgacggctgccggggagcgcctgctgcagtctgtgggacatcgtattgatgagattgaagccgagctggacatgctgacggcactgcgtgataaacctgccgggaccgtccgtattacatgtggacctaatgttctgaagaccacactgctgccaaagctgacaccactgttacgcgaatatcctgatattcatattgagtttgatgccaaccacggcttccgggatatcgttgcggatcgttttgatgccggcgtgaggctcggagacactatcgacaaagatatgatagccgtacccattggcccgaaactgcgcatggcggctgtagcttcccctgagtatttcgcccggtgcgccgcccctcagacgccacgcgatctgatgcaacactgctgtattaatgagcgcatggttcaatcggggaaaatttacgcctgggagtttgagcaggaaagcggtaaatttcacgttcgggttgaagggcaactgacgtttaacacatcggaacacgtcgttgacgcagctcttgccggactgggcattgcctttttacctgaagaggagttcggcacacatctgcaggaaggaaaactgatccgcgtgcttgaagaatggtgccgtccttttcccggctactatctttattatcccagccgtaaacagccttccccagcgttttcactcgttgtggatgcgttgcgtattaaccggaaaatttaa

SEQ ID NO: 220540 - DNA, 555 bp, Klebsiella pneumoniae
atgcaaaccatctcttttgaaaattatacccaagacatggcggtgcaactgaaaaccaaaaatcactattcgctgacgcgccgcgatcgccagaagtgtagggctatttttgccgctgttcaggaatgggaatcttcattacctggtcgcgcgcaggagcacgtcgcacagcaggtggccgaacagtgggagaaacaaaacggtcgtggcatcagcgttaataaacaaaatctgtaccgctacctgaaaaacgaatccggatcagagaagtacaccagctacgtcatgcagctttcaggagcgatcgctgatgcgatgcctattgagattgcgcgcaaacacggattgaaacgtggattgactgaaagcgagctggtggctcaagcaatcaaagagtgtagcgaagcgcaccaggcaaaattgcttggtgctccgttgcagaagttagagcgtgaaattcgggaggcagcaattgcactttttaacatgcttcctgcagatgcggcgggaccacttctggcgagcattagcgccgtagcgccgcagtttttctaa

SEQ ID NO: 220541 - DNA, 225 bp, Klebsiella pneumoniae
atgaactacatttcgcatctacggaaaaaagccaacatttcgcagcaagccttggctaaggcggctggttggaaccaacctcggttagccaactatgaaaaatccttacgcgttccaagcctggctgattctcgtcatatcgtggccgcacttaatacgttaggggttagttgttcgcttgatgatgtattccctccagaaccctcaaatcctagggagaaataa

SEQ ID NO: 220542 - DNA, 243 bp, Klebsiella pneumoniae
atggggaaagataatatctatgggcctggagaaagttttagtaggggtatggagataggcaagactaccattttccgccaaaacagaccggtaaaattccgtctggaaatggttaacgggagtgttgtggaggggattatcccggctaactctgaatttaagattacgcctcaggatggggatatcaaaaaattcgacattataatcgaagatactcctaagtctccgcaggcaattgaataa

SEQ ID NO: 220543 - DNA, 747 bp, Klebsiella pneumoniae
atgaagaaggtgattttagcggcgttaattggactttcaggcgtggctcatgccgaatggaaacatgaagttactcaagacaaaatggggaggggtagcgatgaggtcgctaccgtcgtaagtagcaatactttatctcttcagcctccttatgagggaaaacaatatgcaacgttttcattgagaagtcttagaggcgaaaataatgaatttgttgtttcagtagagaaggggcaaataatttgcgagcaagatggatgcggattattagttagggtggatgatgaaaaggcatttcgacttattggctctcatcctaaagatggaagctctgatatggttgttggttcaattaacacagaagatttaagaaaaataaaaaaagcaaaatcaattttaattgaattgactatttaccagaatggcgagcatgtccttgagtttgatagtaaagataatccattcgtcggtaggaaaacttaccttatctctgagattagagagatgattgattctggaaaacctccaaagcacacaaaaacatcagaggttcctatggatatgcctaaatttgatatatgcaaaaaagtagcaaataaaagcgctgaggatgggaagatcaccgtcatagaggtgaacaaaaaggatgaattcactactgctacgtatggcgaggattctgttatgaagcttgcgtgtaggagaggtagcaaaacgtctatgctttcattttttagctatgattaa

SEQ ID NO: 220544 - DNA, 381 bp, Klebsiella pneumoniae
atgaagaaaattttagtcgctactgcgattgctttgactctggcaggctgcgcttcctcaggaaaccagcaactcagcaaggaaaccgaaatcagcgtaaagtctaaactgcaggaagggaaaactaccaaggccgaggttaaaacgacattcggttccccggattcagtttcgtatactgacggcggcaatgagatctggaagtacgccttcgccaaagtaaaagttaacgggactacgttcatacctttctatggcctcttccataacggaactaacggcaccaagaaagaacttaccatcctgtttaaagacgatgtagtagccaagtacacaatggcagagtcggctatcaatactaaatctggctgggcagattaa

SEQ ID NO: 220545 - DNA, 261 bp, Klebsiella pneumoniae
atgcatggcggcatgactcagtccataattgaagtctacgacgtttccctcggggtaagagctccctgcaaaggtgatgatgacaacgcccatcctgtggttttatggcgcacgacaggggataaggattgcgagggaataatattccttcatgagttggacatcgccgtcgttaaatcaaccgatggaacagtgctccatgaatggcacggtgctaaaagccaaaagcagaaaagagagcaaatcccctcattcctatag

SEQ ID NO: 220546 - DNA, 402 bp, Klebsiella pneumoniae
atggtaactctcgaccaagcgaaggagtatctggaaggtcaggggattgccatccctgactttgtactccaggcgttcgttgatgaggcgaacagcattcaggactgccttgatgcacattacccgacatcgacagccttgcttattcagctctacctcctagcgctgatggggctcgggagtggggataaatacatttccagccagacggcgccaagcggagcatcccgctcattccgttatcagtcattttcagacagatggaaggcatccgtaaacctgctgcgcagtctggataaatacggatgcgccagcgctctgattcctgcagaccctaccgcctcgccggcattcgctgggatctggataggtcgaggcggttgcatgtgcgggagtaagtga

SEQ ID NO: 220547 - DNA, 294 bp, Klebsiella pneumoniae; identical to SEQ ID NO: 200156

SEQ ID NO: 220548 - DNA, 1077 bp, Klebsiella pneumoniae
atgtacttttctaatgagacactggcgactaatgctcgccttggcgctcactggaatgagttgtgggctaaccgcaacatgtggaacgcgcaacatgacgctatgattgctgtcaaccgcgcgcacatgacgccagaaatgttggcatgtaacgctgttggaggtttttctcgtgatttctgggctgagattgataaccagatcctgcagctacgcgatcaggaagatggtatggaaatcatcaatgacctgatgggcgtccagaccgtactttcagttggcaagacggcgaagctatataacgtagtaggcgatattgctgatgatgtttctgtgagcatcgacggtcaggctccgttctcctttgaccacaccgactatgctagtgatggcgaccctattccggtgtttaccgccggctatggggttaactggcgtcacgcagcaggtcttaattcggttggtgtagatctggtgctcgactcgcaaatggcgaaactcaaaaaagtaaacaagcgccgtgttgcttattacctttcaggtgatgccaatattcaggtgcagggttatcctgcccagggtatgaaaaaccaccgcaacaccaagaaaattaaccttggctctggcgcaggtggcgtaaacatcgatctgactaccgccactactgagcagatcattgagttcttcggaaagggcgctttcggaacaacggcacgtgccaacaaggtttcttcctatgacgtaatgtgggtatctgatgagatctgggctaacttggcaaaaccgtacgtagtgaacggtgtgattagtggcaatgttctgcaggcggttctgccgttcgcgccagttaaagaaatccgcccaacgttcgctctgtccggtaatgagttcattgcttacgtccgccgtcgcgatgtgatttctccgcttgttggtatggctcagggcgttattgcactacctcgcccgctgccaaacgttaactacaacttccagatcatgtctgctgaaggtctgcaaatcactgcagacgatcagggcctgtctggcgttgtctacggcgcgaacctggcgtaa

SEQ ID NO: 220549 - DNA, 450 bp, Klebsiella pneumoniae
atggcacgttatcgtcgcgttaatatcgacggtctgtctctttacaagaccgaaacccgcaccacggctgccgatcttcttcctggcaccgccgccaccatcaactcctctgataaatttgctcaggcaaccgcactaactggccgcctgtacattatcgatgtcggctaccaccaaggactgactatcaccgaagcaattcctgccggtgattccgcggtcggcaactatgtcgaagagggacgtgagctggcgttacgctgcctgcctggtgcgtataagaaagacagccctatcaaacttgggacggctggtcagtttaccctggcaaccgatgacactgattcagtgatcggatacagccaggatgaatacaccatcgcggccagcactaccgatttcattcgcgtgcgcatgcgcgttggcactgtcgccgcagctggcgcgtaa

SEQ ID NO: 220550 - DNA, 1266 bp, Klebsiella pneumoniae
atgcctatgcaggtcaatatcaccaccaaggtgaacagccagtctatccggcgcgaaacatacaacggtcgtgaacatctggtgctgccgagttacacgctgccggccaatgtcgtcatgaatggcggtctgtacacgcaggaagaaatcgacgcccattatcaggggcttgaaggcaccctggcgccgctgggacatccgcaggttaacggtcagtttgtatctgccttctcaccggagggtatcaatgccggccatatcggtgcgtggaaccgcaatgttaagaagtccggtaaccgtatctatctcgaaaagtgggtcgatgtggcacgcgctggcgagtcggaaggcggtaaagaattgcttgagcgtgtcgcggctatcgagcgcggtgaagacgtcccacccattcacaccagtgtggcggcattcctcgaccagcttgaaccaaatgagcagcagcgcgcaacaggcgctgattgggtggcaaaaatccacagcatggaccatgacgcgattcttctgcatgaggtcggagcggccacccctgagcaaggtgttggcctgatggttaacgctgacatggcgaagccgttaaaagccaattctggcgcgctgatcggagaatcttaccgggagcgcgagcagcgcctcgatagagctgccaaagctaagtttgcggccggccaggacgaatacgcctgggtggctgacttcactgactcgcaagcggtaatcatccgtaacggcggcaatgctgaggtgtttggctacaagtcagaaggcgggattatcaccttcgacgataccggcaccgcagttgcacgacaggagtcgtgggtggctgtcgtcactaacaaactcaaagctctattcacaccgcaggaacagcctgcaccaaaccacaaaacggagggcgacatgcctttaaccaaagaagaactggaacaaatcggcagcatgatcggccaggctgttgcgactaataccgatgcggctattaagccccttgtagaaaaggttgatgcgctgcaggccaatcagcagcaactggcagaaaccctgacagccaactcccgcgctgaagaaaaaaccaagcgtgaagcagttgcgaaagtccacggcgatatcgtcgccaatgcgctgtctggagaagcgctggatgcgatgtttaaaactatcggtgaagccgctccgttgggaaccaacaatgctcagcagccgaaagaaactggcgcgcctgccgcatctgaatactttaaataa

SEQ ID NO: 220551 - DNA, 927 bp, Klebsiella pneumoniae
atggcagcgaagaagacgaagccaccgattctaccgcgtaactatcaggacccgaccggagttgatgcgctggaacgccgggcgatgaaagacttcgccaggcggatgaataagattggcaaagcgtacaaagcagcactcgacaaaataccttcctctctcgcagtaaacgccagatacgaataccagctaaacccaacgatactctccatcatcctgaatgatgccagttatctggttgatcaggtgcttctggatggtaacgagtacgacctgtggttttatgagtatgtcgatttggcgtcagagaaaggcactggacagtcattctacaaccttagtcagcagtcgccggtgtacgccgccggacgtgagtccctggcatccatccttgcaagcgacccataccagcaacgaatggcgttggtgcatgcccgtgtttttgaggaaatgaagggccttactgctgacgttaagcgcgacatggcgcgagtgctgactgatggcgtagggcgcggccttaatccccgagacattgctcgcaacctcacagatcagactggcatcgagaagcgccgggcgaaccgtatagcccgcaccgaagtcactaccgcgctacgccgggctaagtgggatgaagatcaggaggccaacgacctatacggcctgaaaactttactggttcacatctctgcactctcgccgacaaccaggcatacccacgccgtgcgtcacgcacacctctacacaaatgaagaggtccgtgactggtacagcaaggatgccaacagcattaactgcaagtgtactcagcagtcagtgttagtcgatgaagagggcaagccgatttatccggacaccatcaccaaacttaaacaggaatacaaaacgatgcaggcgcggggttacgcctgggcggagaaataa

SEQ ID NO: 220552 - DNA, 1350 bp, Klebsiella pneumoniae
atgactgacaaattaacactcgccgtcaaccatgcgttgaacgatgcgcggatggcgcgtgcccgtatgggactgatggcaccgacgatgggactggacaataagcgccattcagcatggtgcgagtatggtttccctgagcaggtcacctacgaaaacctttacgcgctgtatcggcgcggtggtatcgctcacggtgctgttgagaaactggtgggcaagtgctggcagacaaacccggaaatcatcgagggtgatgatgccgatgagagcgaagacgaaaccgcctgggagcgcaagtcaaaacaggtattcaccaatcggttttggcgctcattcgcagaggcagatcgccgtcgtcttgtaggtcgatatgcaggcatcatccttcatgtccgcgatgaaaaggactggaaccttcctgtaaccaaaggccgaggacttcagaaaatatccgtggcgtgggccggatcgctcacggttagcgagtgggataccggcctgaactcgaagacatacggccagcccaagatgtggcagtacgcggaacggttgccgaatggttcaagccgccgcgtcaatatccaccccgatcgcattttcatcctgggcgattactcagacgatgcaattgggttccttgagccagcatataacgcatttgtgagtctggagaaagtagagggcggatcgggcgagtcattcctgaagaacgctgcgcggcaactcaacgtcaatttcgaaaaggaaatcgacttcaacaatcttgcctcgctttacggcgtcactgtcactgagttgcaggacaagttcaacgaagtcgcgggtgagattaaccgtggcaatgatgtgctgatgactacacagggcgcatcagttacccctctggtgacttcggtagcagacccgacggcaacatacaacgtaaaccttcagaccgccgctgccggggtggatatccccacgcgcatcttagtgggcaaccaacaggccgagcgttccagcactgaagaccagaaatatttcaactcgcgttgccagtcacgccgtggagatctgtcattcgagattgaggacttctgcgacaagcttattgacctgcaaatcatcgacgccgtcagtcagaaagcggttgtatgggatgacctgaacgagcagaccggtaccgagaagctcaccaacgctaagactatgggcgagataaaccaggccatgatgggaagcggtgaagaaccggcattcagtcgcgaagaaattcgtaccgccgctggttatgaaaacgatggtgaaataccgttaggagaagaggatggcagcgaagaagacgaagccaccgattctaccgcgtaa

SEQ ID NO: 220553 - DNA, 267 bp, Klebsiella pneumoniae
atgatttctgggcttcatcatttcgatgcttggcttgagagaaacacctggtataaatctcatcccagtgaggcaaggctattctacctagcgttagaaaaggtaattgcagaaaacccgggagttctgatacaccagcagtatgtgagggattacattttgactaaaaaagtctcaacgttagcggatggcactctcatacctactgctcagaaatatgggctgttagcggaaaatatttccgattacttgcttaatacacagtaa

SEQ ID NO: 220554 - DNA, 1485 bp, Klebsiella pneumoniae
atgacgactgctgagcaaaaggcgtttgccagaaaggtggaatgtgaggaggacgggctttactacgctcgctatttcttcaagcagcgcaccggcggcaagatgatagttgcgcctcaccacaaggtgattcagaaaacactggaccgcgtcattgaaggtgagattcagcgcctgattatcaacatccctcctggttacacgaaaacggaacttgcaaccatcaatatgatggggcgcggtctggcgctgaattgccgggcacgcttcatgcacctgtcctattcgcacaacctggcgctgctgaactcctcaaccgctcgcggcatgattaagtcgcaggcgtaccagtccatgtggccaatggcgctgcgcgatgacgcagacagcaaggcgatgtggtggaccgagcacggcggtggcgtttacgcatcttcagcggcagggcaggttaccgggttccgcgcaggacacatggagcctgggtggcagggcgctctgattatcgatgacccagttaagccggatgacgcttactctgagaccgtccgagacggagtcaacaaccgtttcaacgagacaatcaaatcacgactggcgatcgagacgacgccaatgattgtcatcatgcaacgaatccactaccacgatctgagcggctatctgttgcgtggtgggagtggtgagaaatggcatcacctgaatctgccggtgattatcgacaatagtcagccatacgctgcgcagtacccagaaaacacacacgctataccgattgaccacggcctgcctgatggctggctctggcctttcaaacataacgaatcgcaccgcgtatcgctattttctcaccggcgcactgccgaagcccagtatatgcagaagcctcgacggtttaatgctgagggcgcgctgtggacagaggtgatgatcagcgcagcacgtgatctgcaaattcatcacgacaaggtacgcactgtcgttgcgattgacccgcaggcaaccaacagcgacgaaagcgacgagtcgggaatcgtggttgctagtgcatacggtgcgggtgataagaagcagtacaccgttgacggagattacagtggaaaattctctcctgcaggctgggccaaaaaggcaatgtgggcatatgaggaacacggcgctgatgcgatcgttatcgagaccaaccagggcggcgatatggcggaagaaacgctgcgtaacgccgggtttaaggggcgcatcattcgtgtgcatgctagtaaaggaaagtatgcgcgcgcggagccgatatcggcgctctacgaacaggggcgtgtggcacaccatggcaacctttacacgctggaaaatcagctgatggagtatgtgccagcaactgccaagaagtcgcctgaccgtctcgacgcgatggtatacgcacttactgagctcggaggcgcgcagccaatgggcatgatgattcctaagcgcctacaaggtcgatag

SEQ ID NO: 220555 - DNA, 480 bp, Klebsiella pneumoniae
atggcagcattatcgacagaggttaaagccttcatcgttcagtcgctggcctgtttcgaaagcccgacaaaagtcattgagctggtaaaggctgaatatggcatcgatgtctcgcggcagcaggtgtcgcaatatactcccggcaacgcaatggcggccaagttgagccagaagtggattgacctgttcaacgccactcgcaaacgattccagaatgagatcgccgacatcccgatcgcaaataaagcgtatcggctgcgcgttctcgaccgaatggcgaccaatgctgaaaagatgaagaactacggcatgacctcgcagcttatcgagcaggccgccaaagaaatgggtgacgcctacaccaataagcacaagtttgaacattccggcccaaatggtggcgccattcagacgatcaccatgagcaaagaggaatacaagtccgcacggcaggagatgatggaggatgacgactgctga

SEQ ID NO: 220556 - DNA, 636 bp, Klebsiella pneumoniae
atggctgatagcacagtgattaggccatatccccctgtcaatttcactggtgagaactggttgccttacacccggcttatccctgctcccgaaattggcgaatgggtaaatcagaacatcctcaccgaagacggccgaatccataaccctgaccatgcgcacttggtcgatgctgatgtcgcgtttatgtgggcctctggctcattcgctaaaagcgggcgcattgtgcttggtcagtgtgagcaggtaatgatgcgctccggcggctggcagaaatcccgcatggagcagcagatgcatgaatggttcggtcgtataccgaagttcatcatcactctggctgctgactactgcgagcaatgcaacgatctggagttctgcgcactggttgagcatgagctttaccacatcgcccaggctaccgatgactatggcgcgccgaagttcaacaaagagaccggtatgccggtgctcaaacttcgcggccatgacgtcgaggagttcgtaggagtggtccggcgttacggtgccagcaaagacgtgcaggaaatggtggatgcggcgaacaggccggcggaggttgctcatatcgatgttgccagagcgtgcgggacgtgcatgctgaaactggcatag

SEQ ID NO: 220557 - DNA, 219 bp, Klebsiella pneumoniae
atgactgatgaatataaaaagaaaattgggattccagataaccatactctcgaggaagtatcttccacctggaaggggccacgaagaggtcaagatactgatgaatatcttctacgtgagctcgacgaaaatggagaagtagttgctcactatgaagtatatgactcaacttcaacttacccgccgtttggtcgttcgattacatacaaaaaagtctaa

SEQ ID NO: 220558 - DNA, 315 bp, Klebsiella pneumoniae
atgcaacgtatgaacccaaccgatggtcacaatctgccttactggtggtcagccttgcttggtatcttttccgtcctgagtctgcaggattatgtcttcatcattggcgccctgatctctgccttcttcacaatcaagacttattacgcaaagcgcaaggaagagcgagagcgacttgatgaagagaaaaagcgcacgcagctgttggccagttatctggctgatgtctccacaaagcctggaggtgaccgtccggcttcagccgaagtggttaccgaggctttgaagcggatcgcaagtgatacacaggggtga

SEQ ID NO: 220559 - DNA, 498 bp, Klebsiella pneumoniae
atgagcggaagccagtcacgcgctaagggttcctcaatcgctctcgttctgcccgttgaatactcgacagccagctggcgccgcgccctcctgtcgctggaagaccaccagaaatcctggttgctgtggaactacagcgacaatatccgctttgagtatcaggtagcgataacacagtgggcatgggaagaattccgtgatcaactcggcgctaagaaagtggccggcaagacgatggagcggctgaagaaactgatatggctggcggcacaggacgtgaaagcagagctggcgggtaagtatgtatatcagcaccaggaccttgcagccctgtgtggcgttaagcctgataactggtgccataactacgctgattactggcgggctatgtgcgccatttttaagcggcttgatagcgactctcttctctgtgctgtgagaacacgatcacaacaaaaagcgactttttcgcagcagggtcttgcaaaagtcaattaa

SEQ ID NO: 220560 - DNA, 405 bp, Klebsiella pneumoniae
atgggtaagaagtcactggtaataggtcactcaatgacgaccgctatggaaaattctggccaatttctaatgaaagagttagagaagaaaggtgtggctttatccgctgccatgtggtttttttatggcgaaatgttttcttggaaatatattttggtaataaatgactttgaggaaagaggacctacatttgtttatagtcttataaatcaaataaatagagacaacagatcaaataaataccattcgataccacttgaatcaatcgaagctaaaggtaaatccgcttttatttataaaatgatgaaaggggcgttttctattgaaaatagcaaggtccgattttcaaatagtatggtaaatggtttggatgttgtggattgtttgatatataaatttaaataa

SEQ ID NO: 220561 - DNA, 213 bp, Klebsiella pneumoniae
atgggaataactgaaggattttgcgccgatttgtattgcgactgtgatggttgtcagtcagggaaaatctatccgcaggggcaggctgatttcatcggccggaatatgaccgacatttctcaacaggcgcgcaaagctggctggcgcatcagcaaagaccgccagcgctgctatgcgccgggccacaaaatttcacggggagccaaccaatga

SEQ ID NO: 220562 - DNA, 372 bp, Klebsiella pneumoniae
atgacaactgatatcaccgaactggcgcagagcctgaaagcggcagcagagaatgctattggggcgcatgaacggctcgcagcatatccatatggtgagattatcgatatctctcagcatgaaggtgaacagattgatatcgatatcactgatctcaatgaattcaacaaagaagccaacccggtaaacatcctcgcgctggtagaggcgctggagaaggcgcagcagcagattactcagctggagtcccgcaccgtgaagttgccggagccgttcaagttggctaaatcatcgagcggattaacgtactactacgctgacgaggtcgatgctgcgcttaccgccgccggcatcaaggtggaggctgagtga

SEQ ID NO: 220563 - DNA, 405 bp, Klebsiella pneumoniae
atgagcaattttgatacttcatcgcaagttaaggctcgcaagttacatcgttgctgtgaatgtcacggcgctatcaatccaggcgatacctacgagaaagcgtttattgtccaggatggcgatgccagcaacttcaagacgtgccagaaatgcgcagaagcgcgtgactggctgcttaacgaaactgattggcctgacgatatcgacggcgaagggcattcgtatttcttcacgatgctgcgtgaccacctccgtgagcaaggccgggaaggcgaccgcaaatacgcatttcgcgcatatcggcttgtcgtcctgatggataagcgccgtatggcttatgccaacgcatacaacgcggagaccgtgaaaatccgcgattctcttgctcaaggagtctcagcatga

SEQ ID NO: 220564 - DNA, 303 bp, Klebsiella pneumoniae
atgaaaaagaactcgggcaaacaagccgttattaacttcatcggccagcatcctggctgcagctttcaggatatccgccgcggtaccggtcttgactcttcagtggtcaactcctccctgtggcagatgaacaaagacggccaggttaagcgagaaggtgaatgcaggagctaccgctacaccctgattgacacaacagctgtcaccgaaagcgatccatctgttcagtatcgccagcgtcctggcggcgtaaacccaatgaccaacctttttaaccagtgcctggcgggagtaagaaaatga

SEQ ID NO: 220565 - DNA, 729 bp, Klebsiella pneumoniae
atgtcacttatggcgaaagcaatgggggtcaaagtgggaaactcactgcgtaagctcgttcttatcaagctggccgacaacgccaacgacaagggcgaatgctggccttcgtatcaacacattgccgatcagtgcgaatgcagcaaatccgctgttcgcaaccatattgatgcgcttgaggatatgggtctgctcaagcgtgaaaatcgcgttggggtcaacaacgggaaaggtaatacatccaacgtgtattatctgaaccttgatgctacccctatgccatcaaaaagcacaggggtatgccatgaaatagcaccccctatgccatctgatggcacaccccctatgccaccagatggcaccagaaccagtcactcttttgaaccagtcactgaaccagactctctctctgcgcgagggcagtttatcagcgaggctgcaaagcgacggatcgggatttcacccaacggggaaatacctttccctcctgccttcaagccatcggcagatcacattgcgattgcctcggagaaagggatcagcattgaaaccgagttgctgaactttcgtgattatcaccaggcccgcggcacaaagcttatagactggaactcggcattccgggtgtggctcaggaacgcgagagttaatccgctttccgggcgccagagaagcgaacctgattccccacactggaacagccctgaaggctggaaggacttcatatga

SEQ ID NO: 220566 - DNA, 321 bp, Klebsiella pneumoniae
atggagaatgcaatagcccgaaagttagagccgccaatcctcaacccaattgagattgaaggcattttgttaaaccggcttttgtccattggccaaaaggtttttgcggaaatgcgaggggttagcgagtcgacaatcagtcgccgcaagagcgaggggtattacgcagaaatggcgaaggaaatatcagcgctgggtttgcaggttgttccgccggaggcggtggtagtttcccgccactacctgcagtcagtagaaacgctggcagatatcggtttgcgtgcggagcggtgccgccctggcccgttagggtgggactga

SEQ ID NO: 220567 - DNA, 486 bp, Klebsiella pneumoniae
atgagggctgatggtgaagatgacaagaagccttcacacataaatcatgatgtgttcagggtcgacattttggatctggccgtcagtgccggcccgggcattgtgaatcaggagttcgtggagattctccactccgttgaatatgcgccagcggaagcgcgccacatgttcgatgggcgcaaggctgagaacatccggatcatcaacgtccggggcgacagcatgtctgggacgattgagccgggtgatctgctgttcgtcgacatcagcgttaagagcttcgacggcgacgggatatacgccttcctgtacgacgacactgctcacgtcaagcgcctgcagaagatgaaggacaagctactggttatctcagataacaagagctatgcagcctgggacccgatcgaaaaagacgagatgaatcgggtgttcgtgttcggcaaggtgatcggcagcatgccgcagacgtacaggaagcatgggtaa

SEQ ID NO: 220568 - DNA, 543 bp, Klebsiella pneumoniae
gtggctaaaaaaggtgactttaagcctactcagaaagaggttgatcaggccatttctcgacctaaaaaagtaacctttaacggcgttacttggaatgggagcgaaggccgcactccgatctggtttaagttggatctcaaggcctttgatgataaaggcaacccaataacaggcgtaagattcatgctgcattggcgttcgcctatcgttgaaggcgttgatatcgttaagctttcttttgttatgttttttcatgataagcgaatatatgcgctcgacccatacccagcggacaataagcctcaccgcaatcgatctataattaatcatcctgactttgttgaggttgctcgcggcccgcactaccacatgtacttcgaagcggctggtgaggagatagcactaaaactcgataccgacatcaacccggatgactttttgggctactggaattatttttgtcggacgcttaatatcacttatgaaggcaaaccgcctttaccaaatcaagataaatcaggtcagctatcatgggaaatgtaa

SEQ ID NO: 220569 - DNA, 777 bp, Klebsiella pneumoniae
atgggaaatgtaacgtgttcaacagtaatatctaagctcgggtttgaatgtcacccaatgagcgacacgttgctgcgcgttgtaagcccattcacttactatgacgatagcgagcacattagcgtctttgttcaggaaatgagtggacagtacaggataactgattactgcgacacgttgatgaacattgaggctaggggtatccacctgacaaaaaagaaaattgatttgataaggtcatcgctcgcatcacaggggatcacgttgaatgattctggcgagatatccgcttgggccgatgagatttctgttgggcaggttacggctagcgtcataagaggtggactgcttgcatccgctcaaaccgcagattggtatgcggaagttaaagatgataagtttgaaaaatgcgtgattagttatcttaaatccgtagggcttggcacaaggttggccctaaaagagaaggttcggggcattagtggacataacatcaccgttccaataaccttaaaaaacgagtctccacttgtagctccaaagcgtggatttacagtaagtttatctagcagtaaaggctggaatactgcgcactcaaccgtgggtaagatagtagatttgagtcaggctgttccagaaatcagtaacagatttgtgattattgatagtgatgggttaactcctgagttacagcagttatcattgcttttcaatgacacggctttagtgcttcctttccacagcagagaaacttggattgaatcgctagtagcctaa

SEQ ID NO: 220570 - DNA, 222 bp, Klebsiella pneumoniae
atgacgccagaagaaaaagaaaacgccctccgcgcccaggctcgtcgctgcgcagaagagataaccaaagcgatgagcgtaaagcctaaaccgaagtggaacgctgtatgcccccccatccttcgcaagcactacgagaaggtaaagccgatgggtgtcagcctggtgaaatttgtcagtgttattggccgcatgaatgggcggtatggagtggaatcatga

SEQ ID NO: 220571 - DNA, 699 bp, Klebsiella pneumoniae
atgactgagcgcggaatgatttttaacgctgagatggtacgcgccattcttgccggccggaagacgcagacccggaggattatggcacctcaaccagaaccatgcccccggggtggacactggtggccaagcaacgtgttcaaaacaatgcttcatgtcgaagatgaaatgcagaacggcaaaggttgctggggtgggcttgttggagatgcttgcccgttcggagacgtcggcgatcgcatctgggtgcgggaaacatttcaggggccgttattcaattacgaacagatggatgaatacctcgaagatagctcgaaattcgaaaagccagaattctgccagtatgccgctgacggcggacatagacctgaatatcaagacgccgacgacaatttgcgtcatggatggcgaccatctatccacatgcctcgctgggccagccgcattcttctggaaatcaccaacgtgcgagttgagcgccttaattcaatgcacgatgtcgatgctatgcgagaaggaattcagaacctgacgacatgtttacactccgatttcggcattcctggcgtcgtaaatgcgcaacatcctgtgcgagcgtttcaactgctatgggaatcaatctacggcattgacagctggcacgctaacccgtgggtttgggttatcgagttcaaacgcgttgaaggcggtgcagcatga

SEQ ID NO: 220572 - DNA, 219 bp, Klebsiella pneumoniae
atgagcgcagaaatcatcgatcaggccaacgagctggcagagcgccggctggaaatgaccatccagaacatgcgcatcaaccatgcggcagtttcagctactcactgccgcgactgcggggaagagatacccgagcggcgccgggaactggtggcgggttgccagcgctgcgctgactgtcagaaagaatttgaagaacgtggcaagcaccagaggtga

SEQ ID NO: 220573 - DNA, 246 bp, Klebsiella pneumoniae
atgcagacaataatccagatcgagccaaacgaatgggtttcagaggacttgctgatggcagtcacagggatgaaacgtggaaccattacacgggcccgcaaatcatcctggatgcttgggcgtgagtataagcacgtttcccctgaaggtgacccaaagccaaccagcgaatgcatgtacaaccgcaaagcggtagacgcatggattcaggcccaaaagcaaccattgggtgatcgggcggtatga

SEQ ID NO: 220574 - DNA, 1263 bp, Klebsiella pneumoniae
atgagtaaagaatcatacccaacgggcgttgagaaccacggaaaatcactccgcatatggttcatttttaaaggtaagcgtgtcagggaaaatctcggtgtccctgacaccgctaaaaacaggaaggtggccggggaactgcgaacgtcagtttgtttcgctatccgcatggggacctttgactatgcggcgcaattccccaattcgccaaacctgaaaactttcggcatctgcaagaaagatatcaccgtgaaatttctgtctgaaaaatggctggagctgaaacggctggagatctgcgctaatgctctggaccgatatgaatcggttgtaaggaatatgctgctgaggattggtggaaacaagcttgcttcgtcagtgaacagggaagatctgttgtatgtcaggaaagatatgttgtcggcgggatcggtgaagaacggtttgagtgtggcgacggcaaactattacatgaccaccatggcgggcatgtttcagtttgccgctgataatggttatatccgggaaaacccatttaatggaatcaggccgcttaaaagggccaggatagaacctgatccactcactcgtgacgaatttattcgtttcatagatgcctgcccgcatcagcaaacgaaaaacctgtggtccgttgcggtttacacaggattacgccacggtgagttggtctcccttgcatgggaagacatagatctgaaagctggaacgatgaccatacgccgaaattatacgaaactcggtgatttcactccaccaaaaaccgaagccggcacagacagggtcgtgcatctgatcaaaccagccattgacgctttgaggaaccaggcggaaatgaccagactgggaaagcagtatcagattgaggtacaactacgggagtatggccgaacggctattcatgactgtacatttgtgttcaatcctcagctggtcagaaaaagcagtaacgttggttatcattacaaggttgattcaattggtgactcatgggaggcggcgctgaaacgagctggtttaaggcatcgcaaagcatatcagtccagacacacttatgcctgctggtcactgtcagccggggccaaccccagcttcattgcgagccagatggggcacacaagcgcccaaatggttttcaatgtctacggcgcctggatggccgacagtaacagcgatcagattgctatgttgaaccagaaattatctgactttgccccatccatgccccaatgcatagttatttga

SEQ ID NO: 220575 - DNA, 927 bp, Klebsiella pneumoniae
atgaatattatgcatcctgtcctgcgccggattgacctcaacctgttgccggtctttgacgcggtctatcgctcccgctcggtacgcctggcggcggaagagctggcgatgagcacctcggcgctgagccatgcgctttcccggctgcgcagcgccctcaacgatccgctgttctaccgcgaaggccaccggatgtgccccagcgtctatgccagccagttggcgccctctatcgcttcggcgctgaagtttctcaaccaggagctgacgccgccggaggcgtttgtgccggccgccagcaccgactgcatgcagattgcgatcaccgatttcaccgcgttctgcgtctttccgacgctgatgcatcacctgcagcgtgaggcgcccgggctgcggtttgagctccgttatctgccccacagcccggcgctgaccgagctgctggcgggcgaggtcgacctggccctcgggttcaatacccctgacgagccagcccatcccgatcttgaggagattaactggctgcgggacgaatatgtggtcatcagccaggccaaccggacggcgctgaccctggacgcctaccttgcggcccgtcatctggtggtgaccccgtggaatgagcggcagggggtgctggactgtgagctggagcgacagggctattcgcggcaggtggcgatgaaaaccccctcgatgctgagcgcgccctttattattgagcagagcgacctgttgatggcgctgccccggcgggcggcggagacgatggcccgcgccgcccggctgaccattttcccgctgccgtttccggttccgccgtttgacgtcaagatttacgcccaccaacgcagcgggaaacgcgaggctacccgctggcttatctccctgttgcagacgctggtgggggagtccaccgcttcctga

SEQ ID NO: 220576 - DNA, 1365 bp, Klebsiella pneumoniae
gtgattagtctattcgacatgttcaaggtggggattggtccctcatcttcccacactgttggcccgatgaaggccggaaaacagttcgtcgatgacctggtcgaaaaaggattgcttaatgcagtgactcgtgtggcggttgacgtctacggttcactgtcattaaccggcaaaggccaccatacggacatcgccattatcatgggactggcgggcaatcagcccgatacggtcgatattgacgcgatcccggcttttatccgtgacgtcgaagcgcgcggtcgtctgctgctggccaacggccagcatgaggtcgacttcccggcggatgacggcatgcgttttcgcagcgacaacctgccgctgcacgaaaacggcatgaccattcacgcctgggccggcgagaaagagatctactgcaagacctactactcgatcggcggcggctttattgtcgacgaagagcacttcggcaaggaaaacgccaacgaactgcaggtgccctacccatttaaatcggcgcaggaaatgctggcctactgcaaagagactggcctgtcgctctccgggatggtgatgcagaacgagttggctctgcacagcaaaaaagagatcgaggattatttcgccaacgtctggcagaccatgcgcgcctgtatcgaccgcgggatgaacaccgagggcgtgctgcctggcccgctgcgcgtaccgcgtcgcgcctcggcgctgcgtcgtctgctggtggccagcgataagctctccagcgatccaatgaacgttgttgactgggtcaatatgttcgcgctggcggtcaatgaagagaacgccgccggcggtcgcgtggtaaccgcgccgaccaacggcgcctgcggcatcgttccggcggtactcgcctattacgatcactttatcgagtccgtcagcccggagatctatattcgctactttatggcctgcggggcgatcggcgcgctgtacaagatgaatgcgtccatttccggcgcggaagtcggctgtcagggcgaggtgggcgtcgcctgctcgatggcggcggcgggcctggctgaactgctcggcgccagcccggaacaggtttgcgtggcagcggagatcggcatggaacacaacctcggcctgacctgtgatccggtcgccggtcaggtgcaggtgccatgcattgaacgtaacgccatcgcctccgtcaaggcgatcaacgccgcgcgaatggcgatgcgccgcaccagcgaaccgcgcgtctcgctcgataaggtgatcgagaccatgtatgaaaccggtaaagacatgaacgccaagtaccgcgaaacctcgcgcggcggcctggcgattaaagttcagtgtgactaa

SEQ ID NO: 220577 - DNA, 1557 bp, Klebsiella pneumoniae
atgaaactaaaagcaatgagcgcagcacttctgttgactttgcctttctgggcctgcgccaaagatgtcaccataatttataccaatgatcttcatgcccatgtcgaaccttataaagtgccatggatagcggatggtaaacgagatattggtggttgggcgaatatcacgacgatggtgaaacaggaaaaagcgaaaaataacgcgacctggttttttgatgccggggattattttaccgggccttacatcagtagcctgacgaagggtaaagcgataatcgatattatgaatacgatgtcctacgatgcggtgactatcggtaatcatgagttcgatcacggctgggataatacgttgcttcagcttagccaggcgacattcccgattgttcagggcaatattttttatcagaacagcgataaatcgttctgggataagccctataccattatcgaaaaagatggcgtgaaaattggcgtgattggcctgcacggcgtgtttgcttttaatgacaccgtttctgccgcgacgcgagtgggtatcgaagcgcgcgatgaggtgaaatggctacagcattatatcgatgaacttaacggtaaagtggatctgaccgtggccctgatccatgaaggcgtcccggcgcgtcagtcgagccaggggggaaccgatgtgcgtcgtgcgctggataaagatattcagactgcgggtcaggtgaaaggcctggacgttttaattaccggccatgctcacgttggcacaccggagcccattaaagtgggtaatacgttgattctttctaccgatagcggcggcatcgatgtgggtaaactggtgctggattatcaggagaaaccgcaccaattcacggtgaagcactttgagctgaagacgctttatgccgatgagtggaagcctgatccgcagacaaaacaggtcatcgacggctggaataagcaacttgatcaactggtgcagcaggtcattacacaatcgcccgttgaactgacccgtgcgtatggtatctcttcgccgttgggcaatcttgccgctgacgccttgctgttggcagcaggtaggagtacgcagatggcgttaaccaactcgggcgggatccggaatgagatccccgccggggcggtgagcatgggcgccgttatcagcaccttcccgtttcccaacgagctggtcaccatggatctaaccgggaagcagttgcgtagcctgatggagcatggcgccgggttgagcaacggcgtgctgcaggtctcccggggactggaaatgaagtatgacagcagcaaacctgtgggccagcgcgttgtgttattcaggctaaacggtaaaccgattgacgatacgacggtttaccatattgccaccaacagcttccttgcagatggcggcgatggttttgtcgcgtttaccgaggggcaggcgcgtaatacctccggcggctattacgtttcaaatgcggtcgtagactatttcaaagccgggcaaaagataacggatgagcagcttagcgggcagcgcgttgtcgatgtgaagaaataa

SEQ ID NO: 220578 - DNA, 1104 bp, Klebsiella pneumoniae
atggatcgcattattcaatcaccaggcaaatatatccagggcgcaggcgccatcaagcgcctcggcgactatctgaaaccgctggccgagcgctggctggtggtcggtgataagttcgtcctggggtttgcggaagagatgctgcgtaaaagcctggccgacgctggcctggcggccgaaatcgcgccgtttggcggtgagtgttcgcataatgaaatcaaccgtctacgcgatatcgccggcaacgcgaagtgcaccgccgtgctggggatcggcggtggcaaaaccctggataccgcgaaagcgctggcccactttatgaatgtgccggtggcgatcgcccccaccatcgcctccaccgatgcgccgtgcagcgcgctgtcggtgatatacaccgacgaaggggaattcgacagctacctgatgctgccgcgcaaccccaacatggtcattgtcgatacgcagatcgttgccggcgcgccggcccgcctgctggccgccgggattggcgatgcgctggctacctggttcgaagcccgcgcctgctcccgtagcggcgccaccaccatggcgggcggtaagtgcacccaggcggcgctggcgctggccgagctatgctacaacaccttactcgaagagggtgaaaaagcgatgctggccgccgaacagcacgtggtcaccccggcgctggagcgggtggtggaagccaacacctatctgagcggcgtgggtttcgaaagcggtggtctcgcggcggcgcacgcgattcataacggcatgacggccatccctgacgcccatcactattatcacggggaaaaagtggcgttcggaaccctgacgcagctggtgctggaaaatgcgccggtggacgaaatagagaccgtcgccgcgctgtgccacagcgttgggctgccgatcaccctggcgcagctggatatcaaaggtgatatcccgaccaaaatgcgtctggtggcggaagccgcctgcgctgaaggcgaaaccattcacaatatgccgggcggcgttgattccgaccaggtctacgccgcgctgctggtggccgaccagtatggtcagcgcttcctgcaggaatgggaataa

SEQ ID NO: 220579 - DNA, 936 bp, Klebsiella pneumoniae
gtgaaagttgtctttaatgttaatggtaaaaaagttccgctcaaatctctgcaatatataagtaaagcaaatcaacttgaagtaatgaggaattggttttttgaaaatttcgaagaccccgcaaactcttgcccgtatgaatcccgtgaaggcggatatgcttacatttatggtggcccatatgaagcaagtgaagagttacaagcgatgtttgaagggtacgtgaaatttgattatatccaagaattagttagtgatttacaagaacagtgctacgagtggtctggcaattcaaataatattaatgattggtacgacgaagacttgtacgatgctgttacatcttccgaacagcctttttctaagttcgttgaaagcattgatggaataaaatcgctggctaaaggtgattttaaagataagcaaaaagaacatctgcttagcatcttatatattaacgtcattacagccttggaaacgctttatgttgagttatttattaactctatagataaaaatgactcataccttacagatttcatagaaaaaggtaagacggaatttaaggtaaataaagaaattttggctttgccattcaaaggagaaactattgaaaacatgagggcggaattgatcaaagcaatcaaagaacatttgattagtgcaagttggcatagtacaaacaaagttgtagggcgttataaagctacatttgacattaatgtacaaaaggagtggccaatagacgagatcgaaatagcaacacaaaagcgtaatcatttagttcatcgtggcgggaaagataaagaaggcaatccggtagtgattactgaacaagatttagatatgttgctggatcacgctcaaattcttggagaaaaattatttgatagtcttggggtagcattacagaaaaaagatgagagcgaattttga

SEQ ID NO: 220580 - DNA, 1554 bp, Klebsiella pneumoniae; identical to SEQ ID NO: 113469

SEQ ID NO: 220581 - DNA, 810 bp, Klebsiella pneumoniae
ttgagatacatagataaacgccagctgcgtagattggtcgatttaacagacattgatttggcaaaagcacaaattgctgcattaccagcagatcaacgtagtgattttattgatgccaacggtgatcgttggtcaaagttaaagccagctctgtggcagttgggcaacttaaaatgttggtattctgagtcggaactacaagttcaacaagggcacgttgaacacttcagaccaaagaagaagcctcacggtcttaatggagttgcacactctggttactggtggcgagcttttgattggactaatttccgactatcacaccctacatgtaacgttcgaattactgattatctgacaggtcaaattgttggaaaaggcgcgtattttcctcttaaagatggtgatgctagagctatcgacgaggcaggtgagcggaatgagaatcctgttcttctcgatccaacagtgattggtgattgtaaattaatttgtttcgatactaatgatggtaggccacttgctactttttctgtacagcaagatccgtggaagaacaaaagagctattcaatcaatagcgttttatcatctggatgaaggaacatggaattatcaacggaaagacttgatggatgaggttggtattctttgtgacaggttaattgaagccgaaagctcacccaatagagatcaagcacaatgtgatcagttagctgatgaattggttggttatattaatgagcatcaaccgttcacctcagcatgtactcaagtaattaaagaaaaagggttgcttgaggcagtaaattag

SEQ ID NO: 220582 - DNA, 1722 bp, Klebsiella pneumoniae
gtgaaaattgattggttacgattagaaaacttcaaaaatctcacaagttttgaggtggatttttccttaaagtctgaacgccaagttattattggtcgcaatggtgtcggcaaatccaatatattggagtccatcgcatggattttcagagacttagatctttgtgaagaatctgactttgagtatgagattaaatatcgatgccgtgatcactatgtaaaagtaatatctaaagggaaatcgagtaaaaagcctaggcgcaaaggtactcggcgagaaaatattcagcgcttcaaacgttcttattgggtaattgaaaacgctgcagatattgaagataaaagtagcgaagaaattgaaaaattatttgtagagttaaaagagactgaatttaaccgccgcaaccaagctattaaaaacgaaagcggcgtttatcaatttagagatgaaagactgcttcctgattatgtttttggttactactcgggaatatcggcacgctttaatgaagcgttcgaaactcacgagcgcgattactattctgaccagaaggatggggaggaaatgtcgcttagaactatgtttttagctaagcctcaccatagtcagttttcattattatctttttttgctaagcaggatgaggctactgcaaagtttttgttggatgagttcgacatagaaagcttgtcttcagtcttgtttacacttcaagaaccctattggagtagttcgactaaaaagagcgaactagaaaagcagaataaagataggcgtttttggggggctggcggaaatgttgagccattcttaaataaattatttagtcttgcctatgcaccaatggctgggaccgaaagaaaagaaatatcaataaatcgaacgactaacttagaaacaagatattgttttctaaactctcaggactctattaataaattagctgacgggttagagccaaaagaatttttcactcgcttagaaagttctattttcagtgatattttgagcctagacggcagcggattaaagatccgtgtgaggcttaaaggtgttaaggatgcgattactttcaaggaaatgagtgaaggtgagcaacagctgctcactattattgggcttatgcgtttcactcagcgagatgaaagtctctttttgttagatgagccggacacacaccttaatccagcgtggtgcttggatttgttaaaaaacctcagaacatatggtgtcgaccctaaaaacagccaaattttaattaccacacacagcccacttacttttgcaggtttagacaagcacgaagttgtgattgtggacaaaaactcggatggtcagatttatagctatcaccctaccaccgctccaaaggggatgggtttccaggctattctaaccagtgatttctttaagttacgctcgaccctggatagggatactctgaatttgcttgatgaaaaacgtgagctgggtttaaaagaagaaaaaaccgacgaagacagacagcgacttgatgagctcaacacaattcttggaaaattagatttttcacatgcagcacgtgatcctctatatctagaatatatccgcgcaattaccgaagcacaaaaagagtttccagaaattgcaaacgcaactcctgatcatgtttcttggcaggttaggaaacggatttctcttgatattgctaaacggttatcgagaaaaaaggaggacgtttga

SEQ ID NO: 220583 - DNA, 1731 bp, Klebsiella pneumoniae; identical to SEQ ID NO: 113473

SEQ ID NO: 220584 - DNA, 555 bp, Klebsiella pneumoniae
atgacgaagccatgctggagctccgtgccagaaaaaagttggcttctctgccgggcgagggcgacagatagtcgccgatgttcagcagggattgcgcgctggccgagggtaccgaggtctccgtcagtaaaatatgccgttggtttgcctcggcgcacttggtattaccgcagcgtcaaggcagttcccaaggttcagcagcatctggtctcgtcgatcaaggtcatgatcgacgagaatccatcgttaagctatcgaaccgtggcggcactgctgggttttaacaagaacacggtccagcgcatcttccagctcaaggggtggcaagtgcgtaaacgtccggttgggtttcgcccgagactccgggccttgtcctcggtggcatcggcccctaaccagcgttgggcgaccgacctatgtcggatctgggctggacagaatggctggtattcgttggccttggtgattgattgccatacccgagagttgctggggggcatctatcgcgcagtggtaaatcaaagacggctgaggcggcgcaggagcaagcgctga

SEQ ID NO: 220585 - DNA, 303 bp, Klebsiella pneumoniae
atgagtaatcccagtcatagcgacatcatgcgcaagttaaaagagatcaaggggattaaggagctgctggagaaggccgtgctcttgtatgtcctgctcacggatggcgatctgctggtctggtgctatgcgctcatcatcggtgcgctggcttatctggtaagcccgttcgacgtggtacccgatcccatttcatttgccggttatctggatgatttatcgatcatcacctcggcattagccgcactgccggttaagtcacaccaccgccaatccgcgaaagaccgaatgagatcaccgtga

SEQ ID NO: 220586 - DNA, 576 bp, Klebsiella pneumoniae
atgaaagagacaaagacgcgatatgacagtttgctggatagctatcaacgttggctaaacgggtttacaaaactggccatcataaatggcatgtgtcaccccaatatccaggccagccaccatctgatggtgggcagtctgtactttcccggcgcgggacagatgactgcagtggtaccacaatgcctttaccgactgatttacggaagtcagcatacagaacctgtgtcggtagtgactgatatgcaaatcagtcttgagacaaaccaaaaaactttactgcaccacccaatgctggaagggatattgctgagtgaatgtatccgcctgaaacaacgcccactggcaaataggctgattagcctgttacaacaattcagctcaccggagcatcgccacaaactggtctggctatgttggtacgatttgatgataggtgcaacgctggaagactggctggataacctgaaacgtaaggcacctgaagatctaggcttgtggctgattggacggcaggaggaaaacatatccctcatgcaaataatggatgaatatctgctatttaccggccactga

SEQ ID NO: 220587 - DNA, 207 bp, Klebsiella pneumoniae
atgactattcaaatttccctgctcgaagaccagttcatcgatatggcattcattacgcaactcacccagttgaccgataaatggttttacaagcttattaaagacggtaagtttccaaaaccaaccaaatttggtcgcagctcccgctggcggaaaagtgaagtggaagcctggctacaggcgagaatcgaagaatcacgcagctag

SEQ ID NO: 220588 - DNA, 588 bp, Klebsiella pneumoniae
atgcaaaaatattacccacatctaaagaaaatcaccccgaatgacttcctgctaaatatgattaaccaccatcttaatcagatcctggcatgtcactccaaaatactggcgtttcgaatggattttgattaccagcgaggcactaaaagatttattcgtaattcctcatttgagatacaggatgatctcagagacctcactcaggcgatgactaacattcctggtgtcactggtattttctgggtactggaatggacatcagaaggagtagttcatgcccatgcgattttctatcttaatgctcaagaacatcagaagtcattcccattcattttacaggcggagcaaatgtggctagagattacccatggtgaaggcaagtctcagcgatgcaagccaaatgaatatcatcgggacaacattaacaacgttgttgaatatcacaataatgaagccttaaacagcttaagacgtatagccagttatctgacaaaagaagaccagaaatatgattacccagtctggggatgtaatgaggttccaccacctgcacgacagggtagacccagaaaatatataccaggctaa

SEQ ID NO: 220589 - DNA, 930 bp, Klebsiella pneumoniae
atgagtgcaggaaagcgagtgaccagtctctggacaaaaagagtaaacttatggctttactgggatatctttcgctcagaattaatgcatgttgatgagtctcgtgaattagtggaaagaatagacgatgccactcttttcaaagagtcttgcattaactatatgaacaaaaaagaaatggttaaatattggagtgcggaggatttctttgaaaagagtaagcgagaggttgagggtcaattaataccttttagtgaacttgaatggattgattgtgagcgttcgttgtcatttgttgctaattatattcatgccgaatataagctatatgcaaataataacaccccctctcttcttgatgttactttacctgaatggagccttgacactaatcagggtggcgtaaattatgacgggttaattcttatgatcgactaccaatgtcgtgtatcaagctttaaccatattcgctcaaacttagaacgtttgagaaattcttggctccgtatccagaaaaaatttggcaatccgttctggttctcatccaccagatatgatgctaaatacttgacagattatcagtgggtgatgtcctacttcgacaagaacaaaatgattaatggtaatgtggatttttggtttgaaaaaaatatgaacctgaaaattcattcaatctttgatcaatgggttgagaataaatccgatgctgaaggtgaattgtttattataagaataaaaaaggcatggggtcagaaaaaattcagagatagtgttgcaaacaaaaaggttctcaatacctatattagcaaaggcagtaagagacaacttgattatttggtcagtcaaaatgaaatgaaaatcaatgaattgattgagatgctgatcaatgatgcatatacaaaagccaaactaaaaagttgggaaaattaa

SEQ ID NO: 220590 - DNA, 864 bp, Klebsiella pneumoniae
atgaaacaatttgacggtctgcactcactgcagcaaccgctttccggcctgccccagtgggtctctgaacgcattctgcagcagataaatcagcttactcactatgagccggtggtaggcattatgggtaaaaccgggacaggaaagagcagcctgtgcaataccctgtttgctggggatatatcaccggtcagtgatgtggcggcatgtacccgaaaaccactgcagtttcgcctgcaggtcggcaaacgctttatgacaattatggacctacccggtgttggagagtccgaactacgggatgctgaatatgccgctctctaccgtgaacaacttccccggctcgacctggtgttgtggttgatcaaggccgatgatcgagcgctggcggtggatgaacatttttaccgggaggtgattggtgaggcataccggcataaggtgttgtttgttatcagtcagtccgacaaggttgaacccacctgcggtggtgaaaagttgtctacagagcagaaacaaaatatcagccgaaaaatctgtctgctgcatgagctgttccaacctgtaaaccctgtctgtgcggtgtcggtacgtttgcagtgggggctgcgggtgatggctgaacggatgattcgttgcctgccacgggaggccagtagtccggtggcggtacagcttagtgctccacttcgtaccgatgccgttaataaaaaagcccgtgacgattttggtgaaacggtcggctcggtactggataccataagttccatgcccctgataccggccccggttcggacagtcatccaggctgtacgcgacatcgtggtatcagtcgctcgtgcagtctggaacttcttcttctga

SEQ ID NO: 220591 - DNA, 825 bp, Klebsiella pneumoniae
atgacccgtctggcttcgcgctttggcgcagtaaatcttatccgtagtgaccgtccgttaacccgcgaagaactatttcttgtggtacccagcgtattcagcgaggacaaacacgcatcccgcagtgagcggtacacgtatatacccaccatatccctgctggacagtctgcagcgcgaaggctttcagcccttctttgcctgtcagaccagagtgcgtgatccaggtcgccgcgagcacacaaagcacatgctgcgcttgcgtcgggaggggcaaattaccggcaagcaagtccccgaaatcattctgctcaactctcatgacggcaccagctcgtatcagatgctgccgggattattccgtgcggtgtgccagaacggactcgtctgcggtgagtcgtttggcgaggtgcgggtgccgcacaaaggagatgtcgtgagtcaggtgattgagggggcgtatgaagtgctgggtatttttgaccgtgtggaagagaagcgggatgccatgcagtcgctggtgctgccgccacctgcacaacaggctctggcacaggctgcacagacgtaccgtttcggtgaggatcaccagccggtgacagcacctcagatactctccccacgccgctggcagaatgagagcaatgatctgtggaccacataccagcgtattcaggagaacctgattaagggcgggctcagtggacgcagtgcgaaaggcagacgaacgcatacccgtgcggtgcgcggtattgacggtgatgtgaagctcaaccgggctctctgggtgatggcggaagcgatgctgagtgggtttcagtcctga

SEQ ID NO: 220592 - DNA, 711 bp, Klebsiella pneumoniae
atggcacagacagagcgccgtcatgatcggctggctgtcaggctgtcactgataatcagccgcctggttgcaggtgaaacgctgaacatggcgcggctggctgcagagtttggtgtgtcagtccgtaccctgcgacgggattttcgcgaacggctgatgtacctcgaccttgagtatcgacgggggcaatgccgcctgcgcagcaccggtgggggcgtacagggggagctggatgcgctgaccttcgcgcaccgggccggactggccgatatctttccgggactggatcggcgtctggcgggcatgctgctcactgcgggagggatgccgtgtctggtatggcagccgccacagtctgtgtcaccggccatctcactggtgttctaccgtctcgtcagtgccattaccgcctgccagcgggtactgctgctggccgagggagagcgctgtgacgggctggctccgtaccgcctgatatcactcgacggctgctggtacctcaccggtgaacttaacgggcatatcaccgtgcaccctctggcgaccatccatgcggtgacagttctgaacaccacttttaccccgcgaaaacgtctcagccagttaaccacacaggcgggctttatccgggctctaccgcacttcagctgtattcgcgaaatcctgtctcctgggccctctgaggaggagcggggcaacacactgatttaa

SEQ ID NO: 220593 - DNA, 537 bp, Klebsiella pneumoniae
atgacctggcattacgagaaaaatggcatacgtcacgacaatgtgactgaagacgacatcaccggcctgattatgcgcggtgaactgactgcatccactctggtatggcgacagggcatgacggagtggcaaccggtctccgctaccctgctggcttcggcgctgctccggagcaccacaccgccagcgctgccggggaaccgcattccgggtggcgttctgtggacgctggcatttgctcccttcattggctacgcgctggagttgtggactgcaggattgagcgggatgtcatttgacgaggcatatgatgccgtctcgggtgggcagtactggtttatcacgctgctactcaatattgctctggggtatctcgatgaacgacgcctgcgtaaggccggagtggacaccaccacgttcggcaaactggcctggctggtgccgttctatctgtggcggcgggcgaaaaacctcggtcagaaaccggcttacttctgggtatggcttgtgatgctggccctgaccgtctgggcctga

SEQ ID NO: 220594 - DNA, 438 bp, Klebsiella pneumoniae
atgaaaacactgattaaaatactgggcattaccggcagccttctgctttgtgcaggggctcaggcccagccctataaccggacgctacctgcagtcgtcaatgacaacaacgggaatattttctggtgtgatgcgcatcgtcaggttaccggaaaatgcgaagccatgtctgttgaccgtcagggcgggatggtcacggtgcgttcagcaccttttaaagactgcgaaggcggcctgtggggctggataactatcatgcgcaacgatgtgtcgaagggattcaccattactccggataagaaattcgggctcaccgtaaaagatctgtgccgtccgggcacggtagtgacctttaagcccaaccagaagaagccggaatatgacgacctggtggcactttaccagggcaaagagctgtttcgctaccggcgcttctga

SEQ ID NO: 220595 - DNA, 411 bp, Klebsiella pneumoniae
atgctgaaaatactgacctctgctgtacccgccctcattctgtcacttgccgccttcagtgccggtgccgctcagcttccggcaagcctgatggataaagacaatcccggccaagagtactggtgccagggaaacgacatcaacacctccatgtgctcactaaccagtgtcagcgacgaccataaatttgccctgattcaggacctgccgggcccggcctgtgaagacttaagcttcggggttattgatctggtgcgtcagaccggcgtcaacattccttacgacggtggtgactgtaagggtgatgtgcaggccggttttgtgcgaggcacgaaagataatgccctgtatgtgaaaattgtccggggcagtaaaaccctgcggttgtataaagtacaaaccggttactga

SEQ ID NO: 220596 - DNA, 459 bp, Klebsiella pneumoniae
atgacgacacaaacgcaatgcgaattgatgtctgctaatgaacctcaatttgaccttactgcaacaccaatacctgacgagcagcgtctcgatttctggcagctgtactttggcgatatcccgcagtggatatcgctggaaccccgtattttcgcctggatggagcgcttctgtaatgagtacagcggtggtatctggtcctcttacacgctcagtaatggcggcgcgtttatggcccctgatgctgacggtggtgataaatggcatctgttcaacaggatgaacggtaatggtgtggaaatgagcgtggaagccgcaggtatcgcggtctgcctgattgaatacagccatcacgcctgtcgtaccgaatgcgatgccatgactgagcactattaccgcctgcgggattacgccctgcagcaccctgaatccagcaccattctgcgcattattgattaa

SEQ ID NO: 220597 - DNA, 483 bp, Klebsiella pneumoniae
atgatggaacagtcacttatcccacagactccggcactaccactaaccgcacaacgcacggtaaaacgcgccttaacgctgcttgaccgacacctgcgcgaaacaggagtggcattcacttccactcaggctgcccgtgactggctgaaactgaaaatggcgggactggagcgcgaagagtttatggtgctgtatctgaaccagcagaaccagttgattgcccatgaaaccctgtttgccggttctattagcagtaccgaggtacatccccgtgaggtggtcaaacgcgccctgtacttcaatgcggcagcagtgatactggcgcataaccatccctccggcgacacctcgcccagcaaggcagataagaccatcacgcagcgtctggtgcaggcgcttcagcttgttgatatccgtgtgcctgaccaccttattgtaggtggtacgcagatattgtcgttcgctgaacacggtctgctgtga

SEQ ID NO: 220598 - DNA, 222 bp, Klebsiella pneumoniae
atgagaattatcagtaaacgccgggcgatgacgatttaccgtcagcatccggcctcccgcatttttcgatactgcaccggcagataccagtggcatggcagtgtctgtcattacaccggtctggccgttcctgacattcccggcgtgctggcggtatacgccgaacgccgtcaggatcgcaacggaccttatacctgtctgatgagtatcaccctgaactga

SEQ ID NO: 220599 - DNA, 318 bp, Klebsiella pneumoniae
atgagcaaccccacatggggcctgctgcgggatatcacgccgtgcctaggagcacgtctggtgcaggagggcaaccggctgtactatctggttgaccgagcaagtatcaccggtaagtttagtgatgccgaaatcctgaagttggatgtcgtatttccacattttatcagtcagatggaatcgatgctgaccattggtgaaatgaatccccgccatgcccactgtgtcaccctgtaccacaacggtttcacctgcgaagccgatacccttggtagttgcggctacgtatacatcgccatttatctcactcaacgctaa

SEQ ID NO: 220600 - DNA, 510 bp, Klebsiella pneumoniae; identical to SEQ ID NO: 136960

SEQ ID NO: 220601 - DNA, 537 bp, Klebsiella pneumoniae
atgatgttacccctgaccacgccccggctgctgctgcgccggttcagaacggaagatctgccgactttcagccattatcgcaatctgccggaggtggcccgcttccagagctggacccactacggcatgacagaggcgacagccttctatgaacaacagcgttcgcaggcctttgctgaggatgagagctggttccagcttgccgtagagatccaggccaacggtgcgctggcgggagatgtggggatccacttcttagatcacggcagacaagccgagctggggatgaccttttcccctgcgtatcagcatcaggggtatgcccgggaagccatacgggcggtgatggccttactctttgaacagttagcccatcaccggctgatagcggtggtagacacacgcaataccggcgcgatcaaactcctggaagggctgggctttcgtcgcgaggcgcattaccggcagaatatcttttttaaaggcgagtggggcgatgagtacctgtacgcgctgctgcgcagcgaatatcagtga

SEQ ID NO: 220602 - DNA, 951 bp, Klebsiella pneumoniae
gtggttgacctgtgcccacaagcgaactcgtcctctatgttacttggtggaatgataaatggcgaaaacacactaaaccagattcattcagcaatacagagaaagacaatatctggatatattgaggataggatcagaagtccatatattcctaccaacactggttctagctatgtaataaatgtatctacacacaatagtaaagttccaaataatctatatcttgtcactggcgatgaacaattagaactccaagcatcaagagttgttggggcatcatttccaggtccccatgatgcatggcgtactgttcacctctggattaatgatttaatcagtgacatttgcaactcatggaataatgaagatagctgcgtattcattgactgcaaccctagcttctctatttatacagagttagctttaaccgcagcagagcgccttttaattcctttctctgccgatggttcatcaaagagagcagttaaggctgtactttctttagtttatggtgagcgtcgccatcagaatgaaccacaatcagatttctatcttaatagcaatcgttattctatgtcgctaccacaaatatatatgtatgttggaaatagattaacgcaaatgaacaattcatctgccagtgcatttaagacggtagtaaccgaaattggtgatgaaatttggaaagtatggcaaacaaaaccaagtctgttttgtattcacccaaatgggagctcaacgccaaataataaaagatctttcaggaatatgtttcagtatgaagtaaatgatgcaaacacagcatctgtcgtatctggagccttaggtattccaatcgcgacattaactgcaggaaataaaactgtttcaggaaaaataataaaggttaatcagacgcagctagataaacaagtccccaacattgtagctctcgctggtatgatcgaataa

SEQ ID NO: 220603 - DNA, 258 bp, Klebsiella pneumoniae
atgggctctaacaataatcagaataaagatctgcaggataagcaagctgatcttttggaccaaacgtatactcttggttggatggatggctatgccgaagggtatgatgatgctattgaagatactcagaacgctttgaataaactggaaaacgaaaacgagttgcttactgaggttgttgaaagtaaagataatgtaatcaaagagttggcctctagtgctggcagggcgctgcaagcagtaaagaaaaacaaataa

SEQ ID NO: 220604 - DNA, 405 bp, Klebsiella pneumoniae
atgaccattttagtgacgatacaggcccagctcgttgtcggggaggaacaggttataaagagcctcgctcctgagggcatgctggccgccgtgttcgaagacgatggccggaccgggtatttctatgcgctcgatgagtccgtcgagggaaacccgattatggacgcagtacacatctacaatgccgaagacgtttcagacggtcacattccttctgatgttaaaattggctggtcagaagacagtcagaagtgcgtactcctgatcaatggatacccgcacggggcattcgatttcgtgggaaaaaacgggtactgcaggagtggttatcctccccctataaacaaggtgtggtctctttccgggcatgagtggagcgactctgtggatgattttttccggtga

SEQ ID NO: 220605 - DNA, 402 bp, Klebsiella pneumoniae
atggccagagtgtctattagtgaggcagcccgactgacgggtaagagtagaacaacactgcacaggttaattaaagcaggtgacctgtccacctgtagcggtgagcgcaatgcaaaaatggtagacacttcagagcttttacgtgtctttggtccctttgaacaactgaagggtgaacaccattctggacaggtctctgaacagcgcgatacagcctctgttgaccagtgtgaacaggtgattcgtcatctgaaacaggagattgaacacctgaacactttacttttgtccaaagattcgcacattgacagcctgaaacaggccatgctccttcttgaaaatcaccaggcaaaattaactgaatccccggcgccatggtggaaattctggaaaaaatcctga

SEQ ID NO: 220606 - DNA, 192 bp, Klebsiella pneumoniae
atgacgaaacaacagaaaacagcgctgaacatggctaaattcatccagcatcaatctctgctcctgctggagaagcttaacgagcttgatcttgatgtcgaggccgacctttgtgagaaactccacgatgatgcggagcatcttttccgtacactgtcctcgagactggatgcattacaggatggtaactga

SEQ ID NO: 220607 - DNA, 606 bp, Klebsiella pneumoniae; identical to SEQ ID NO: 107131

SEQ ID NO: 220608 - DNA, 2898 bp, Klebsiella pneumoniae
atgtcacgacgccatattttcaccgaacggcagcgagcagcgctgttcgatctgcccacggacgaactgtcgctactgaagttctacacgctgggcgatgatgacctggaaaacattaggcagcgccgcagaccggaaaacaggattggctttgccctgcaactttgtgccttacgatatccgggccgtgcactggctcctggtgagatgatcccgcgtgaagtcctttccttcgtcggtgctcagcttggagttccggctgatgcgcttctcacttatgccacacggcgccaaacccgtcagcagcacatggacacgctgcgcgaaatttacggctacaagaccttcacgggccgtggtgcccgtgatctgcgggagtggactttcggccaggccgaagatgccagatcaaacgaggatcttgctcatcgttttattgtgcggtgtcgggaaacttccaccattctgcccgcagtatcgacaatcgagcgcttgtgcgcggatgctctggtcgccgctgagcggcggattgaaacgcggattgcggaaaatttaacagcggatgttcgcgatcacctggacaaacttctgagtgaaatgctcgccggcaatatcagtcgtttcatctggcttcgcaacttcgaggttggtaacaactcggctgctgctaaccgtttgctcgacaggctcgaatttctgcgtaccctgaatatcaatcatagtgctttggccagcatacctgcccatcgcattgcccggctgcgtcggcagggtgaacgctacttcaccgacggtttgcgtgacatcacttcggaccgccgctgggcgatccttgccgtctgtgttgtggagtgggaagcggcgattgctgatgccatagtcgaaacccatgacaggatcgtaggaaaaacctggcgggaagcgaagcgccagcatgacgaaacaatttccggctctaaagccacactcacggatacgatccgtaccttcaccgcgctgggagcttcgttgcttgaggcccgcagtgacggaaccccgctggagatggctgtcgccagttcggttgcatgggaccggctcgctcaactggtagcgacagggactcaactcagcaacacgctagccgatgagcctcttgcatatgtcgggcagggataccatcgctttcgtcgttatgcgccccgcatgttgcgctgtctgaagctcgaagccgcgccggtcgccggaccattggtagcagcagctttgtcgatcggagagatgaaaggtgttgcatcgccagaaaggcgtttcctgcggcccagctccaaatggaaccgtcatttacgagctcaggaaaaaggagatacccgtctttgggaagtggcggtactctttcacctccgggatgcttttcgttccggagatgtctggctcgctcattcgcgccgctatggtgacctcaagcaggtactggtgccgatgatcgcggcgcaggaaaatgcaaaactggccgtgccttccaacccacaggattggctggcagacagaaaggcgcgactcacgatcgctcttaagcggctggcccgggctgcccgtaacggcactattccgcacggtagcatagaagatggaacgttgcggatcgacaggttgacagcagacgtgccggatggtgccgaggcactcatactggatctgtatcgccgaatgccgtccgttcggattaccgacatgctgcttgaagttgatgcagcccttggtttcacagatgcgtttacccatctgagaaccggggctccatgtcgcgaccggatcggtctgctcaacgtcctgctcgctgaagggctcaatctgggcctgcgtaagatggcggaagctacaaacacgcatgattactggcagctctcacgccttgcccgctggcatgttgaaagcgaagccatgaaccaggcattggcaattgtggtggccgcgcagggtaaactgccgatgtcacgcgtctgggggatgggcacgtcagcatcgagcgatggtcagtttttcccgacagcgcggcatggcgaagtcatgaacatggtcaatgccaaatatggttctgttcccggcctcaaagcgtatactcacgtaagcgaccagttcgcgccattcgcttgtcagtcgatcccggcgaccgtgagcgaggcaccgtatattctcgatggactactgatgaacgaggtcggtcgccatgttcgcgaacagtatgccgatacagcaggattcaccgaccatttgttcggagccagtagcctgctcggctacaatctcgttctgcgaatcagggatctgccatcgaagcggttgtacgtatttaatcccgatacgacccccagggagttacgcaagttggtaggtggaaaagcccgggaggatcttatcgttgcgaactggcctgatattttccgttgtgccgcgacgatgaccgctggcaaaatcaggcccagccaactcctgcgcaagctcgcttcttacccacgacaaaacaaccttgcagttgcgcttcgtgaagttggtcgtattgaacggacccttttcattattgagtggatcctggatacggacatgcagcggcgtgctcagatcggtcttaacaagggagaggcccaccatgcgctcaaaaatgcgctccgtatcgggaggcagggggaaattcgcgatcgcacgacagaggggcagcactaccgaatcgctgggctcaatttattgactgcggtgatcatttactggaataccgtccatcttggtcatgccgtcacggagcggcggaacgaagggttggatgttccccctgaatttcttccccacatatccccattgggctgggcgcacattctactgactggcgaatatctttggcccaaggaaccgaaagcttag

SEQ ID NO: 220609 - DNA, 546 bp, Klebsiella pneumoniae
atgccattacctgagcgaatgaaacccgcacgggtcacccgtaaacagatgaaagaactggtcagtcagctgaatggcattctcgatcacatcgataacgggatggacgaaaacaatgaagaactaaaacagatgatggcagactggaatgcacaggtcgtcataccctgcgggttctctgattttcgtgatttttcatcctggacaagtgcactagatttcaccaggatggcgcttaatcaggaaaaataccttgatgactttacatggacagaactgaacgacgttatcaacttcatacgcaaagcagaaggtagtgcatctgaccacagctatgcactccagttactggagattaatttcagggcaaacccactggatctcatctatcaccctgactgctggttcaatgatgaagcattgtttcatgctcggctgactaccgaagaaattggtggctacctgatgaaaaaatcaggtcgatggctcaacgatgcaccggatatccagctggtgtatgccatcccccaggatgtttatgattaa

SEQ ID NO: 220610 - DNA, 393 bp, Klebsiella pneumoniae
atggcaaagatacaggcatatgttagcgatgaagttgctgaaaaaattaatgccattgtggagaaacggaaagctgagggcgccagggagaaagatgttagtttttccagtgtgtctacgatgcttgtcgagttaggcttgagggtttatgaagcgcaaatggaaaggaaagaaagcggctttaatcagatggctttcaataaggttttgcttgaaacagttttgaagacacaatttgcaaccaacaaaattttgggaatttcttgtttgagtccacatatctcaggtaaccaaaaatttgagtggcgatttatgattgataacattctggaagacactaaagaagtggtcgatacattctttccagaatcagaagatggtgacgaagagtaa

SEQ ID NO: 220611 - DNA, 408 bp, Klebsiella pneumoniae
atggcaggacgggactatcgaatagattccgatctactgcgggctatttcatggcaggagtctaaatggaaggtgaatgccattgggaaaaacccgggatctggctacggtgccggactgatgcagatcgactcgcaacaccagggtgaactgtcgcagtacggtattaaaccgggacaccttctgactgatgcctgtctgaatatttacaccggtgcttattatctggcactggcttttaaaaaatggggagtcagctgggaggcagtcggcgcctacaacgccgggttccggagatcggacaggcaggccatacgacgactggagtacgccaggaagattgaggccatctacctggctatcaagagaaataaaaatgccggccagtcatctttaacaaaaaactga

SEQ ID NO: 220612 - DNA, 531 bp, Klebsiella pneumoniae
atgcgcacaatgaaagtcaacaccgccactcgtgaatcagacgaactttttaaaacagacaaatatctgcgctgtgccgtaaccaatggtaaagctcgcctggattttatcccggacctcttttttacgccgttagccgataatatggcagcgagctggttacgccagcattctgaatacaacggcggttcctggtcttactgggttattccacagggtgttggcgggaatattgcacccaacagcatccagttcattaacacgcagaccggatatatcgcaccagaaggtgagcagcgttacaggatgtgcatcccgggaaattatttcgaaggtgaggtcagcgccgatgcagcaggcattattgccacgctgatgattatgaacaggctgtcctggcacgtggctgaaatggggccgcaatatgaccagatctgcaggcgtctggtttcacggcaggatgcactgaaggattatatcagcattattcagcatcccgaacggcatttaatatggcgggcaattgattaa

SEQ ID NO: 220613 - DNA, 834 bp, Klebsiella pneumoniae
atgtcacagatgaattttgccgatgtgttcaatctggccagagaaaccgcggataacagccctgttattcaggcagggctgcagatcgcggaacaggtgcctgcggttcatcgtatgatgagcgcgcagtacagccggggccgtttcatcagcgtatttaaggatacgggccgccatctggggcgctgggaagtgttcagtgattttctgtcactcgccgccagtgagctggatatggcccggataagaacgccagagagcatggagcactgccggaaaatctgcgcccggtacgaggccgccgacgtcgcgaacatgcaggaaatgttctgcctgatggtgtgtgcgctggaggcgaaatttcatgatttcctcggcgcgatttttatggagcttgatctgggcgataactttcgcgggcagtattttacgccgtattcggtgcagtgtctgatggcgcgaatgctgatgccaggcgtcagagacactatccgccgggaaggcattgccaccgtcagcgatccggcgtgtggggccgcagggatgctgatcgcctatgcagagtgcctgcttgaagcggatattaacccctccatgcacatgttcggcagctgcattgacatcgatccagtggcagcagatatggccttcatccagctgtcactgctggggatagccgcggaagtgatgacgggcaacacgctcacgatgcagatccggcgtgtgaggtataccccggttttctacctcaatgactttgaaaaacgactgacagatctgcgccggttcagggccatgcgggactttatgcgcggaatacaggaggccgcgtaa

SEQ ID NO: 220614 - DNA, 507 bp, Klebsiella pneumoniae
atgtcagtgaccgagtctaaagcaaaagcgccggttaaaaccagcaaaaaatcggtgaaccctgccgaatccgccgccctgaaagccgcgcttgaggctgctcaggttgagatggtgccgctgtcggcgctggtcaaatccccgctgaactttcgcacgatcccctatccggctgacagtgtccgggagatggctgactccatcatggcgatcggcctgatccagaatctggtggttcactcgctgccggacggtatgtcaggggtggctgcaggtggccgccgtcttgccgccctgcaacagttgctcagcgagcagccccgccgtcatcagcgcaacctgcgtgatgatatcgccgcacaggagattgacccggtgctgaaggctttcggacggcatattgcccggagcgttcgcaaggggcgtggtgtccatatccccgcgatgaacaacaccgccttcgggcaggtgctccgcacgcttgaactcaaacgcgcatgtaactga

SEQ ID NO: 220615 - DNA, 1029 bp, Klebsiella pneumoniae
atggctatggaagttcacgggtttattatttcgtctccgttcgtgttcgtctgcgatggtaaggtttatcgcagccaatcggggaaaaactggacggtcatatttagccgttacggtacgcaagcctgggggaatgatacctatgcttcccagcgcgttgaccgtgcttgcccgccaaatcgtaacgaagaagttcgtttggctttccgtggcgcagttatgcgccacttcaagctgaactacacccaaattgaggcattcttccagcgtcagatcgacgaggacaagcaaatcctggtcgaaggaaattcggttaaacgccatgtgggtggccgcagcagttacagcacaggcagtagcagcacgacgttatctgctcccgcgcccgctccagtcaaaaaggaatccccccatccagcgcttaaacatggttgtccagcaagtcgtttggaagaattcctagcctgggaaaaagcgcaccttgggattttgaatcgtgtcaaaatgccccagcgcgttgccatgttcctgggaacctgggaagaaccgaatgcggtcaaacctgaacccgtggtggccgaagaaccccaggctgaagaacctcgagccgaacggtcgctggctgaagaacgcgaacataaagaagatgtacccttctatggccgtcgccgtcgtgatcaggggaaattccgtgaagatgtgatgcttaactgcggtggccgttgcgtctacacgaatgccattgcggtacgctgcgaagccgcacaccttaaagcccacgctcgcaaaggtggcgcgagctttaaaaacggtctgctgctgcgcgctgatatccacaagctctttgacgcgggactatgtgccatcgatccgcacacgcttaaactctggttcgcgccagacctggtaaaaaaagacgcagatctcgcggccattgatgggataacgatgcgcaaaacgctgctccctatcaacaaagacaacatcgaagaccgctgggatgccttcgttaagatcttgctggcatga

SEQ ID NO: 220616 - DNA, 3162 bp, Klebsiella pneumoniae
atggcaaccggcgaccgctctagggttgccctattggagcgaggtgtaccatggggaccaaatgcccgcagcaagcccagccataagctttatttcgaggtcgtcctcggctccatcgctctcgacaaggcgacggacgagctggtcaaggtttttggcgaggatgaggagcgttcacgcccggacggtaagaaggcggccatcggctcgctcctgatcgacaaagaaggttatgtgcttgaggacaaaggcgttgccgtgtccagttttgcctgggcactcaagccggctctcgacctgaagcttgggagcttagggaattggccgaatgttgagccgcgcattatcgagcatctggatcgaatggttcgccgccacaacgaggatggagaacccataccgatcgatttggatgtcgttcttaacgcttatagatggcttgtgtctcagttcggtgtacccgaacatttggttgagccacccacattcgcgattaaggtgtttcatcatttcaaggccaaggcgccgcctgaaccttcgttactgaattccttctatcttgaagatctcggtgaagcaaccaaattgctcgagacgggcaaagccggagccggtttgcgccgctacatgggaattggcaggcctgaacagaaaatcgacgtgctatcgcccatttccgcagttgagccattcgtcgcaccctcgctcatgccgcaggctcgttggccttcgaaaggcggccatccactggtactgcttcaacaggctgccgtgaatgcggcgcgtgctgagctgaatgatgctccaggtatcatcggcgtcaatgggcctccgggaaccggaaagaccactcttctgcgagatattgtcgtcgggtgcattcttgatcgggccacggcgatgtgcggcttcaataaaccgcaggatgccttttccacaacaggcgagaagctggcattcggctccaatgcattcctgcacttctacaagttacatgcatccttaaagggccatgagatcgttgtagcgtcctccaataacaaagcggtcgagaacgttagtaaagagcttcctctcaaggaagccaatggtcgtcatgaacaaatcgcctattttcggtccatcagcgacctgattgcgaaccccaaacgcgtcggctatttcgaagccgaggccgagggggacatcccctccgacccagtcgaaacctgggggctgatcgccgctgctctcggcaagagcagcaaccgaggcgcgttccagcaaggtttctggtggaatgaagacggtggtttccttacctacctgaaagcagctcgcggcataaatgtcatgcgtgagatcaaggacgaacgaacaggcgaaatcatcgatcgcgtaatgcccagcgtggttgtcaatgagcggcccagcaccaacgaagcggatgctgctgcggcctggctgaaagcgcgaaccgcatttcttaaactcaaggcaacggtagacgccgaaatcgccagcatcgaagagatgcgacgggatatccaggcgctcaagggagcgatcaccgaacttcaaagggctgaagagcgtcgaccgagtctggatgaagccgtagaagaggcacaccagattgctgaatcctgccaacgggagcatgagaaggcaaaatcgcagatcgagcaggataagatcatgctcgacagccatcttgctggccgtccaggtttcttctcccgtttgttcgcgactgcggcctggaagtcgtggagatcgacactgcagatgctctcggcgaccttgcagcaatcagtcttacgggcgctggagacagacggtgccctggagcttgcaagggctgagtggagcaatactgagtcccagttacagcaactcgaccaggaaatttccagcaagtgtcaggctgtctcgaaattgaaagcaaccgaggcagaggcacgaaaccgcatgggagacagggtcgttgatgagagattcttcgagcgcgagcacgaggctatccacctgactgcgccatggcttcccgatgaggttcatcgcctgcgggaggatctattcgccgctgccctgactgtgcataaaacgttcatcgatgcttcggccagccgcttgcaacacaaccttgggctattgatgtcgggcatggtggctggtgccttccagtcttccgctcaccgtgaacttctccccgacctttggtcaagccttttcatggtggtgccgaccgtgtccacgacattcgcctctgttcggacgatgttcggggatctgccaccagagagcattggctggcttctggtagatgaagcgggccaggccgttcctcaggcagcagttggagctatcatgcgggcaaagcgctccatcgtggtaggtgacccgttgcaaatcccacctgtagtttcacttcctgaaaagctgaacgtcgaaatctgcaaattcttcgacattgatcagagcgaatggtctgcgcccgcagcatctacgcagacccttgctgatcaggcatcgcgcttcaaatccaccttcgtcatggatgtaggtgatcgagaagtcgggctgccactcctcgttcacaggcgttgccagaacccaatgttcgatgtttctaactccatcgcctatgccgggcagatggtccatgctgtcgggcctaaaagactaggatctatcggctcggctttggggcgatctcgctggttcgacgtcaatggcaatgctgagacgaagtggtgccccgaggagggtgatgcggttgtacgaatgcttaaagagctggccgcatcgggcattacaaatccggacgtctttatcatcacaccattcaagatcgtagagcagaacatgcgtcggcgtctcgacagtgagaccgatctgctgcaagcgctgggagtaaagtggaatgagtggagccgtgatcgtgtaggcacgatccacacgttccagggccgagaggcggacacggtcatcctgctgctgggtgctccgaaagcgagtcagcaaagagcccgtcagtgggcggcaagcccgccaaacattatcaatgtagccgtctcacgcgccaagcaaaacctgtatgtggtcggctcggctgctgcatgggcaggggcgggaacgagcctacaggtcctgcagcgacaattggcgcaatcagcctga

SEQ ID NO: 220617 - DNA, 876 bp, Klebsiella pneumoniae
atgaataaacctgatggccttcaggcctttgaacaaccgcttgcgtcgcttccctctacgcttcgcgagcttattcttgaacgtatccagaacctgacccactacgagccggttattggcatcatgggcaaaagtggtgcaggtaaatcctctctttgcaacgaacttttccggggcgaggtgtccccggtgagtgacgtgaatgcctgtactcgcgacgtgctgcgtttccggttacgcagtgggcgtcacagcctggtgattgttgatttaccgggcgtgggcgaaaacgggcagcgggatcaagaataccgtgccctgtaccgtcgaatcctgccggagctggacctggtgctgtgggtcattaaggccgatgatcgggcactaaccgtggacgagcagttctggcacggtgtgatgcaaccttacaggcaaaaggtactgttcgtgattaaccaggccgacaaaatcgaaccctgtcatgaatgggataccctcaccagcaaaccttcaccgcaccaacagggaaatcttaaagcgaagcaggctgcgattatggcgatgtttaaaccgcatcatccggtctgtgcggtgtccgccagcactggatggggcattgaggatatggtggcaaccatgatgcgctgtctgcctgaccgcgccaccagcccggtggtgacacaactgcacgggagactctgcacagagccggtaaagtcgcaggcccgtgacagtttcggtgacgcagtgggccgtgttttcgatacggctgagtcatcgtcattgctgcctgcgccattgaaaacggtgattcgtaccgtgcgtgatgcggtggtgtcggtcgcacgggccgtctgggactggatattcttctga

SEQ ID NO: 220618 - DNA, 717 bp, Klebsiella pneumoniae
atgacgcttcaggagcggcgacatgaccggcttgccgtcaggttgtcgttgattatcagccgtctggtgtccggtgaaactctgtttattcgcaaactggcaactgaattcggggtgtcagagcgcacgttacgtcgtgactttcgggaacgtctgatgtatctcgacctggattattaccaggggcagtgcagtctgcgctcagatattcacagtacgcggcaggaaatagatattctgacctttgctcaccgcacgggggtggccggggctttcccgggctttgaccggcgactggtcagcagcctgctggactgtgatgagcgaccttgtctggtatggcatcaggacagacctcatcccccggcaggaaagctctgcttctacaggctggtcagagctatttcgggatgtcagcgcatcaccattctgactgaaggggagcgtcatgaggccgttgcaccttaccggctaatcgccctggatggttactggtatctggtcgctgaacataacaggcaattacgtgtcttccggctggatgagattcatctggtaaggccatcccgggaaacatttattcgcagtgagcttctccatcagctgtcggaggacaaacattttatcttagccttacctcatttccgttttattcaacagtcgctgaattcattttctccatcagaaagtcgggggcaatccggacaaactgattag

SEQ ID NO: 220619 - DNA, 141 bp, Klebsiella pneumoniae; identical to SEQ ID NO: 147916

SEQ ID NO: 220620 - DNA, 261 bp, Klebsiella pneumoniae
atgggatggtttattgttgttcgctcgaaaccttccagagattgtccgggtggcatatgggggtggatcactcccagtaaagacggtgtagcaacaggctatacgattacgccaggtaaagaattcaatctcaccatgaaggatatgtgcagtccggatatgaaggtaacattccgcacgaataaaaaggatcctcgttatgacgatctcgttgggatttatgccgggaaagaagcgtttcgctacaaacaaataagataa

SEQ ID NO: 220621 - DNA, 474 bp, Klebsiella pneumoniae
atgcgactgccttacgtaatagttacattagctatgctggcttccgtatcaacagcacaggctattcccaatatgtggacgagtgattttgggatgggcgtgaccgaatatatcattaccagcccggataaggtggtgtttaatctgaactgtactggcaatccggatgcgcagaatattctgcaacacggtgttgatctcaccctgcctgatggaacatcagtaagttctcatgacgacgggacggaaataacagtcgtcatggataacagtcagtatccgttaccgtcattcctcggctggcgaaacggtgacaatgcctgggtgtcatttattgacgccctgagccaggctggggattttgatgtttacgtcaacgataaaaaagtcggtaccttcagtccgggtctgaagaatacgcagaaagaattgtctgacctcagtggctgcagaaccacccattacagcgattaa

SEQ ID NO: 220622 - DNA, 822 bp, Klebsiella pneumoniae
atgcgattagccagccgctttggccgtataaaccagatacgccgtgacaggcctctgacccatgaagagctgatgagccatgtccccagcgtgttcgggagtgacaagcatgaatctcgttcagaccgttacacctacatccctaccattaccattctcgaaagcctgcagcgtgaaggctttgagccgttctttgcctgccagacgaaggtccgtgacctgggcaagcgggagcacaccaagcacatgctgcgcctgcgtcgtgctggtcaactgaccgggcatcaggtaccggaaatcattttgctcaacagtcatgacggctcctcgagctaccagatgctgccggggttgtttcgtggcgtctgtaccaatggtctggtctgcggccagtcattcggcgaagtgcgggtcccgcataaaggtaatgtcgtcgagaaggtgattgaaggggcttacgaagtgcttggggtgtttgaccgggtggatgagaaacgcgatgcaatgcagtcgctggcgctgccagccccggcacgtcacgcgctggcagatgccgcattgaggtatcgctttggtgaagaccaccagccggtcacggtatcacagttgctgactccgcgtcgtcgggaggactacagcgatgacctgtggaccgtctaccagcgcgtgcaggagaacctgatgaaaggaggtctgtcagggcgaaccgctcaggggaaaagcagtcgcacccgtgctgttaccggcattgacggcgatgtgaagcttaatcgcgccctgtgggtgatggcagaaaacatgctcgagtttttcgggcgttaa

SEQ ID NO: 220623 - DNA, 441 bp, Klebsiella pneumoniae
atggatacacaaaaccttgagttcgctgagcaggcagcaattactgcctcggtagtccctgacgagttacgtatcggcttctggccgaagcactttggatctatcccacaatggataacccttgagccccaaatatttggctggatggatcgtctgtgcgctgattacagcggcggcgtctggagcttttacacactcagcaacggcggcgcatttatggctccggagcccgacggtgagaagtggacgttgttcaacagcatgaacggcaacggcgcggaacttactggcgaagcggcagggatagtcgtctgcctgatggcatacagccaccatgcctgtcgcaccgagtgtgacgcgatgactgaacactattatcacttacgtgacttcgcgctacaccatccagagtgcagcgccattatgcatctcatcgactga

SEQ ID NO: 220624 - DNA, 543 bp, Klebsiella pneumoniae
atgaataccgcattatccccgctgtcatctcagcctgaactctttccgctggcggttatgacccagcatggttgcctgctcccagcgacatccggattgacaccttatgcccaacggaccatccaccgggctatcaacctgctggataaatatctgcgccagcctgggatagcatttacctcaagtactgctgcccgtgactggctttggttacatctggcaggacaagaacgggaagtgtttatggtgctctatctcgataaccagcaccgtttactggagagtgaaacgctatttgccggttcgattaaccatgtccgggtccatcctcgagaagtattgaagtcagcgcttcgcttcaatgctgcagctgtcgtgctggtgcataaccatccatccggtgatccggagcccagccagtgcgatcgcaacattacgggcaggcttaaagaagcgctggcactggttgatgtgaacacgctcgatcatctggttatcggatcagatggcattgtgtcgtttgcagagcgaggctggatatga

SEQ ID NO: 220625 - DNA, 342 bp, Klebsiella pneumoniae
atgaaatctactgactcagagaacgatacatttctccagtggggactgaatcgtaatgtaacgccttgctttggcgctcgtctggtacaggagggaaaccgactgcactatctggctgaccgggtcagcattaccggtgaattcagtaacgcagaatctttgaagttggatgaagtattcccacgttttatcagccagatggaatcgatgttgaccactggtgaaatgaatcctcgctatgcccactgcgtcaccctgtaccacaacggtttcacctgcgaagccgatacacttggttcacacggttacgtctatatcgtcatttatcctgcacaacgttaa

SEQ ID NO: 220626 - DNA, 786 bp, Klebsiella pneumoniae
atgataaaaaaaactaccgttaataaacttgtaacctttaactccaaacttgatacgtctcaaaaaataataaggaatcttattgctgcagtcgtcatttgttttcttctaaatttccttgggttagacggtttgtggaaggggttctttatactgactttgatttactggagcttttcggtattccatagtctaattattatttataaaaaagcatatgaaacaacattgggtaaatggatcctaatattaggaggcacgctatgtgtgaatttcgccctatgtctttcaggtgtggtgatcaatgatataacttcagtttcaccaacaaacttccctcactctttgatatttattgcggcttcgatgattcctttgatcgtgcctctttgtatgatcttactgttcgcggttattttggtgtcagtacctatatggtgctggttttttgtgtatgacgataagcttaagaaatttttactgccaggatatgaacctaatcagcagaggtttttgcataaaagcactttaataatccaagttatatctttaataatttattgtgcttttatttttcaattttcacgactcataggtaatgattatatatcatatatcaataataaatctcaagggatgatttatacactcgagatgtttgataaaagtccatgtgccaacattaagaatgctaaggtttcatttttagatgatggcaatgttctggttgcgtctaggaataatgataaatactccttcaaagtcatgaagtgtgagataaaatag

SEQ ID NO: 220627 - DNA, 516 bp, Klebsiella pneumoniae
gtgagtctacttgaattgattgaatcaaagagggcacatatcgccagaaattcttcagaaaatggaatattaggggaacgcagcctacttgattcgcaagctttatggataaaaagacctaaagggaaagacatgaaaaatctgctagctgcgctgaagcaatttgaagatattgaaataaaggcatcaagctttgattttatttctatccctgaaaatgtaagtgttgactttagtgacgttagctccttggctagaatattaaaatcattaacatttattgaacttaaaacctgcaatcaaaaaagggtcaccactcctgacttcaggaatttcttctttgccattactgagaacgaaataatagcatcagaacttctcggcgataggcacatagttgtactacacaacaaaataacgggagataaactggtgacaacaataccagaaattataaatagggccaattctaagaactggcagctgtctgtaagtcttggggcgcgagaagtttag

SEQ ID NO: 220628 - DNA, 243 bp, Klebsiella pneumoniae; identical to SEQ ID NO: 196784

SEQ ID NO: 220629 - DNA, 939 bp, Klebsiella pneumoniae
atgcaaacgcctaaaaaattatttaaatataaaaaatttaacgatgattgtatggagttgataattgatgattatttgtattttgctaacccagcccaatttaatgacccgttagattgcaaggtttcaatattagatgatgtaaacgatgaggggtttttgagggatacactttcaacattacttcagcgtaactctggaaaaaaattaaaggcttctgcgaaaaatctacgttataaaggcccggtaaccgctgaaaaaatttctattttaagccaaagtgaagctgaaaaaatcatttcagatatctattctgaattttcatttgcacaatacgattttaatatccagacaatcaatcaagttttaaccagtgcaatagggaatattatattgtcggggtatagtagaggggtgctttcgttatcaaaaaaagatacttgtcctttgatgtgggcgcattatgcttataatcataaaggactttgtttaggatattctatacctgaaaatactgataataaaatccgtccagttagctatacgagtgagtttagagagataaaaattagccagatacgtaggatgttagacggagatgaaaatgcaaaggcagagattgagcataatatattcttaaggaaggctaaaccttgggggtatgaagatgagtggagaatggtatcagatgttggtttgcaaaactcatcaatatatttgtctgaaatcacatttgggctccgttgtaaatatacaactattttcactgttatgatgtccctttctgaaagacagaccccagttgaattttataaaatcattgaggtcccgcataaattcacgctcgaaaaagaaagaattgcgtttgatcatgaaagattacaaggcttgccgagatgcatggaaagcctcgatcaaatgttgaatgatgaagagtaa

SEQ ID NO: 220630 - DNA, 357 bp, Klebsiella pneumoniae; identical to SEQ ID NO: 102369

SEQ ID NO: 220631 - DNA, 1386 bp, Klebsiella pneumoniae
atgttcaaattaaaattactcagcattagcacgatattcatcctggcaggctgcgtgtcgcttgcgcctgaatatcagcgtcccgcagcaccggtaccccagcagttttcactgtcccataacagcctgacgccagcggtaaatggctatcaggatacgggctggcgtaacttttttgtcgatccccaggttacccggttgatcggtgaagctctgactaataaccgtgatttgagaatggctgccctgaaggttgaagaggcccgagcccagttcaacgtcacggatgcagatcgttatccccagctgaatgcctcatccgggataacatacagcggtggtctgaaaggtgacaagccgaccacacaggagtacgacgcgagactggagctcagctatgagctcgattttttcggcaaacttaagaacatgagtgatgctgaccgccagaactactttgccagcgaagaagcccgtcgggccgtacacatcctgctggtctccaacgtttcacagagctatttcagccagcaactggcgtacgaacaactccgtattgcgcgggaaacgctgaaaaattatgaacagtcctatgctttcgttgagcaacagctcgtgaccgggagtacgaacgttctggcacttgaacaggcgagaggacaaatcgaaagtacccgcgccgaaatagccaaacgagaaggcgatctggctcaggcaaacaatgccctgcaactggtgcttggaacgtaccgcgcagttccgtcagaaaaagggatgaaaggtggggagatcgcaccagtaaaattgccaccaaatctgtcgtcacaaatattgctgcagcgtccggatattatggaagcggaataccagttgaaagcggctgatgccaatattggcgcagcgcgagcggcttttttcccgtccattaccctgaccagtggtctctcctcaagcagtacggagctgtccagcctctttacgtcaggaagtggaatgtggaattttattcctaaaattgaaattcctatatttaatgctggcaggaacaaagccaatctgaagctggccgaaattcgccagcaacagtcggtggttaattacgaacaaaaaattcagtcagcctttaaggatgtttccgacacgcttgcgctgcgcgacagccttagccagcaacttgagtcacagcagcgttatcttgattcactacagataactctacagcgtgccagaggattgtatgcaagtggtgctgtcagttacatcgaagtgctggatgcagaacgttccctcttcgcgacgcagcaaaccattctcgatcttacctattcccgacaggttaacgaaattaatctgtttaccgcgctgggtggcggttgggtagagtaa

SEQ ID NO: 220632 - DNA, 681 bp, Klebsiella pneumoniae; identical to SEQ ID NO: 19863

SEQ ID NO: 220633 - DNA, 555 bp, Klebsiella pneumoniae
atgtcacaccataatacttgctatcgttctgagcattacgatctgtggtttgataatggttttcttctctatgggatgtcgctgatcctgaatagcctgccggcatcttacttccgcaaaaaacatgttttcttcaccagcgacaattatttcgcggtactgcagcacaactataatcggcgggatacattatttattctgttaaccgaaggcaacgatcttaattttcttagtgaactgcctatgctgcgcttaccggccaactcgacgccggaagagttaaagatatttctgcatcaacccacccgctattacaaaacccatccggcgccaggcgcctcggtgcagtttaccgagcgggaaaagaaagttattcaacttatcagcaatggcgaagcggtcgccagcattggccggtcgctaaatctgcatataaaaaccatttatcagatccggctgaatctgattaaaaagctcggctgcagcggtagaaccgatttttttaatatcagccgcagcgaaacgttcaaatcctggagccagattcacctgtaa

SEQ ID NO: 220634 - DNA, 879 bp, Klebsiella pneumoniae; identical to SEQ ID NO: 94294

SEQ ID NO: 220635 - DNA, 1350 bp, Klebsiella pneumoniae; identical to SEQ ID NO: 189815

SEQ ID NO: 220636 - DNA, 1071 bp, Klebsiella pneumoniae
atggtaaccggcatggcagacaacatttcaatggaagcggaagcgaccaatgcgctgacagcgcagcagagcgatattgactgtgactttgcagcagacgttcttcttgagcactacggcattcgcggtgaagtccgcaaattgcgtagtgaaagagatcaaaactttctggttgaaagcgcagatggcgctaagttcacgattaaatttgcccatccaggtgaagaacggatggtaagcaatttccagactgagctgatgcatcacatcaatcttcgtgcccctggcctgccgattcaacaggtcagagcaacgtcagacggtcgttttgaactcattcttgattgcctggggcaaatgcgtacggtcagagtcgttacttatcttgaaggtaagctaatggcacagtcacctgcgactaatgtacagaaatataatcttggcagcatggctgggctcgtcaccagtgctcttttggatttcagtcatcccgctcaggatcatgtgctgctctgggatgctcaacatgcatcatcgctgcgcgaatacatgaaagtgattgttgcacctgctcgccgtgccatgctggagttttgtctggataactttgaatcacgcgttaagccacttcttccctcgttacgtaagagcgttgttcacaacgatatgaacggcgacaacgtgctggttgatccacaaaatactgacgaaatagccgcaattcttgattttggtgacgccgtctgcacagcgattgccattgatgttgcggtgggagccacttatcagatgggaaccggcgagcgcttgcttgatggcgctctcgcctaccttcgaggctacatagcacaggttccgcttcaggaagaggagatcaacattatgttcgatctgttcctcacccgcatgtttgtccgaattgtcattaccgaatggcgtgcacgtcagtttccggataaccgtgaatatattctgagaaacaccgcaaccagctgggcacagctggaacagttattgtctctgccgtttgaagaaactcgctccctcattgaatcagcctgtaaggaataa

SEQ ID NO: 220637 - DNA, 747 bp, Klebsiella pneumoniae; identical to SEQ ID NO: 94297

SEQ ID NO: 220638 - DNA, 753 bp, Klebsiella pneumoniae; identical to SEQ ID NO: 94298

SEQ ID NO: 220639 - DNA, 684 bp, Klebsiella pneumoniae
atgtttgagcttttacaggaatacggtccccgcatgctgaacggtcttggcattacctttcagatagtactgacatcagtttttgccggtgcgatcctgtcaatgttaatcctgatgctgcgtatgtctggctcatcgatactgaagtcagtttctcttgcttacatctactttttccgtggcacaccgctactggcccagacatttttggtttactacggcgcaggtcagttcaggcatgaattacaggggctcggtttatggtggttcttccgtgaagcttactggtgtaccgttttcacatttacgctaaatacagcggcttatcaggctgaaatctggcgcggtgcgatccagtcggttccaggtggtcagcatgaagccattcatgcattaggaatgacacggacctccggttttctgaaaatcattcttcctcaggcctccattgtcgcgttgcgccctttgggaaatgagctggtactgatgatgaagtcatcagcaatcgccagcaccatcacggttatggaagtgatgggaaccaccgcgcttgccttttctcgctctttcgatttccaggtttatttatgggcagcaattatttacctggccattgtagaaatcattcgccgcctggtattgaaaatcagtaaccgtctgacaagacacatggtcagggcctga

SEQ ID NO: 220640 - DNA, 711 bp, Klebsiella pneumoniae; identical to SEQ ID NO: 94300

SEQ ID NO: 220641 - DNA, 774 bp, Klebsiella pneumoniae; identical to SEQ ID NO: 189809

SEQ ID NO: 220642 - DNA, 480 bp, Klebsiella pneumoniae
atgcaaaagacatgccacttaatgattggttcgtacaaggctattacacagtgggaggttttaaatattctcgtacttttgcaccattcagaggcaaaacagccccaaaagagtgcaagcttgataaacaacttgggcgatttatgcttgctaccagttttacatcatcactcatcgcatatgctatttcgatacaggacgaagcaaatttccgggaactggagaagatggaaaatctataagtttttaacaagacggttggtcaatccattatgtactggaacagtcagtagaaatggatttgcaacaaccttttctgttaagcactataatttatccaaaatattaacgtccgcttcacaacctgagacattcgacaagctttttatggcttcagtaagggcgactttcgcgcttccagtgccagcaaatatttcgcttcgtcgtaccgggttctggtcttcctgcagcggtaaatga

SEQ ID NO: 220643 - DNA, 702 bp, Klebsiella pneumoniae
gtggccgtcagcgggggaaacacttttctgtctgcaaaagaacgtttccgcgtacaggtctgtttcaaaaatgccataacacatccagatgaagatcggctgctggccgagctgttgactgttcatcacttcctggctgacacctctattttatggtacatggagcaaaaaacttatgcttgctccacgacctgggccaccacgtccacatggctacctgatatctatcagcgtcaggccagcacacccaatgtggtaaagattatcaaatttatgcacgcccggtttcctggcctccaaacggttgtagaaacaaatgagcagggctatgaacaggcgcttaccagtgttgattttgagattccttactggccagtgctgccgaaatttgacgctgatataggaacgatacaagtaacgattagcgggatgatccgttacacagaaacgatgagcaataaaaattgtaaaagccctctcgacttaatgataaaaagttttaagtcagggttaatcccgatagagaaaatgccgttgagcaagaccgaaaggcttatgcctctggatatgaaagccgtaggtttgatattcacacacgcaacatggccgaggcttcgttacatttttgtaccggacgaggcgggaataatgaaactggttagcgtggtcaaattaagattaaaacctctggaggaaaaatga

SEQ ID NO: 220644 - DNA, 972 bp, Klebsiella pneumoniae
atgaatactgactttgcacattacaacgaagagcaactacgcaaactcggtgagctgcacagtttactcggtcatagcgatatcggatcatcttaccttgccacgctaccggagccccgtagtgtggaggagttgaatcctccacaggaaatcaatgtgactcattcggtgcccgacgtagacaccctggtggatatttaccggcagcagcgggttgataaagtccatgtcagggatgaacattattcaaccaaaattacccgaaaatatcccgggtttgttgtggttaaaaataatcatgacgaagtgatgtcgctggtgggtgaaatcaaccggcttcgcgacaaatttgctgatgctgtaaaaggtatcactcattaccaggactcacggtcagaaattctgcaccagatttacccgtggctggtgactttacaggtgtcccgcaatatccggatcgttaccgagaaaattaggtccctggggttcacctggcaaatccctgtcattcataaattcacccggctggaaacggtaatagaccgcctacgcagggagataactgagcttcaaccggatatcaatctgacaaaacaggatgtagaacgattgaaacaggagcggaccgaagaaatcatgatgctgtcgttgttgaatgatgaagtgtgtaatgacgatgaatcttcgagaaaatttcggcttatccgggaaagtaactttcctgctgttaacgtcaatatccggtacaccagtcctgatgatccgaatgacgttcatgggccgtacaaactcaacttccgcgcgcctttacctttaattttgtttagtgaaccggaccgatttaatccgttaaaaaattacgtaaagggtgaaaggcagaagcgcggcagttttaatgaaaaatatcgttctgtcctgccccgtatagggctggtggaagtcatcaaggagtcgagaagagccggtttctaa

SEQ ID NO: 220645 - DNA, 465 bp, Klebsiella pneumoniae; identical to SEQ ID NO: 161822

SEQ ID NO: 220646 - DNA, 243 bp, Klebsiella pneumoniae; identical to SEQ ID NO: 161823

SEQ ID NO: 220647 - DNA, 255 bp, Klebsiella pneumoniae; identical to SEQ ID NO: 161824

SEQ ID NO: 220648 - DNA, 285 bp, Klebsiella pneumoniae
atgggcacaccacgatttacacctgaatttaaggaagatgccgtccgtcaaataacggaatgcggttattccgtcgccgaagtatctgaccgtctgggtgtttctgcacacagcctctacaagtggctacgggctatcaaacctgataacagcgagcagtatgcccggggtatactggaagctaaaagcgagatcctgaaactccgggcgcagctaaaacgaaccgaagaagaatgggatatcctgaaaaaggccgcgcggtactttgcaagggagcccgactga

SEQ ID NO: 220649 - DNA, 807 bp, Klebsiella pneumoniae
atgtcggcgcgcgtgatgaactgcctggaggtactggcccccagggtggaacagtattcaattgatgagatgttcctcaacctgacctgcctggagcactgtatggggcttgaggacttcggccggcagctgcgtcagcacgtgtatgactgtacccgcctgaccattggcgtgggcgccggaccaaccaaaaccctcgcaaaatcagcccagtgggcctcaaaagagtggaaacagtttcgtggcgtactcgctctgaccaggggaaatccgcagagaacgcggaaactgctttcactgcagccggttgaagaaatctggggggtgggtaaccttattgcacgcaagctgaatatgctgggcataaagaccgcgctcgatctggccctgacgaacccgaccttcatccgcaaaaatttttctgtggtcctagagcgaacggtacgtgaactgaacggggaaagctgcctttcgcttgaggaagcccctccgacgaaacagcaaattgtctgcagtcgcagttttggtgtgaagatcaaggagtacgagtcgctccgcaggctatctgtcagcacgctgagcgggcctctgaaaagctgcgtaaagagcaccagtattgccggcatatttccgtttccatcaaaacgtctccgttcgccgttaaagagccttactacggcaacgtggccacggagaaactgcttacacccactcaggacaccggggacatcattgctgccgccacaacggctctggagcgtatcaggaaggatgggcaccggtatgccaaagccggagttatgctga

SEQ ID NO: 220650 - DNA, 264 bp, Klebsiella pneumoniae
atgaagaagcgtttttccgacgaacagatcatcagtattctccgtgaggctgaggccgggggttctgcccgtgagctctgccgcaagcacgctatttccgacgccaccttttatacccggcgcaagaagtatggcggtatggaagtgcctgaggttaagcgactgaagtcgcttgaggaagagaacgccagactcaagaagctgcttgccgaagccatgctggataagcaggcgcttcaggtggctctggggcgaaagtactga

SEQ ID NO: 220651 - DNA, 528 bp, Klebsiella pneumoniae
ttgtccctgtcgacctgccattatgaggctcagcgtccggcggctgatgcgcatttatcagggcgcatcactgagcgggcactggagcgcaggcgttttggctaccgccgcatctggcagttactgcgccgcgaagggcttcatgttaatcacaagcgagtataccggctctaccatctcagtggactgggcgtaaaacgcagacgacgtcgtaaagggctggcaacagaacgtctgccgctgctccgcccggtggcgcccaacctgacctggtcgatggattttgtcatggatgcactcgccaccggtcgcaggatcaagtgcctgacctgtgtggacgacttcacgaagaagtgcctgacaattaccatcgcattcgggatttcaggcgttcaggtcacgcgtgttctggacagcattgcagtgtttcgaggctatccggcgacgataagaactgaccaggggccggagttcacctgccgcgcactggaacaatgggcctttgagcatggtttgagttgcgcttaa

SEQ ID NO: 220652 - DNA, 297 bp, Klebsiella pneumoniae
atgagcgagcataacctgttgttgttgcatgacaagccagagcgaccgaagtgtagatataaggccaaaatcacgttagcagaaagcgagatgctcaggtgttcagatggcttagaattcgtctgcgacaagagtgaaaaactgcgggtcacgttcgcgctggacttctgcaaacgtgggggcatagactgggcagcaatcacaggaggttatgacagttcgacggtgcgggatgtgattctgaaagcgcatcggcgacaggttgcccgatacagcggtgcagtggctgacggataa

SEQ ID NO: 220653 - DNA, 291 bp, Klebsiella pneumoniae
atggatagcgcacgcgcccttgttgccaaaggacggggaatagccctggtcagccgcaccatgggtgtgtcgcgtgcgctgctgtcactgcgaattaaccgttctgtcgactggcaggacagacgctgtaacctgcgtaatgacgaagcagacgctgaaatactgtcggatattctcgacatcatcagcgatatgcccagttacggctatcgtcgtgtgtggggtatcctgcgtaagcaacgcctcacagaggggctcccccggtcaatgccaaacggctttacagggtaa

SEQ ID NO: 220654 - DNA, 396 bp, Klebsiella pneumoniae; identical to SEQ ID NO: 189828

SEQ ID NO: 220655 - DNA, 315 bp, Klebsiella pneumoniae
atgcgaacgacaagtatcaccctgtgtctggttttggcgagttttggtgtatccgctaaaatccttgcagacccagaccttacttaccaggcaaataaaacgtgtgctaaacgagatgtactggaactgaaagtccctttagaagccaataatccctcctcccccacatggggtttggacaagggcatggtgcaggccacaattgacgcactgaaagaaaatccagacatcgccccggctgactctgtagcctgccaacaggctgcaataaaacagtatcgggctgggcaaaaacactacagtaagctcaagtag

SEQ ID NO: 220656 - DNA, 306 bp, Klebsiella pneumoniae; identical to SEQ ID NO: 102407

SEQ ID NO: 220657 - DNA, 276 bp, Klebsiella pneumoniae
atgggcattgaaatgattattggtctggcaactgcgttgctggcggttatcgctggcgcgtttggcattggtcatgctcgcgggaccagtaaggcagaagccaaagccgataagcagcgtaccgaagagaacgccgccgctgccgtcgccgcagcagaacgtaaggcagaagtcacgaaagaggcaagcgatgtacaacaaaccgttagccatatgcctgatgacgatgttgatcgggagctgcgcgaaaagtttacccgccccggtggtggttga

SEQ ID NO: 220658 - DNA, 273 bp, Klebsiella pneumoniae; identical to SEQ ID NO: 190774

SEQ ID NO: 220659 - DNA, 246 bp, Klebsiella pneumoniae
atggcagagatcacaccggcagaacagattcgactgaatctgctttccaccctgaactacgacaccgcggccgctgctaaggcgattgagttcgtccaggatagccagctcaaatatcagctgttcatccagcagtacagtcgcgtgacaactgaatccgaagtggtggcgcggaccatcaaagcagttcaggagtcgaccgaggcgctggcgctgtttgataccatcgcagaacaggcgagctaa

SEQ ID NO: 220660 - DNA, 1308 bp, Klebsiella pneumoniae
atggctaagaataaacagcaaccagggcgcgttaagagcgctcttttaaactggcttggtgttcccataagcctgacgaccggtgaattctggcgggagtggtacggaaccagcagtagcggaaaagtggttaccgctgacaaagttatccggctttctgctgtctgggcgtgcgtaagactcttaagtgagtcagtttccacgcttccgcttaaaatttacgagcggcaggctgatggatcgcgaaagctggcccagaacaatcccgcctaccagatattatgcaggcgtcctaacccggaaatgaccccttcccgtttcatgttgatgattgtggccagtatttgcctgcgtggtaatgcatttgtcgagaagctatatatcggcagcaaattggtttcgctggtgccgttacttccgcagaaaatggttgtaaagcgactcgatagcgggaagttacagtatacatacacggaaaatagcgttaagcggatcattccagtagaccggatgatgcatatccgcggatttggtcttgatggtgtgtgcgggatgatgccgacaatggccggggttgacgttttcggcgctgctatgtcggttgatgaagccgcggcaaaaatcttcgaaaatggcctgcaaagtaccggtttcctgtcgtcaaaaacggcgcttaataaggaacagcgagaaagattgcgtcaaaaccttcagtcttttattggttctaaaaacgccgggaaactgatggttctggaaaatgaactgacttaccagaatgtcactatgaacccggaggccgcgcaactccttgaaagccgttcattcagtattgaggaaatttgtcgctggtttcgcgtaccgccatttatggtcggccatacgacaaaacaatccagctgggcttcgagtcttgaagggatgaacatgctgttcctgactcataccctgcgtcctctcctggtcaatattgagcaggaaatatcgcgttgtcttctgaacagtgatgaggacttgtttgctgagttctccgttgaagggcttctgcgcgccgatagcgctggtcgtgctgcttactataccagcgcactgcagaatggctggatgtctcgcaatgacgttcgccgtcttgagaacatgccgccgatagaagggggcgatatttacaccgttcagctcaacctgacgcaactgaaaaatctcgaaagcagcaaccctgccgttcaggcgctggctttgcgagagctgcataaccatgtattccccgacatttcctttgaacaatctccgctgaaacaggccgcttag

SEQ ID NO: 220661 - DNA, 339 bp, Klebsiella pneumoniae
atgcaggcaggacgattacggcaccggatcaccatccaaaatttcaccaccaccagaacgccttcaggtcagccggttgaaaaatgggaagatgggaaaaccatctgggccgaggttaaggggataagcggtcgtgaacttttagccgctggcgctgagcgtgccgatgccaccattcgcgtttgggtgcgttttcgtacagatatctcagcttcttcccgcctgaaagtacgtaccggcccgtttaaaggtgccgttcttaacgttaccgggcctccggttccggatatcaaaggcacccggctggaaattctctgcaaacaggggaccgaaaaatga

SEQ ID NO: 220662 - DNA, 705 bp, Klebsiella pneumoniae
atgtcagcactatttgaacgtgcccaaaaaacggtagtaatgattacctctgtgccggtcaccgcggcagagctggataccgcaacctggttaaacctgagttgcactatcaaacaggcaagctttaccgctggtcagaaaaacgatattgacgtgacaacgctctgttcggatgaaacggaaaatatcaacggccttcctgctccgtctgaaatgtcactttccggtaacttctaccgcaacccggcgcaggatgcacttcgtgcagcatatgataacgacggggtttatgggtttaaggttattttcccgtctggtaatggattcctgatgcgcgctgaggtacgtcagcacacctgggattctcaaaccaatggcgtggttgctgcaacgttctcgctgcgtctgaaaggtaaacccaccaatattaacgccccaggagttctatcgtttgctactgaccttccggcgtcccaaacggtcgcggcaggaagcgccctgaccatgggcgtggtcgtccagggcggtacggcaccttatacctacgcctggaaaaagggcacctcgacggtcagcggccagaccagcgcaacgtttacgaaagccagcgctgtatccggtgatgccggggtttattcctgcgtggttactgatgccgatggcactgtgatcacttcttctgattgcaccgtcacaatcaattaa

SEQ ID NO: 220663 - DNA, 474 bp, Klebsiella pneumoniae
atggcggatattatctatccggatgagtacctgcccatgcctcttatggacgggtacggttttaagcccatctcacctttactgcgaacggaaatgacgtccggtcgagcaaggcaaaggcggcgatacacctcaacacccacccatgcctcggttaaatggatttttcagactgatgcgctggcgcaggtgtttgaggcctttttcagggacgcactgaaagacggacagtcctggttctatctgaggctccagactccgatcggggtaaagccctacaaagccaggttcattgatatttacgaaggtccgacacttgtcgcgccaaaatactggcagtacagcgcaacgctggagttatgggagcgtccgttaccgcctacaggatgggggaattacccggaatggctggctggtcagtcgttactggatattgcgctaaacagagagtggcctgagcatgacaattcttga

SEQ ID NO: 220664 - DNA, 486 bp, Klebsiella pneumoniae
atgacaattcttgagcaactttatgcaagcagcggctctgaagtcattcacgacacgctgcagatcacggcaggtgatcagaactactggcttacccgcgggtgggacaatattactgcctcgttagaagacgggcagcaggtaacgtttgaagggtgtgctatcgatatagcattgcctgccaggaatgccgacggaacgcaagatctcaaattttccatcagtaatatcgacggtgtcgtatccgatgcgattgacagaattctggacgaaatgaaatcggcaactctgacttttcgacggtacatctcctctgatttatctgcaccggcggcatcgccttacacccttgatgtgaaatccggatcgtggacggcaacagcggtacaggttactgccggatatatgaacatccttaaaacggcctggccgcgtaatcgttataacttggctgaacatcccggtcttcgttatatgtcctcctga

SEQ ID NO: 220665 - DNA, 381 bp, Klebsiella pneumoniae
atgttcaattctgataaatacctttcggtcaaatggctgaagggcgggcgaatttatccggagctcgactgtttcggtattatcaatgaaatcagaggtgatctctttctcccgttatggccggatttttccggcgtgacgaaagatgagggagggctcgatcgtgaggccaggaagtttatgaaattccttacacgctgcgagccttgcgtcggggccggggtagcttgttactccggatcaaccgtgacgcatgttggtatcgtagttttgctggatggccagttgcaggttgccgaatgtaatccgggaaccaacgtcacctttctacctcttccgcgatttgtccgtcggtttaaccgtgtggagttctggcaatga

SEQ ID NO: 220666 - DNA, 564 bp, Klebsiella pneumoniae
atggcacttgataaagcccatgacataagaaagtttgaaatagatctctattggaagcgtgctacatacttcttcgcattcttcactgtaataacaggtgcatttggttatttgttcacccataacagttatgctttcttagcccctacgcttgcgatcattggttctgtttttgctttatgtttttgttatgtgaatatcggcagtaagtattggcaagaaaactgggagtttataatcgataaaattgaatattatgtcacaggaaacctttataaactttttttcttcgaaaaccatagaaccaaacgtccatcagtcactaagattaatatatttctaagcaagttaattatagttatatggtacgcttgctttatactttccatgcaccagatatggaatcaaagcatggcattaaatatctcttacattatcgctatcatatatagcactggaacgacaatatattactgcgataaaactgttgcagacatatcgaacaatgataaacaatcaccacgattctttagcttcagaaaaccaaattacataaaatcgtaa

SEQ ID NO: 220667 - DNA, 486 bp, Klebsiella pneumoniae
atggcaatcccagcacacttatggcttaaagatgatggtggagcattaattaagggatcatgcgatgtaatggatcgcgagggaagtgtagaaattattggtttcggtcatggtctacatattcctaccgataataatactggtaaaattactggaactcgaatccatgcaccgatggtattagaaaaggaatttgatagctctacaccgtatctctataaagcagttgcaacaggccaatcacttaaaagtgctgaaattaaatggtacaagattaatgatgctggtcaggaagtagagtactttaatatgcttcttgaaggcgtcaaagtcgttgctgtaactccgataatgtacaatacaaagaccgttgaaaaatgtaatcatatggagcgtgtagaattacgctacgaaagaattacatggaagtactgtgacggtaatatccagtacacagatgcgtggaatgaacgagctactgcttaa

SEQ ID NO: 220668 - DNA, 714 bp, Klebsiella pneumoniae
atgaaatttaaaaaatataacaatgctttgatttgcactgttcttgtactcttatgggtaacaatattggtgttggttaaagttttattttctggaaataacgattttgaatggggtagtgtctctgattgggcatccacattatgcaatgctataatggctggagctgcattatatgcggctattaatgcaaaaaattggttatcagagaaaacacgaacattaggtatggaaaaagccgaagctatacttaatgaaatcgatactttttcttccacccatagctcttatatagatagtttagcggaagctgaaatctactatcgttctaacatctttgacaatcaagcagacagaaataaagtaataagttcacttgatgagttacgagtattaattgaaaataacagattgagattacaggatacgcattctaaattttcatcattaaaacgctgggatgtgacaatattaaaggaaaaggaaatttatcaactgcttgatgtttatcaaatgacaattatgtctttatcgaatgcgacttttaacctaagaaatgcattatctgaatttataaatgatgaaagatattttgcactctttgggcatcattttaaggtaaattatgctgaggctctctcttcttattatcaaggaacaagtatccatgaaaaaattagaacatataaattccgagaactatttgatgtatag

SEQ ID NO: 220669 - DNA, 462 bp, Klebsiella pneumoniae
atggcaaaaacttattcaagttttgataacagaaacataaaagcactaattagtcagtacaagctatataaagatatcccatgtgaagatatcaaaaatataatgaaggattcagtggctaaactgaatgtgagggataagattagtgtatacgatgtgtttacagtattgagcaatgaagatgaaatacgaaatgatttactattcagcactatcaatgctattaaagtaaatcagaataagaaacaagtaaaagaacgtatgatcaggtactacggggcagcgatcacggatgcagcaaaacgaatcgagcagtatatgatggagcacccagacgcactaccagcaccggcatatggacaaagaacactaacatataaagaggtaggtaagctattggacctacaaaaacaaggtaactttattgatgacatgatcgagtacttaaagagcttgcgttaa

SEQ ID NO: 220670 - DNA, 501 bp, Klebsiella pneumoniae
atgaagaagggaaaaagaaatgacctaaaaggtcagagattgccacgtatgaaagaagcattacgagtatggaataattttcactcaagaatacgtaataacgtcaattacagtactgttaacatctgcgatgactggtatctctttagtaacttttattactggtatattgataatgtcgttgatgattggcacttggataaagatatattaggaaggaatgagtacagcccaagtaactgtatctttgtaccgagagaaatcaatcaattgtttcgggaagtaccaacatctttatcaactggcgtagtcgttaatcacaagggctatcaagcacaagctacatttgataagaaagtacataaatttggaacatacccaacagtagaagaagctcatacagcttatgttgctggacgtaagtcatacatctatgagctatcgcagaagtataaagcatatccgaaacttagtgcggtactattacaaaaatcaaaataa

SEQ ID NO: 220671 - DNA, 153 bp, Klebsiella pneumoniae
atgaaagaaaagaaaacgattagtgttggagtgaggttaaatccttcacaagaagaaatactaaaatcacttatagaatgtggtaaggctactacgattagttcagccattcagtatctgatacatcagtatgcggttttaggtagcaagtaa

SEQ ID NO: 220672 - DNA, 378 bp, Klebsiella pneumoniae
atgaccgtatcaaaacgtggccgtgtgccgcaaacaatcaaagaagccatacaagagcagttcagtcgcatgggggaaagctactctgcaaacatcaagtgggggaaatcagttaatgcccattacttcaaggtcattcgggaaacggatcagccagaaccgattttttacaccttcgcagtaattgataaagcgatacattatacatattttgacgtgaacacctttgaagcaactcagctatcgttagcttgctcagaggatgcgttctttcaattcatgttcaggtgtgatctaccgttagacttcgatgcatttaccgaaattatgcgtttgatctcatcgcatggattagatgtcactgccttttataaataa

SEQ ID NO: 220673 - DNA, 1935 bp, Klebsiella pneumoniae
atgctccgtcctatatgttatgagcgagtatcaagcattcagcaaatcgaagggggcggaggtctggatgaccaacgttcagcactggaaggttatttagatagaaattctgacaaattcagtaatgatagaatattcattcaagacagaggggtgagtgcgttcaaaaactccaatatatcatcggagtcacaacttgggatatttttgcaagatgtacaaaaccgcaagtacggcgaaggtgacgcactcattgtgatgtcgcttgaccgcattagtcgaaggtcaagttgggcagaggacaccatcaggttcatagtgaacagtgggatcgaggttcacgatatttctgccagcactgtgttacggaaagatgatcctcactcgaaacttatcatggaactgatacagatgcgttctcacaacgagtcgctaatgaagtcagtacgagcaaaggctgcatgggataggaaaatcattgaagcagtacagaacggtacagtgatatcaaacaaaatgcctatgtggttgaagaacgttgataacaggtatcaagtgattcaagaaaaggcagatctgatcatcagatgcttcgagtggtatagggatggattcagtactggagagatagtcaaacgtattgccgatccaaaatggcagatggttacagtttcaaggctagtaagggatcgtcggttgttgggtgaacataaacgttacaatgacgagattattcataatgtctatccaaaagtcatagatgatgatttgtttctcacagctaatcgcatgatggatcgtgtgatgttggagaagaataaaccagcagaagacctgctacttgaatctgatgtagtgcaagagatctttcagctatatgaaagtgggcttggatcgggtgctattgttaagcgtttgccgaaagggtggagtactgtaaatgtactaagggttttacgtgacaaaaatgtagtaacgcagaagattattgataacttaacgtttgagcgtgtgaatcaaaaattgtcaatgaatggtgtagctaatcgtattcggaaggatataactattgcacaagatgattacataactaacttattcccgaagatccttaagtgcggttgttgtggtggtaatattgcgattcactacaatcatgtcagaacgaaatatgtgatttgtcgaaatcgagaagaaaggaagatttgtgatgcaaaatctatacagtatattagaattgaaaaaaatatactcaaatgtgtgaagaatgtcgattttcaaaaattaatgatagaaagtactggcagtgaaacttcagtgctggatggtctgcgtgaagagctatcatcattacgcagagaagaaagtagttataacgataaaataaacgaaagaaaattagcaggtaaaagagtaggtatacatctcaatgatgggttaacggaggtgcaggacaggattgaggaaatagaaaaagaaattatcagtgctcagactgtaagagagatacctaaatttgattttgatatggatgaagtacttgatccaatgaacatagagcttcgggcgaaagtgcgaaaacagcttaggttagtacttaaagcagtgaagtactggatgttcgataaacgtatttttattcaattggaatacttcaatgatgtactttcacacatgcttgtaattgataataaacgtggcggtggagaagtaatgtatgaaatgtccattgaagaaaaaaaaggtgagcgtatctatacagttcatgaaaatggttatgcagttttcattgcatcagtaactatcggcacagaattatggtcgttagctttaagccgcacacgtacaattgatagcgttggcaattacctaagcctccttgctcgtgaaggttttgagatcttcgtaaacgaagatcaaattgattggttttag

SEQ ID NO: 220674 - DNA, 1935 bp, Klebsiella pneumoniae
atgaatatattcgatcactatcgccagcgctacgaagctgccaaggacgaagagttcacactgcaggagtttcttaccatctgccggcaagatcgcagtgcctatgccaatgcggcagaacgtctgttgatggccattggtgaacccgtcatggttgatacggctctcgagccgcggctatcccgtctcttttcaaaccgggttatcgcacgctatccggcatttgaagagttttacggtatggaagacgccattgagcagatcgtttcctacctcaagcatgccgcccaggggctggaagagaagaaacagatcctctatctgctggggccggtgggcggtggtaaatcgtcgctggctgaacggctgaaagcgctgatgcagcgcgtgcccatctatgtgctgagcgccaacggcgaacgcagtccggtcaacgatcacccgctgtgcctgttcaatccacaggaagatgcgcagatcctccagaaagagtacggcatcccgacccgctatctcggcaccattatgtcgccgtgggcggccaagcgcctgcacgagtttggcggcgatatcacgaaattccgcgtggttaaagtctggccatcgattctcgagcaggttgccatcgccaaaaccgaaccgggtgatgaaaacaaccaggatatttcagcgctggtcggtaaggtggatatccgtaagctggaacactatgcgcagaacgacccggacgcctacggctactccggtgcgctgtgccgcgccaaccaggggattatggagttcgtcgagatgtttaaagcgccgattaaggtgctgcatccgctgctgaccgccacccaggaaggtaactataacggcaccgaagggatctccgccctgccgtttaacgggatcatccttgctcactccaacgaatcggaatgggtgaccttccgtaataacaagaacaatgaggccttcctcgaccgcgtctatatcgtcaaggtgccttattgcctgcgtatctccgaagagatccgcatctatgaaaaactgctcaacaacagtgagctgacccatgcgccatgcgccccgggcaccctggaaaccctggcgcgcttttcgattctgtcgcgcctgaaagagccggaaaactcgagcatctactcgaagatgcgggtctatgacggcgaaagtctgaaagataccgacccgaaagcgaagtcctatcaggagtatcgcgattacgccggggttgatgaagggatgaacgggctctccacccgctttgcctttaagatcctgtctcgggtgtttaacttcgaccacgtcgaggtggccgctaacccggtgcatctgttctatgtgctggagcagcagattgagcgcgaacagttcccacaggagcaggccgagcgctatctggaattcctcaaaggctatctgatcccgaaatacgccgagtttatcggcaaagagatccagaccgcttatctggaatcctactccgagtatgggcagaacattttcgatcgctatgtcacctacgctgacttctggatccaggatcaggaataccgcgatccggacaccgggcagctgtttgaccgtgaatcgttgaatgccgagctggagaaaattgagaagccagccgggattagcaacccgaaagacttccgtaacgaaatcgtcaactttgtgctgcgtgccagagccaacaacagcggacgtaatccgaactggaccagctatgagaaactgcgcacggttattgagaagaaaatgttctccaataccgaagagctgttgccggtcatttcgtttaatgccaaaacctcaaccgatgagcagaaaaaacacgacgactttgtcgaccgcatgatggagaaaggctacacccgcaaacaggttcgcctgctgtgcgagtggtacctgcgggttcgtaaatcgtcctga

SEQ ID NO: 220675 - DNA, 141 bp, Klebsiella pneumoniae; identical to SEQ ID NO: 36145

SEQ ID NO: 220676 - DNA, 381 bp, Klebsiella pneumoniae
atgtttaaccctgataaataccgttcagtcacctggctgaagggcgggcgcgtatacccgcaactcgactgtttcggcattgtgaacgagatacgccgcgacctgaatttacccgtctggcccgattttgcaggggtcaccaaagacgacggcggcctcgaccgggaagcgcgcaggatgatgcttacccttgagcgctgcgagccctgcgaaggggctggcgtggcctgctattccgggtcgaccgtcacccatgtggggattgttgtcagtatcggtggcctgctgcatgtggcggaatgtaatccgggaacgaacgtcaccttcctgccgttgccgcggtttaagcgccgatttgtcaaagtggagttctggcaatga

SEQ ID NO: 220677 - DNA, 483 bp, Klebsiella pneumoniae
atgacaagacttaacaggctctatgccagcagcgggccggaggtgatcattgaaacgctgcagatcaccgttggctcagatgttcactacctgtgtcaggggtacgaggatattacggcgacgacggagagcggcgataccgtaacgtttaccgcctgcgcgattgacattgcgctgccggcgcgcaacgcggacggtacgcaagatttgaaattcgccctgtgcaatgttgatggtgttgtgtccacgacgatccgcaatgccctggctaacaggttgtctgcatcgctgacataccgcagttttatctccacggatttagccgcgcctgcggcggtaccgtatacgctgaaaatcaagtcgggttactggacggcgacagaggcgcagattaccgcgggttatatgaatatccttgatacagcctggccgcgataccgctacacgctccctgtattccccggactgcgttatatcagctaa

SEQ ID NO: 220678 - DNA, 366 bp, Klebsiella pneumoniae
atgattgctccaatatttgcagtttgcgcagccagccaggcagtcagggatttgttaggttctactcccgtgcggctttatccgttcggtatgcaggacgacaatatcgtttatccctacgcagtctggcaaaacgtaggtggcttccctgaaaattatctaaaccagcggccagatgcagatcactattctctgcaggttgatgtctatggtgatactgacaccgatgtgatcgccgttgcccgcgctttgcgtgacgcaattgagggcaaggcctatatcacccgatggggtgaacaaagccgcgatcctgaaacaatgcgataccgctattccttcgatgttgactggataacgaccagataa

SEQ ID NO: 220679 - DNA, 198 bp, Klebsiella pneumoniae
atgaacgagcaactggtaaacgcgctgatagcagcgctgagagaacaaacaacagcacagcgagagcagacggaagcgataaaccgcctggctgagtctaacgtcgccctgtccgatgtaattatccagtcgcttgccggcgatctcgatgaggcgccagagcagcaaacctatctgagcgggaaacccagggggtga

SEQ ID NO: 220680 - DNA, 327 bp, Klebsiella pneumoniae; identical to SEQ ID NO: 186223

SEQ ID NO: 220681 - DNA, 1164 bp, Klebsiella pneumoniae
atgtctgaattatctgtactggaaaaagctatcgaaaactcccaaaaagaagtaaaggagcttatcgaagaacagcgtaaatccatcaaccagaccggtgaaatcaacaagcagctgcagatcgatctgacgaaagcacaggaagaactgaaagccaccggcacccgcctgttcgatcttgagcagaaactggccggaaactctcctgatcagactgcgcagaagtcatttgctcagcgcgtatctgaagacctgatgaagggctgggacggctcgcgtaccaaagcgaaagtcaccagttttgataaagcgattggttccggcgcagcgtcggcaggcgccctggtccagccgcagcagctgccgggtattcttatgccgggtcttcgccgtctgaccgtgcgtgacttgctggcacaggggcgtatcaccagtaacgcgctggaatacgtgcgcgaaaacgtgtttaccaacgctgcagcaccagtggcagaaggtaccctcaagccggaaagtaatattaccttcaccaaagaaacggcgaacgtgaaaactatcgcccactggatccaggcatcgcgccagatcatggatgatgccccggcgctcgagtcttacctcaattcccgcatgatgtacggactggcactggtggaagagaaccagatgctgaacggggacggtaccggcgataacctgcaggggctcaacgtagtagcgaatgactacgaaaccacactcaacgcagccggagatactggcgctgatgttctggcacacgccatctatcaggtatcgctgagtgagttcgaagcagacggcatcattctgaacccggcggactggcaccgtattgccctgctgaaggacgctaacggcaattacattctcggtggcccgcaggcgtttgcctcgaaagtgctttgggggcttccggtggtgtcgaccacagcgcagacggcaggcaaattcaccgttggcgcgtttggcctggcgtcgcaggtttgggatcgcatggatgccaccatcgagatcagcaaccaggaccgcgataacttcgttaaaaacatgctgaccatcctttgcgaagagcgcctggcgctggcccactatcgcccggcagcgattgtgacgggtgatattgctgtcagcactggtgcataa

SEQ ID NO: 220682 - DNA, 669 bp, Klebsiella pneumoniae
atgcctgacattcagaagacgctggctttcgaccagacagaaatcaagttcatcggcgacggcagtaagggaacatttgaagggtatgcctcggtttttaataacaccgacgccgatggcgacattattttgccaggtgctttcgctggtgtgattgctaaccagagtcgcaaggtggccatgttctttaaccaccagacacgtgctatcccggtcggtaaatgggatgccatgcatgaagatgacaaggggctatttgtccgtggtcaacttactccagggcttagcctggccgaagacctgaaagctgccatgcagcatggcacggttgaagggatgtctgtggggttttccgttgggcctgatgattacaccgttggcacgtcagggctcatcttcaaaaacatctcttacctgcgggaaattagcgtctgtactttcccggctaacgagctcgctggcgtaacggccatgaagagcatcgacagcatcaaatctattcgcgatgcggaggcctggctgagggattcagtcgggctttcgcgttctgaagcacaggcatttatcgcccgtgttaagtctgcaggccgaagcgagttcggtagcgacgacattgacgcgctggcacagcgcattaactcatttgccgctaacctgcggacaccttaa

SEQ ID NO: 220683 - DNA, 1278 bp, Klebsiella pneumoniae
atggcagataccgattacagcattgacctgcggacgcgatcgccattctgggcgcgcatggcctctatcctgaccggcggccgcctggtgacacccgataagggctcgcaaatggcgggtacgtcagcgcacggtgtggttggtgattctgttgtgactgatgagcgtaatatgcaaatcagtacggtatgggcctgcatcaggttaatctccaccgtaacagcatctttaccactcgatgtttatcagaccaaaaatgatcagcgcacgaaagtggacaacagtcacccccttgcgaaactgctgagattccgtcccaacaacttcatgaccgctcttgagtttcgcgaagcaatgactatgcagctatgtgcctacggcaacgcctatgcacatgttgagcgaaacggtgttggtgacgtgattagcatggttccactgatgagcgccaatatggaagttcggctcagcgataacggtaaaaatattatctaccgctaccgacgggacactgaatacgctgacttttcacagaaagaaatttttcatctcaaaggatttggcttcaatggtctgactggtctttcgccgctggcgttcagtgcgaagtctgctggtgtggccatagcgatggaagataaccagcgtgaatttttcgccaacggtgcgaagtctccgcagatcctgatgactgacggcaaggtgctgacgaaagagcagcgtgggcagctggaggaaaactttaaggagattgctggtggtccggtcaaaaagcggctttggatccttgagagcggcttcaccacgcaacctatcggcgtttcgcctcaggattcagaaattctggctgcgcgtaaatttcaggtcgccgaactggcgcgattttacggcgtgcctccacatctggtcggcgacgtggacaaaaccacctcctggggatcggggattgaacagcaaaacctgggctttctccagtataccctcaaaccctaccttgatcggtgggagtacagcattgagcgctggctggtcaaagagtcagaacagggcatcattcacgccgagcataacctcgacgggctgttgcgcggtgattcaacaagccgggcatcatttatgcaaatcatggtcaataccgggattcggaccgttaacgaggttcgaaggctcgataacctgccgccgctgcccggaggtgatgtggcgacacggcagtcgcagaacgtgcccattaccgatctcggaacaaacaaagagccccgcaatgccggggcttaa

SEQ ID NO: 220684 - DNA, 1533 bp, Klebsiella pneumoniae
atggctaaaaaaactctgacaagagccgagaggaatatcctctggtgcgaaagaaatatttatattcccgaaggtaagtttgtcggccagccgctgaaaatggctgagttcatgaaggatgacttcagagccattttcgacaacaagcatggtacacgtcgcgcaatcatcagtcgcgggcgaaaaaacgccaaaacggtggaaaccgccatgctgatgttgctctacctggtagggcccgaggctgcaccgaactcgcagctgtattctgcggcacggtcacgcgaccaggcggccattctgtttaacctggcctcgaagatgtgccggatgaacccggtactaatgcagtacgttgcgatcaaggattcagctaaagaaatccactgccctgagctgggttcttattaccgcgcactgagtgccgaagctaccacggcctatggtttctcgccgcgatttgttgcacacgacgaactgggccaggttcgtgggccgcgagacccgctttatgaagcgctggaaaccgccaccgctgcacaggataaccctatttcgataatcatcagcacccaggcgcccgatgcgagcgacctgcttagcctgctgattgatgatggcctgaccggagccgatccccggacggtggtccggcttcagaccgcgccggaagatatcgatcctttctctgtcgaggccatcaggctggcaaacccggccttcgatgtgttcatgaaccagaaagaagtgctggatatggccgccagtgcgaaacgcctgccgtctcgccaggcagagtttgagaaccttgtgttaaaccgcagggttgaagcgaaaagcccgttcgttagccagagtgtatggcatatgaacaaggaggaacccggcgaacttgcgggggctaccgtatggggcgggctcgatctttccagcgtgtcagacctgaccgcactggtgctgaacaccacgcagggagatgtgcactgtaaattctggctaccggaggaagggctggcagataaggcgcgtaatgatcgtgtgccttatgacatatgggcgaagcagggctggctaaacacgacacctggtaaggctatcgagtatggatttatcgcgagggagctgcggcgcgtttttgatctctgtaacgtcaggacgctggcgtttgaccgctataacatgcgcttccttcgcccgcatctcatcgatgctggtttcaccgatgtggagctcgaacgattcgtagagttcggtcaggggtttgtttccatgtcgcctgctctcagggagctggaagccaaactgctcggtgcgcagctgaagcacggcaatcatccgatcctcgaaatgtgcgccaaaaacgccacggtaatcactgaccctgccggtaaccgcaagtttgtgaaaggtaagtcgagcggacgtatcgacggcatggtagcgctggcgatgtctattggcgcgcagaccagtgacgaggtagaggagcagggtgacgttaatgatttcatttacaactttttgagcgtgtaa

SEQ ID NO: 220685 - DNA, 435 bp, Klebsiella pneumoniae
atggcacagcgaggcagaaaatctcttgccgcgacgacggctgtgtcgcttccggctctggctgaaagcaggctgcagccctcgttacaccttagcgatccagagataaacgtctggatcagactggttaacgataacccggccagctcatttactgaaacacatcgcgacatgatggaaatgtactgtcggcatgtggtgcaggcgagactgttaaccactcagatcgaggagtttgagctggagtggctggctcgggatgatggcctgaagcgctacgataaattgctcacgatgcgcgaacgtgaagtacggtctgcgtcttcactggcaacgcgactgcgtatcacccggcaggcgactgctgatcctaaaacagtaggacgcgccaacaaaaatctgccgcgggagaaaaaaccctgggaaattgaataa

SEQ ID NO: 220686 - DNA, 210 bp, Klebsiella pneumoniae
atgcaagacctgaagattgaataccgggatggcaagctggtggaactgagcattgatggtgtgagctttctttctgcatccgccatctccttcagtcatacagcaaacgagacgctaccaacgatcatcctgacaatgtctgtcggtgtcggtgagcgactggagccccccagccctccccgtgaaaacctgcggatcatcgagaaatga

SEQ ID NO: 220687 - DNA, 291 bp, Klebsiella pneumoniae
atggcaactaattcaccctggcatcatctctataacactaaaaggtggtaccggttgcgttatcaccagcttcagaaacagccactctgcgagtttcacctcaggcgaaatcaggtgatatccgcaaccgttgttgatcacatcaaacctcacaagggcgatgaaacccttttccacaacccggacaatcttcagtcgctatgcaagcgctgccacgactcggttaagcaacgcatggagaagggcggaacggttaccgagttcgacaatgaaggcagggtaatctggtaa

SEQ ID NO: 220688 - DNA, 207 bp, Klebsiella pneumoniae
atgcaatggacatcagtaaaatttaaattaccacagccaaccaaacaggtttcttggtatatcgtaaatacggataaaggtgttggctttgcggaattcaatccccttaccggatttggcaatatcgtgattattgataacagccagtattttaatcttgaaataactcactggatgcctttacctccgccaccgtcaagcaattaa

SEQ ID NO: 220689 - DNA, 246 bp, Klebsiella pneumoniae
atgtcagagatcactgcatccgagcaaatccgcctggatataatcaagaaagttaattatgacaccgcagcggccaagctggccattgactgggtaggcgacagctatctgaagtctgagctattcgctgactcttttgatcgtgtcttcactgaaagtgagattgtctcgaagacccgcaaggccatccaggaagcgactgaggcgctggcgctgtttgataccatcgcagaacaggcgagctaa

SEQ ID NO: 220690 - DNA, 276 bp, Klebsiella pneumoniae
atgggaatcgaagctatcgcggggctggtggtcgtcatcctgggcgctatagctggcgcgttcggcatcggccatgctcgcgggaccagtaaggcagaagccaaagccgatcagcagcgtaccgaagagaacgccgccgccaccgtcgccgcggcagaacgtaaggcggaagttgtgaaagaggcaagcgatgtacagcaaaccgttagtcatatgcctgatgacgatgttgatcgcgagctgcgcgaaaagtttacccgccccggtagtcgttga

SEQ ID NO: 220691 - DNA, 291 bp, Klebsiella pneumoniae
atgattggaatgataattgatttaatcaaaactggattgggtttcttccagaaaaaagaacaaagcaaacaggaactggacgcacagaacagtcacgagcagaacgagatcacacttgaagaaacacgtaagggcttcacgtggcgacagggtttaggctgggtactgacgttcatcattctatggaactacgtcattgtgccagtactggccttatgtggtgtagtacttcccatagttccacttgatgagatatggaaagtactgataatattgattgggggtagttaa

SEQ ID NO: 220692 - DNA, 312 bp, Klebsiella pneumoniae
atgaattttgaagaacactatggtgaacttacgggtgagataacactaaatggtactacgccagatggtaatagtatgccaatcaataagtgctttctcgggaagaagttccaaaagcaattgaagaaagcagatatacagattgagtgctttatgaatgtctgctacgagacaaagcaacgttttaaagatggtgaagtactcacatggtcactacagggtgatgaaatgaatgtgtacttaatcgaaagtaagaaattatttgtaaaaggaaagcacttttggggatattgtgtggggattattgaatga

SEQ ID NO: 220693 - DNA, 570 bp, Klebsiella pneumoniae
atgattagaggcagaataacaggactgaataacgcaacaacctatcttaatacaacgggtcaacgtcttggacgtgactttcagaacgaaataatcaaaaggtcaagagcgttatcagccaaaatgcaaatggacttaaacaatgccgtcgataaaggagcagtacctttcactcagcgttccattctctttatgtacaagaaagttggtaatggtgttcgcagtaccattctcgtgaaggatctacaagcgaagtacttatatgacgtactcgttgaggaaaaggccattgataagtttgtaccaacgagtaaagcacgtcttgatcggtttggtaacattgcaggactgaaacgtaatctatcaaatgggcgttataaggtcattacagggaagaatggtaaggagcgattaattgataccagccagaagaaaaaagaaaagcgagtaattggattacgtgaaagtaagaaacgtaaaatcatttatgacttctatgcagaagcagaaaagggggcaagacttgttattgcaggtatacagggatcgtttgttataaaaaagggataa

SEQ ID NO: 220694 - DNA, 450 bp, Klebsiella pneumoniae
atgagaattaataacaactggacgatgttcgatccagaacaatgggatatcaaggaagtaaatgaaggtctgtactgttcatttgtgtacttaattgaatttcccgaaacgggagagtactacttcgggaagaagcagatatataaaggtatcaaagacatttcaaaccttaaaagtacttcaacggaaagtaactggctggattatacgggcagcagtaaaagtgtaaatgccatgattgattcaggtatggagtactcaaaaaagattctgtactgttttaagacagatgcagaagctactttgattgaaactgcattgattagctattacggtttacatcccgataatcttaataaagccattctgtgtaaatcccgattaccaaaaaatcgaattgaattgttccgggtgctacagagtttgattgaaatgttgggcgtgaggtaa

SEQ ID NO: 220695 - DNA, 273 bp, Klebsiella pneumoniae
atggatttcggtactattgttgctcttgttatcgctggccttggttttctttatacgatattccgtgacagttcttctgatactgaagatttgctcacgcgagtttcgcagattgaagcgaagatacaactacacagtagtagtataaaccgcctcgaaacagagcaggatgaaatgaagaagacattacgtaatcttgaagatcaaattcatcaactggatttgaagattgagcgtattcttacaattctcgaaaagacaaaaggggcataa

SEQ ID NO: 220696 - DNA, 648 bp, Klebsiella pneumoniae
atgtcaggttttcaggtttacaattcagcaggtgctcttacgatagattccgataataaatcggtcgtaatgagttcagttaaagcaatgggtacactctcagacacaggttactatctcattaacagtgcctttggtaacgggagtacgctggggtatttgcccctaaatttcttccccaatacggggctacgctggtttcagctacagacgaatggaaagtactgctttcccggctcggcaatgttcgaggcaggttcagggcggttcatgctctccagtaatactacggctcttacatcaggctatctcgatgtgtataacagtgccggaacattgatctggtctgctgccagtgcgggtacaatgccacgtattcagggttttcttaccgtgccatcctctcatgatctcggtactgccttgacgcttacaacgagttttgccgatccgtggatatgcattagtcagtgtccgggcaacatatccgatgatggtggtacagttggctattctggcattttgattaaaaggaatagcagtacttcattctctttacagtatgtgaataaaaaccagaagacatatcgccaggcaatggggaacagcggatttcaaattgctttagcaagtttcactggctattga

SEQ ID NO: 220697 - DNA, 3204 bp, Klebsiella pneumoniae
atggggaaaagtttagggggcttctttggagcaataattacggcagtcattgtcgctttggcggtttacttcactggcggtacggcattagccgcgattggctggggagcagcggcaggggctgcaagccttgttgcaacaagtatgctgggacagattggcgtacagagttatggggatgtaacggattctctcagcaggtcaacgagtcctaccactggattaccagtactgtacggtgggcaactcccccataaaaatggggtatcgggcggttcgttcattctcacgggtagtattgtctcatggtataacatcccaaacagtgattcacagtacttattcagcgaacaggcaatatgttacgcgggaactgaaaagaatataaaccagatttatattgataatgaaccagtattagccgttccggtaactcaggatggtattgtaccaaaggcgaatattgccagtaagtatcaggaatatctacaactggaagtacgctttggtggtgattataccagtactaaatcccttgccagccaatacgcagggccgaagtggacaaataaatttcttggcaaaggcattgtttctgtcagtgcggttatcaaaaaaacacaacaatcattagaacagaatctactcgtgaatgatcagttcacgatgactgttgaaatgaaagggcagaggatattagacctcgcaacagggtcagtactggcgacgtcaaatccaccatcaattatctacgactatctgaccaatacaacatacgggatgggaattgaaccgggattaattaatctcgataccttccttgaaaccgcagcgtattgtgaccagatggagtattacgcaaatggttcaattagttatcaacgctcgtataaggaaaacattgaaaatatctgtcaggtatttggcggtattatgtatgttcatgcagggcaaatctgtattacgacggatcgtaaaacgctttcagttgcatcattcaatgaaaataacatgttcggtgcagtacagatcagtaccagcggtggcacagactacttcaatactgttgatgcgaagtacaccaatccagccagtatgtacacgactgacgtgttacgcattccttccgatattacaattgatgaggcaatccagcgtgacgggcaggttattaccctaagccgtgattactcatggtgctatgacgctgatgtactggcgaagatggtcaatgttgatgtactcaaggctaagtacgccttacgaactgtatccttcaccacaagtgaaggctgggatctgaaggtatgggatgctatcaccgtcagtaataccgaactgaacatttcagggaagtttaaggtactgtcaaaagatgtggcaaccgatcaggagaacgttgggtacgttacgatcacggcagttgaagcccctgatgcgatgtatgatggcgtagatcccggtatctggtcgcctggtggttcaatccagtttcccgaactgagcgtaaaggctcccacgaatctacaggcagtacgcaaaggtaacaccacaaacggctctattgtcgatctcacatgggatgcgtcacaagatccgtggctacggggctattacatctactataagttgagcagctccagtacatggacatatgcgggaagtactaacacgcagaaaaccgactttgaactattcggcctctcagacacggcggcttatgactttggggttgaggcatataacaatctcggccttaccagtaacagactaacgttaacgggattagtaccgacatataactttgcattaccttccgtaactggtgtcttactggcaaatcgcaccgtgggacaatatgaaactgattctgctgatttcaatattcgttgggataatcagaagaacttaatcgttaatggtcgttcattttctgattacttcaagtactacatcattaatatctataacggtagtgatttaatcgatacattctatacgcagagcaatacattcaactttatgcttaaaatgaatcgactcagagtacgtaaacctactattggcattattgctcagggattcaataatggtacttattcacaggaagtacgaatcaccgttgagaataaacaatgtggattagtgcagggtgttcagttcacaggtggttttggcaacttattcgcctcatggactccatcaactgaaagagattacgccggggcagtagtgagtattgttaatggtacgagtactaaactatacaccagtaataaacctgaatttgacagtatacctaatattccagatggtgaatataaagttaaggtcggattttttgatgtatttggacaggacaatattcagtactcagcagagcagactgtcagtattaatagcaaataccagtttacggaagatgatgcagaacagatcaatggaatacttgatctcgatgaccgcctgaatgagacaattgaaaacgccgttaatgaatcgaatgaatacaccaatacgcaaatctctacattgaaaaacacggtagacggaaatacggcaagcataaccaatctgaatcagacggtagcggataatgacacagcacaatcacaggcagttatacagctacgtagtgatgtgaacgggcagattgccacggttaaccagcagatgagtacaaaggcaactgcaagcactgtagacagccagtactcattgtccgtcaatgctaacggtactgtagcgggtatccgtcttgttgcttctcagggaacgagtaataacagtgctatctatttcgcagcagataaatttattgtcagcggcagtagtgcggcgacagttggcggtacggctccattctcaatcgtgaatggtactacttacatcaaaacatccatgattcaggcggcaagtatcggtactggttacatcgcagatgcagcgatcacaaatgcgaaaattgccaatgccagtattaatgcagcaaaaattatcgatggtgaaattaccaatgcgaaaattggtgccacgatacaaagtactaactatgttgctaactctacggggtggcagataaataaatcaggtactttctatataaatggatctggtggcacaggtaagatgattatcagtaataacctcattcagatctacgataacaataataaattacgtgtaagaatggggttgtggtaa

SEQ ID NO: 220698 - DNA, 405 bp, Klebsiella pneumoniae
atgatgcataatgaattaatgaaaataattcagtactcaatcgacaatccttataagtatggtgataacgattgtaatttgatagtactccgcattattgatctattcactggcagtacccttgcaaatcgaaattatacgagcgttaaagagggcatagcaggacttaaaaaagaaggatgggatcatacgggtcaaatagttgaacagtactgtgatgaggtacagcacgttatagacggagatatctggttagatcccgataaccccttaattatggcagtggttgtatcaggtcgagtacttggggtgaatgaaagccatgatggctttgaacttcatccaaaaccggtacagggaagatattttagagtaaggaaagaaaaggaatggggaaaagtttag

SEQ ID NO: 220699 - DNA, 624 bp, Klebsiella pneumoniae
atggacgaaagtattttaactaacgcaacattattgaagtactggaagttagttcggggcacgactaaaacacgcctcagcgtaatggacgtaatgagtttaggtgttcatgttacctgttttgatgtactcccgaaaggtacaaacggttttcactggactgattctcttattgatattgatctgaatggtaaccagtacattagttttcccgatatcattagtggttcattgccttctttcagcgaacagaaggggatcaacaacgatgcgattaacttcaaaattagtaatgtgaacacgagtgtaagagcacttgctttagggggcttccttaaagatgcacaaatgaatattacactcgttatcctgaatccctatgacagtactgtattgtactccatgctgatgttctcagggtttattgattacattcaggcagtagccgatccaaatgaaaaaacgaatgaaatgacagtttacgtgaacagcatttataaaaagctggacagacagccgccattgattgccgccaattcagtatatcaatctctctataaaggggatgaatactttagtttattaggacaggtgaatcaggatcaaacgtggagatacaaatga

SEQ ID NO: 220700 - DNA, 558 bp, Klebsiella pneumoniae
atggcatccttttcaaatcaaataaaaataacaaacttccagattaaaagtactgaacctgtttactcaaatcaaacgtggacaggtcaacgtatcatgagaagtacaggcattcaatactatgagattcagtttcagttaagtttcaatccttccagtattggagaggttcaaaactttttggctcagtactctcaaggtaaatccttcacattctcgctcggattgatgggtacttacaggggagtacagagcggggcattaacaagccagtcaatcgcatctaagggtacaagggtaatcgcgactaataataattcaatggcagttggtgaattaatacaattcacgaatcataaaaaaatatacagaattattgaccgtaccagtacttcattaaccgtattccctgtactgcaaaataccgtacaggcaagtgaaccaattatctataacaacattcaaattgaagcagtattagatcccgataatgattatacaatgcccgttggcaacatcatgaatatcacattaaaggcaacggagaatattatctaa

SEQ ID NO: 220701 - DNA, 573 bp, Klebsiella pneumoniae
ttgatacctctaagatcctgttatcgtatttatattaaatcgcccgcagttagatttttttctaatttaaactggcaggccgcatctgtaataatggcaatgctattgttcattgcccaattaggttacaacggttatgacaaaatacgagatagctctgatcaggcttacaaactgagagttttacttctgagtgagatcagtaataatctcttaactctgtcaacaggtggtgatgagtctcatgcatttggcacagtagatatttgcattcctcttcctgaagatgacaaagaagcagttgataaaatggcactcgtcgccactaatcttcacgatgaagtttattactcacaattagataagttatcgatcttatcaaaagatgaattaaacactgtagtaaaaagttatcattccctcactcgattaagaacactttctttggaactggcatttgtcaaaccattacctaataataaagtaaaaattctacgaagtgagtacagcaatctttataactctctttttgctctttcatctacgtttgataatgagactaaaaacccctga

SEQ ID NO: 220702 - DNA, 2220 bp, Klebsiella pneumoniae
atggcaaataataatagaattcgttttgatattgacggggatacgtcaggtttacagcgtgccttgcgacaaggcacctcatcacttgaagaattcggttcaaatgctggcggtgtaattgaagatctcactggcagttttagtgggcttgctggcggtttcggtacggcaatgacgggattagcgggggctgctgcaattggtattggcggtcttactgcactggtcaattcaagccgcgaatatgtccgcgaaatgaatgaaatcagtcgtagtactggattgtccgtgatgcagcttcagcagctatcggcggcgtttagcggtcttggccttgaaatggataagtttggggatttcaacaaggatacgctcgataaacttggtgatgcgttccgtgccgggggcggtgttagtgacgatcttaaagagtacgggctaaacctacagcagtataacaagtaccttaaacaagcagatggcggtatgcaggccgtgatccacacgttttatgccatgcgggatgcaggtaaatcacaggccgaaatcgtcaacgtcatggagacactggcaagtgattcaagccacatgatcagtactctacagcagttcaatactgaagccgatgcaatgacgtacatacagggccagaacgccgccgtgagtaacgaagcagcagctaactatgcagagttcgataagaatctggataagctgactacccgtatcaaaggtactatcgctgatggtctgaatccactcgtgggggcaatgaatgcagtactggatgcagccaatcagaagccccatgaagcagggctatttgaagatctgaacgaaaagattaaaacgtcgaaggggtcattacaggactttttagacatatgggaaaagctacgcaccgccggggctttaaactatcagggtgcagccttgcaaactggcagtatggataatggcaagcagagtgtgtacgccagtgctcaggccaatcttgaaggactcgtgaacaactttcgtagtgacatagctactgttacggctccgcaaggaggctggaaagacgaagctaaagaacgtgaggatgctcagaagaaagccgatcagctacggaaacaggcagaacaagaccaaaagcaggctgatgcaaaaaggctacaggcacagcgtaatcttgaaacggcacttgctcaggtcggggaagagggcttcaaagtacgcctacagcagtttgacaggcaacagaaagcctttcttaagacgattacggacagtgctcaggttcttggaatatcaccaaaacaacttaaagaatatgtcgatgctgcaaatgcttctggtactaaacaacgtaatgatttaatcaattcaatggttggttatcaagatcccaatcagggtttgaaagatacaaatagcttaatttcttctggtgtactgaacagtactcaaaaatcattcctgacagatcagcagaatcagcgtatcaatggtggtaatcccttaagttatgataataccgatcaattactgaaagataatcaggatgccatgaatgcagaacttcagcagaatgatttattactgaagggtcatgaagattatgaaaagcgaaaggcagagattacggcaaagtataatgctcaggctatcgatatcagtaaccagaatgcacagcaacaattgactattttcagcgatacagcccaatccttaagtgatggcatggtggcagcgtttggtgaatcttcaggggcagcacaggcggcattcgcattgagtaagggcattactattgctcagacagtactctcaatacaatcagcattagcacaggctcttgctacgccctggcccgcaagcctcgcaaactacgctcaggtactatcgttaggtatgagcattatcagtactgcgaagggggctgcaagtgggcagttccacggcggtgtagatgaattgccagcaggtatggataacaaaagttttgtactgaaagccggtgagcgtgtagtacagccagaagctaacaagaagctgactaagttcctcgatactcaggagaaaggcggtagtactgctggagatatcaccgtcaacgcccccttgatcattcagggagacgttgcaggtgatgataagaaattcaatgaaatgttgaagaaacacgctaatagcgttactcaggccgtgagaagcagtcagagacgaaatacctaa

SEQ ID NO: 220703 - DNA, 294 bp, Klebsiella pneumoniae
atgcttatggtttacgatgtctatatagaaccgacaggtacgcaaattgagatgttgaaacatgcttatcagtgctattacaccacgataagtaatgggaatctcacgccagaggcacggcgtagtatcaaagttgctgattttgattttctggatgttctcaatagcgatctcactacacaagaaaaagcagaagtgaaagaacagaagaaaaaagaagctcaggccaatgatattaaatcaatcggtgacgctatcaggaatcaggtattaggaaagaagaatggcaaataa

SEQ ID NO: 220704 - DNA, 300 bp, Klebsiella pneumoniae
atgaatttaatggaactaaaaaagaaactacaacctgagctaaaaccatttgagatcgaaggcttcacgctctacatccaccgtccaagtggtcgcgatttcgcaagctgtactgatgtggcaaatactctcattctttgtgttaaagatgaaaatggtgatcctattttctctggtgaagatattgatgggcgtattaatgttaacagtattgattatgttatgcagggcaaaatctatcaggcaatcattcaactcgtcagtgacagtaatccagtggatgaagtcgaaaaaaagtaa

SEQ ID NO: 220705 - DNA, 504 bp, Klebsiella pneumoniae
atggatttatcccgtcaattcaattcttataaggatataaatatggctatggatatttttgctggtgctaacctacaggtcgaagtaggtacaagtgctggcagtactattgcaacggattttgaagtaatccccgaagtgaataccttcacgacttcaggctttgaaagtacagtaattactgtaaaaacatttaataacgcgtatgaccggaaactattaggtactaaatcaatccctgatattagtcttgcagttaactacttgccagataatgaagtacaccaaaagttagaacagctggccgatgatcagaaacgttgtcagatcaaactcagctattttgaagatgccactaaaacaacaggattctacgttatctacacctgtttcgtgtcgagtacgactatcggaggtgacaaggatgaagtcgtaactaagaccttcacgcttgctgtagatggtgctgctattgattcaggactgattactgaaactccataa

SEQ ID NO: 220706 - DNA, 2754 bp, Klebsiella pneumoniae
atggcagatatttttacaggtaatggactttcattatcatataacaccgatacggggaacagatcaccacagggaattggcaacgtccagattaatgaagtggcagaatttccagtactggagattgaatcagaggtgaatcagtacgacacctacaacagcacatataacagtaaattacttgcagagaaatccgctaatccacttgatattgttgttaattacctccccgatgattctacacatcaatttctggatgaagcagcagaaaatcaggatgtgttccagctaaccattgcctatcaggaagagggcagccagttaacttatgcaatggtgaacggggcgattaccagtacacaactctccggggataaggatagcgtagtaaccaaaacctatgaatttaccccaactgatgttgttgcccgtagtcaggcgattacggcgttacttccggtctatcagggagattatggtgtaggttcaaacacaacagatgttcctcagtacgcaccggctatccctacagggaacagttttatcaaagtaccgtctacacaggcgggcaatcctgccggggccgacatgatgggcatgggtcttgttgatggctcgtctgtcagttcccttgcaatgacgaaatcgggaacgctaagtatctatgcgaagaatgccactacagcgtggactcgtatctataccgctacacagatggacgcacgctatgtttctctcactcgaacggtaaacggcaagcaactgagtactgacattgttctgactccgggtgatgttggtgctgttcctgtagaacgtaccgttaatggccatgtactttctgatgatgtggtactgacgagttcagacacaggcagtgtaccggatagcagaacgatcaacgggcatgtactcagtgatgatgtagtactttcgaaagatgatgttggtcttggctccgttactgacgatgcacaattggcgatcggtaataacctttctgatctaactgatattgaagaagcccgtaacaatctggatgtttattcaaagggcgaagtcgatacttttagtgagaattatgtacaaaaaaccacaacggttaacggcaagccattaagcagtaatatcatccttgataaaggggatcttggcttatccagcgtaacgaatgatgcacagcttaaaatcacatcgaacctttcggatcttgcgaacatagcaatatcacgtactaatctcgggttaggtagcctcgcgacgcagaatgctaacgcagtcgctatcactggcggtacggcagctttatcgtcgctatccctatctacggcattacccttaacgagtggcggtacaggggctacgacggtagcggcagcacgtacagctttagggcttggtacggcagcgacaacaaacattggtacatcaggtagtactgttccgttgctctcgacttctaacacgtggaacggtgtacaaacattcacaagtactattcagggtaatgtctcaggtacagcgagtaatgttactggcattgtgccgatcagtaatggtggtactggttcagctacgaaactggaagctcaaacagcacttgatgtgtattcgaaagcaggaacgctttcagcaatcggtatagggcaagatccaagacatatcagcgatatggctaatgctgaacaatacaaaggtttcgcaagaatcactggttcaactgttggtagtccaggtacattcggtggtgctggtttcattgcacagttcgatggttctccgtcttatgcaggattatttgtacaaccggacggaaacagagtctttgccgcaggacaagctacaccaactgatttatggcagtttcatgaagtgccaacattagatcgttcaaataatttttcgacagttcaatcaatatacaattcattggttattacgcgtgaaacctggcccgcgattgactttctatccacaagttttacaccatcaactattggctataaagttcgatttgaagttaacgacgcactaactccgactatattctggagacaacaaaatagtaatacagggcaggttgcaatcgagtttgaccgaccaagccagggactggttaaagtctcatataatggcgggcttgcacctactggctcatcacaagcagctactggtactgatatgaatgttgttaatcaggggtggcaagctgtcggcggtacgtggtcaaatggtccattaagcggaaatatctatggctcattatttacacaggcaactcagggtttaaatgtcggtggcacttcagcaatgggaacaaccaatcaatggtatcaacaacgtttttatgatacgtcgaatcgtatctattctcggatacaaacgaatgttgccgcatggggagcgtgggcacaaataacaacatcttcagtttccgatgaaagagcaaagaatattggtgaacaattagatcttaatattgcactcaataatatatcgcaaatggattttgtgaacttcacttttaaatctgatgaggatcaaacaccaagacgtggtgtggtttcacagcagattatgaatattgatccacaatacgttaaagaagtcggtgatctctatcatctcgatgaaacacccatgatgttagatggccttgctgctatcaaggcactaaaaataaagaatgatgaacttgcagccgaaattgaaacattgaaagtacttgtacaatcactacttgataataaataa

SEQ ID NO: 220707 - DNA, 303 bp, Klebsiella pneumoniae
atgtctaacactaacaccaattttgagatgaccgggatcctgttagggcaagaagtccgtaaacgtaaaactcctcaggagaagatcgccattatccagcagacgatggagccgggtatgaatgtctcccatgtcgcccgcctgcatggtatccagcccagcctgctgtttaagtggaagaagcaatatcaggaaggcagcctcaccttgcagcggcgttcacgcattacaatgaaaatcacccgcatagtgcgctgggatatcactctccgagagaataccggcggcagcgggcatcgttaa

SEQ ID NO: 220708 - DNA, 267 bp, Klebsiella pneumoniae; identical to SEQ ID NO: 180192

SEQ ID NO: 220709 - DNA, 483 bp, Klebsiella pneumoniae
gtgggatgtataactgcgcccgagccgttatccagcgcccatcaactggcagagttcgtcagtggggaaacggtactcgatgaatggttaaaacagagaggtttaaaaaatcaagctcttggcgctgcacgaactttcgttgtttgcaagacgggtacgaagcaagtagctggtttttactctttggccaccggtagcgttaaccatacggaagcgacaggcagtcttcggcgtaacatgccagatcctataccggtgattatactcgctcgcctggcggtagatgtttcattgcacggaaaaggggttggcgccgatttacttcacgatgcggttctacgctgttatcgcgtagctgagaatattggcgttcgtgcgataatggttcacgcgcttactgaagaagccgaaggtttctatgctcaccatggatttaaggcatcgcaaactcatgagcggactctgttccttaaacttccatga

SEQ ID NO: 220710 - DNA, 996 bp, Klebsiella pneumoniae
atggaattaacgcaagataaggctgacgcgtttgcccgcattcctttgacctatttgcgcttggaatacccgaaccacatcatgcacctacttaatgatgatggcgacgtgctgctgcctcgtgaactgcacccgattttttacggttgttttgactggcattcggcggtacacggctactggctgctgctgcgctgcgtgcgtctttatccccacttaccgtgccagaaggcgatcgttgagcttttcgaccaacacctgaccaaagagaacgtggcgaatgagctggcctatttcaccgcaccgttccgcgactcgtttgagcggccgtatggttacggctggctgctggcgctggcccaggaaatgaaacagtcgtcgctgtcgcaggccgcaggctggtatcagacgttggagccgcttacccagtatattcgcaaccggctggtggattaccttgctaaactcacctatccgatccgcgtggggacgcactacaacacagcgtttgctctagctctggcgctagattatgcccgagctgtagaagatagcgcgcttgagcaggctattctgtcctctgcagagcagttttatcttgccgacacgcgctatccggcccactacgaacccggcggcgatgagtatatttccggcgccttgacggaagcgttattgatgagcaaggtgtcggcggacttttccgcctggtttgacgcgtttttgccggatgtcggctccgttgcggaacttatgaacccggcggaggtgagcgatcgtaccgatccgaaaattgcccatctcgacggattaaatctcagccgtgcctggtgcatgaagcacattgcgaaagcgcttccggtcaaccatccggcgcagcaggtgctaagtgatgcggtggcgaaacacctgacggtgagcgtcgagcatgtggtgggcagccactacagcggctggcactggctggcgagctttgcgttgctggcgctggagtaa

SEQ ID NO: 220711 - DNA, 651 bp, Klebsiella pneumoniae; identical to SEQ ID NO: 101441

SEQ ID NO: 220712 - DNA, 318 bp, Klebsiella pneumoniae; identical to SEQ ID NO: 161839

SEQ ID NO: 220713 - DNA, 333 bp, Klebsiella pneumoniae; identical to SEQ ID NO: 161840

SEQ ID NO: 220714 - DNA, 339 bp, Klebsiella pneumoniae; identical to SEQ ID NO: 161842

SEQ ID NO: 220715 - DNA, 270 bp, Klebsiella pneumoniae; identical to SEQ ID NO: 161844

SEQ ID NO: 220716 - DNA, 450 bp, Klebsiella pneumoniae
atgaacccgataattacggcacatcatgaaatcgttatcgagaactcggttcgctatatcgagttactgaaatcagaggcatcaaaaattctggatgaatactgggaggcctggaaggcgcggaatcaactgatatcccagacctcgtatgcaaacgggggaagatttatatccggtcgttttgctcctgtgctgagaaaggttggatcgtcgcaaaagctgacaattgtatggaaagatttttcgcccaggttcaaaaacaaaattaaacatcatggcgtggttgttaaacctaaactcataggttacagcgttagttgttttaaaaataccctggactgggaactggagatgatccaggaaacagaaaaaaaattaaaccaatccgtgaactactcgcggaataccatcaacgaaaactggccgacatcaaaagactggaaaaactga

SEQ ID NO: 220717 - DNA, 789 bp, Klebsiella pneumoniae
atggctggcaacgcatccccaaaaactgaaccgcgtaatcaacgaaacgctgtaaataaccttcccttagggatggtcatttcaaaattaaagccactttcaagtgatttctatacacactttcataaaaaaaacagagcctgcctgcgccagtttaacgccatctccaatgcaatttataatattttccgcctggtagaaggtgaccaggcgacaagcactaaagttcagaaatggctctccggtgtttacgatgaactgtcgggtaatgtaaataccctcaatgagcagattgacaaaaatgtcgccagactacttctggatgattcatcatacgaagggtttgactatggtatatttgaaattcgctggaaccacccattgttctataaattgctggatattatccagaccgccaacgtcctgactcgtcaggcacaccagttgtggttatgcggtcagatatcacaacaggttcatgaccgaattatcttgcaactcctgagctcactgcaggttgctatggacaagattactaaaatactgaacgttgaaaatcgtgtgaatggaaaatacgacatattaccattcatccagagtattaagcggtttaaatcggtggaactttatattgccagtctcgaaccgaaggcccttgctcagtccggttacattgacatttcagctgatactggcagtgagcagacattaaaaccagaggaagtggcaggctctggcaagccatctgacaaaacacaatcttctgccactcctgtttcggcacaataa

SEQ ID NO: 220718 - DNA, 648 bp, Klebsiella pneumoniae; identical to SEQ ID NO: 102375

SEQ ID NO: 220719 - DNA, 792 bp, Klebsiella pneumoniae; identical to SEQ ID NO: 102376

SEQ ID NO: 220720 - DNA, 852 bp, Klebsiella pneumoniae; identical to SEQ ID NO: 102377

SEQ ID NO: 220721 - DNA, 1371 bp, Klebsiella pneumoniae; identical to SEQ ID NO: 102378

SEQ ID NO: 220722 - DNA, 1467 bp, Klebsiella pneumoniae; identical to SEQ ID NO: 102379

SEQ ID NO: 220723 - DNA, 1323 bp, Klebsiella pneumoniae
atgagcaagcagctctttcctgacgaagcagccagtttgtatcagcgtgacacccggtccgtagctggaattgagaagttacgcttcttcccgttagccgttaccgctggcaagggatgctggttaactgaagcaggtggccggaaattgctcgacctgtcagccacctggaccgcggcaggtctgggtcatggtcacccggaaatcgccgcggctatcaccagggctgcacagaatccagccggggccggtggcctttcagcggtacacccggattcggtcggacttgcagaggagctgctggccattaccccgggcaacggggatcgctgcgtctatctcggacatgccggtagcgatgccaatgatgtggcgcttcgcgcctgccggctcgccagcggaaaacgtaaggtggtggcttttgcgcatgggtatcatggaggtatcgggctggcgatgaaagtatccggagtacatatatcggcaggtaacgcagctgatccagacctctacctggccacttatccaaatccattcagaaccaatgatgaaggcgctgcggcagtcagcgcaagcctgcacgaagttaaagaacagctcgatcaaggtgatgtggcttgtgtgattgttgaacccatcctgtcggatggtggaatggtcgtgccaccaaaaggttttttaggtgggttacatcgattatgcgtaaaggcgggtgtgccgctaatatgcgatgaagtcaaaatgggtctggggcgccccgggctgatgcacgccttccagcatgagaacatcgttccggaaatcgtcacttttggcaaagtgttaggtggaggtttgccgctttctgccactgtgggccccaaagagatccttggtggtcccgcagcgcatgcattgcttaccaccgcaggaaatcctatttgtacagccgtaggccgttctgtgttgcgtgtgctgcagcacgaagagctgcctgaacgagcggctcaggctgggctttacttcattcaacttctgcgtgaactggcgaaggacttacccgagatcggcgatgttcgtgggcatggtctggctattggcatcgagttagtcgttcctgacggcagcaaaaatccggaccgggcgctcgcgcaaaaagtcgtatatcaggcatggaaagagggcctggtggtgtactacgtcggggggaatgtgctggaaataacgccaccgttaattattacccgggatgagataacctgcgcggtagaaaaactatcgctcgcaatacggaatgccccgaaggtcacacgtgaagaaatacagccttatgctggctggtga

SEQ ID NO: 220724 - DNA, 720 bp, Klebsiella pneumoniae; identical to SEQ ID NO: 102381

SEQ ID NO: 220725 - DNA, 903 bp, Klebsiella pneumoniae; identical to SEQ ID NO: 102382

SEQ ID NO: 220726 - DNA, 303 bp, Klebsiella pneumoniae; identical to SEQ ID NO: 96991

SEQ ID NO: 220727 - DNA, 408 bp, Klebsiella pneumoniae
atggggcgctggcttgctggcagactcatgaaagagctggggctggtcagttgccagcagccgactcaccggtataagcgtggcggtcatgagcacgttgctatcccgaatcatcttgagcgacagttcgccgtaacggaaccaaatcaggtgtggcgcggtgatgtgacctatatctggacgggtaagcgctgggcgtacctcgccgttgttctcgacctgttcgcaagaaaaccagtgggctgggccatgtcgttctcgccggacagcaggctcaccatgaaagcactggaaatggcatgggaaacccgtggtaagcccgtcggggtgatattccacagcgatagtaataatgccgatgtcagtctttaccaccacttagtttgccgtttaaccagattggtgtga

SEQ ID NO: 220728 - DNA, 1077 bp, Klebsiella pneumoniae
atggttgataaagttaccgaagctgccgttgtgggtggcgtggatacacataaagatttgcacgttgccgctgtcgtagatcagaacaataaagtccttgggactcagtatttctccacaacacgacaaggttaccggcagatgctggcatggatgacctcgtttgggacattaaagcgaattggtgttgagtgcacaggtacctatggttccggtttgcttcgttattttcagaacgccgggttagaagttcttgaggtgactgctccagaccggatggagcgacgcaaacggggtaaaagtgacacaattgatgctgaatgtgccgctcatgcagcattctcaggcatcaggacagttactcccaaaacgcgtgatggcatgattgagtccctgcgggtattaaaaacttgccgaaaaacagcaatatcagcccgcagagtcgctctccagattatccattcaaatattatctctgccccggatgaattacgtgaacagctcagaaatatgacgagcatgcagctcatcaggaccctgggttcctggagacctgatgccagtgaataccgcaatgtaaccaacgtttatcgcatttcattaaagtcccttgcccgacgctatctcgagttacatgacgaaatcgctgatctggatgtcatgattgcggcaattgtcgacgagttggcacctgaactgattaaacgtaatgctatcggatacgaaagcgcttcacagttgctgatcactgccggagacaatcctcaacggttaagatcagaatcaggatttgcggcactgtgtggtgtcagcccggtccccgtttcttctggaaaaacgaaccgttaccgacttaatcgtggtggagatcgtgctgcaaatagtgcacttcacatcatcgccatcggacgcttacgaactgacgcaaaaacaaaggaatatgtcgccaggcgtgtagccgaaggacatacaaaaatggaagcgatacgctgtctaaagcgatatatctcccgcgaagtttacacgttactgcgcaatcaaaacaggcggatcaacagtatcccgataacagcttga

SEQ ID NO: 220729 - DNA, 555 bp, Klebsiella pneumoniae
atgacgatgccatttttacagaatatccccccgtttatcttcttcaccggcaaaggcggcgtggggaaaacctctctggcctgcgcgacggcggtatggctggctgaccagggccggagaacgcttctggtcagtaccgatccggcctccaatgtcggtcaggtcttcagccagactgtgggccaccggatcactggtatccgcaccgtggaaaaccttgcggcaatggaagttgacccgatggcggccgcgcaggcttaccgcgatcgcgtgctcgatcctgttcgtgaactgatgcctgccgatgtcatcagcagcattgaagaacagctttccggttcatgtaccacggagatcgcggcatttgatgaatttaccgcactgctgaccagtcatgaactgcgcgaaaaatatgatcatatcgtctttgatactgcaccaaccggacacaccatccgtatgcttgagctgccgggcgcctggagcgggtatctcgatgcacatcctgatgctgcggcgaacctcggccctctggtagggctggagaaacaatag

SEQ ID NO: 220730 - DNA, 975 bp, Klebsiella pneumoniae
atgcaggcacccggtataccggagaatgaagaacagaggctgaagtccctgtatattaccggccttcttgatacccgtgacgatgagcgttttgaacgcctgacgcggctggcccgcaaagcctttcaggtcccggtggccctgataagcctgctggatcgcgagcgccagtggctcctcgcctgccagggcgtcggcgtgcgcgaaactccacgtgatatttcgttctgcgggcacgccattctgcaggaagggccttttatcattcacgatgcggctgccgatgcgcgatttcacgataatcccctggttaccggtgagccacacatccggttctacgccggccagccggtgagcctgccggacggcacggtggccggcacgctgtgcctgatccacaccgttccccgcgccttcacggatgaggacattgcgtccctccgggacctggcctgtatcgtggaggacgaattcgaggccatcagcatggccatgacggacagcctgacgggcattcccaaccggcgcgggttttaccgcgccggcgaaaaactcttccgcgcaatgaaccggcaggatgcgtcgttcagcctcatctatttcgatctggacaggttcaaaccggttaacgatctctggggacacgcggaaggtgacgaggtgctgaagatctttgccggctttttacatcagcaccttgaaccgggtgaaatagcaggccgcctcggcggggatgagtttgccgccctgatccggcgaaacggtaacactcagtcttatctgcacgcgctgagtgccagtctcgatcattacaatgacacctcgggcaagccctacaacatcaattattcctttggcgaactgatcaataacgcagaccattatacgacactggcggagatgatcggtaaatgtgacgaagtgatgtacctgaagaaaaaaagaaagaccctgtcacggaaaacagaaccgtga

SEQ ID NO: 220731 - DNA, 396 bp, Klebsiella pneumoniae
atgtctaacactaacgccaattttgagatgaccgggatcctgttagggcaagaagtccgtaaacgtaaaactcctcaggagaagatcgccattatccagcagacgatggagccgggtatgaatgtctcccatgtcgcccgcctgcatggtatccagcccggcctgctgtttaagtggaagaagcaatatcaggaaggcagcctcaccgccgttgcggctggagaggacgtccttcctgcttctgagcttactgctgctctgaagcaggtccgggagctccagcgcctgctgggcaagaagacgatggaagttgagatcctgaaagaagccgtggagtacggtcagtcgcgaaaatggatagcgcacgcgcccttgttgccaaaggacggggaatag

SEQ ID NO: 220732 - DNA, 1248 bp, Klebsiella pneumoniae; identical to SEQ ID NO: 189763

SEQ ID NO: 220733 - DNA, 870 bp, Klebsiella pneumoniae; identical to SEQ ID NO: 146709

SEQ ID NO: 220734 - DNA, 1062 bp, Klebsiella pneumoniae
gtgacaacaacctctcttaatttatcggcgaatggtatgaagaaacacagacaatcctcgagctggctggcgacattgttaattttagctggtgctctcatgctaccgttagtggtcgatagcaccacgatcggtgacttttcctactttcttctctggaccttcggcgccatcggattagctgcgatgtggggacatggcggtattttatctttcggccaaacggcgttctttggtctggcgggttacgcctatggtgtgatgacattaaacttcggcgctggcgtgctctctacctggtccggtttaattgtcgcattgctgcttgccgctgcagcggctgcggcactgggttacctgatgttttacggcgggggaaccggtatttttgttggtatcgtaaccctgtcctgcactctggtcctggaaacctttatgtcacaaactgcaggtccacaatgggctatcggcagtgcgcgtttgaatggtttcaacggtatgtcagggatgccccccttgtccataccatgggttaacggtgacttgccactggaagacaacggcttttattacctgattatcttgctgctcgcgggtgtttattggggggtgaggacgttgttacgctccaattttggcctgacgttggcctcaattcgtgaaaatcctcatcgggcagagatgctcggcattgatatccgccgttatcaattactggtgtttgtgctgggaggtgtactttctggcctgtccggagcactttataccctgtggggatcatatattaccccgtcatcaatgggtttatccgccgctgcaatgccggtcatctgggttgccaccgctgggcggaaaaacatttttggcacggtgatcattacggccatcctggtgtggctatcccaatggttagctgtttatggcagcgaatatgccttgattctactgggcgccatcttgctgttagtggtattagcggcgcccaacggacttttatcctggctggctgagagcatcacccgcttgctctcctcacgccggaaaaaggaggactcgctatga

SEQ ID NO: 220735 - DNA, 735 bp, Klebsiella pneumoniae; identical to SEQ ID NO: 146711

SEQ ID NO: 220736 - DNA, 720 bp, Klebsiella pneumoniae; identical to SEQ ID NO: 189767

SEQ ID NO: 220737 - DNA, 987 bp, Klebsiella pneumoniae; identical to SEQ ID NO: 146713

SEQ ID NO: 220738 - DNA, 1173 bp, Klebsiella pneumoniae; identical to SEQ ID NO: 189769

SEQ ID NO: 220739 - DNA, 207 bp, Klebsiella pneumoniae; identical to SEQ ID NO: 146715

SEQ ID NO: 220740 - DNA, 1734 bp, Klebsiella pneumoniae
atgccgatagccccttatcttgcagccgcaattcaattcgaacccttaatgtttgccaaagaagccaatttacgtcaattacttatattggttgaacaggcggcacagaaaggtgcacgcttgattacaaccccggaaatggcaacaacgggatactgttggtttgaccggcaggagattgcgccgatggtagaaaccgtccctggcgagagtacagcactttttgctgagttagcgcaacattatcaatgctatatcgttttgggaatgcctgaaatcgaccccaatacatcgctgtattacaacagcgccgtattaattgggcctgagggtgttatcggttgccatcgtaaaacccacccctatatttcagaacccaaatgggctgcggcgggcgattctggacatcaagtcttcgatactccgctaggacgcattggtatgctggtttgcatggatattcacttcccggaaacagcccgcttgctggccctggacggcgttgacgtcatttgtcacatcagcaactggttggcagaacgcacccccgcgccctactggattagccgggcaatggaaaacggttgttatctgctggagagtaaccgctggggactagaacgcggagttcagtttagcggcggtagttgtattattgagcctgatggcaacattgccgcagtggtcgataacggtaatgggatagcgtatgccgaaatagatatcaaccgtagccgccagcgccaggtattaggggagccggttttttatcaacgccgtcctgattattatcacttactattaagcgacagttttttatggaacccgcaggatttctttgggctgtatggacatcagccactccccccaggcaagcagagccgtatcaccgtggcgcagttatctcccggtgagcaagttgaagataatctggcggcgataatcgccatgacaaaagaagctgttttggagcaaggtagcgagctgatcgtcttccctgaattagccttgacaggtcattacgataatgcggctcatgctcaaacgttagaaagcccggcagtgcagacgctggctcgcctggctatacagctaagagtctaccttgtggtcggaatggcagaaaagcaacatgataaaaactacattgcacagatgctgtttgggccagaagggataatcggcagttacaggcaaatccatctttcgcaggaaagccaaaaatgggccagcgcgggagaacactggcgagtgtttgataccgcgcttggcagaattggattgttgtcaggtcacgatgccctgtttcccgaatcagcacgaattctcgctttaatgggatgcgatattattgcgtgttctgctgcgctttcggcaggatttaccgccgcccacgcgggcagctctgtgacacagaatttccctatcccaacaggggccgatccgctgcattggcacttattcagaacccgtgcgggagaaaacaatctttatctggtttttgctaatgcacttgatggtatagatggggcaggaggatttagcggaattttcgggccagaaaccttcacttttccacggcaagaacggctgctttggcaggaaacgctggtcacaacacaaatcgtcgacacacgctctcttgctgacagcccttatccaaccaatgtggtacggcgtaaagatctggttgccatgcgccaaccccatcactataaaccgctgctgtattaa

SEQ ID NO: 220741 - DNA, 213 bp, Klebsiella pneumoniae; identical to SEQ ID NO: 189772

SEQ ID NO: 220742 - DNA, 174 bp, Klebsiella pneumoniae
atgaacaaaaagcctcgctatgctgtcatgctggatggggataaaaccgtctatagtggaaatagtcggtttgtcgcctggacgttctggctgatgaaccgtcatcgtagggctatcgcatatgattgcggagtttgggttgttgaaccagcctactggatccgtgtcgtttaa

SEQ ID NO: 220743 - DNA, 630 bp, Klebsiella pneumoniae
ttgaaatggattaattttttacaacgtcttctacaacgttttttccccaaaaaaaatgaaataattgaagtgaaatacattgaaagggatgaaacaagagtattaccagacatccctgaaaacgtcatagctgcctgtcagactcttcaggtgaagctggattctgttaagaataatccatttttggaaattagtttgatttatggatttcttgatacttttggcgagtttgcatcaacctttacagtatgtcagaaaggttgcagcgcctgttgcaaaataggtgtcgaaatgacggcattagaagcaagttttatagaaaaaaatacatcccacagaattgtatctaacaagcaaagaaaattaaaaaccaatacagattgcccatttttaactgatggaatctgctccatatatgaatatcgacctttcaattgtagaacctttttcacagtagataaccctaagtactgcgaaacaccaaacgaacctcataggacatatgggagtttaggtggtcaagacataaatataatttatcagttccgaaactatattgaccaactaaatgggaagaggaagaagagtgatataagattcttctttgggaatcataaaggaataaaatag

SEQ ID NO: 220744 - DNA, 963 bp, Klebsiella pneumoniae
atgccgacaaccctttacagcaagccttaccgtacacctgccgatctgattaacgacctcaagagcaaaaagcttgagtttttggacgaggctgaagcagaaaatacgctcagccagataagctattaccattttaaaatttatctccatcctctgttagatccggcaagtccgggcggaaaacattacagaaaagatgagtattttgaatatggggttgagctataccgcttcgacgaaaaacttcgtgtactgttgtttggcgtaattgcgcggcttgaagttaagctcagaagcaggcttgaccatacactttccgcattctcaaatgaccctttctggtatcttgataatacttttttctatacagcgaaaggcactaaaattattgatgacattcgaagtagaatacaaggtgactttaataaggaaggggagctttacgcgagaaattacaggaaaaaataccacaataattcgcatccgcaattctctaatctaccccctttctggattgccagtgaggtaattactatcggttgtcttttcaagatattcagtgcgactgatttctcatattttaagggattgccagcacctcataacactctgctggatacactcgcaaatgagtttggtgcaaatgatttcaattcgctgacgaactgggttcagcgtctgcgtgacgtaagaaatcgtgccgcgcatcatagccgactgtggaacgccaaacttgcgattccaagccagatagccagtgagttgaccatacccgcagttcaccagtatcgaccatacttgacggtctgcgtgatacacaaaatgattaagacactagacctggcgggcattgacttaaagggtgatcttcttcgtctttttgctggtagccatgcggcgcagctgtatatggctgataccggcttcccgcaaggttgggaaaacgatcctttctggaattaa

SEQ ID NO: 220745 - DNA, 783 bp, Klebsiella pneumoniae
atgaccggacttgtaaccctgggagggtattcgacaacaggtgctcagttacctgtttctatcgactatccagcggcgctggccctgcgtcagatggcgctcgttcaggacgaactgccgaaatacctgctggcgccggaagtaagtgccctgctccactatgtacccgatctccaccgcaagatgttgctggcaaccctctggaataccggcgcgcgcattaacgaggcgctggcgctgacccggagtgatttttccctgacaccgccctacccgttcgtgcagctggccacgctcaaacagcggaccgaaaaagccaccagaacggccggccgtgctccggccggtagcctgcctcatcgtatcgttccgctttccgatgcgaactatgtcagccagctggagatgatggtggccacgcttaaaattccgctggagcgccgtaataaacgcacagacagaaccgagaaagcacgcatctgggaaattaccgacagaacggtccggacctggataagtgaagccgttgatgcggctgccgccgacggggtgacgttttcggtaccggttaccccgcacacgttccgtcacagctacgggatgcatatgctgtatgccggcatcccgctgaaggtgctgcagagcctgatgggacacaagtcgatcagctcgacggaggtctacacgaaagtgtttgcgctcgatgtcgcggcacggcaccgggtgcagttccagatgccaggcgatgaggcggtggcgctgctgaagggaaatggcaggtaa

SEQ ID NO: 220746 - DNA, 819 bp, Klebsiella pneumoniae
atgggaagcatgaaagaccagatgatggatattgaatctgaacgatttgataaatggcttgctgaaaattatccggatgttgtccccggctcagaagaatgggaacaggccgctaacctgtactactgggaacaggagtatctcgccgatcaggctcagtgggatcatgaacacgggctgtttgtggcttccctgaacaatgttcatcagcgttacctgcacgccagccaggagctgaagaagctccatgccctgcttgatgaaaagcagcctgaactggtgtacagaatgtctttcgtccatgccgtgacggtcatggaggcgtacctgatgtactgcgccagagctctgctggaagaggacaggccgctcgagagatactttgaagagtattacttaccttttgctaaggtaggcaagaaagagaagcaggcggcccgcgagatggagcttaccaagttccgccctgtggcaaagaatgttgttgcgagtatgacgtttcataacgtgaaaaccattgagcgctatttcgggactgtgcttcatataccgcccgtctggccaattgagccgctgggtatcatcgcagactggcgaaacgatctggtacaccgcaacggtgtggatgagcatgatgtgccacgcgtgatatcagcgcagcagctgcatagcgccctgcagaaagtgtcggatctgatagaggctgcagatcattccctgcgtctggaagtggactattttggtaactggcgtaatgaagagaaccgggaaatcattgcgggagcactgcgcatatcccctggcggagaatcatcctga

SEQ ID NO: 220747 - DNA, 495 bp, Klebsiella pneumoniae; identical to SEQ ID NO: 92425

SEQ ID NO: 220748 - DNA, 1242 bp, Klebsiella pneumoniae; identical to SEQ ID NO: 102392

SEQ ID NO: 220749 - DNA, 660 bp, Klebsiella pneumoniae; identical to SEQ ID NO: 177802

SEQ ID NO: 220750 - DNA, 819 bp, Klebsiella pneumoniae; identical to SEQ ID NO: 152548

SEQ ID NO: 220751 - DNA, 891 bp, Klebsiella pneumoniae
atgctcactctgcgccagctccggcagtttcttgttgtggctgaaaccatgaatatcagaaaagcggcagagcgcctccatatggctcagccccccctgacagccgcaatccgtcatatggaagatgctctgggcacccgcctttttgagcgaacaaatcgtataacggcacttaccccagcaggtaaagtgttacagaaggaagcggttacgatgctgggacagatggaaaggacagttctgctgacaaaacgcgctggccagggaatgaccggaactttgcgtatcggttttgtggccactgctgtcagacatttgttgccagagatgatcgcgcgttttcacttctcatgtcctgaggttgttctcgagttgaaggaaatgacaactgcccgacaggtatcggctcttatcggggactcgctggatgtgggaattgtggtattacctgttcctgaatatgccacacagaaattggcttatcacagttttttcaactgccagttgattgctgttttgccacaaaaacaccctgctggcgtaagcggaactctgccgctttctgctcttgccggggaaccgtggatattatttccggaacaggaaggacccggactctatcactcgattattgatgcctgtcaaaagggaggatttactccggaggttgtccagcgggccttacagatggaaaccattgtcggccttgtagcttcggggctaggggtcagtctggtccctgaatttatgcgaaaaaatggatgggaaaatgtttgtttttgcacactaaccggagaaccgatactgtatcaggttgccttggttcatatggcagaaaacactaatccaaatgttgctgctttggtaaaaaacattacttaccggcagtaa

SEQ ID NO: 220752 - DNA, 1116 bp, Klebsiella pneumoniae
atgaacatactcagatcgttgtcactcacttaccgcagcataaatctactgggaaccctccttatgtcggcatcatccgcgctggccgagcctgaaataaatgagacctccacacagttaaaccggacagacagatacgtaacgctcgaaggaggagagcaactccatatcagggaagtcagtctgaaatcaggtatcaggaaatcacagacgcctgtattgctcatccatggtgcacgagtccccggcgtcgcctcttttgatctgtccgtcaggggcgcctcgctggccgcggacctggcgcaggcaggatttcgggtgtatatacctgatttgcgtgggtatgggtcatcgagccggcctggtgaaatggatgcatcgccagaccagtcagccccgttaatccgcacggcagatgccataaacgatctcgctcacaccgtacaggctgttcaggcgtggagtggctctccccgcatcagtatcctgggatgggcgacaggtggtcactgggccggtgcctacgctgcacagtacccacagaccgtggaacgactgattttatataacacgctttatggcggaagtgctcatcacccgactctcggatatgggtcgccgctggatgatccaggtaagcccggacatttcaatacatcacaatttggtggctggcgcctgaacacgcgggaaagcctgtttaccgcctgggataacagcattcccgcggcggataagacacagtggagggatgaaacggttaaacgcgcttacggtgatgccgcactggcatcggacaagacgtcacagcacagaacaccaccggctttccgtgctccgacaggtgcgatggcagacagctttgagctggctaccggcagaaaacagtggtctgcggcggcattaacaacagtcccggtgctggttatccgttccgaacgggatttctggagcaggcaggaggatgcggatgccatcatgaaggatgcccccttagccgaactgctggtcattcctgacgccacacattttgtccaccttgaccgggaaaacgccggcagaaaactcttcctccggggcgttgtcagatttctgacacaacaacaacgatcatga

SEQ ID NO: 220753 - DNA, 822 bp, Klebsiella pneumoniae
atgagcgataaaagcagggcttttcgccttctccacaaatcacagaatacctttgtcattcccaatccctgggacattggtacggccagaatacttgagaaaatgggctttatggcccttgctacaaccagtgcgggcctcgcattttctctgggaatggcggaaggtcaggtcccctggcaacaggtaatgcatcattgccggaatatcacagaagcgaccactctgcctgtatcagctgatctggagaaaggaacaggcgacagtcctgacagcgcggcagaaaccattaaaattgcagttgatgccggacttgcgggctgttccctggaggatcacacaggccgaccagaaaatcccatttttgatttgagccttgctgtcgagagaatttcagcggcggctgaatcgcgagatgcatgtgatcctgattttgttattactgcacgcgctgaaaatttcatgtggggcaatcatgatcttgatgaaacgatcctgagactccaggctttcgaaaaagcgggggcagatgttctctatgcgcccggaattcatgacatttcaatgattaatactgtctgcagatctgttaaaaaacctgtcaatgttgtaatggggttgcccggaaatgtttacactgtggaagaactttcacaggcaggagtccgtcgtataagcgtgggagcatcgatggcccggtttgcctatggcgcatttattgaggcggcacaggaggtcagttgtgggggcaccttttcttattcaaaacatgccatcagtttttcagatcttgaggccttttttcggacaaccactctataa

SEQ ID NO: 220754 - DNA, 2217 bp, Klebsiella pneumoniae
atgatgcgttctgaacagacagcgccctgtccggcagaggcgctcgctctttctgataaccagtgggacacccggcctgagtttatttcaggggagtccgaagcactggatacactggtcgggcatttccggcagggcggtaaaaactggccgcctttcgtattaacccggctttcccgtctccttttaccattgcgtgacacgctgattaggatgcatgcggccagggccccctacaattcggccattcatgatataaccctggaaatgcagcgtacccgcaaaacatactgggcctggacacaggcagagtggtctgaagtgatctgcagcactgagggcgaatttcaccggcggtttggcgccagcggaaactgtcggcagtatgtgatggcactggcctggctgttgtgcggttttgaccggctggagtcctgtggcgttttctatcagtaccggctctgcctcaaggtatttggtcgacacagtacggatgatgcagtcagcaagcttgggagcatgatgcaggcaatggggtatgtcccccgcgatggacggaataaccgcgtcaggaatgccatgtgtatggcaatgctgcttcagcgtgaaccgcaggcagaacgtatcagtgtggacacgctgcgacatatagctacggtggggcctgcttatctccgcgaggcctccgccacgctgtcgcgcatactggcatcatcagggattattgatgagggttttgatcatcgggtatcagaacgccgccggccaacccgggaatataatgcggtggccgatgtgccagccgaatggctctcctggtgtgagcgatggcgatccacctcggtgctccgtccctcaagcattgaggcatgctggtatgtactgcttaagtgtggccgctggctggcagattcttacccgatgagcgtgtctccggcagactggacgcgggagactgcaatggcatgggtgacggcagcatgcaaaatgaaagtaggtgaatgggcgaatccggggagaatgtaccgcgatcggcgagggatgctgatgaagccgtcagcgcgtgccggaatgctcaggcatgtacgtacattatttcatgacctccaggaatggggatggataccggttaagttcagcccggaaagagttctgagaacacccagaagcctgagttcgcagatcggacctgacccccgcattgtgagggatgatctctggtgtaaattaatccacgcgggccagaacctgcaggaaaccgatttacccaactgtattggatatccctatttttatccaattgagatggtcagagcgctgagcgtactctggctttttggcgggctgaggcgtgatgaaatcctgcgcatgcggtgtggctgtatccgctggcagacaccggaagaagaaaaaaatacgtcccgcatctgtctgattgatgtgccggtcagcaagacatacgcggcattcaccaaaccggttgacccgattgttggagaatatatcgaacgctgggagcaggtccgtagcgcacaatcacttcaggaagatcccaaaaccggtgaaaacgtgcattttctgtttatgcacagggggaaacgcgtgcacggaagctacatcaacaattcactcgttcccctgctgtgcaaaaaagcgggcatacctgaacaggatgccagaggcaggatcaccagccatcgtgcaagagcgaccatcgccagccagctttacaatgcccgcgaaccgcttgatatttttgagcttcagaaatggctggggcatgcctcaccggaatccacgcgtcattatgttgatatcacgccaacgaggcttgccggatctctcgggaaagccggttactttgaacgtaaccgccgtatggtatctgttctcatcgatcaggacgtcatagcagcaggacaggcagcggcaggaagaccctggcgctattacgatctggggcatggtttctgcagctatgatttttttgagcagtgcccgcaccgtatggcctgcgcaaagtgctcgttttaccttccgaaaacgtcatcagaagtacagtatctggaatcccggaataacctgatacggatgatgcaggagatccccctgaccgaagatgaacaggccgctgtggaagatggaatagaagcggtggaaaatttggtcatcaaattgaagaatattgccccgcctgatgaaaaagagctgttatag

SEQ ID NO: 220755 - DNA, 999 bp, Klebsiella pneumoniae
gtgcagaagaaactgctggatgcgctgcctttcctggcggccgatccttcagcttgccggtggatgtgcctgcaggaggacctgctgcgtgctccaaacaccattgatgcctatgcccgtggcgtcaatgactggctcgctttctgccactctgttgcactgacggctgctgtcgccggacgtgacacggtcgcactctatgtccgcagcctgcataccggtcgccagctggcagccaccactatccaccaccggctgacggtagtgcgactttactgtgactggctgtgcgaagagggaatgcgggagaagaatcccgtcaggcggggggtctggaaaagcagcggaaggggaataccgggcatcgtgccggtgcagcggaagatgccgtggatacctgatgatgaagactggctgcgttttctgagggtggcgggccaggctgatatccgtacccgctttatgctggcactggcttacgactgcgcactgcgcagggaagaactctgtaaggttgccaccggcgatatcgatccggcccggcggctgctcactgtgcgtgctgaaaacaccaaaaaccgctgtggccgggtggtgccttattcgccggtgaccggtgagctctatgtggcctggctggctgagcgacgtcagctcagtgcatcccgcggtccgctttttctgtcgcactcaccgcgtaaccgggcggaacccgtcagcggctggacctggtcaaaggtggtgcgtcgcctggcccttgaggccggtcagccactcatcagcacccacaccttccggcatctctgcctgacggaactggcccgcgccggctgggatatccatgagattgccgcgttcgccggccaccgccgcatccagtcaacgctgctgtatattcatctcagcgcccgcgacctgagtcaccggttcagctgtacggtggcctcactgcatgctgcccggctcacggcgctgcaataccgggaactctcaccatga

SEQ ID NO: 220756 - DNA, 843 bp, Klebsiella pneumoniae
atgttgttacttcacgaggtccgtcaccagcggctgcgcaacaggatcattcttgccgttgcgctgctggccgctatcgcctccatttcgcccgaacagctcggcatcacgctatacaagctgtctctggtttccatagctgccattctcggctaccaccctgatcgagcactgtttccttacgccagcccggggagctatctgatagaagattggaaagagaacctcggcaagccggtgccagtgagccgcaatgagcctgaataccccgttgcaacgggctatgagctgatttgccgccgttctgctgcgatgtgcaccgattgtcgcggcgatctgcttcggcgtgacgatggggctctaacgatgatccgactcgcgcagtctctcatcctgcttagcctgctgagtggttgtcacccgttcttcgctgccagcattcaggttgaggcccggcaataccagcgcgagctgacccgcaatgcacgcgctgtctgggggcttaatgccccagtaccatcccttcaacccagcaggaggtctgtaattttttgcgaaggccattaccaccgccaggtacggcggatgctgcagatctatcagcgtaatatggagatctacgcctgctggctgcaggagtttttcccctgcggcatctgtgttagccgcccgaaaggctgctttatgttatggttcgagctaccggagcaggtggatatggtttgcgtcgcgaagcagttgtgccggctgaagatcttggtcgcgtcaggatcgctgttttcggcatccggggagtatcgagcaactgcgccctgccgccaatcgagaagcataaagagttga

SEQ ID NO: 220757 - DNA, 300 bp, Klebsiella pneumoniae
atgatgaaaaccgaacccgcggaggaaaacattgctgagatcacagataagcgcctgaccatcggaatggatgaacctccagttctccgtgtactggatgcgttgtgttataacgagaagcgtcgagctatgaactatcccaattcagaaatggttaacatcggctggttccagcgtaagatggctccttttattaacgttcacagcgatcacttcaacaacagaattaaccttcaggaagcccgatatctgtcgggcttttttctacccgggagcaaattactctgcaccccattctga

SEQ ID NO: 220758 - DNA, 1125 bp, Klebsiella pneumoniae
atgggtacgccgtggtttcagatgaaaaacgaaagatacccggaaaaaatatacgcgttctctagcaactatgaactttatgcatccatgtcggcacgcgtgatgagctgcctggaggaactggctccgggggtggaacagtattcgattgacgagatgttcctcgatctgaccggcgtggagcactgcatggacctggaggacttcggccggcagctgcgacagcacgtgtatgactgtacccgtctgaccattggcgtgggtgccggaccaacgaaaaccctcgcaaaatcagcccagtgggcctcaaaggagtggaaacagtttcgtggtgtgctcgcactcacccgggggaatccacagcgaacgcggaaactgctttcactgcagccggtcgaagagatctggggcgtgggaaaccgtattgcacgcaagctcaatgttctgggcattaagaccgcgctcgatctggccctgacgaacccggccttcatccggaaaaatttctccgtcgttctcgagcgaacagtgcgcgaactgaacggggaaagctgcatgtcgcttgaggaagcaccgccaacaaagcagcagatagtctgcagccgcagctttggtgagaaggtcactgaatacgattcgctgcggcaggctgtctgtcagtacgcagagcgggcctcagaaaagctgcgcaaggagcgccagtattgccggcatatttccgttttcatcaaaacgtctccgttcgccgttaaagagccttattacggcaacgtggccacggagaaactgcttactcccacccaggacacccgggacatcattgcggccgccacaacggctctggagcgtatctggaaggacgggcaccggtatgccaaagccggtgtgatgctgaatgacttcaccggctccggcgtttcgcagctgcagctgttcgacgaacgccctccacgccctcacagtgctgagctgatgaaggttctcgatggcattaatcattccggactgggacaggtctggtttgccggacgagggattgcgcctgcgtggcaaatgaaacgcgatatgctctcccctgcgtacaccacccgctggaaagatatccccatagtgaggatcggctaa

SEQ ID NO: 220759 - DNA, 897 bp, Klebsiella pneumoniae
atgtataagaaaagtgtagatctatcacttgaatcggttctcgtagaaatcgatgaaaataagaagctcatgccttccagaaacgctactgtccagcctgtagctttgatgcgcttaggtctgtttctaccttccttaaaacgaaaaggaaaggatacagaaaatatcagtattgatgcgagtaacgaacttcaaagcttagagttggcaagagccgaaggttatacagacatccgtattaccggcccacgactttcgatggagactgacttcaaggtgtgggttggcatcattctcgcgttttcgaaatatggcttaaacagcagcaccattgaacttccattcagcgagtttgctacattatgcgggtttagctcaaaggacaaagataaaggactcagaacgcgcttggccgactctcttattcgtcttcgcagcacaactatcaagcttgcctcagaaaaggatcggaatggtgttgtatctggtctgttaagtcgtggtaagtgggacgaaaaagacgacatcatggaacttaccgccgatgagtctctttgggagctttatcaattcgaccgtcaggtgcttctgcagatgtttataatccggcaacttgcgaacaaagggacagcacaggccctatacactttcattgagagccttcctgagcgaccaataccactatcgttcgcgcgtattaaacgtcgcctaatgcttacctcacccaataaccagcagaatcgagtgattaacaaggctatagacgagcttaaagcggtcggttatttagatggcgatgtcgttaaaaaggatggtgaatggcacttaatcataacccgtcgcacgcctaggccagacattaaggctatgtctgaagccttaaaagatggagagtaa

SEQ ID NO: 220760 - DNA, 1206 bp, Klebsiella pneumoniae
atgaaacgagattacggtggagtaggctcgatagcgcgacgagctggcatattacttgagtcaatgagccgggacattgaagatcaacgcaaagagtttaaccttacagaatacttccagacctttacccggaacgcagtagccaaattacccaagctaagccgtcgcatcgtggagcaggccattaaagaaatggaagatgcaggctacgatttcaacaagaaacgcgtcggaaatgttgagcaatatgctcttacagtacagaatgttattgatatttacgcccaccgcaagatcccgaagtatcgtgaaatccatcaatcgccttacgttattttcgtcgttaacttgaaaggcggcgtatccaaaaccgtatcaactgtaacgctggcgcacgcgttgcgagtgcatcaggatttattgcgtcacgatctgcgtattctggttattgaccttgatccgcaggcatccagcaccatgttcctcgatcacacgcacagtattggttccattcttgaaaccgccgcgcaagcgatgctaaacgatgtcgatgctgaaaccctgcgtaacgaagtgatacggccaaccatcattccaggtgttgatgttattccggcttctatcgatgatggttttgtagccagcgcatggaaggagctggttagcgagcacctgccgggcgtaaaccagtacgaagtgcttcgcaaaatcattatcgatcgtgtggctgatgactacgatttcatcctgattgatacaggtccgcacctcgatccatttttactaaacggtttggcggcaagtgaccttattctcacccctactccgccggcgcaagtcgatttccattccacgttgaaataccttacccgcttgcctgaaatgctggaaacgctggaagaagaaggcattgaaccgcgtctggctgccagtattggttttatgtcgaaaatgactggcaagcccgatcacctggtttcacatagccttgctcgtgaagtctacacaagtagcatactggactcttccctgccacgcctggatggctttgaacgttgcggagaaacgtttgatacgattattagtgctaacccagcatcttatcccggtagcaacgacgcgttaaaaaaagcgcgtacagaagcagagcattttacgaaggctgtgtttgaccgtattgaattcctgaggagccaatcagcgtga

SEQ ID NO: 220761 - DNA, 975 bp, Klebsiella pneumoniae
gtgaagaaaaaaatagtagctcgcgggcgaaacattttaggtagtgatagctcggattttatccgtagcctcgaaaccaaagaagcagagaaggtattcacccttaagtccggtaatcaggccaagttcaccctctcaaccattttgaatggtgatattgaagagaagacatttgtcgatccagctgttaacggtcgcgaccaaaggtatgtaacccctgagtcagtgagcgacataacgcgaactatcaacctgcagcaatttttcccagcaatcggccgagttattgacggttgtattgaagtgttagatggttcccggcgccgggcggcatgtatcttcagtggcgcgaaattcgaaattctggttacagaagatgagataagtcttgaagatgctcgtcagcttgccaaagacattcagaccgcgcgtgagcatacgcttcgtgagataggtcaaagatatcaatttatgtacgcaaatggcatgtctaaggatgaaattgcgcgcgtagaggacgtctcaccggccagcgtttcccgcgcgtttcaagctgcttctgtgccagctgaaatggtcgagttattcccggttatcaatgaactctcccttgctgattaccagctgctgttaaaaatttcagaggacttagatagcaaaggtgtgcctctgtctgatttgctcggaaaagttcaggcagacatcagtgcagcaaaagttgaaagcataagtaagtcgctaattatggactcttttaaacgccattcgaagcagctgaagccagcgccagtgaaaactgtacaaactgaaaaactacgtgagtttgaagacaaaaagcagtttgcccggaagaaaaccgatccgtctaaacgcttagtgacctatgaatttgcccgtcttcctgcttcagttcaggctgagttagatgaggccatcaggctggttatgggcaacatgcagtccttcgaaaaataa

SEQ ID NO: 220762 - DNA, 864 bp, Klebsiella pneumoniae
atggatgacgccaccggtcgcctgatgcacctgcgattctgtgattcagaaaacgcgtttgactacatgatggctacccggcaatacattgataaacatggtaaacctgtcgcattttacagcgacaagcatgcggtgttcagggtcagcggacccgaaagccgacgtaccggcacaacccagttcggacgggctctccgggaactggcgatcgaattgatttgtgccaacagcagccaggcaaaaggtcgcgtggaacgggtaaataaaacgctccaggatcgcctgattaaagagatgcgactgcagaacatcagctcggttgctgaagccaatcagtggattgaacatttcatgtctgattttaaccgtcgtttctcccggccggcaaaataccctaaagatctgcaccgtgcggtcacacagagtccactggagctgaatgatatcttcgcctggcaggagctgcggaccttatcgaaagcactgacttttcagtatgataaagtgatgtatatcattgaacccaccgaaaaaaatacgcgcatagcaggtgaaaaaattaccgtttatgattaccctgacggaagcattactttccggcatcagcaccggccactgggttataagattttcgataaactgacctgcgttgatcagggggcggttgttgataacaaacgactgggtgccgttctgaggctggcacagcagaaacaggaagagctggaggctgaaggaaagcgaatgcgcagtacaaaaatgccccgcaggcgcgctcaggaacgtgcactggaagagctcagggcgatcaacccggtgctggccagtccgcaggattttatccccagcctgaagcgataa

SEQ ID NO: 220763 - DNA, 396 bp, Klebsiella pneumoniae
atggacgacaacaaaccagtgctcctgacacttcacgaagcgctacgcctggatttgattgaagcctatatggcgggggaaattacgctggcagaagtggctgagtccatggagctcacccgtcgtcagtgctcccgcctgattaaacgctaccgcgagctggggtcagccggtctggtcagccggcgtcgtggaaagccaggcaatcatcagttaaacaccaccatcagagatcaggcactgcagcttattcgctcacgcggccgggatatgaatccgtcagccatctggcgaattctgaccacagaatacggtgtccggatttcaaaagagaccgtacgtaaactgatgatagccgagaaaacctggcaaccacgttcttcctccaaagcctga

SEQ ID NO: 220764 - DNA, 333 bp, Klebsiella pneumoniae
atgacggcatacggaacggagtttttctcaatgagatatgtaaaccgactcaggatccttcaggatgtcatcgaccgcaacctgcgtcctggtctggcagccgaaatgctcggtatcacgccgcgccattgcagccgcctgctgaaacgttatcgtcagtccgggccactgggcatgaataaccagagtcgtggtcgcaccggaaatcgcctgctttccgcatcattgactgatcaggccctgaatatcatccgtgaacgctatgccgattttggccccacactgacgtgggaaaagctcgctgaaaatcacggtttactgatgagtttatga

SEQ ID NO: 220765 - DNA, 537 bp, Klebsiella pneumoniae
atgaccgcttataaccggcgctttggcaaagcaccccggcatgactttgatgttcaccggccacttgaaactgatgatgatctgaccgcatttttcacatggcgggaaccgcgccgtgtttcaaaatccctgacggtgcagtatgacaaagtgctctatctgattgaagacaatgagttaagccgaagggctattggcaagtacattgaggtatggcattacccggatggccggaaagagctccggctaaacggggttgtccttccctactccacctatgatcgccttcaggaaatcgaccagggggctatcgtggacaacaagcgcctcgggcgtacacttgaatttatcaaactggtacaggacaaacgcgacaataaccggtcacaggctctccctgccggagatggcccctcgcgccgacgcaggaaacccacagagaagaaatcccagcgatctctggacgaagacgatatgctcaatgcgctgaagacattacaatcacgttctgacgagattttcggtacaaggaaatga

SEQ ID NO: 220766 - DNA, 1161 bp, Klebsiella pneumoniae
atgaaacgaagaactcggattaactacacgccagagcagaaggcaattatctgggacagatataagcaaggtgattctctacatgatatcgccagaatgttcgacagatatcattcttccattatgcccactatccaccagacaggcggctatcgtcctcccgtgcgaaaacggcaccgattagcgctttcgcttgatgaaagagaggagatatccagagggctggtagcaaaactcagtatcagggatatcgccgccaaattatcaagagcgccctcaacgattagccgcgaggtcaggaggcacggtggtgcaaaacaataccgtgcagcaaaagccgatgctactgcgtgggaaaatgcactgagaccaaaaccttgcaagctaattgaaagccccgcattgtgtaaaatcattgcagagaagatgcatcaggactggtcgccggaacagatcgccggttggctgaaacgctgttatccggataatcaggaaatgcatgtgtcacacgaaacgatttataaaacgctttttatacaaacccggggagcattaaaaaaagagctgcagcaatgcctcagaagcggaagagcagtgcgtagatccagaacgtcatcgcttaaagggaaaggattagggtcaatcccgaacacgatacctatcagcgaaaggccaccagaggcggctgacagagccatcccaggtcactgggaaggtgacttgattcagggctcgaaaaactcctatatcatcaccctcgtagaacgtcattctcgttttgttatgctggcgaagatcagagacaacaagaccataacggttatatctgcactcatcagacaagcccgggaattacctgctgagctttataaaacattaacttgggatcgtggcgctgaaatgaccagccacacacgatttactatagcgacagacattcagatttatttttgtgatcctcaatctccctggcaacgtggctcaaatgaaaatacgaacagattgctcagacaatattttccaaaaggaactgacttatcggttcacagccagcaaagacttaacagtgttgccagacagctcaacgaaaggccgagaaaaacgctagactatgaatcacccgcagaacggttcaatcaatgtgttgcatccatcggttga

SEQ ID NO: 220767 - DNA, 276 bp, Klebsiella pneumoniae
atggaaaagtgggaaatgacagccttctgcccactctgtaagcaggtttttgttgctaaaaaatttaaatcccatctaaaccagcatcacgctgaagcatcagatgctgacaaatccaaagtagagaaaatggcgctaatagcccttaactctgtgaagaaaaaaattaacaagaagagcaaggagctaaaaagcgccacagacttgataacctctcaccgaaacggatacacaggaacggtaagtggtggcgctttcggtcaaggtaaaaagtaa

SEQ ID NO: 220768 - DNA, 207 bp, Klebsiella pneumoniae; identical to SEQ ID NO: 195782

SEQ ID NO: 220769 - DNA, 1035 bp, Klebsiella pneumoniae; identical to SEQ ID NO: 195781

SEQ ID NO: 220770 - DNA, 705 bp, Klebsiella pneumoniae; identical to SEQ ID NO: 195780

SEQ ID NO: 220771 - DNA, 261 bp, Klebsiella pneumoniae
atgtccaattcacccaccgaagccgcgattaaggcagcagggcggtctttatcagaggtcgcgcgtagctttggcttcaagtctacccagtcagtagccaactgggtcattaacgatcaggtcccatctgagcgcgttttgcagctatgcgaacttggcgggtggattgttactccccatcagctacggcctgatatctatccgaaccccaatgatgggctccctgacaacaagactcaggttactacttctgctgcttaa

SEQ ID NO: 220772 - DNA, 606 bp, Klebsiella pneumoniae
atgggctccctgacaacaagactcaggttactacttctgctgcttaatcataaccacaactcaagaggtgaaatcgtgggtaatgaacctgaatggaaagtagaacgccagcctgcatggctggtggccgcgataagaagaactattgctgatttatcgggtggatatgacgaagctgctgaaattctcggggtttataagtccgatgacgtaactccggctaccgacccattgcataaccggcttcggaccaacggcgatcaaatcttccctctgggttgggcgatggttttacaagctgctggtggctcaaatcacatcgcaaatgccgttgctcgtcactccaatgggctctttgtgccgctagctgatgtggaagatatcgataacgccgatatcaaccagcgtctgatggaatctattgaatggattggcaggcactcgcagtacatccgaaaagctactgctgatggtgttattgatgctgccgaacgcgctcaaattgaagagaacagctaccaggttatgaccaaatggcaggagcacctgactctgttattccgggttttctgcgcccctgatgaggtttcccgaccgccagactaa

SEQ ID NO: 220773 - DNA, 315 bp, Klebsiella pneumoniae
atggctgatatggcttcaattacagcagggctaaatgcagtaaagctggctttcaatattgcaaaagaccttaaggatgcaaccgcagcgttcaatgaagcagagtttcgattaaaactcagcgagttatacttaagcctgagcgatgccagaatgaatctcgctgaagctcaacaggagataagttctctgcagggggaaatctcatctctcaaagcccaactcagtacagttgatgaattagaattccgggatggtttttattacagaactacatctgttgatggaaagccaaaatggtcctttctgtcctaa

SEQ ID NO: 220774 - DNA, 573 bp, Klebsiella pneumoniae
atggcattactgagatatgcaagggtatcaaccagccatcagaagctgacagtgcaaattacagagctgaaatcaattggcgttagagatgacagaatttttactgacatgatgtcgggagccacggacgaccgcgcagggttgcagcagctgcttgcccgggcggaaaaagacgacattatcatttgtaccaaaatggaccggctagggcgcaataccgcagatatgatccatatcgttgatgcctgctataaaaaggggattgccatccgttttcttgaaaatggcctgagtaccgaagggacaatggggaaaatggtgattcagattttggctgctgtggctgaggctgaacgggagcgtattctggaacgtaccaacgagggacggttgattgctatggcgtccggtgtgaaattcggacgtaagccccacctgaaatcggactcggccatggcgcttattgatcagaaacaaccagccagagtggttatggaaaaaacaggcatttcgcgggccacttactttcggttaaaaaaatacattaaaaatcagcaatcgaataataactaa

SEQ ID NO: 220775 - DNA, 819 bp, Klebsiella pneumoniae
atgaataataaaatacctaacaatgtcattggcgcggtgtcttcagtacttagtgaacattattttagccatacgtctttaaattcgctgtttatggagtcaggcgcacctggtgaggtgccaatgggaaactgtgaaaccaaatgcagtaattggctgaaaatttgcaatgaagacgactcgatagatgcaatttcagtattaggcagtatcatccagaattacatggatttacctccgaattcatactctagggctggagctggatctactgtcgaatatgggcaaaaaagaataatcgatgctttatctaagaaccaattagtctacagactcaatggatttatcactaaatcaggttcgactccgatttctaaaacgctagaggattatctgaagtctggcgactactcatctattgaaaatgagtttcttcgtgcagtagagaatattcaaaccgatccgcatgcatcagtcaccgcagcatgtgcgataattgaatctgcattaaaatgctacatagaaaaattcgatttacctatgccacaaaaattgaatgtagcacctctttgggctgccgtgcagccgagcttgaaccttaatgccgacgctacgttagcggatgatcagcacaaaattttaaaaggaatttcatcaataattgacggtattggtgcattcagatcacatatagggagtgctcatgggcgtggtcaaaaccctccgcagatcgtagttgccgaagctagactcgcagtcaatgcatctcacaccttagttgtatttattatggatgttatccatgcgaataaaatataa

SEQ ID NO: 220776 - DNA, 837 bp, Klebsiella pneumoniae
atgcatcttcgttttggtgaaaccgaatcagcctttgactacatgcttgctacccgtgaatatgttgagaaacatggtaagccgctggcattttacagcgacaaacacggtatttttcgagtaaatcatgccgccggaagcaaatctggaactcaatttggtcgagtcctgcacgatattggtgttgagcttatctgtgcgaacagccctcaggcaaaagatcgtgttgagcgtgccaacaaaacacttcaggacaggctcatcaaagaaatgcgcctcaataaaataagcagtatcgaagaagccaatgcttggctggaaacgtttatcgtaaacttcaaccagcgcttcgccaaaacgcccaaatatccaaaaaaccttcatcgccctgtggcagaaacgattgtggatctggatgatattttctcatggcaggaaacccgtaaactctcgaaatcattaacattccgttatgataagatgatatatctggttgaacccacagaagaaaacacccgaattgccggggagaatattaaggtctttgattaccctgatggcaccctcgccttcaaatacggccaccgcgccctctcctatcaggtattcgataaactggactgtatcgatcaggggcaaattgtcgataataagcgactcggtgcagtgctccgattggctcaggataaaatggatgaattggatcgtaacggcaaacgtgagcgaagcacaaagatgccgaagcggcgtgctcaggctcgtatacaggaacagttacgagcaattaatccagttctggttaatccaaaagaatttcgtgcgagcttgaaaagataa

SEQ ID NO: 220777 - DNA, 180 bp, Klebsiella pneumoniae
atgcaactcgatgcaggtcttaaatccaaaacacaagttatcgcagaactgggcggtgatccagtgaaggtattagcggagatagctaaagaaaaagaagagaatattaacaaggaagttaaccagaatggaaataaggaacaagaagagggagctaacgatacccctacaggcgattaa

SEQ ID NO: 220778 - DNA, 1212 bp, Klebsiella pneumoniae
  misc_feature (1195)..(1204): n is a, c, g, or t
atgttctggaagaagaaagaagagaaacaaccacagccagtaccaaagaaactacgtcagcgtaatgcacaatcaagtacattgaagaaagatattcaggcagcacgtaatacgtcagtaatgaattttgggttcaatgcaaatacgggaggtaatattaactttctgttgatgaaagcgttgcctacattccgtgcttttagtcgtgatgcaattttgaaaaatccgataggtcgtaagtatatgaacctttcggtagatggggtagtgggcagtgatggggtatatgtaaaacccgccgtagaacttgaacaagatgatgcagtacttaacgagattaaccagcagttagaaaaactgtttgaccgatgggcatacaatccagaccgctttagcattgatggagcattgagtttcgacttattccagcagacggtcgagaagattcgggtacaggatggggaatgttttattcgaatccatacaaataatggacagattcaaattgaaattatcgatgctgcacgattaacacagcttaataatcagttcatgtctaatggtaactatattagtaacggtattgagttcgataagtaccatcgtccggtgaattactatttctgtactttcaatcctgttaactatcagttcaatacaactgattacgaagttattcccgcaaatgaaatttgtcattacttcattgccgatatacaggggcaggaacggggcattcccgatatggttgctaccagtaaattaatgaccgacttacagaacttcactgaagcggcattaacggcaaaacgtgtgagtgcttcgagtatggcatttatcacgaacaacagtgataccactcaagtagatctcattgatgacaatcgtgaggaagtcactcctgtatatacagagtactttgaagcgggatttatcggtgaacttggtgaaggtcaggatattaaaacgattacgccaacaaatggtgtcgatggaattgatgtttttacgaacgaattgatgaaccaaatcagtatgggtcttaacgttactaaacaagcactattatctgatacctctaatgcatcattcagtgcagcacgacttacagaaaaactccaggttacgacattccgtaccagaacaaatgtactcatcagtaaagtactgaagccaatttatgccgcatggctgnnnnnnnnnngattttga

SEQ ID NO: 220779 - DNA, 531 bp, Klebsiella pneumoniae
atggcactattatcagaaaagatctatatggtcagcaacccatatgatctggctgtaacattacccgccagaacaatacttgtagtaagttttacttcatccggtcaaagtatttcattcgataatctacagtctgatacttcaagggaatttactctaacgttagaaattgatacagcaagtgaaacactattctgtactcaaattactaataacagtgtgagtacctttacctccgaagtaatcaaccctgttatgcatactaatgaatacgcaaaactgaaagggatgattgatgaaattgatcaggttattgcagtaaagatttctggtggtgcgaattacagcataacaattaataataaaacattagtaagtgaatctcttagctctcttgaatctatgcgtgaacgttatgtgaaacgtgcaaacgctttatgggcgaagatgaatggaattaacgtctcaggaaacggaaaaccaatcaagagtattaccgtgtttaaacctaatacatggagtactcgataa

SEQ ID NO: 220780 - DNA, 540 bp, Klebsiella pneumoniae
atggacccactcgtaattctcgggaaagtgttcagcaatgaacctctggaaagaaccatgtacatgatcgtcatttgggttgcacttttggtgcttatcccagagtcatgggctgcttatattgatgaaaaaacaggaatacctcatgtttggcacttgttgattttttccgtagcctttttatcagccattaatactcaaaagggttttaaatttgcattaaatcgctaccacgtcaggcgaagaaagcgggaacgcagagcaagagacaacaaaattcgcacagtgatcgcaaatctaacggaagcacaatcaatggttctatgcgcagcgcttagtgacggtcgccaagaggtaactacgacagccgtgttccctcacatcgaagaattaatccagcttggtgtgctaaacaaaaccttttcacggtggaaaggggcggttattttgtttcctattgaggatgtttattggactgaattggtgacttgctttgatccgtacaatattgagataaagccgaggccaatatctaagtaa

SEQ ID NO: 220781 - DNA, 690 bp, Klebsiella pneumoniae
atgtttaatgaaaacatgaaaacaattcaagaaatcaggcgcataaacgccagaaaattgagagacggtgttggcggaaattcgttttttgccacgatgattgatcgtgagccgactcaaaccagccgatttatgggggatggagcaaccaaaaatattggcgacgcaatggcgcgccatattgaaaagtgctttgatttgccactaggctggcttgaccaagaacatcagactacgaatgtggctaaaagcaacgatgtttctgatgcttatagagacattactttagttccagtcatatcctgggtgcaggcaggagcttggacggaagttggatatgctgaggtagacttgaatagcgcagaaacttatccctgcccagtgccttgtggcccaatgacctacatattgcgtgtcattggcgattcaatgataagtgaatatcgccccggtgatatgatttttgttgacccggaagtcccagctgttcatggcgatgatgttatagccattatgcatgactcgggagaaacaaccttcaaacggttgattgaagatagcgggcaaaaatttctcaaggcactgaatcctaattggcccgagccttacgtcaaaatcaacggtaattgctcaatcattgggacagttattttttcaggaaaaccaagacgatacataaatagagtatga

SEQ ID NO: 220782 - DNA, 201 bp, Klebsiella pneumoniae
atgaaagattattgggattctttaactaaagagcagcagtgcaagcttgccaatagcgttggctcaacgcctggttacttacgcttagtgttcaatgggtacaaaaaggccggtttttctttggctacaagattagaaaacatcactcttggtgagattaaaaaatctgaactccggcctgacatctatccaaaacagtaa

SEQ ID NO: 220783 - DNA, 516 bp, Klebsiella pneumoniae
gtgggtaatcaacctgattggaaagtcgagaaacagccagcctggctggtggccgcaatcaaaaagacgatcgcggaattacctggcggatatgcagaagcagccgaatggcttgatgtgactgagaattcgttgttcaaccgtctgcgtgctgatggcgatcaggtattcccgtttgggtgggcaatggttctccagcgcgctggtggttcacaccatatcgcgaatgctattgcgaaagcctctggtggagttttcgtaccgcttaccgatgttgaagatgtcgataacggggatatcaaccaaagactgatggagtcggttgaatggataggaaaacactctcaataccttcggaaggcaaccgctgacggcgtaatcgatcgtgatgaacgcgctcaaatcgaagcgaacagttaccaggtcatggctaagtggcaggagcatttagcgctgcttttcatggtcttctgctcccctgacgacactccaaatgtaccttcaaattcagggtaa

SEQ ID NO: 220784 - DNA, 249 bp, Klebsiella pneumoniae
atgaataacatgattggctttctgtacgttaacaccgaaaccgactgcaaccgtagagagaataatcaccccaaatccaggatgaacctggaaatcatcgatcagcctctggcggctattctgactattacttttagtgctggtatcaccgttaataatgacagggcgggtaatggtcccaacttattgatagtgttttatgttcagataatgcccgatgactttatcatgcagctccaccgattttga

SEQ ID NO: 220785 - DNA, 1497 bp, Klebsiella pneumoniae
atgagttctttaggttcaaccagcgtagagcatattcccagacgcagaatcaatctccccgcaggtctgctgcacatcaaaacgaaagtcgaactttcttttggccccttcgcaatgtgcggcgaggggatattccagaccatctttgctatacatcccagcgcagcttcagatgatgattatctgtttgacttcagctcagccggctgggattcaacaggaagggtcagaatatccgaactttatctgagtaacttctcagtgcttggggaaactgcgagctggattcgtaaaagaatctttaaattctacggcgtcggctgggattttgcgatagagaacgtgcaggtctggtcgcctccactttcgtcattcgatatgacggatgtcatggacggggtatttaatcaggtgaggataaactccggaggccggttcctcactgcaggttcagaagtaacgcatcagattaacatgctgaatcagtatgataactgtaatgcaataagatacatgagctgccattttgaaaacaactattcaggcgtctcttatattcgtggtgggtcaaacaacattctctttggcggaatgtgtaaatttgaaaataacagcagaaacaaccttgttcctgttaaccagatttacgggtccacctcagatagtgtcaaatttgaaaatatcttcgtaagccacccggcccatatcacagtttactggctggacagcaatggccggcacgtatcaattcgcggaggctcacttatgagcccgtcggatttaggtggatataccggtctgaggtggttccgcatccaccgtacaaactgggcgagtgcgactgcgtgcgttcagctggtcgctgatattgacatgatgcatgtggacgggtacggatataacggggcgaatcagctctcaccgtttgattttgagggcgaggttattttccgggcaaaggctattcgcctggcgcgaccaaataccttcatgtacatcaactggaactgcaaaattgatattgaaaatctgacgctgttaggtgctgttaccagcgattatcagacctcactgtttaatgttgccgcgtcatcagtaaaggcagacgtaaacgttgataaatataacggcagcgttgttggaactgtttatgtcaatccagcaatgaccaccgcatcgcgccggcagtcaataatcaatgtgaggggtaaatcacttcagtcttcatcactgacgctctctgagggtacagaccctcttggttatgatgagtcctggacgtggaatgcctcgggaaatgtagccaacatcggatactgccatacagggaagcgaatggttgtcagatgtgcagacacatcaaattgcctgattgtcggcggtaatattttccttccgggtggtgcggtaacggctgcatgtacgataaccctgatggcgatgaacacatcgttccgtcagggctgggtcgaagtttcacgggtagcaggagtctaa

SEQ ID NO: 220786 - DNA, 270 bp, Klebsiella pneumoniae
atgtcatttaccctcacgcaaaatttgaagtcgtttcgtaccatcccataccttaatctcgttgagccgcttagtgccgcgcctgtagctgtgacatataccgcaaaaggggtcgacagtatcaacgggactactgcaacggtgctgtttgatacgcaggctgaggggctggaggctacaggccagttctactactctttcgaatttactgaccttgcaacaatttttgaggatgcagaaacggcactaaaaaaagagatttcagagtaa

SEQ ID NO: 220787 - DNA, 147 bp, Klebsiella pneumoniae
atggttacctggaagtggggtaattttatctatccatacgtaatatttagttggggcactgtaatgcatcaggtttttgcttccgaagcatggattgtagttttgattacttcgattctcctggcgttcagattacataagtgctaa

SEQ ID NO: 220788 - DNA, 1296 bp, Klebsiella pneumoniae
gtgagtcaccagggcgagtacgcgctgaaaaacatcaacgggttaggtttcactgagcggatcaccctcagctctccggggctggtggaagttcgctgccgtcggcgcaatgagcagggcagtaataacgcgcgcgacaatatgtactggcaggctttgagagggaggcttcttgctagaccggtatcctactcaggcataacaacctgggcaattaccgttgaaaccggggggaagctggcggcacagtctgacaggcgcgtcagcgtggtctctacccgtgaatatgacggtggaggtaacagaaccataagcggtgcattccgtcatgtggcaaatagccttggatttaatgctaatcagattgacgcctctgcaataaatgctcttgaaactgcctggtggacgccaaggggagaatattttgactatgaggcaagcagcgatagtgcttctgcgaaagatattttcgacaaaatcaccgaagcaggcatgagctattttttgctatcagatgggctcttatctgccgggcgcgaaggtatcaaaacctggaccgggatcatcactccccaggatacggtagaggaaatgcagacatcattcagggccccttctgatgatgattatgatggtgttgacgtcacatatattaatccggttacctgggcggaggaaatcgttcagtgtcggacagctgataatcctgtgccacgcaaagtggagtcgtactcgctgggcattgtaatgactgcagatcgtgcttaccggataggtatgcgcaggctcatgaaatatctgcaccagcgcaggacctatgaatgcacaactgagcttcttggctggtgctatcagtttggcgatcacatcattctttctgatgatattccgacgggtaaaacaatcagctgtctgatagaaggcgtgacattcgatgatgaagttatcacgttaacagtcactgagcttcttgactggagctatgctaatccgcgctgctggattcagtttcagggggggcggccgtcgactcgtttgctaacgccgacacgtgtcgatgacttcacccttactataccgtacaacgacgacctgcacccggaagactggattatggatgatccggatgttgaattacctcgcctgttgttttgtgacagtgagaagggggcgcggcacggtatcgttcaggaaattgtcccgtctgatgactgtacttgccaggtcacagccccggaatataaagaaatcttttacgcatacgacgacgctacataccctggcgacgtagcttag

SEQ ID NO: 220789 - DNA, 1284 bp, Klebsiella pneumoniae
gtgagtcaccagggcgagtacgcgctgaaaaatatcaacgggttaggtttcactgagcggatcaccctcagttctccggggctggtggaagttcgctgccgtcggcgcaatgagcagggctcaaacaacgcgcgagacagtatgtactggcaggcactgcgagggcgactgctgacgcgcccttcatcctatcccggcgtgtcgctgatggcggtgaccgttgagacgggcgggaagctggcggcgcagtcggaccgccgcgtaaatgttgtggcaacgcgtttctatgactcaggaacggccagaaccatttcgggggcgctgctgcatgtcgggagctcgctgggtctggagatggacgtcgataccatcaacgcgctggagtccgcgtactggacgccacggggcgaaaatttcgatttcgccaccggcgacagtatctcggcgctggaaatgctgcagatgatagccaatgccgggaaatcccgcttcgtgttaagcgatggcctggcgacggtcaaccgcgaggggattaagccctggacggggatcataacgccgcatgagatggtggaggagctgcagagcggatttaccgtgccgtccgacgatgattttgatggtgtcgacgtgacgtacatcaacggcgtcacctgggcggaggagactgttaaatgccggacacccgataatcccacaccggtgaaaatcgagaactacaaactcgatggggtactttctcaggatcacgcctaccagatcggcatgcgccgcctgatgaaatacctgcagcagcgggtgacgttccagaccaccaccgagctggacgcgctgtgctacaacacaggcgatcgcattgtgctcacggatgatattccggggaacaacacgatttcctgtctggtggaggcgatgacaacggcaggtggcatgacaaccttcaccgtcacggagcctctggactggtctttcgaaaacccccgtgcgctgatccgctatcaggatggctctgcatccggtctgatggtggcgagcagagtgggggattatcagttgtccgttccccatctgagtgattttgatgacccattgaagattgaccagacttcaccagccattgagccagtccgcctggtgttctgcggctcaacgcgtcatgtctatgacgccattgttgaggagattgccccacaatcagacgggacgtgtcaggttaccgccaaagagtaccgcgcatccttctacgactacgacaacgccagttatcccggcgacattgcataa

SEQ ID NO: 220790 - DNA, 822 bp, Klebsiella pneumoniae; identical to SEQ ID NO: 102409

SEQ ID NO: 220791 - DNA, 1254 bp, Klebsiella pneumoniae
atggaagaacagaacaaatctgttgagacggaaattactcaggaaattgaagttgaaacaccaaaagaacacagtgatgaagaactgttagccattatcgctaatcgtccagaactactaaataaactcacaactgtagaagaaacagtaaatagtaatgaattaaccgaagcagaattagaacgccaacgcgaattaacttccatcggtaaagtactaaatattgatgtgtcggaagccattggtaaaggaattaccgtctccgaatttaaacgtcatttaaatgataacaaaaatcctgttcatgataaggaaatcaaaacaatggaaaaaaatctaattaaggatatggtgcgtgctatcaaaactggtgataaatcagcacttgaagcatatgaacgtggcctaaatggttttgtacgtgccgtagtaccttcaaccaataccagtactgctacgggtctggtcgtcgaagatctacaggatcagtacattccagaactactaaaactatcctcactcggtgaacttaacccgactgtgtacagtggccttgctggtcgtggcaatcttgcgatccctaaagctgatggtgtcgcaccagtattcaaattctatgcagaaggtgaaaccgttgtcgattctatcgcttccttctcaaaagtcgtacttacaccaaaaacatttgctggtgctatccctgtcagtaagacggcgatcctaacggctccaaacattgagacattcgtacaggcagagttactccgctatgccgctcagggtcttgaacaatccgtattcgataagattgctgcggctgctccagttgttgaatctgctgatgctggtgtattaacccaggctgatgtacagggtgctgtagctcaattgggttctgctaatgttgacgttcgtcgttgcaaggctgtgatgaacagtaaaatgctatccaaaatgcgtcagactaaggtactcgataatactgctgctgtagcaatggttgagggattccgtgcagatgcaatgtggctaaatgacgaagtacaggtagtcgtttctgaatttattgaagacgatactattttgattggtcagtttgataatgtcattatcgctaattgggaaggtcaggaagttgattttgacgatactacttatcgttcttctgcaacaattgtataccgcgtttgggattttacagatgtagcaattgcccatgctgatgcattcgtacagctaactatcaaggcataa

SEQ ID NO: 220792 - DNA, 570 bp, Klebsiella pneumoniae
gtgattgattccaccgggctgaaggtctttggtgaaggcgaatggaaagtcaaaaagcatggccaggaacgccgtcgtatatggcgaaagttgcatctggcagttgacagcaacacacatgaaatcatctgtgcagacctgtcgctgaacaatgtgacggactcagaagccttcccgggtcttatccggcagactcacagaaaaatcagggcagccgcggcagacggcgcttacgacacccggctctgtcacgatgaactgcggcgtaagaaaatcagcgcccttatcccgccccgagaaggtgcgggttactggcccggtaaatatgcagaccgtaaccgtgcagtggctaatcagcaaatgaccgggagtaatgcgcggtggaaatggacaacagattacaaccgtcgctcgatagcggaaacggcgatgtaccgggtaaaacagctgttcgggggttcactgacgctgcgtgactacgatggtcaggttgcggaggctatggccctggtacgagcgctgaacaaaatgacgaaagcatgtatgcctgaaagcgtgcgtattgcctga

SEQ ID NO: 220793 - DNA, 1200 bp, Klebsiella pneumoniae
gtgatcaccaacccgcagaccaccgccgcctcgccggatatggccattccgttcggcctcaagttcagcggctatgcccgctatggcgctcacttccagaccggcgaccagaaatatgtcggcgtcgacggctcctataacggcgcctcggcgatcggccgtctgggcaacgaaagcaacggcggcgaattccagatcagcaaggccttcaaaagcgcgcagggggctatctgggatcttaacgtgatgttcgaccactggagcgacgaagttaacctgaagaaggcctacgtcggggtcaccaacgtgctggaatccaaccccaacgcctatatctgggccggccgcgacttccaccagcgtccgcaacaggggatcaacgactacttctggatgaaccacgacggccagggcgccggggtaaagaactttgatatcggcggcgtgcagttcgacgtggcggcggtctcgcaggtgaaatcctgcagcccggaagtgatggccgacgagaccaacccgtcgcgcatcacctgtaccggcagctccgacaccggcgacaacggccactacgcgctgaccaccaaaacccacaacatcaaggccgggccgatcgacgtcgaggtgtacgccaactacggctttgactcaaaggcggtggacagcgacgcgcgtctcgaagcctggcagggcggcctggtgctgagccacaccaacgacagcggggtgaacaaggtgatcctgcgctactccgacaactcggataacagcgtctacaacaaaaccgacgacctgaccacggtctacgccagcttcgagggcagccataagttcacccagcaggcgcaggtggaatatctgctggccttccacgactacgacaacggcaaagataataccgacaaccgcaaaaactacggcgccatcgtccggccgatgtacttctggaacgacgtgcactccacctggctggaagcgggctaccagcgcgtggattacgaccagggtggggataaccacggctggaagctgacgctgtcgcagaacatcgccatcggcatggggccggagttccgtccgatgctgcgcttctacgtgaccggcggccaggtggacaacgagcacaccgcgaaggtaaacggcacccaggaccagcagctggattcgctgaacgtcggcgggatgtttgaggcgtggttctga

SEQ ID NO: 220794 - DNA, 1128 bp, Klebsiella pneumoniae
atgtctatgaatactattaaatatcacattgcttattctgatttaaagtccttttttggtaataacccactatttatattccctacaaatacatttggcgggcatgaagtaatgaccattggtattattgagtctttacttataagtggatgtaatgtaactgttgctattgaacctaataatgtctcgctaaagaaaaaaatatcacaatatgacaagttaaataattttattttacctataaaacaagggcgatttgagtttttacacgcactgtttaatatatttaagatatataaagcaaatcgttttttaaaaaaaataagtcaagatggctatagttcaataataattgttcaaggagatattgaattaggttcaatatatgtaaatgccgcccatacgttaaatttgccttttatttcttatattccatatgcccacacagctaagaaaatgggcaagaaactttctttcttaagagacttatattatccatttatttataggcgtataaaagaatacttaacaataagtgacatttttaaagatgaaattaaagctttttccccatcgagcaatatctatgttttaaaaaataaagtaagagatgtttctgcttttcatgaacgaaggaaattgcacaattctaaagataataagaaattataccacattgctgttattggacgagtgaattttaaacaaaaaggccacgatatattacttgaagcaataaatcgtttatcaaacgaatctcgtaaatacattattgtagatattgtcggcactggtcctgatttaaagagattacaaagtttagtgtcatcaagtgatttagaaaaacattttatattccatggctggcaaacagaaccttgggaaaaagtttatctggatgatgcattaattattccttctcgttttgaaggtgtaccattggttatgttagaggggataagtattggcatggatattcttgcatctaacgccgatggtatgcgtgactatctccctgaaaacgttctgtttaacgactcaaaagaattatctattttgcttgagaaaaaaatcaatcaaaaacttctaaaattgaaaatcgctaaagggggaaataataatgaataa

SEQ ID NO: 220795 - DNA, 1005 bp, Klebsiella pneumoniae
atggaaaacattgcgctcattggtatcgatctgggtaaaaactctttccatattcattgccaggatcgtcgcgggaaggctgtttaccgtaaaaaatttacccggccaaagttgatcgaatttttggcgacatgccccgctacaaccatcgcaatggaagcctgtggcggttctcactttatggcacgcaagttggaagagttggggcattccccaaagctgatatcaccacaatttgtccgcccgttcgttaaaagcaataaaaacgactttgtcgacgccgaagctatttgtgaagctgcatcgcgtccgtctatgcgttttgtgcagcccagaacggaatctcagcaggcaatgcgggctctgcatcgtgtccgtgaatccctggttcaggataaggtaaaaacaaccaatcaaatgcatgcttttctgctggaatttggcattagcgttccccgaggagctgccgttattagccgactgagtaccattcttgaggataatagtttgcctctttacctcagccagttattgctgaaattacaacagcattatcactatcttgttgagcagattaaagatttggaatcccagttgaaacgaaagttggacgaagatgaggttggacagcgcttgctgagcattccctgcgtcggaacactgacagcgagtactatttcaactgagattggcgacgggaagcagtacgccagcagccgtgactttgcggcggcaacagggcttgtacctcggcagtacagcacgggaggtaggacgacattgctgggaattagtaagcgaggtaataaaaagatccgaactttgttggttcaatgtgccagggtattcatacaaaaactggaacaccagtctggcaaattggccgattgggtcagggatttactgtgccggaaaagcaactttgtcgtcacctgtgctctggcaaacaagctggccagaatagcctgggccctaacggcacgacagcaaacttatgtagcataa

SEQ ID NO: 220796 - DNA, 483 bp, Klebsiella pneumoniae
atgttcggccttgaaggtttctattgcgacgggatcattaatatcgacgttctggaacgctttcagggtggcaaattcgtcgtagttttgcaggatgttttctgcccgcaggtattcaccaaacagcttcacaaacgcttttttctctttttcactgtcaatggcggttggatcggggaaacgttgttccagttctgccaccacatccataaagccacgcttcgtttcacctgttacgatatccttaaaaccttccatgtactctttgtagctcttttccagtaccatgtttttggtgttcttatcaccaaacagagtgatggcgtcaatggtgacctgttcgagattacggaaggtcacgatattgccaaaggttttggtggcatcatagatacggttagtgcgcgaaaatgcctgcatcagtccgtgatagcgcaggtttttatcaacaaacagggtgttcagggtcggggcgtcaggtga

SEQ ID NO: 220797 - DNA, 285 bp, Klebsiella pneumoniae
gtgtacaacgatattcgtgactggcaacgccgtgaaaaaatggtcgcagaaaaggacaaatcaaccaccagttgggaagatgtggtatttgagatcgatttactgaaaacccaggaaatcaatctggactatatccttggcctgatattcgagcacaacagaaagaataaggacaaagccaccctgaccggggaagtcagacgcctgatccgttcaagcctaggcaaccgtgcgaaagaaggtctggtggttgactttattcaacagacaaaccggctttgttga

SEQ ID NO: 220798 - DNA, 525 bp, Klebsiella pneumoniae
atggaaacgaacaaaataaaacttacgaggatattacagaaagtactaccgacaatacaaccgccgaaaatccagaatacgagtgaatggattagtaaaggcgtagtgaaatttgttgatggcccgaatatggggcttgactggattccatttagttttcaaaaagaaccaatggatattgcccaactgagaagtactaagaagattgtacttcagtcatgcagccaacttttgaaaactaccgtcctgcaatcaattgcatttggtgcgatggcgaatgatccctgtaacttcgcatttggtagcagttctgaatccgaagtgaaaaagtttaaagatggtaaatttcttcctgcaattgaaaccagtgaggtactcaagcctttagtcacagataaaaatgataagaatgcagcaaacaatgcgaaacagacgcaattagttaacggtacttttatatattggctgaatttaaacacgccgggtaatctacgcgggattacttgccgtatggtgttactttga

SEQ ID NO: 220799 - DNA, 792 bp, Klebsiella pneumoniae
atgcgtgacacttcgttatttacattatttattttatcactaggtttttataaaaatattaaatttgataaagagttttcaataatctttattagtcaaatttttatactcttctatacattgtttactagtgttctagtttcaaatcatagcgtttatgtgcgaagtaataatgtcgtattgtatcaagagtatggcgctggtgttggtgtatggatgaaaatgctgacatttataatgttaacatatgcaacttattgtattgcaaaagttattaaagtatcatttttatataaaaccatgaaatggtttgtaattgctgcttttttatattctattattaccataattatatatacagtattcccacaaattgctattaagctatcgcattggggagggcgtctttccttaggttatcctacggaagatgtatgtttcttggcattatcgcttgtatttatatattatataaacatgccttccatttataaaattattatagttttatccaatacgttagccttattttttcaaaatacattaactggatttttactttttgcctttgtattatttttttattttttaaaggggggggtgcgtttaaaatttattgtcattgttattcttgtttgtatatttgttggtgctggtgttgtttataataatagtgagcaattttctgatttcggaatgctgttgcataataagatagattctatattatatttcagttcgtccgagaatgatccttccttttatttaagaatgcagcaaaacccaaaatag

SEQ ID NO: 220800 - DNA, 243 bp, Klebsiella pneumoniae
atgacaagacaatacgtgaaaaaaatcaattacccatgccagacagcggcaatctttcaggatgtcatttacgtcatgcgtcctgccagcgcatctgaattacttgcagaagcagataaggctagtgagttctatttgaattatttcccattcgcgacgctggaggatatcagggaaggcattctgtatagcttcggtggactctatctgaatgatttccagcttatccgggaggccgcatga

SEQ ID NO: 220801 - DNA, 165 bp, Klebsiella pneumoniae
atgaaaatactcatcgtcatgttggtagcactgctcacaggttgtagtagtgtacatcactcattcatggataacgccttagtcggcaatgttgataacaaggctgtagtcgtactgtttgacgctggcacacgtaacggggtgaatgaagattgcggcatttga

SEQ ID NO: 220802 - DNA, 231 bp, Klebsiella pneumoniae
atgccttatctacaactgctgagttacccagctaccattttcagcgaaaaataccgtcgcatcggctccattgaccagggatatttgaggaggtatgtggccaatatcaacatcatacagtacgggcacggcaatattctcaaaagcggctttaagggcatccagataattatgtttagtcgggtcgcttacgtcgggtgcagcacttctgccgataagaacaccatttaa

SEQ ID NO: 220803 - DNA, 903 bp, Klebsiella pneumoniae
gtgcattcaaacatgattgaataccttaatattttcgtacaggttgttgagcagggcagctttacaagggccgctgacattctgcagattcatcgtcccaccgtgagcaaagcgatacagcagatagaggacgacctcggcgtaaaactcatccatcgcactacccgtaagttgagcgttacggctgaaggggaggcgttttatcatcgtgccaggcttgtattgtctgaagttaatgacatgatggcgagcttttcacctacccttccacctcgggggcggctcaggattgatgtcccgctggcgctggctcacgccatactgatccctaatctcaaacatttccagtcactgtatcctgacattgatgtcatattggtttcatcggacaaaaaaaccgatctcattagtgaaggtgtggactgtcttgtccgcctgggtgagcttcaggattcgagttttatttccagacgtcttggtgacatcaggatggtcacctgtgcagccccgtcttacttgcaacaatatggacgaccggaaacacttgcggatctggatcagcatcgggcaataaactttttcagcgaccacagtcgtgatgtgatggaatggaaatttactaaggacgggaagattgtttcgttgcgtcccgtaggcagcatgctggttgataattcagatattctgctctcctgtggactggcgggcctcggcataatccaggccacctttaacgcccttgctccacatattgcttccggcgctcttgaagagattctgacgcaatacccttctgtgtctaagcctgtgtcggtgctgtatccggacaggcactacctttcgcccaaagtacgggtctttatcgactggttcagtgaagttctgaccatgcagaaccgctga

SEQ ID NO: 220804 - DNA, 993 bp, Klebsiella pneumoniae
atgtctaaagttgttacctttaaccgcaccggtggtccggaagttttggaaattgtcgatatggaggtgcccgcaccagcagcgggtgaagttcagattcgcgtgcaggctatcggtcttaatcgtgcagaaatcatgtaccgcaacggccaatatgttattgagccggaatttccggcacgtcttggttatgaagcggctggcgttgtgcaggccgtaggtgagaatgttgaggcgtttaccactggcgatctggtcagcgtaatcccttcgtttatgtttaatgaatacggcatgtacggcgaactggtcaatgcacctgtgcacgctgttgtgaagcatcctgaaaatctttcctttgaggaagccgctgcaagttggatgatgtatgtcactgcatatggcgcgctggttgaatatggcaaccttcaggctgggcagaatgttgtgatccgcgcagcatcaagcagcgtaggactggctgccatacagattgctaacatgctgggtgctaaacccattgcgcttacccgaactgccgaaaaaagagacatgcttcttaaagcgggtgccgccactgttatcgctagcgctgagcaggatatggttgcggaaatcaatcatgcgacagatggcatgggcgcccatattgtttttgatcctgtcggtgggccggacgtggcaaaactgacccaggtgatggcaccgcaagggatgttcttccagtacggcgcgctagacagccgcgaccttcttgtgcctgtctttgatattctcggtaagcatctcacgctgcgtggatatgagctgtttgaaattacgacggaccctgaaaaaatggcacgcgcaaaatccttcgtcaccgaagggttacgttccggcaaactgaaacctgtcattgataaaacatttccgcttgaggatattgcggatgcacagcgctatatggaagcaaatggacaggttggcaaagtcgttgtagtggttgagtaa

SEQ ID NO: 220805 - DNA, 1383 bp, Klebsiella pneumoniae
atggcagaaacaacgtttaccctgtggcggcagcgccttggctatggcattgccgatctctcctgcaaccttgtgtggcagatgatctctctgtatctgatgttcttttacaccgacgtcatgggtctcccggcctattatgtcggcctgatgttcctggtcacccggctggtagacggcgtggccgacgtgctgatggggctggtgatcgacaataccaccacccgctgggggcgctgccgcccctggctgctgatcggcgccctgccttttggcctgctgtgtattctggccttttatgtgccggatttcggcaccaccggcaaactgctgtacgcctttgtcacctatctgtgtctgtcgttcctctacaccctggtgaatattccgttctgcgccatgctgccgtttttaaccagtgattccgcagaacgcaccacgctgtcggcggtgcgcattttgctgggctcccttggcgccaccatcgtcgccgtggctacgctgccgctggtcggcatgctaggcaaaggcaaccagcagcagggattcctctataccgcggtgatttttggcgtactggcggcctttttcctgctggtgagctttcgcaacgtcgaagaaaagatcacccttaccggggagcgcatgaccctgaaacgcgcctggattagtctgcgcgccaatcgtccgtggtgggtcttcgccagcaatatctttctgatgtggggtgcctttttctttcagaccggggccctggtgtacttcttccattattacgtcgggaataccgagctgacggcggttatcgccgggatctccaccttcgttcccctgctcggcaccctcaccgtcccgctgctggcccgacgcatgaaaaaacgtcatgtctatcttgtggccagcgcggtcaatttgctcgggatggggattatgatggtgtctggcgcccacgttctgggactgatcgtcggggccgtgatcctctccctcggcgccggccaacgcacggctatctatttctcgatgcaggccgacccggtggattacggcgtgtggaaaaccgggattaataccgcagggatcctgacctcgataaacggttttctcggcaaggtggcgatggctggtgccggggctatcaccggcgtgctgctctcctccagcggctatatcgccaaccacacgcagagcgacagcgccctgttggccatcaaggcctgctatctatacattccggcgctattgatcctcgcctcgatgctgtggatgggccgcttctaccgcctcgacgatcagtatgagcagattcgtgccgaccttgatgccggacgcggcgcctcgccagccccggccccgaccgccggagaatcccccgccatgtaa

SEQ ID NO: 220806 - DNA, 702 bp, Klebsiella pneumoniae
atgcgcacgctgacccctatcaccctgcaggaggtctctttcgccttcacagagacccctattcttgaccgcttcacgttgcatatcgaacccggccgcatcgtggcgctactgggcccttccggctgcggcaaaagcacgctgctgcgtctgctggccgggctgagcgtgccggccagcggcgaaatccgctttggcgacaggctggtcgcccgcgcaggatggggattgcccccggagcagcgcgatatcggcatggtttttcaggattatgccctctggccgcatatgagcgtggcgcagaacgtcgcctttccgctgcgcatgcgcggcgtctcccgcagcgaacgcgagcgccgggtcagcgaggcgctggcgcgggtaggcctcaacggctttgccgaacgtaagccttcaggcctctccggcggtcagcagcagcgggtggcgctggcgcgggcgatcgtcgccgcgccgcgggtgctgctgtttgatgaaccgctctccaacctggacagcgaactacgcgaatcgctgtgtggcgaaatgagccgcctgctgcgacagctcggcatcaccgccctgtatgtcacccatgaccgacgtgaagccgagctgttagccgaccagattgtctatttatccgcgggccgcgtggccgctgtccgcgccgttacgccaacctcaggggaagttgcatga

SEQ ID NO: 220807 - DNA, 678 bp, Klebsiella pneumoniae
atgaaatgggactggattttctttgatgccgatgaaacgctgtttacgtttgattctttcagcggcttgcagcggatgtttctcgactacagcgtgacctttaccgccgaagattttcaggactatcaggccgtgaacaagccgctatgggtggattaccaaaacggcgccatcacctcgctgcagctgcagcaccagcgttttgacagctgggcggaacgtttgaatgtgccgcccggggaactcaacgacgcgtttatgaatgcgatggcggaaatctgtgctccgttgccgggcgcggtctcgctgctcaacgcgctgcagggcaaggtcagaatgggcatcatcaccaacggctttacctcgctgcagcagactcgtctggagcggacaggtttacgcgatcactttgatttgctgattatttctgaacaggtgggtgtcgccaagccggacgcgcgtattttcgattatgcgctggcgcaggcgggtaacccaccgcgctcgcgggtgctgatggtcggcgataccgccgagtcggatattcgcggcggcgtgaacgccggactggcgacctgctggctcaatgcgcatcagcgcgagctgccggcggacctcgagccggactggacggtgacctcgttaagcgaactggagcagctcctgtgtaaacactga

SEQ ID NO: 220808 - DNA, 1047 bp, Klebsiella pneumoniae
atgactgcacaaacctggcgagcacactacgcacaaaaatatcaatattccttacggctttttttactgcttaatttcatttcttcctcgctgtcgctggtcacccccctatttacggtagttcgttttacgctgccctgcgccctgatcgtcgtctgcagcgggctgctgctgctctggcactggaaatggccgcaatcgaaaataaatattcccactatctcgttgttatttggcatgctatgggcatggcacgtagtgacaaaagcgatgctattgacaccgccgcattttaactatctggtgatcgccctattaagcattctgtttatcggcaccatcgctttttccaataatatcactgcctttaccctccactctttaccaactttccttgcctgcctgataatggcggagggggaacaatggttgcgtatgacttactgctttatgctgcctatagccggtattaccctgcaaaatattatccagaagcgcagcgatgcctttacgcagggtttaatggataaactgatgcatgaacgcaatacgctcaacgatctcagtatgctcgatcccctgaccggtttgtataatcgccgcggactgcagaaccgcctcgataccctgctggcgctggacggcgacaaccactacgtgctgctcctcgatatcgatcacttcaaggcctataacgatcactatggtcatatgatgggtgaccaggcgcttattcgcgtctctgctgccattcgcaacgctgtacgctcacgcgatattgtcgcccgctttggtggagaggagtttatggtgctgctgaccaatagcagcgaagaaacggcctggcagacagccgaacgtatacgtcagcgggtctatgacctgaagatcccgcatatgtttaatgaaagcgtcgccaccaacgtcaccatcagtattggcctgacgccgctcattaatgacaacattgaacaagcgctggcgcgcgccgacggcgcactctatgaggccaaaaataaaggccgcaacattattcttgccagttga

SEQ ID NO: 220809 - DNA, 399 bp, Klebsiella pneumoniae
atgtcgttctgtcatatgcgcattgccaggccggtcagcgaactggacaccaccgccagcatgtattgcgccgggctgggactcgagctgctcggcagctttaccgatcatgaaggattcagcgggataatgctcggcgcgcccgaagcgggctggcatctggaattcacccactgccgccaccctcccgtcaccccctcgccaggcgatgaagatctgctggtgctgtactatccacagcaggcggcatgggaggcacagtgcgcagccatggacgccgccggatttctgcgcgttacggcgtttaacccttactgggaggtcaatggcgtcactttcgtcgaccgggacggctaccgcacggtattgcaaaaccgcgcctgggcgcatggtgtgtga

SEQ ID NO: 220810 - DNA, 1188 bp, Klebsiella pneumoniae
atgagcacttccgtcagcactacacaactcaatttgcgcattatttcgatcgttgtttttacctgtatctgctatctctccattggtctgccgctggccgtgctgccgggctatattcactatcagctgggctacagcacctttgtcgccggaattgtgatcagtctgcagtacatatcgacgctgataagccggccgcacgccgggcgctacaccgatatctgggggccgaaaaaagtggtcagccttgggatcgtctgctgcctgctcagtggcgccttcacgctactggcggtagtcctgcaggcaacgccgatgctggccattgccgcgctgctggcgggccgggtgtttctcggcgtcggcgagagctttaccgccaccggcgccaccctgtgggggatcaaaaccgtcggcgcgatccacacgtcacgggttatctcctggaacggcgtggcgacctatgtggcgatggcggtcggggcgccgctgggagttaccctcaatcactattttggcatcagcggctttgctacggtggtagtgctggtcgcggccatcggtctgctgttcgctcgtacccgccaggacgtcaaggtgaccgccggcgccagagcgccctttcacgcggtggtgcgaaaaatctggccttacggcctggggctggcctttggcaccgtcggtttcggcgttatcgccacctttatcaccctctacttcgccgcgcacagctggcagggcgccgcgtttaccctttcgctgttcagcgtcggctttatctgcgttcgcctggtgctgggaaataccattacccgctttggcggagtcccggtctccctggcctgcttcatcatcgaaagtctcggcctgcttcttatctggctggcgccatcagcatggatggccggcgtcggcgcctttctcaccggttcgggtttctcgctggtctttccggctttaggagttgaggcggtaaaacaggtggaagagcaaaatcagggaaccgccctcggcacctactcggcgtttcttgatctggcgctgggcctgaccgggccgctggccggctgggtcgccgggttctacgatctcgccacgctgtatctgctggcggcgatcgtggtggcgctcgcattcctgctgattttccgcgtacatcggcaacagcggcttgtcgccagagagtag

SEQ ID NO: 220811 - DNA, 291 bp, Klebsiella pneumoniae
atgcaccaaagttttaatcagcgcgttcatttctattactgcgtcctggtcgcgctgaagatgcacggaaaatcgaaaaaagcgggtggtatcaggggaaagaataactttctgctgaaatggctgcgccgggcgcaggataacaacatttttcctcccgatatcaccagtgaaatcgaatggctgcgaggaaaaattattcaggctggttatgacaccgatctcgagccgatgttggattttgtctacgccacagccagccgcgccgaggcgctcaaaaacgccgaatag

SEQ ID NO: 220812 - DNA, 762 bp, Klebsiella pneumoniae
atggccgactggaatccttcgttgtatctgcaatttgacgctgaacgtacccgccccgcggccgacctgctctcgcgtattgcccatctgcaggtcgagcacgccgtcgacctcggctgcgggccgggaaacagcacccgcctgctacgcgccgcctggccgttggcgacgatcgtcggtatcgataactccccggccatgctggtccaggcggcgcaggccttacccgactgcgaattcattgatgccgatattgcccgctggcggcctgcgcaaccgccagatgtgatctatgccaacgcctctctgcagtggctgacggatcatgagacgcttttcccccatctggtaaaccagctggcggacaacggaacgctggcagtgcagatgccggataactggcaggaaccttcccataccctgatgcgtcaggttgccagcgagatggggttgccggaccgtggacgccagccgttactcccgcccgccgcctggtacgatctgctcagccgccagggttgcgaagttgatatctggcgcaccacctattttcatccccttgcttctcatcaggcgattgtcgactggctgcagggcaccgggttacgcccctatctggcaggcctggacgagcaggccggaagcgcgtttctcacacgctatctcgcattgctagccgcacactatccgttacagtgtaacgggaaggtgctcctgcgtttcccacggctgtttatcgtggcgcgaaagatcgccgcctga

SEQ ID NO: 220813 - DNA, 321 bp, Klebsiella pneumoniae
atgagtactcctcctgtcgatcgccgaacgctggctgctatcgcgccaaagctagccgagctgaccgaaacggtgctgtttggcgatatctgggcgcggagcgagctgtcgccccgcgaacgcagcctgatcaccctttccgccctgacggcgcagggcaaaactgaacagctgccgtggcacatcgcgttcggctatcagaatggcctgagccgggaagaaattgtcgaattgtttacccatctggcgttctatgccggttggccggcggcggccagcgccctgacctgcctgaatgcgcaggaggcgtcatgcccctga

SEQ ID NO: 220814 - DNA, 447 bp, Klebsiella pneumoniae; identical to SEQ ID NO: 212250

SEQ ID NO: 220815 - DNA, 1452 bp, Klebsiella pneumoniae
gtgaaaactttaaaccgtcgtgatttccccggcgcgcagtaccctgaccgtatcatccagtttggggaaggtaacttcctgcgcgcattcgttgactggcagatcgacctgctcaacgagcataccgacctgaatgcgggcatcgtggtcgtgcggcctatcgccacagattttccgccttcgctgaacacccaggatggcctgtacacgactattattcgcggcctgaacgagcagggcgaagcggtcagcgatgcgcgtcttatccgctcggtcaaccgggagatcagcgcttacgcagacttcgacgcttttttacgcctggcgcataacccggagatgcggtttgtcttctccaacaccaccgaggcgggcatcagctaccatgccggggatcggtttgacgacgcgccgccggtcagttatccggcgaaactgacccgtctgttgtttgagcgttaccagcatttcgccggtgcggccgacaagggatgggtgattattccctgcgagctgatcgattataacggcgaggcgctgcaggcgctggtgctgcgctatgctagcgaatgggaactgccgcaggcatttatcacctggctgacctcagcgaataccttctgttcgacgctggtggatcgcattgtgaccggctatccgcgtgatgaagtggcggctctcgaggcgcagaccggctataaagatgctttccttgataccgctgagcatttctacctgttcgttatccagggacctgcctcgctggaggccgagctgcgtctcgataaactgccgctgaatgtgcgcattgtggacgatattaagccgtataaagaacgcaaagtggcgatccttaacggggcgcacaccgcgctggtgccggtggccttccaggccgggatcgacaccgtgggtgaggcgatgaacgacgcggagatttgcgcgtttgtcgaaaaggcgatttatgacgagattattccggtgctggatctgccgcgcgatgagctggtgtcattcgccagcgccgtgacagggcgcttccgtaatccctatattaaacatcagctgctctcgattgcgctcaacggcatgaccaagtaccgcacccgtattctgccgcagctgctggcggggcagaaagcgcatggcgcgctgccgccgcgtctgacctttgccctggcggcgctgatcgccttttaccggggagagcgggatggtgagagctatccagtacaggatgacgccgactggatatcgcgctatcaaacgctgtgggcccgccatcgcaatggccagatgagcactcgcgagctggtcaccgccgtgctcagcgtggcggatcactggcagcaggatctgagccagatcccggggctggtggagctggtgactgccgaccttgacgctatcctgacctgcggtatgcgcgacgccgtcaaacctctttgctga

SEQ ID NO: 220816 - DNA, 531 bp, Klebsiella pneumoniae
atgaccacatccttttcactgcgcacgctctcgcgtgacgatattctccatcacctcccggcattaagcgagatcctggcaagctgcgtcaacggcggcgcctcggtgagctttatgctgcctttcgcgccgcaaacggcgataacgttctggcaacgcactgccgacagcgtggcggccggggagcgcattgtgctggccgccttcgacgcggaagaacgtcccgttggcaccgtgcaacttatcaccagtcaaccggaaaaccagccccatcgagcggatgtcgccaaattattggttcaccaaaatgtccgccgccaggggatcgcccaggcgttgatgagcgagctggagcgcattgcccggcgggaaaggaagacggtgctggtgctggacacggcgaccggtagcggggcggaacagttctatgcccgctgcggctgggaaaaagtgggggaaattccgcgctatgcgctgatgcccgacggcgaaatgactgccacctcactattctataagtttctgccctga

SEQ ID NO: 220817 - DNA, 1425 bp, Klebsiella pneumoniae
atgtcttcactgtcgattcggtcatttacgctgtttcgtgaagaacaacccgtgcgcgatgcattggtcttatttacgttaacgctactgctgcattttcttggcgctatgctgcgtctggtgcaggagctctctttcttctggccgctcaatgcagtgatggccgggatttttgcacgctatgtatggcttaaccgcagctatttttatgccgtctgttttgcggcaatgctggtctatgacggattaacctcgcgctggggtatgggctttgcctcattgctgattaacttttccaatattgtctttattgtgacgctggcgcagctggtgctgtgggataaacgtcgcgccgactccatgccgggcccgataaacgcgcttaatttattctgtttctgcctgttagccgccttactgtgcgcagcggtcggcgcgctggggtcggtggatgttgaacgcgccaccttcgttccccagctggcggactggtttagcgaacagttctcgacggcggtattaatcctgccctttattctgaccctgacgctgccttcggcattaagcggttttcgctttcgccagctgctgccggtgctggcgctggtcctgtcaattgcgcttggcgtggcggtaggcggcgcgggcagcattaccttcccgttaccagctttgatctggtgcgctgtacgctatccgctgccgctgacctgtctgctgacttttctcactggcatcggcgaaatactgctggtcgctaattcgttaattcacttttcgccagatgcgcgaatgcagccgtggcagctgttctccacccgcctcggaattgccgccatgctgattagcccggtgattgtcgcatccagtgtcgaagcgattaacacgctggtgaagcagctggccctgcgcgccgattttgactttcagacccgcgtctattcccgttccggactgagcgaagcgttgaagcgtcagacgctgccggcggataagctgctgacggtgatggtgctggatatcgatggcttcaaacgggtgaatgatgctctgggccatgaaggcggcgattgcgtgctgacccagtttgcccagcaggttcgacagctggtgggtgagcaggggatggtggcccgtatcggcggcgaagagtttgcggtggccgccgtcgtcgacagcgcccagcagggctatttgctggcggaaaagatccgtcacggggtggagtcgcagcctttcggcctgggccagaacccgatccacctgaccatcagtctgggactggagacgcgcgaggtaggccacgcccgcatcaccgagctgtttaaccagctgctgttggcggcggacgatgagatggtgaaagccaaacagagcggtcgtaaccaaatttgtatgccgacgctgaccgaaagcgcgccataa

SEQ ID NO: 220818 - DNA, 2706 bp, Klebsiella pneumoniae
atgttgattccgtccaaattaagtcgtccggtccgccttgaacacactgtggttcgtgagcgcttactggcgaaactttccggcgcgaacaattatcgtctcgtgctgatcaccagtcctgccgggtacggtaaaacaacgctcatttctcagtgggccgcgggtaaaaacgatcttgggtggttttcgctggacgaaggcgacaaccagcaggagcgttttgccagctatctgatcgcggcgattcagcaggctaccggcaaccactgcgcggccagtgaagcgatggtgcaaaaacgccagtacgccagtctctcctctctttttgcgcagctgtttattgaacttgccgactggcagcgcccgctgtatctcgtcattgatgattaccatctgatcaataatccggtgatccatgacgcgatgcgctttttcctgcgccatcagccggagaatatgaccctggtggtcctgtcgcgtaacctgccgcagctgggcattgccaatctgcgcgtccgcgatcagcttctggagattggcagtcagcagctggcctttacccaccaggaggcgaaacaatttttcgactgtcgtctgacatcgcctatcgaagccgacgacagtagccggctgtgcgacgatgtcgccgggtgggccaccgcgctacaactcatcgccctctccgcccgccagaataactcctccgcccaacactccgcccgccgcctcgccgggattaacgccagccatctgtcggattatctggtggatgaagtgctggataacgttgacgcccgcacgcgcaactttttgctgaagagttctctgctgcgctcaatgaacgacgcgttaatcgtgcgcgtcaccggcgaagagaatggccagatgcagctggaggagatcgaacgccaggggctgttcctgcagcggatggatgattccggcgaatggttccgctatcacccgctgtttggcagcttcctgcgccagcgctgtcagtgggagctggcggttgaactaccggagatccaccgcgccgcggcggaaagctggatggcgcaaggtttccccagcgaggccatccaccatgcgctggcggccggcgatgccaaaatgctgcgcgatatcttgctcaatcatgcctggggcatgtttaaccatagcgagctggggctactggagcagtcgctggcggcgctgccatggtccaatctgctggaaaatccgcgcctgatcctgctccaggcctggctgatgcagagccagcatcgctacagcgaagtcaataccctgctggcgcgcgccgagcaggagatgagtgtggaaatggacaccgcgatgcatggcgacttcaacgcgctgcgcgcgcaggtggcgattaacgatggcgaccaggacgaggcggaacgtctgtcaatggtggccctggaagagctgccgctggccaactattacagccgcatcgtcgccacatcggtgcatggcgaagttctccattgtaaggggaagctgaccaaatccctcgccgtgatgcagcagaccgaacagatggcccgccgtcacgacgtatggcattacgccctgtggagcatcattcagcaaagcgaaatcctcttcgcccagggcttcctgcaggccgcctgggagagccaggagaaagccttccagctggtacgcgaacagcatcttgagcagttgccgatgcatgagttcctgctgcgcatccgttctcagctgctgtgggcatgggcgcgcctcgacgaggctgaagcttgcgcccgccaggggatggacgtgctctccacctatcagccgcagcagcagctgcagtgcctggcgctgatggtccagtgctcactggcgcgcggcgatctggataatgcccgcagccacctgaaccggctggaaaacctgctcggtaatggtcactatcacagcgactgggtctccaacgccgataaggtacgagtgatctactggcagatgaccggtgataaaaccgcggcggccaactggctgcgccagacgccaaagccggagttcgccaacaaccacttcctgcagagccagtggcgcaacattgcccgggcgcagatcctgctgggcgacttcgaaccggcggaaatggtgctggaagagctgaacgaaaatgcgcgttcgctgcgtttgatgagcgatctcaaccgcaacctgctgctgctcaatcagctgtactggcagtcgggacgcaagagcgaagcgcagaaagccctgctggaagccctgacgctcgccaaccgcaccggttttatcaaccactttgtgattgaaggcgaggcgatggcccagcagctgcgccagctgatccagttgaacacgttgccggagctggagcagcatcgcgcccagcgtattctgcgcgacatcaaccagcatcatcgccacaaattcgcccactttgacgaagggttcgtcgagcgactgctgaatcatccggaggtgccggagcttatccgcaccagcccgctgacccagcgcgagtggcaggtgcttggcttaatctattccggttacagcaacgagcagattgccggcgagcttgacgtggcggccaccaccatcaagacccacattcgcaacctgtatcagaaactgggcgtcgcccaccggcaggacgcggtacagcatgcccagcagttacttaagatgatgggatacggcgtctga

SEQ ID NO: 220819 - DNA, 876 bp, Klebsiella pneumoniae; identical to SEQ ID NO: 135349

SEQ ID NO: 220820 - DNA, 183 bp, Klebsiella pneumoniae; identical to SEQ ID NO: 135357

SEQ ID NO: 220821 - DNA, 1128 bp, Klebsiella pneumoniae
atggctgccagaccacgtaaaaataatatatctattccaaatttatacccgctctacagtagaaaggttaataaagtatactggcgttataagcacccgataactggtaagtttcatagtctaggaacagatgaagcagaggccacggcaatagctattgaagcaaataaaagactggctgaacaacaaacccgccagataatggcaattactgacagaatttccaccagctcaggaaaatcaatatcaactaacacctggcttgaacgttactggaagattcagcaggaaagattaaagtccggagatattaaagaaaacactatcaaacaaaaagcaaaaccagtatctctgcttaaggagcgggtaggaatgaaattaatatccgctgtcaatgttcgagatgttgcgcaaattcttgatgaatatttagcggagggacaacccagaatggctcaggtcattcgctctgtcctaatagatgtttttaaagaagctcagcatgcgggagaagtacctcctggttataaccctgcactagcaactaaacaacctcgtagaaagatcactcgccagcgcctcactcttgaggaatggcaaaagatttttgatatagccgatgaaaaccacaaatacatggggaacgccatgcttttagccatagtaacaggacagcgattaggtgatatatcccgtatgaaattctcggacatctgggacgatcatctacacgttgagcaagagaaaaccggaagcaaaatcgctataccattagctctgcgttgcaacgcaatcaactggagcctccgagatgtaatcagtcgttgccgggattatgcagtaagcccttatttggttcatttctttagaaccacctcacaggctgagcgaggagcacaggtgaaacccagaacactgaccatgaatttcagcaaggcaagagacagtgcagatattgactggggacaaggtacaccggcaactttccatgaacaaagatcgctttccgagcggttatataaagcccaaggtataaacacgaaagatttacttggacataaaactcaacaacaaacggataggtaccatgatgatcgtgggaaggggtggacaacggtggccttatga

SEQ ID NO: 220822 - DNA, 1392 bp, Klebsiella pneumoniae
atggtaaattatactgaagaatcagcttttattgaaaagtacaaaccgtttaggaaattttggacagttttttcacctcattttgtagctcgactgcattcacttgccaatatgataagggggggaaatccaactcaagaaccaccttctaataatgaggattttcttacagagtatgaagcttgcctcaaaaattggaaagacgcacagaaaattatatcgtctgaaattgtttttcggctgagagatataaaaaaattagaagttaaaaaaaacgagcatcatcgaaacaaggataaagcaaagaaagaaaagtgtattgatgaaataaatttaaaaaaaattgaagttcttattcttcgccgttgtgttgactcactaatttggagcattcttgatgaagaacactcgagtttgcggcgtttacctattaatgcagtcaatgacaatctatcagaagataacataattgattctatggtcgcagctgatcttatcaatcaggacaaacacgccatagcaattgtctctgatatgagtacatttgttcatgtgggggatttagtcacctttaatccactggatggcttccagcttgtggaagttaaaacaggtaaaaagaataatgagatttatgaagctgccgaattttctgttatctcaaagtgtccgcactttgaagaaaacttcaaaaacaatatgtctggcaatgatgttaagcaatttaaacgcataaaaaggcaagtcgtacgtggcatgaatgtgctggaggcgattaatactggagagggctttgacaacctccatcagtctaaagttaaaatcgatgaaatagatcttccgtctgaattctatacccaccgcttatttaaaatgtgggaggttattcgtggaggaaaaaattgggcaattgatactattgatgaatgtttgttcttagggatgtaccgtgattctggaatgggttttgttgccttcaatggatggatggatagtatcggtataaaaagccctgttgtgaatataaacgattcattctttgaccctttgtctcggccatttatgagtttgcatctgccaactgaaatgctctccgatatcatgtcagggaaaataatcatcgtaatgtgttttgacaatgaacttttttttcaccgtgccaacaaaatgtacccaagtttatttcttcttagcaatgcggaaagcacaaagcaaccgttagaaaatattcttcatgttggttcgcaagggatagcttcttacgtaaatgggcatgccagctttttaggtaatggtattgaatcccgaatcctttttgatcagcaacgacccgacaatattattgagtggagctatgctagaagcgatctcaaaaagcaatataaagcataa

SEQ ID NO: 220823 - DNA, 870 bp, Klebsiella pneumoniae
atgaggctttacataataggaaacggatttgacattcgacatggactaccgacaagatacaaacactttaagtcgtatgtagcaaaaaatgacaaagaactatatgacgcgatagaagaatacatacctgctggagacgagtggaatgagttagaaagtgctttaggtgaaattgattatgaacttatccttcaaaacagtgagatgtttttagttacgtacaataccgaagattggagcgatgcgtatcatcacgattaccagtatgaagtagataaaataacacggatgctgtcagctcgcttgaaggagcaattcgctgattgggttaaagggattaacatagccgatgcttacaattctgaacaatacatcccccccataccaagagaaagtctatatttttcatttaattatacaaataccttgcaacagatctatgccgttccagacgcgcaaattatgcatattcacggcaattgtagttacgatgaagatctcatactaggtcatagttttagggtggaaaagtcactaaatccatatataggaccagatcaagatataagaatagcagaagcatacgatagtatagacaaatactttggtaatacattcaagcccagcgaagacataattaaagaagagaacgtttttttctcgtcgcttaaaaatgtggatgaggtcattgttttaggccattcgcttgctgaagttgacggtgaatactttgctgaaataaataaaagcatcccaaaaagtgctcgatggatagttgctttatataaaggtgaggaaaaatcaggcagcttagaagattatgatgtcagagcctcaaatatttctttcgtgctgtatgaagatatctaa

SEQ ID NO: 220824 - DNA, 1434 bp, Klebsiella pneumoniae
atggcgctgccgattatcgttgccgtgctgttattgttcgtcccggtccccgaaggcctgccgccgtacgcctggcactacttcgctatctttgtcggggtgatcgtcgggttgatttttgaaccgctgcccggcgccgttatcggtatcaccggcgtggtagttattgccctgtgcagccagtggctgctgttcagcccggatcagatggccgcgccaggcttcaaaatggctggcgcctcctttaagtgggcggtgagcggcttcggcaactccaccgtgtggcttatcttcggcgcgttcatgttcgccgccggctacgataaaacgcagttcggccgccgcctggcgctgattctggtgaaatatcttggccgtcgcagcctgacgctcggctacgccatcaccttcgcggatctgctgctggcgccgtttacgccgtctaacaccgcacgcagcggggggactatctacccgattatcgctaacctgccgccgctgtacggttcaaagccaaacgatccgagcgcacgtaaaatcggttcctatctgatgtgggtagcgatcaccgccgcctgtattaccagctcgatgttcctgtcggctctggccccgaacctgctggccctggcgctggtcaaaagcattgttggcatcaatatctcctggggcacctggttcatcgccttcctgccgctgggtatcctgctgattctggccatgccgctgctggcctactggttctatccgccggaagtgaaagtcaataacgaagtgccactgtgggccgcgcgtgaactggaaaaactgggcaaactgtcgcgcaatgaaattctgctgctggtattcgtctgcttcgcgctgatgatgtggatcttcgccgccgactggatcgaaccggcgctggctgccctgctggttatcgtgctgatgctgtggaccggcgtgctctcctggagcgatatcaccaacaacaaagcggcatggaacacctttgtctggttcgccaccctggtggcactggccgacggcctctcctccaccggctttatcgcctggctgggtaaagagggcggcgcgctgatgagcggcatctccccggggatggcaaccatcgtcctgctgctggcgttctacctgctgcactatctgtttgccagcaccaccgcgcacaccaccgcgctgctgccggccatgctgaccattgcctcgactatcccgggaatgaatatggaagtgtttgtcctgctgatggtcacctcgctgggcgtgatggggatcatcaccccgtacggtactggcccaagcccaatctactacggcagcggctacctgccgaccaaagattactggcgcctcggcaccatctttggcgccatcttcctggccgccctgctgctgattggctatccgtggatgtccatgatgttctga

SEQ ID NO: 220825 - DNA, 1653 bp, Klebsiella pneumoniae
atgtcgactaaaccgtttgtttatcaggatccgtttccgctggcgcacgacgatacggaatactacctgctcagcaaagagcacgtctccgtcgccgaatttgacggccagcaggtcctgaaagtagagccgcaggcgctgaccctgctcgctcagcaggccttccacgacgccgcctttatgctgcgcgtctcccatcagcaacaggtcgcctcgattttgctcgacccggaagccagcgataacgataaatatgtcgccctgcagttcctgcgcaactcggaaattgccgccaagggcgtgctgccgacctgccaggataccggcaccgcgattatcatggggaaaaaaggccagcgcgtctggaccggcggcggcgatgaagccgctctggcgcagggcgtttacaacacctataccgaagataacctgcgctactcacagaacgcgccgctggatatgtataaagaggttaacaccggcaccaacctgccggcgcagatcgatctctatagcgtcgacggtgaagaatataagttcctgtgcatggcgaaaggcggcggttccgccaacaaaacctatctgtaccaggagaccaaggccctgatcaccccggcgaagctgaaaaactacctcgttgagaagatgcgcactctcggcaccgccgcctgcccgccgtaccacatcgcgtttgtgatcggcggcacctcggcggaagcgacgctgaagaccgtgaaactggcctcgacccgctattacgacggtctgccgaccgaaggtaacgaacacggtcaggcgttccgcgacgtgcaactggagcaggagttgctgcaggaagcgcagaacctcggcctcggcgcgcagttcggcgggaaatacttcgcccacgatatccgggtgatccgcctgccgcgccacggcgcctcctgtccgatcggcatgggtgtctcctgctccgccgaccgcaatatcaaagccaaaattaaccgcgacggtatctggatcgagaagctggagagcaatccgggaaaatatattcctgagcatctgcgtcaggccggcgaaggcgaggtggtaagcatcaacctgaatcagccgatgagcgagatcctggcgcagctgtcggcacatccggtctccacccgcctgagccttaacggcaccattatcgtggcccgcgacatcgcccacgccaagctgaaggagcttatcgacaacggcgaggcgctgccgcagtacgtcaaagatcacccgatctactacgcgggcccggcaaaaacgccagccggttacgcttccggctccctcggcccaaccactgccggccgcatggactcttacgttgatctgctgcagtcccacggcgcgagcatggtgatgctggcgaaaggcaaccgcagccagcaggtgaccgatgcctgccatacacacggcggcttctaccttggaagcatcggcggcccggcggcagtgctcgcccagcagagtatcaagagcctcgagtgcgtggcctatccggaactggggatggaagctatctggaaaatcgaagtggaagattttccggcgtttatcctcgtcgatgataaaggcaacgacttcttccagcagatccagaataagcagtgcgcgggctgtaaacagcacggctaa

SEQ ID NO: 220826 - DNA, 1392 bp, Klebsiella pneumoniae
atgaacaggatgagcatcgttatcctctgggcgctggcgctgctggtgctccagccggcgctggccgccgaaccgcgacagcagccaaccgcgcgcgagcaggcacgcacggtcacgattttccaccaacctgtcgtcatgttgcaggccacctttggccagaccacgcccgaagagcgcgttttgcgcacccgtagcgccctgcgcgccttcaccgaagatgatattcgccagccgctgcgggtcgtgccggttatccgctatggtcagccaggcagactgtttctgatgaacggcaaaccggtgctgctgctgagccaggcggatctcgacgagggcgatgatttaaccctcgaccaggcagcccagcgggtgctggcgcgtatggaagcccagcgcaccagcctccaggagcagttcaacaaccgctatctgttcatctccgccggtaaagccctggccggggcgctgctgctggcgctgttttactacggcgccttacgcgcctggcggcgggtgcgacgctttttcctgctgcggatcctcgaaaaacgtagcgccataccgcagcactggcggcgctatctcggcaatattgaagttcgactctatgctgtgctggtcatccttctcggcatgctggcctgttatctctggctgagctgggccttcagcctgtttccctggacgcgggtgtggagcgaatcgctgggggactggtcgctgggggtgatccgcgacctctctctgtcgattgtcgcctccctgccggggctgatgatcgtggtgcttattttccttctcacctggcttatcattcgcctggtgaaggtggttctcgaccaggtcgccgccggccgcattcaggttcccggcattcatccggagaccgttagcgccacccgtcggcttatctcggtggtcatctggttgtttgccctctccgccgcctacccgttccttcccggcgccaactccctcgccttcaaaggcattagcgtgttcttcggcctgatgctgaccctcgggtcaaccggggtgatgacccatgcgatgagcggcctggtgctgatctactctcgggcgctgcgcaaaggcgactggatccgcctcgccgataatgagggtcaggtcagcgagattggcgtgctggcgaccaaaattctcacccgcgaaaattacatcgttaccgtcccgaacgcggtggtggtgagcgggaaaattattaatctcagcgccgaaagcgccgacggtggagtcaacctcaccaccagcgtcaccatcggctacgatacgccgtggcgtcaggtccatgcgctgctggagctggcggcctcaaaatcgctgagacgttcccggaaggccggggcagcccgcatggatgcgggctga

SEQ ID NO: 220827 - DNA, 1209 bp, Klebsiella pneumoniae; identical to SEQ ID NO: 219902

SEQ ID NO: 220828 - DNA, 618 bp, Klebsiella pneumoniae
ttgaacgtcaaaactttcaatgttttctgtgatgagtcctgccatttattgaatgatcatcaagaagtcatggttataggcgctacatggtgccctgattcaatcacaaaaaaaattggtcgggatataagggctataaaatttaaacatggtctaagtcaagatttcgaaattaagtggactaaagtttctaactctaaaattgatttctatcttgatatagttgattattttttttccaatcaggcattgcgctttagagctgtagttgttcctcataagagtcggttagatcatgaccgtatttatctagatataaaagatactcttggcatagaaaagatcgaaaaacttagaagtgttcttcataatgctggatacgattttaaccgtgaatcagttcagcgaatccaacacattcgctcacatgaagttcagcaactacagttagctgatctattcattggggccttaggatatcttcacagaggtttgaactctaatgaaggaaaggttcaactaattgaaagaattcgcagttatacaaatagagatcttctaagaagtactctcccaactgagcgcaaatttaatgtttttgtttgggagtcacgttaa

SEQ ID NO: 220829 - DNA, 657 bp, Klebsiella pneumoniae; identical to SEQ ID NO: 136368

SEQ ID NO: 220830 - DNA, 324 bp, Klebsiella pneumoniae
atgaaatttctacctacaacaaatatgcgggcggcgaagccatgcctgtcgcccgtgactatctggcaaatgctacttagtcgtctgctggaacagcattatggcctgacactaaacgatacacctttctgtgatgaaaccgtcatacaggaacatatcgatgccggtatcactctcgctaatgccattaactttctagtggaaaagtacgaattggttcgtatcgatcgcagagggtttagctggcaagaacaaacgccatatctcacgattattgatatcatgagggcccgtcgcgatctgggtttaatgaatcgtaattag

SEQ ID NO: 220831 - DNA, 357 bp, Klebsiella pneumoniae
atgaacaatcactcagaatccggtacaaagccggagaatcccgcctgccagcagtgggggctaaagagtacgattacaccctgttttggagctcggctggtacaagaaggcgaccgcctgcattttcttgctgatcgggccggatttaacggtgctttctgcgacgatgacgcgctatacctggatcaggcctttccgttgattctcaaacaactggagctgatactcaccagcggagaactctccccccgccatcagcactgtgtcaccctctatcacaacggactcacctgcgaagccgatacgcttggtagttgtggctacgtatacatcgccatttatcccactcaacgttaa

SEQ ID NO: 220832 - DNA, 222 bp, Klebsiella pneumoniae
atgaaaatcatcagcaaacgccaggcaatgaccctgtaccggcaacatcctggctcccgactgtttcgcttctgtaccggcaaatataaatggtccggcagtatctgccattatgctggccgggaagttcaggacatacgcggcgttctggctgtatttgctgaacgtcgtcaggaccgcaatggtccctatgtcattcttcgaagcattactcttaattaa

SEQ ID NO: 220833 - DNA, 906 bp, Klebsiella pneumoniae
atggcagaagaaaaaaaacttattgctgtgtttggagcaaccggacatcagggaaaaggcgtggtgcaagcgctaaaacaaaccggtatcttcagaattcgggctttgtcgcgtaaccctcagtcttatatcggtgaggctgatgaagcagagtatgcagatcttgaaaaacctgaaacgctgagtgacgcgctgaaggagacgcacggtgtgtttctggtaacggattactggcaagaaggtgctgatgagactaagcaggcaaaatcagcgatcgacgcggcaaaagcggcgggcgtgaaccattttatctggtctacacttcccgacgttgaatctatcactcagggtgaattcattctgcctcagtttacgaataaagccagagtaaacaatctggtaaaagcggccaatttctcttactacacctttgtcgtcccacctgcctattatcagaacttcactggcccctttggtccgcagccacagcaggacgggagttatggatgggtcctgccgattgatcccgacgttcgctgcattcatatgggtgatataaatgagctaggcaaaattgtggccggtgcgtttgcacatcctgataaagcaggaaaaggtgacaccctgccgcttgtgggcgatttcctcagcttcagtgagattgtagaaacgctaaatcagccaggacaccccgtaacctttaaacaggtaccacgtgacgtctatgcaagtttttttcccggagctgaagcgctgggtgatacgctggcatattacgaaaaatatacttatcttggtcctggccagcaccaggcagcaattgcactggcaaataaagtggcagaatttcaccctacgtcttttgaatcctgggttagagagaattttgcacttaatacaaaataa

SEQ ID NO: 220834 - DNA, 738 bp, Klebsiella pneumoniae
atgctgacagatctgggaaacatcttttataaagaagcaatcatcgcgcttgaggcgataaaacaggcggagcagagcgtgtcccgttccggggactacttacgcggagacttgcgcgtatcacttcctcctgggatgaaaaaaagcttccgggtgatgctgtgtaaatttatgactcagcatcctttcttgcgtgtacatattcacacttccagtcaacatattgatttccggagcggagcatacgacgttgcactgagagccagtattcaaatgcagccagggctgatagcccgcacgctttttcgtgacccggtaattgcagtcgcctcaccaggctatctctcgggcaagggtatccccgtcgcttcggatgaccttataaaccatcaatgcctggtggggttcgcccgtggggagttgcctgatatgtactggccgttactttctggagacagagtaaaggtggacggttcgtttttctctgacgatatttccctgctttctgaggctgcaataaacggccttggcattgcctttttgcctgaagatttgattcgtgaacatctgcagcagggctcacttgtccaggtactgaaaaataaaattggtacagaaatgcaaattgcagtggtatatccggatcgtcactttttattgcctcaggtgcgtgcttttattgatgcagtggttgactggatagctacagagcgggaggagaaacggagcagtatttga

SEQ ID NO: 220835 - DNA, 504 bp, Klebsiella pneumoniae
atgagaatcgctattgtttatggcagcacaactcgttatacagagcgggttgcttgcaaaattgccgcccagccgggatttgaagaggcggagttgctggatattgaagatacagcgcttagcgacttacttgggtttgatttcatcatctttggtattcctacctgggactatggagaagtgcagtcttcctggcagaccgtatgggatgaaatcgataatcttgacttttcgaacaagctttgcgcattttttggtttgggcgatcagcagggttatccgcagtggttcgtggatgctatggggctactgcatgataaaattgtcaggcagggcgggatcgcgattggtgactggtccacagaaggatatcgcttcaatacacagctctccctctccggtaaccggtttgtcggtttaccgctggatgaagtgaatcaagacgatctgactgacgaacgcatcagcgcctggtgcaggcagttgtgtgagatcatcggataa

SEQ ID NO: 220836 - DNA, 2076 bp, Klebsiella pneumoniae
atgagtctgattgatcagaaaattcttgatggcctgacccaggtttcctttcccaaaggattccgttcagcggaagctagcgattacctcaacttaggtgccgaagtttatccagtctaccgcgcggatgcagtcgttattggtaccggagctgcaggcttacgtgccgccgtcgagctgaaacgtcgtggtctgaatgtgcttatcgcaactgctggtctttatatgggcacatccgcctgttcaggctcagacaaacagacgctctttactgcctcaacctccggtaatggtgacaatttcctgcgtctggccgaagcgctgggtagcggcggcggaatggatgctgatacggcttacgtagaagctgtaggctctatccataccctggcaggactgcaatatctgggacttgagctaccggaggatcgccttggtgccattctgcgttaccagacggaccatgatgaagccggtagagctacctcatgcgggccacgtacttcgagattgatggtaaaggtactgctgcaggaggtcctgcaactgggcatccccctgatcaatggagccacagcattacgcttgctacgccaaagtgatgagcagggaagcgaacgatgtgcaggactggtagtttccactggcgtgcgtagtcataacacaaatggtcttgccgttatcctcgcgccaaatgtagtactggcaaccggtggcccaggtgaattgtatcgggacagcgtgtacccaaagaaatgttttggttccctgggactggcccttgaggaaggtctatccctttccaatattattgaaagccagttcggtatcggcacgccgcggacggcgtttccgtggaacttgtccggcacctatgtccaggtcatgccctacatttactctgtcagtgacgatggccaggaacacaacttcctggcggaatactaccggacaacgcaggagctagcgtccaatgttttccgtaagggttatcagtggcctttccacgccacccgcacgcttgacttcggttcaagtctggtcgatatggcgattgcgaaagaacagaaactgggcagaaaagtgtatatggattttctgcgcaatccggcaccggtgccgggtgacttacctttcgacctgacccgactggatgacgacgtccgggcttatctggaaaacaatgaggctctggccgccctgcccattgaccgtctgcgccagatgaacccgctgtctatatcactctataaaatgcacggtcacgatctggaaagcgccccgctgcagtttgccatgaacaaccagcatatgaacggcggcattgaggttgatatctggggccagacatcacttaacggttgccatgctgttggtgaagtatccggcacacatggtgttactcgtccgggaggggcggcgcttaatgcagggcaggtttttggcgttcgcgccgcacagtatatcgccggtgcgggaaaacgtgcatctgctgacgatctttcatctctcgccttacccattcttgtgcaggtgaatgaagtcatttctcaggcgctcaaaagtaaagaaggaatgaccctccgcgaggttcgcgatcagattcagtcacgcatgtctgattatgctggttttgtgtgttcagctgatgaagtctccagagcgtgtgaggaagctgtcgtgcttaaaaaaaatgtttatggcggaggactatcaatcagccacgttgctgagattagtgagctgtttatgtggcgccatctggcgctgacctctgctgcagtcctgaccatgcttgaacaatatgttagtgacggcggtggaagccgcggtgcgcgcatcattctcgattcacatggtgaatgcgtaccgcagatccgatcaggagcttgtgaagcgtggcgcttccgcccggagagggatgaggacaaacactgcaaattcaccatccgctatcagaatgagcgcttcattcttaaaaagaaaccacttcgaacattacctgacctgagcaaaatttatttcgagcggaactggcctgatttcctgaacggtaagatattccgtcagccctga

SEQ ID NO: 220837 - DNA, 1422 bp, Klebsiella pneumoniae
atgaataacagcacacagaacaatacagcagaacagattaatgcccagtcacatgatgaagtcaccacgaaagatctgcgacgtgcggcctggacgtgttcactgggaagtgctctcgaatattacgactttgcactatatagccttgcatcggccatcatttttgggcctctctttttcccgaatcaggagccgggtatagcactgattgcaagttttggaacctattttctcggttttgctatccgcccggtaggcgggctgttgttcggctctcttggcgatcgtctggggcgtaaatttgtattgctggcaacagtattactgatgggcatagcgagtactttgatcggcgtattacctacttacgaaaccgccggcatctgggcgccagttatgcttgtagcgcttcgtcttttgcaggggctcggtgcaggcgcagagcaggcaggcgcagccgtcctgatgacagagtatgctcctaaaggtaaacgcggcttctatgcgtctttgcctttcctgggtattcagattggtaccttcattgccgctgccgtttacttcctgttgttgaatatggagacgaatgtcgcagacagctggctgtggcgcattccgttcctggcaagcgtagtcatcatcgccattgccgtgtatatccgcctgcatctgaaggaatccccttcattttcaaagcttgaggctaaaaaacaggttaccgataagccgctgcgtaatcttctgaaaacttcgcgtcgtaacgtactcatcggtattggtcttcgtcttggtgaaaacgggggatcgtcaatttatcaggcgctggcggtcagctatctggtaggcgtaatcggcatggaaaaagttgttggcacactctgtcttatttctgccgttgttgtcggcgcaattgtagtgccaattgccggatggctgacggatcgctttggacgtgtcattgtatatcgctcgtttgctatcttccagctggccatggccttcccggtctggtggacattcagccacggtgatgtgaccagcacgattgtgatgttgtcaattgctctgggagtgggggcatgggggatgtttggcgctcatggtgcatatatgccagaactcttcggcgcccgtcatcgctacattggtgtggctttggcaagagaagtttccgctgtgattgccggtggtcttgctcctctggtgggttccgcactaattgcctgggcagtcaccgccagcgatccgactggtcgttcagcatgggtattcattgcctcatatcttgcgctgcttactctggggacggttatcgccacatttgtttcgcctgagacacgcgatcgcgatctcgacgatgtcaatgatgcaagtaaagcggataaccggcttcctgccggagcaacccatccttctgcctga

SEQ ID NO: 220838 - DNA, 780 bp, Klebsiella pneumoniae
atgaataacggaagtgtggatctcaatatcagcggtcacattgccaccctgctgatcaatcgtcctgaaaaactgaacgcgcttacccctgagatgctggaggagctggcagggcattgccgtctgctggaaaccaatacggacgtgcgcgttgtcgtgctaaaaagcgcgagtccaaaggtattttgtgtgggtgcggacatcacgcgctggaatgcgctgacgccactggacatgtggcggacctggatacgtcgagggcatcagatatttgatgccctggctggtctgccgcagccggtcattgctctaatgaacgggctttcctacgggggggggctggagcttgcggccgccgccgatatccgcatttgtactcagagcgcaaaaatggcactgccggaaaccggtctggctacagtacccggttggtcgggttcacagcgcctgacccgactggttggcgcgccgcttgttaaggagatggcgttcaccggtgaaccggtggatgcagtcagagcgcgtgaagccggtctggtaaaccgggttgttgacgatgctgcactttcagatgtcggccaggaaatggcactgcagatagcatcgcgtgccccagttgcagtgcaaatggtgaaacagatcatcgatgcggccgacggagtagaagtcagccgcacgcttgaagcactggctggtgcatgtacagccactacagaagatgcccgcgagggtggagaggcattcagggaaaaacgtaaacctgaatttaaggctcgctga

SEQ ID NO: 220839 - DNA, 1572 bp, Klebsiella pneumoniae
atgtcgcatacacgccacatcagtgctgaagaagctgctgaactgatttcagacgattcggtagtaaccatttcttcatcgagcgggatgggttgtcctgatgtcgtacttgcagccatcggtgaacgcttcaggaattcaggaagtccggcgcatctgaccactattcatccaattgcagcgggtgatatgtatggagtgaaaggtattgatcacattgctgttcccggcctgctttcaaaagttattgcgggttcatatccgtcaggtccttcctcagcaacccccccggcgatctggcagatgattaccggcaatgagatccctgcctggaatattccatctggcattctcttcgacatgcaccgcgaagcagcagctcaccgcccgggagttctgacaaaaaccggcatggatacttttgttgatccagtacgtcagggcggcgcaatgaacgacaaagcgaaggaaattccgctggtagagcgtacacagttcgccggagatgaatggcttttcttcccgtccatcgcacctgacgtggctattattcgcgccaccaccgctgatgagcgtggcaacctttcatatgaacatgagggagcttatctcggcccacttgagcaggctttagccgtacgaaacaacgggggaatagtcatcgcgcaggttaagcgtcgcgtggcatcaggaagcattaaaccgaaagatattcgcgtacctggcgtccttgttgactatgtcgtggtggcgccagaacagactcagaccacgcaaacggtatatgaccaggccatttcaggtgaaatgatacgtccgcttgaagaattcagcctgatggaaaatggcccttctaaagtaattgctcgccgcgtcgctcgggaacttagtgacggtcaggcagtgaaccttggttttggtatttccgccaacgtaccgcgaatattcctggaagaaaaccgacatggcgaagtgacgtggttactggaacaaggggctgtgggtggtgtgccgttgcttgaatttcagtttggttgcgcatccaacgctgaggccatcatgccctccccgcagcagtttacctattttcagggcgggggatttgacgtgaccttaatgtccttcctgcaaattggggctgacgggtctgtaaacgtctcgctgcttcctgcacgcccgcatgttacagctggctgcggcggttttattgacattaccgcgcacgcgaaacgtatcgtgttttctggtttttataacgccggggcgcagctggcacttgaaaacggtgagctgaaaatcctgcgcgaaggcaaggccaaaaaagtggttaacgaagtggctcatgtcaccttctccggaaaacgcgcaattgagcagggccagcaagtcatgtacgtgactgaacgctgtgtacttgagctcaccgctgatggccttgtggtcaccgaaattgctccggggattgatctcgacagagatatcctgcagcaaagtgagacgccactgcttatttctcctaatttaaaagttatggaccgcagtctttttgctgaaggagcagaccatgaataa

SEQ ID NO: 220840 - DNA, 1032 bp, Klebsiella pneumoniae
atgatacagtcaaaaactgagaagcgccgagtgacgctttctgatgtggcccgcgaagcgggagtttcaaaatcgacagtatctctggtacttaaccagagtgaactcattaaggctgaaacgcgcgataaagtgcttgccgccatggaagtacttggctatgtctataaccgttctgcggccagccttcgatcgcgccactccaaaacggtaggcgtagtcattgacgatttgaccaaccccttttttgctgaattcactatggggcttgaaaggactcttgccggacatggtttcattaccatgatggcaaacacctcacaggaaaaagaacgtcaaaaagaggtgcttgataccttgcttgagcatcacgttgcaggcttggtgcttttccccgtgccaggtacgaaggaagaagagctgatgcgctatatcaaaagccagaccccattgctcatcgctatgaggcccatggactggaaacaaatctctgttgattatgtcggtgtggataataaagcaggtgtacttgaagcaactgaatacctgatttcaaacggacactcccgtatcgcttttattggaggcatttccagtcatacaaggtttactggctacctcgacgccatgcgtctgcacgggatcgaaccctgggacagtgatgaagatcattaccgatgtgaacctacccgagccaatggctacaaaatgatgctgaatattatggcgtcagaaaatccgccaacagcagtgctgttttacaatgatttgatggcattcggggcgatgtctgctctgggcgagctcaacttacgagcaggacaggatatttcaatcattggtcatgatggtgtaacggcaggagcattcagtaatcctccactcactacgatagggatggagccgctttctctgggcgagcaggctgcaaaacagatccttcaacgaattgaatatccggatacgccggtgaaccattacgtgttcagaccaaccttgcatatcagggcttctacaggaaaaattggctaa

SEQ ID NO: 220841 - DNA, 918 bp, Klebsiella pneumoniae
atgttgcattacgatatgatccgttacgagatcatgtatctaaaaatgcttggtgcgctttccaacactgattactccttacagtggagtacttatgattcgtcggatcagtttcgacgtttaatctctgagatccttgaacggcatttcctgggcgatcaggacaggatcaaagctggtcggaaaactcttaaagaatgggctgagtttctactgattgataaagattattttgattgtttcaaaggtacaccaagagcattgtggtttgctcaccattatatttttgaatatccaatattacctgcagggctggcactaggtggtttgggggatggctttgattgttcaggtggttttaattctcttttactggacgataatatcttcaaaaatcttgatttcgctaatttgaatatcgacctggacggtattgattgggacctgataaaaaatccacagactattgcttcgaaaaaaacgaaacgtgttttctcccgattttatctgaacgcgggagcaagtaccgatctgtacaaccccactccggtaactgagcgtgaactcatcaatggtgtgatgaggtacattgatgaagctccatgctcacttggagataagatatcttatttcaaaaaactgcatgaatgctggcttgagcaatacgatttttttctgacagattttgactggatgtcacgtgatgatgaaactcaactagtatatctctgggactacctcaagggaaaaggacgaatagcgggttatcttcgcccttataatacatctatgcgttatgacatgattattgcggctatagatgtgtggaacgtccaacctgaagagaagctggagtttattgagaagatgaaacatgcctggcaggcatcaaaatcttatcggcgatccgctaaataa

SEQ ID NO: 220842 - DNA, 579 bp, Klebsiella pneumoniae
atgcacacgccttaccctttcaattccagatacacgatgaactggtttctactgtctctgatcaatgaccacctgaatcagttactgaaccgatactcccgaatacaggcactcagactcgacctgttctatcagaaaggtacagagcgctataaacattattcatggaatgaaaccgagcaagaggtgcgcatgctggttgaacgcatcctgcagcacacaaatctggctgggtatttctgggtactcgagaattctgtagaccacggctgccatgcccatatcgtattctatctcgacaggcaccttaaccaggctacctacccaatagctgagaaagtaggaacaatatggcgggaaataacgcaacgagaaggctattacaaccgttgcgaatacaaaccttcttatgacgtcagtattgataagccggtgaactacgatgataccgaagccatcgataacctgcgctatatcatcagttatctcgccaaagaagaacaaaagcacggacactatcactacggagccagtgaggtatcgccgcccagcggactggggcgtcctcgcacgttgtaa

SEQ ID NO: 220843 - DNA, 210 bp, Klebsiella pneumoniae
atgactgaacaaatttctttacttgatgaccaactggtggatatgcgcttcatcaccaagtttacagggctgacggataaatggttctataagttgataaaagacggactgttcccgaagccaattaagctgggccgcagctcccgctggaagaaaagtgaagtcgaattatggttacagcagcgcattacggattcgcgcggccaatga

SEQ ID NO: 220844 - DNA, 747 bp, Klebsiella pneumoniae
ttggatatcccacgtatttttactatcagtgaaagcgaacaccgcatccacaacccgttcaccgaagagaagtacgccacgctgggccgcgtgctacgcatgaagccgggcacccgcattcttgacctcggcagcggctcgggcgagatgctctgcacctgggcccgggatcatggcattacggggactggcatcgacatgagttcgctcttcaccgcgcaggctagacgccgcgcggaggaactcagcgtcagcgaacgcgtacattttattcataatgatgcggcgggttacgtcgccaatgaaaaatgtgacgtagcagcctgcgtcggcgcgacctggattgccggaggctttgccgggacagtcgaactgctggcgcagagccttaaaccgggcgggatcatgctcatcggtgaaccttactggcgtcagctacccgcgacggaagagatagcccaggcctgcggcgtcagctcgacaagcgatttcctgacgcttcctgggcttgtcagcgcgtttgacgacctcggctacgacgtggtggaaatggtactggcggaccaggaaggctgggatcggtatgaggccgcgaaatggctgaccatgcgccgctggttggaagccaatcctgacgacgatttcgccgccgaagtcagggccgagctaaacatctcgccgaaacgccacgtaacgtacgcgcgggaatactttggctggggcgtgttcgcgctcatcgccaggtaa

SEQ ID NO: 220845 - DNA, 252 bp, Klebsiella pneumoniae
atgtcacaacatgaacagttctgtcaggcttgcgggatgccgatgtcggcaccagatgcacacagtgccagtgatcaatattgtgcgtactgcagcgacagcaacggcaatctcaaaccctgggaagaagcggtatcaggtttagcctgcttccttgattcctggcaaaaagtcggcccggaggaagctcggaagcgagcaaagcgttacctgacggcaatgcccgcctgggctcataaagcagatgaatga

SEQ ID NO: 220846 - DNA, 1962 bp, Klebsiella pneumoniae
atgaaaattaagtcgattcatgtctacagccatgatggccaacgtcgggacctgcactttaaggttaatggtttaaatgtcattactggccgttcctcaaccggtaaatcagctctttctgagatcattgaatactgcatgggtcgatctacctttaacgtaccagaaggtattattcgcgataaagtgtcatggttcgcagtcatttatcaattttcacaggaacagatacttattgcgaaaccaacaccaaatgcaggagccacaagctgtggcactgttatgctgcgacgaggaaatgaactgaccgcaccgaatttcaaagacctctcggttaacaccgatgatgattcggtagtcgcactgttgtcacgattacttggtatccgcgagaaccgtacagatgtggcaattgggcacagcagagaaagctttgatgcaaacatcaagcatactttttattaccttttccaaaagcagggccttgtagcaaataaagatcaacttttttatcgacaaaatgaggcatttcagccacaagctattcgcgatacattaccgattcttctaggcatttcatcaaatgatcgctatgaacttgaggccaaactccgtacagcgcagcgagatctgaaaatcaacgccaaacgtcttgaacaagcgcgcgatacaatcgatacatcattgctaaaaggttttgggcttttatctgaagccagagccgtaggtatcatcacacaagacaaagacagaatcggaactgatgaagtaattaatgttttgcgttctgcaatgcaatgggttccgtctcccctacctgaagacgatggacatagaatatccattcttgaaaatgaaattgctggtttacgacaagacagacgtaagatccagtcccgaattgattctgctcggatgtatgccaagcaatcaggtaattttgaaaacgaagttttagaacagcaagaccgattatcttctatcaaggctctaccgaaaaatccggaaactggcgaatggcaatggcctttctgtgaagcaaacttagcaatggaatctccgattgcaaaagcactcctgagcgaactaacaactcttgacgctgaaatgagcgttgtggctggacaacgccctaaaatggatgcttatcttgctgaactagaagatgaggttcagaccattgtaagttcgataagggccaaagaagtggagcttgctgctgcaatcgcggcaaacgaagttattgagcaattaggcacacgcaataatgctgcggcaagagtaattggtcgtataagtttgttcttggaagacctagtacctaactcagagctggcaacatatgaagcagaaaatcgtcgtctaaagctcaaagtcgaagaactacaaaggaaagttggtgctgatagcagccatgaaaggttcatatctattctgaataacatttcgtcacagattacacgctacatcctggcttttgatgcagaatttaagggactccctgctcgatttgatctaagccaaatgactattatctttgatcgtacagatcgtcccgtacctatgagtcgaactggcggtggagaaaatcatctcgcttatcacctgtctgcattgctagccattcatctctttgcctcaaagaacaattgccccatccctcaatttcttttaattgatcagcctacccaagtttatttcccttctgaaaaaatttaccaggaagctgatggtactgttcagaaaacggaagctgatgctgacttagcagcagtacgtaggctgtttgcgttactgctgaagtttactaaagaagaggtcccaggctttcagcttatcgtgacagagcacgcaaatcttcgtgaccagtggttccaggattctttaaccgagcttccttggaccaagccccctgccctggtaccagaagactggcctttaccgtcagacttaccaaattaa

SEQ ID NO: 220847 - DNA, 489 bp, Klebsiella pneumoniae
atgaagcaatgggatcagcgtccattcgagataagaaatcttttcaatcctgcattttgtggtgttgtgctatttagagcaatgcagagctacgaagaggaaaactcacagggcatgccattttctctggctcttttagttttaccattatgtctgcaaaaagattctcgccaagtgtttgctgaaaatcctcgccgctaccttttgaaaactatagaaaataatcccaaattactcgttaattttgctaaccgcgtcaataatatgcttccatttacgcttgaagcttttgggatgctcatggaacgaggatgttttgttgtaacacaagacggccggttgaaaacagtacctaataaagttcgcaaatcggtcatagggactgaagaatctatctcatgccagcgtgtcgcacgctatataggaaaagaatttgcccgtattgctgatcgcgttacggtatacacgacctttggaatacgcccatga

SEQ ID NO: 220848 - DNA, 1224 bp, Klebsiella pneumoniae
atgaccggagtatctagcgatcaatacgctgcaggtgaacagggcttagggtatatctatcagcctcgttttgcgctacttaagcttctacagtggccagaagatacatctgttttgatcgaaaaagatgatgacctagacttcgtcaattctaatggtgtcaaaacactggcatcgctcaaacacaaaggagatggggatactctaaccgacctgtctaccgatttctggaagtcagtccgcatctggcttgaccgctataatcgtgatggtaaaaccgaagcaaatcttcgtttctttctgtttacgaccggaactatctcaaacgcctcgttcctgcaacattttttagtcgaagcgccaacaaaagacgataattcagtatcaataactcaactcgccaatacagctctggctagaagcaagtcaaaactgatcacggcaatagccgatgagttcaataaacttactgatgagcaaaaagatgacttcttatcacggataatcatatttgatggcgggcctcgcattgaagacctcccaacaattattaaaaatcagcacatgcgtatcattagacgcgataaccgagacgctatttttgaacgacttgaagggtggtggaataacatcatagtcgatctactaacagggaaacgtaaagaggcgatttttggttatgagatttccgacaaacttgcagcattttctgaagagtataaatctgacaatctgccgattacgttcagaggaaaaatgcccgttggagaaatcgatgctatgaatgatcacaggctctttgttgtgcagctccgtgaaatagggatttcctctaatcgaatccgaaatgcgattctcgactactaccgagcatttgagcagcgttcttcatgggctcgtgaaaaccttttggttacaggagagatagaagattatgaagaccgccttgttgatgaatggagtcgctataaagacgtcgtttttgaaaaattagatgaaaattcagctgacgaagtacttattactgcgggaaaagcattgtatcaatgggccgatcttgaaagtggtaatattcactcattgcgtatccgagaacgagtgactgagccttatgtagttcgaggaggatttcacatccttgcgaacagtagaccactacccaaaattttctggcatccccacttcctaaatagagttggtcaattgttgggagcccaagcatga

SEQ ID NO: 220849 - DNA, 657 bp, Klebsiella pneumoniae
gtggccacgctggccgttatcagccaccgcgtcggtctccacgatctgctgactcacctgcatctgcttcaggacaccctccgccatcagggcgcctggggatatctggtctatgctgcgctgtttatcattgccaccctgtgtctgatccccggcagcctgctggtgatcgccggcgggatgctcttcggcccgctaacaggctccttgctctcgtttgccgccgccaccctcgcctcttcgctgtcgtttttaatcgcccgctggcttggacgcgatctgctgcagcgctatgtcggccataccaccgtctttcaggcgattgagcgcggtatcgcccgcagcggctgcgatttcctgatcctcacccgcctggtgccgctctttccctacaacattcagaattacgcctacggcctgacggcgatccgcttctggccctttaccctgatctcggccgtgaccaccctgccgggtctggttatctattcggtgatggccagcgaactggcccgcgagggggtgaccctcgccttcgcgctcaaactgagcctcgccggcgggctgctgtttgccctggtgcagataggcaaacggtttgcccgcgcccgtcgcgtggcggcgtgcagtgaggaggtgcgccatgacccaacctga

SEQ ID NO: 220850 - DNA, 1326 bp, Klebsiella pneumoniae
atgaccgcccgcgaagtcaactttgacggtctgcccgggctgacccatcactacgccgggctctcctttggcaacgaggcttccacccggcatcgctatcgggtgtctaacccgcagctggcggccaagcaggggctgaaaaaaatgaaagccctcgccgacgctggctacccgcaggcggtgatcccgccgcaggagcgtcccaacgtgccgcttctgcgccagctgggctttagcggcagcgatgagcaggtggtggcccgggtggcgcagcaggagccggatctgctgtcggcggtgagttcggcctcggcgatgtgggtggcgaacgcggcgacggtgtgtccctccgccgattcgctggatggcctggtgcacctgacggtggcgaatctgcaggataaattccaccgcgccagcgaagcaccgaccacagaggcgctgctgcaggcgattttccccgaccgcacacgattttctatccacccggcgctgcccgcctcggcctggtttggcgacgaaggggcggcgaaccataatcgtctcggcggcgagtatggcgctcccggcgtccagctctttgtctatggccgccgccgggggagcgaggaggcgccgcgtcgctatccggcgcggcaaacccttgaggccagccaggcggtagcgcgcctcaatcaggtcaatccccgccagctgatcttcgcccgccagcatccggcggcgatcgacacgggggtttttcataacgacgtcatcgcggtgagcaaccgtcaggtcctgttctgccatgagcaggcctttgccgaccagaccgcgcttctccagcagctggcgcagcgggtgccgggttttacgccgctggtggttcccgccagccgggtctcggtggcagaggcggttgccacctatctgttcaacagccagctggtgagccgggcggatggcagcatggcgcttatcctgcctcaggaagcgcaggagcatgccggcgtgtgggaatacctcaatgagctgctggccggggataaccctatcgccgacctgcgggtgttcgatctgcgcgagagcatggccaacggaggcggtccggcgtgcctgcgcctgcgggtggtgttgacggccgaggagtatcaggcggtcaatccgcacgtcctgatgaacgatacgctgtttgccaccctcaatgactgggtggatcgctactatcgcgatcgtctcacccaggccgacctcgccgacccgcagctgcttcgggaagggcgcgacgcgctggatcggttgacccagatcctgcagctcggttcggtttatccatttcagcaataa

SEQ ID NO: 220851 - DNA, 846 bp, Klebsiella pneumoniae
atgaagatgaccgaatcacaaaaagtcgccgcggcggcgtggcgtattcgccgttacgccctgcaaatgggggaagtgcaggggcagggctatatcggccaggcgctgggctatgccgatgtgctcgccaccgccttcagccatgccatgacctatcgcccggaagatcccgagtgggaggggcgcgatcgcttcctgctctctcatggccattacgctatcgcttattatgccgcgctgctggaggcgggcattatcccggaagccgaactggaaacctacggctccgacgacagccgcctgccgatgtccggcatggcgacctacaccccggggatggagatgtccggcggctcgctggggcaggggctgtccattgccgtcggcatggcgctcgggctgcggcagaaacagagtaaggcctgggtctacaactccatgtccgatggggagctggacgaagggtcgacctgggaggcggcgatgtcggcggctcactatggcctgagcaacctgattaaccttgtcgatgtcaacaaacagcaggctgacggcgattcacgcaaaatcctcggctttgagccgctgcaggataaatgggccgccttcggctggtacgtacagcgcgtggacggtaacgatctgccggcggtgatggccgcctttgacaacgcgaaaagttattccggcaatcagccgcgggtcattttatgcgacacgctgatgggcaaaggggtgccattcctcgaaacccgcgataaaaaccattttattcgcgtcgatgccgacgaatggcaaaaagcgatcgcggtgctggacgctaacaaaccggaaggagtgctgtaa

SEQ ID NO: 220852 - DNA, 993 bp, Klebsiella pneumoniae
atgagccagagtcaaccccgtttaaaaacgtcggcgatgatcgcctcgattgccgatgaaggccaggcgaccgtccctgcgcccttcggcgtcgcgctgtcaaaactggcggcgcagcgcccggaaatcgtcggcatgaccgcggacctgtcaaaatataccgacctgcatattttcgcccaggccttcccggatcgctttttccagatgggcatggccgaacagctgctgatggcggcggcaggggggatggcgaaggagggatttattcctttcgccaccacctatgccgcctttgcaacccgtcgcgcctatgattttattcaccaggtcatcgccgaagagcatctgaacgtgaagatctgcgcggcgctgccgggcctgacgaccggctatggccccagccatcaggccaccgaagatctggcgatcatgcgcggtatccccgggatggttatcgtcgatccttgcgatgcgctggagatagagcaggcggtaccggccattgccgatcaccaggggccggtgtatatgcgtctgctgcgcggtaaggtgccgctggtgctggataaatatgactatcagttcgaactgggtaaggcgaagctgctggaggacggcaacgatgtgctgattatctcctccgggctgatgaccatgcgcgcgctggaggcggttgaaaagctgcgggccgataatatcggcgtggcggtcctgcacgtgccgaccatcaaaccgctggatgagaaagcgattattgaacaggcgtcgaagccgggccgcctggtggtaactgcggagaaccacaccgcggtcggcggcctgggggaagcggtggccgcgctgctgatgcgtaagggcgtacgctgtgagctggatagcgtggggctgcccgacgcgttcctgttagccggcgccctgccgaccctccacgatcgctacggcatctccaccgcgaagattgtcgaaaaaattaagtatcgtctgcgttaa

SEQ ID NO: 220853 - DNA, 264 bp, Klebsiella pneumoniae
atgtctgaacaaaaaatgaaaatcacggatgaacagttttcggatttcacagggactatgttcaacaccccgtttaccaaatccatctctgacgtgccaatgacggtctatcgacagaatcggctaaaagcctgcttccagtcagagcctcaccaagatccgcagccagcgcctcaagttaaatccactatcgtggcgccagatgactctgtggctgatgagacgaccgccaccaacgaagaacctgcaacagcagtcgtttaa

SEQ ID NO: 220854 - DNA, 834 bp, Klebsiella pneumoniae
atggagcagcttggcgtttataaagacgaggatgatgtcacgcttcgcttttctctcgatgtgatgagcgcagcttcagccacttattctgtgaaggacgccagcggcaaaatcatcacatccggcgtgaatgtcccggtgactgatgggcagatgtttgttgcagtcaccattccgggttcagtgaatgcactggaagagcgtgagcgcgatttgagacgcgtaacgctgtctgttgatgctggtggtgtgttcatcaacaaagaacagcagtacatcgttttacggagttttgagctgtccgtaccggggcagtcgtttatttcgattgctgacgcgcagctgcaggccatcgatatgcttaatggcggtagtttgctgtcaggtagcgagggtgatttgcggagacagttgattgaggcgacgagacgcgttaaatcgatgtcgttttccgttcgtcggatcttcggcattgattgggacgattatgaccggccgcagaacatgctggcgacgtcaactttgcctttccgctgggcggggcagtatacctccgacattgtcgactggagcaagctctccgacgaggactttatggagttccctgagagtttccgtagtgctctggcactggccgttgttaatgaggctagtgaaatagctggtgggaatgatatccagcgagcacgtgaagatggcattgtttcagagtcaattggggagacaaccattgcataccgccagggaaaaagtgctgtctctacagtttctagaacgacgtggcgaattttgctgaagtacatggacaatcgcgtcatcgttcgcagacagtaa

SEQ ID NO: 220855 - DNA, 345 bp, Klebsiella pneumoniae
atggatatttcctggcaggttgaaggtagtctgtataaaaaagtcggcatggatctgtacggcgaggctaaatatgagttcgccgcgccggtaaagatgggtgtcgtgtcgttcattgacagtatggataagacgtctgttcgcgcggatagcgcggccagtcgtggtaaggcggaaatagcgctgttcgatgctgtttttatcatcccgatcactgcgactgtcgataaggaagatgtgttggtagtcgacgggaaaaagctgcgtatcgttagcatacaccgacgatgggggcttcgcggtcgtccgggccactatgaggttggggcgaatatatgggtttga

SEQ ID NO: 220856 - DNA, 495 bp, Klebsiella pneumoniae
atgggtttgaatataaatacgctgaatctgaagaaggcccagagtcgactaagtaacagccagaaagcctataaacgtgtactcgtctccgaaatggctaagctcgcgaaggtggcccagcgtatggcgcgagccatggcgccgatggaaacgggatcactggagaatgccatctttgctcgtgtggtaaagcagggttatgacagtctgcatattgagttaaaggtggatgaaagccggccgcgagaaagtaatggcagtgtttatgtcaagcctggtacgacggtcggtgattatgcgctttacatggagaagaataagtacaggctccaggctggttccgtgctgaaacagatgacccagagtggcgtggatgggcgtcgggttaatgtagggcgtcgatatatggagagagccgtcgagtacatccgaaagcgctttcctgaaatagtggaagactcggccagaaaagccggatttgtaaggagacgatag

SEQ ID NO: 220857 - DNA, 360 bp, Klebsiella pneumoniae
atgtacctggcgaagaaaggtgttgggaaagctggatcagatattttcattgatgctatgccgcagagtgtaaaagcagccgttatggtgacgtcggcaaccagcggtattgctgtcgacgatgagctgagagggttctactttgactctatgctgattgtcgtgcgtgacatttctttggcgtcggctcagaagaaaatgcaggtgataaatgatttgtttcctgtcgacaatgtcacgtcaaagagtgttttttttaggatgcttcgacccatgacactcccgattgtgtatccccgaaatgatggtgctctgttcgagattgggcttcctgtggaatttgccgggtatatgttgtaa

SEQ ID NO: 220858 - DNA, 4575 bp, Klebsiella pneumoniae
atgtccgatattgtagattttaaattgacgttgaatgacaaggagttttcaacgtcaattaaaaacgcgggaaatttgttagagacattcggtaaaacggcctctaataactccaaaaaaatgtcctctcttgaacggtctgtcgtcgccacaggccgttcgttttcagttctaagcgtctcccttggtaaaggcgcggacaaaatggaagactttgcggccggcactgaactagccagccaaagtcttcgagccatccgtgaaaacatcgccgccatcaaccgtagtctgtccgtcttctcgacgagagtagatcaggtcagcggtaaagttggtgcgctgacttctgtactgaagaaggctcagtctgagcttttggatttcgctgatttcgcggatcacgctggcaaatctgccaaaagcttctcaaaccatgcctcagacatgggtaacaccacatcgtcactgaaccgtcgtttgtcgaacaccagcaaagtattagatcgctggaaggggacaactgacaaagcggcagacgggcttaaaaacgttcgtgaccagatggatgccgtcatcgatcgccagaagtcactgagtgggagaatccttggtggcggtcgagtaggtggctctggcggtggctctggcggtagcagaggtaattcgggtggcggtcatggacgctctgagaacggtttgttcgaagggctgcgaggcaatattttccttctgggggaaattggcgacgctgctcgaaccgttaaagaaatgctgttcggatggcaacagccgctgatcgaagccatgagcaagatgcaaaacacgcgcatcttactgcagggtctggagaaggacgcaaagaatccgcaggatgctgccgagaaagacatgaacttcatcatggggctttcggaaaaggttcacgtttcgctcgatgcagtatctgatgcattcgtgaaactgaagtctggcggtatcgatccaacgacgggatcgctaaatgctctggttaactccgtagctcagtttggtggtgattcggaaatcctgaagcgcgcggcgatagcgattcagcagatgtcgggcaaaggcgttatctctatggaagagttgcgtcagcagttgggtgaggctgttcctactgcaatgcagtcgatggccgacactatgggcgtcagcatggcgaagctcgtcaaagacgtttctttgggagccgttgaggcgaagtctgcccttgacatgcttttcctcggcatggagattgacagcgccggcgcggcagatcgtctgtctcattcgtttaccggcgcattggctcagatgcagacggcatttatgcgcttttccgataatatggcgaagggcgggtatctcgacgcattgtccgatggcttaaagcagctatcgacttatctaaacacaaccgaaggtcagttattcgcctacaacttcggccagggcatgactgctatcgttaagacattgacggacatggcctcgtggattgggaagaatattgagctggtcaaaaccattgctcaaattgtcggcttaggcatgggtttcaaatttttgaaaaccatcgttaccggttcactaggcactgctctggagatgttctcttcattgaacaagtctcttggtctggcgaccaaaggggtgacgagtttcctctcggcaacaggcaaaatagttcaggatattcgtaacttcggtttgtttgctgcggcggtgattaacatcacagaggccattcgcggcgcaaaaactgcgtggttggcgtttacagctgttttgcaatttaaccctatcatcgtcggtatcaccgctgttgttggtgttgtggctcttctggcgtcgacgtttgagagtgtttcagagaaagcatctgatgcgcttgagaagattaaagccgtcccggaagcgatggggaaaaatgaacaggctgctcttactgcaagattaaaccagctcgacatggaagaggcggattataagcgccgtaagagcatttatatgtcttcgacgccagagcagcaaaaagggttggcgaagagcgataagttcaacattgataacattaatgccggcctgaaggatgtgcaaagtcagcgtcaggacatccagaacgccatgggtggggcggtggttgctgttgccagtaaagagatttctcgcaacctgcagtcaggtctgaagaagatcgatgaccagttcacgaaagacgctgcctctctttcaacatctgccaaggattatcgtgatcgctcagatgctatcagtaatgataagtcactaagcaaagatgagaaaaacagccaactggagaagttgaacgctgaccgacaaaagaaattggtcgacgcgactcagaagcgcttagacggttatcagaatctggtaaaaacgcttcaagatcagaaggccaatgtagagagccagctgaagagtgaaagcttgacggctgagcagaaaaagacgctcgatacaaaaaatatcgcactgtctaagcaaattaacgatctgaacaacaatcaggttcagatggcgcaagcagatctcgaccgtgcaaaaaaatcgatgtctggtgatacgccgaagctgagcactcagacgaagacgggcgatcgcataaagcttatcacggacaacgcgggcaaaaaggttggtgatttcgtcaatccagatacaggcgaagcgctgcgagaccttctcgggaatgtgatcaccggccagaaccagatgagcgtaaaccagcgctatctctcggctgtaggcgataagaaatttgacgacctgagtcgatctgagcagaactcgattaaaaagggtcttgccgatgcggctaaggccgacaaaatcgccgcggacaagcgccttcagagcgccaatattgctgcctctaagcagcaaagtattgatgcgatggtagccaaggccaatcagcaggtcgtttccagcgcgaacgagttggccggtcagttgggtcttacgtctaaggcaagtgcaagcttcgacgagtcggttaaaaaaacactgagtcaaatcgataacgcgttgaaggatcaggacatcaacggcaaagccttgccgccaaactctcgattcaccgacgaccagaagcgccagatgattcgtgatcgcgatttcatcaaagccaatgctgcggactactctcagcgtcttgaccgcgattctgctgaacagacagtgtcgaaattcactacgacgaccagcgggattatggcgtcggttgatggtgctaatcgacaggctgcgatggctaagtggatggaagactatcagcgcgacatcaagacacttcagagttatatcgcaacgactcagtcggatgtaatgaaggatgtgtaccagcgcagtctaaaagcgatgagagaaggtggcagtcgtgcctttatcgagcagtttgggactgaaacgcagaagatggcgctggagtacgaagacgtcgccggtcaaattgagaccgtgtggagtaatgcgttctctagtatgacggacacgattaccgacttcattatggacggtaaggctagtttcagtgattttgcaagatcgatcgtcaaagacatagccagcatcattgttaaatcgcagatcactgcaccgctcatgaatatgatgggcatgggaaccaacggtgcgggtaataccggcaacattgctggggctatgctgaatcagggagtaagtctcgtcagctccggcggcgccggtgttaacgtgaataacggtgacaaatccattggtcagtccgcgaaggagactagcgcgggtattagccaaatgagtacggccaccgagaatgctaacagcggattgtctgggatggttagtagcgcctggaattctacaaagtcattccttggtcttggcacggccacgggtaatcagactaaggcaatcggcgccaacattctgacgatgaataatctatcttcagtggcagcaggtctgactgctgtcttcgcttcgatgggggctagttcgaattcatcgaaggggagatggatgaactttggcctgtctatggtttccgcggcgacgtcggtgtgggctggcagtatggctggaggcggcggtaaatcgaccggaggggccgtgaatgcgacgaaaagtaatggcttctcgaatgttaatatcccatcgaacggtcagaacattccagccattcctaaatttgagaagggtgggatcatggggccaaatggtgtaattccactgaagacttactccaaaggcgggatcgctacttcgccgcagctggctctatttggcgaagggaaagacaatgaagcctatgtccctctgcctgatggtcgttcgattccagtgacgatgacggggaatgttggcggaggcggaacgattgctccggttgccatcaacatcagcgttaattcggacggttccagttcaacgtctggctcggacgcggacagcaaaggttggaacgatgcggcacaacgcatcaaaaatatcgttcttgaaacgattactcaggaaaagcgccctggtggttctctgaacaaaaacaccaacggcaacaggtaa

SEQ ID NO: 220859 - DNA, 1173 bp, Klebsiella pneumoniae
atgcatcctgaacaggtcaaaagcataaaacttattttttcttttttgatagacgaagtaatagttaatgatcgctctctttcggaaagagtcgaagataaattcccaatccttgttgaaaagttaaaaccaaataaggcggttagttctccaattgatgtgcaaacagcaaccgtagcattctatgatgcggtgttaatattttatttaagcaaaaatttgcttccgccatttttaaaaaacgaaagagagttatcagaagacaccaagaacaacctaatagattttttattctcttacttttcatctctaccacacaaatataatattgaaatcccattacaatacctcgacattccagacttcaaagaggtggatggtaaactggaagtatcaacgcaaggtgcaggtgtacatcatcaaagcccaccattaaccaccatcaagaaaaaatatttaaaattatctggtcagggatatttttctagagacaacagtagtcatgaaataaaaccatatttacaagactttaatgtttttttatacgaaatgataacatcaaaaattcttataaccagaaagaccccatctctacgtggatatcagttcaatgacagaattgaagagggagttaagagcattcccattctgaaagcaaaaataataaataaaagtcatagccagtataacgttgattatgaactaccactgcaactttctaaattcttagatgagttaactgtcgcatcagatagtgaaaaccattcaatggaaaggttaatatttataaacaaattgataaatgataattccgaagcggcaaaatatataaaagcagctatggattggtatatgaatgcgcaaatggttatggatgaaaccatgtctttcattcaaatatgcatgggtctagaagctttattaggtgataaaagagaagggagtatcggtttaactcaaacattatctgacagatgctcttatcttattggaaaagggatgagcgatagagaggaaataaaaaagcaacttaaaaaagcttatgagcttcgctccgcgattgtgcatggtcttaaaaatcgcatcaatgaatcagaaaaagaatatgtaaagaatgctacccttttcctccgaagggccataaaagttgaatgccaatttctgaattattaa

SEQ ID NO: 220860 - DNA, 666 bp, Klebsiella pneumoniae
atggataccagactaatcatagttggtgggacgaaaggcggaccgggtaagtccaccatcgcccagcaggtagcagcctgtttgcaactcaagaagaagaaaaagattcacgttaccgacatcgacatccagcgcaccacgacaacctggtgcgaagatcggcgtagtaacaagaagctcgaacttctgccttttgccttcgtaggcaatgaaatcatcaagcacctccaatcgctcaacggccgttacgagtacatcgtcgtagacgccggtggctttgactccgaaattcagcgtgaagcaatgctgatcgccgacgccatactgattcctcttcgaccgaagcgcagagacctgaagtccttacgagacattgaccctgttctggaaagcgtcaaggcggagaacccggaggttaagatccgcgtggtgatgaaccaatgtccatcattgccttctcaggtgtctcgaatacttgcatcaaaagaaatcgttgagtcatttggcattgaggccgtaccagttaacatctacaaccgaaatatctatgacgatgcggaagaagctgggcgctctgttttcgaaatgaaaggcaaagagcgtgacaaaaaggctgaagacgagattgaagagttagttgattatcttattagtttagaggggtag

SEQ ID NO: 220861 - DNA, 375 bp, Klebsiella pneumoniae
atgaaaatgggaaaaatgggcgatcttgccaaacgtaccgtcgaagagacaccagttcaggatactgaagcaaaagcgtctaactctccgatgcgttctccggttcgaccacaggggagacctacccgcgggaagtccagcattaaaagccgcaccatgagcatcgaggatgaatttatcagcctgatctcggtcatggagaatgtcgaccgctggaaccgtttcactcgttcagacgttatccgtgccgccatcatgaaccttgccagtgagtcgccagctcgaattgctgagaccatcgctgtactgcgcgagacgcctgcttctgaggcggagatgcgcggcgagcaaattcgtcgtgagctggagcagtaa

SEQ ID NO: 220862 - DNA, 192 bp, Klebsiella pneumoniae
atgataagtgacctggttggttttggtttgtcgacctttttgttaggtttcattctgggtggaatgttgttcgtatcaataaagaaggacaatgttaaggccggagtcatggagttcagagggcggatttacaaaattgttgatgtgacttctgaagcgaagggaatttacagcaaggagggtgaagagtga

SEQ ID NO: 220863 - DNA, 243 bp, Klebsiella pneumoniae
atgaacgatcatatcttggcagtatttattttggcgtgtgtctttttttcaaccggtaaggtggtgagctgggtcatcgatgtcgttatggcaaaattcgtatctggcaacaaacagttatctagtgcggtttcgaagttaatcagtgttgcctcgcttcattttggtagcattgagaaagataaagagtattcagtaaaaacaagcggttacaccataaccattcaaaaaaacaaaaattaa

SEQ ID NO: 220864 - DNA, 612 bp, Klebsiella pneumoniae
atgtctgaagtcaaaaaagttattaccgtagctgaacgttcaactaaagcactggttaaagtcgttgctgatggtcagaagctgttttctgagctggcgggcctggccaactccactgtaactctgaccgaagagatcgagttcaaacagggccaattggttgatatcgacaatcagatcgccgctactgagcgtgaagcaaaagctcagctgcgtctgcgcgttatcgaaaatgaagataaagtgttagccgaactgatgcgctcccgcggttacgcagtaatctctcacgctgatctagacgcactgaactctgacctggctgcggccaaaaccgataatgacttcgctgtttctgaagcgcgtgaagctggctatcaggccgctgctgctaaatttggcgctgaaaaccgcgaactggcgtcccagcacaaagttgagatggcagagcataaagcccaggctactgctaaaaatcagcgtatcagcgacctggaagcacaggttaccgagttgcgtgaccagatcactgcagagcgcaatacacgcttggaaatcgctcgtgctgacgctggccgtcagggtgttgtggttaacgccggcaaaaactaa

SEQ ID NO: 220865 - DNA, 288 bp, Klebsiella pneumoniae
atgaacgcagtcaatgacatcatggaagctagcaatgtagcaattgagtccttgaagcaactcagcgataaggctaaagatgtaaccgttgaagaagctgtatttagtagggacggaaacatcgaagttacactgagttatctcgaaggtggcctttccaaagatgcaagtgggtcagcccaaatccttgcattattaggcgagaggagaaagtggagagtatttatcatcgataaaactcacaaaagctttaaagggttcaaggcttatcacccaaagagtaagtag

SEQ ID NO: 220866 - DNA, 831 bp, Klebsiella pneumoniae
atgtctgatacaatgattgttgttgctcctccaactccggggttttcttacgcaagcggtttaacctacggcggtggtgcatttgccggtgctccagcaaatggaccgagtgaaggtcaaatcttctttcaaactgttctacctgcatatcaatcacctaacctctgcattggtcagctggcatggatgactgactacattaataagaatggcgtaggtaacccgaagacatgggaagttatttctcaaaacgtacttgtcttctgcagcgctgatactgccttggttttgaatcctcgaattgctgtttacgatggtttccataaaaccaaatgggccccgtcgaaattcaatttcaaaacgcaaagtcaggagaagtttagcggtaacgtgacgaccccgatcgcagcgtttggtcattatctttggggtgaaggaaagcctcggactgttgatttatcaactgttggtttgaaggtccaagcgaaccagattgacccggtaatgattgcagttaaaaataacgctgcaggcacatatcagattagtggcaatttcaaccgaaacaccttcatcgatggcgatattcctggcctctacttgggtaatattaccatgaagaccgaaggtactttgaaaattgatgctaaaggtaattgggattataacggcgtcgtgcgcgcatttaatgatacttatgatgcaaacccgagtacccatcgaagcaaatctgcggaagacctcacaacgcttctgcgactaactcaagggacaccttatgaaattcgtatcccaggcgaactcaaggtaagcggctccggtaagaaataa

SEQ ID NO: 220867 - DNA, 246 bp, Klebsiella pneumoniae
atgaaagatcagcacactaaaatcaaaggctatcgcgacctgtcggccgaagaaatcgcgctgatgaacgaaggcaaagagctggccgagaaagttggcgcctttgtcgagaagctcgagcgtgccaagtttgctaaaaactcgcttcagctgccggataaccgctggctcgctatcggtaaaactgaccttcagaaaggttttatggccgtaatccgcagcatcgcaaaaccaaccactttctga

SEQ ID NO: 220868 - DNA, 531 bp, Klebsiella pneumoniae
atgcatacgcacagcaaacaatctaaacattgcggcttaaagttagttagtcaaagtgccctactttctttattaattctatcaactcaaacatttgcagctggcacagctgatcccgtaacaatggcgaacaaagctggctttaccaactgtaattctctaattagagatgtgtttagattttccaaagatgctcaggaaatgagaacaaacaccagatataataacgaaacagtaaaggaaaccattgatatagatatggcctttggaaaaactggagacaccattgttcaatcgactcattttgaacggagaggtgggatgtgttatgcatattctagcatatcgttcaatcagcaaggtagttgcgtcggtatcatgagtaaagatggaaacgagtatattgatgagagcgctggaactatttgggccaagaacaagctaggcgcaatgagaattatgacgcaaacaggaaacgtctgtacctctaacttttttgctgctaatcagatgaaacaggatcgttattaa

SEQ ID NO: 220869 - DNA, 525 bp, Klebsiella pneumoniae
atgaaagaatcaatcacaaaagttgcaatggttttggcactcgcgttatcaggaataacgcatgaatcgtgcgctaaagaagccgtaagcactcatcatatcgtagcttctggcgtcggcgcactgtccagcgaggaagttatgtcgagtatcagacagatccaggacgtcactgcagaaggtcgtaagctttacgcgagccttgatgcgcttgccgatattgacttcgaagcagcaaaagctgccgcggaagtaatgcgggcagacatcataggagccttagctattgctgagttcctgttccaggcgctgccagatgtttcagtcatccgcacatttcccaaggattcgttgcggtacaagctttgcagagctgtagcagaggcccgacacaacgcaaaaaacctggacgacctcttaaatcagatactgtccgtcagtccgatccgtgaatcgcatgttaacccggatgcactggtgcatcttgcgaaactaggtacagaggctgctgctaaatggcattga

SEQ ID NO: 220870 - DNA, 417 bp, Klebsiella pneumoniae
atggcattgattgtcgaattcaacccagataccagagccgagtttctggaaccaactttcaagcaacaccctgattttgaagaacaacttaaagccgaatttatttattgtaagacgaacaaagtcacaacggatattttcggcaatgatgccatcttcacctttcccccgtatgcagtagaagcgcaactggctcgcattcacatcaaattaccgaacgaggcgccatggcctcatggtttacctgatcgtcaaaagaagagtaacacgtatcttgtctacgctcagcatatgtgggacccttcgcgtttttctattctggctctcgtgacaccagctcatgacttaatgagcgccgaaaatactcagctaatctctcgtttttctcagtacgcagaagactttcactctcgttaa

SEQ ID NO: 220871 - DNA, 270 bp, Klebsiella pneumoniae
atgtttcgcttgatgataagtaagcacttatctattatgtataagcttttcaacaagagaaaacacatgaccacaaaactgtatttaaaaatctgcgcactgatctcgtttgcgatgtcgatggcagggttagttatcccctatctcgtgtctcaaaagagcgacgttgctgtcctgattggcttcgtgctgatgttcacaacccccttcgcttcctataaagcggctaaaagcattatccatcaactaattacaggaaaaacaaaatga

SEQ ID NO: 220872 - DNA, 828 bp, Klebsiella pneumoniae
atgaaaaagggaattatcgcactggctgtcgtagcggccatgaccatgttaacaggctgcgagtacgttaagcctggtgaagtgggtattaaggttaacaaccttggagaagacaaaggcgtcggcgaagtcgttggtgtcggtcgcgtatggactggctggaataccactctgtataccttccctactttcaagcagatgaagtcgtatgaagacgccttcaacttccaaatgagcgatggtacagcgatcggctaccacattggtgtaacttacaaagtagacccgaccaaagtcaccaccatcttccagacctaccgtaaaggcgtcgacgatatcaccgaaaccgatctgaaacagaagatcgcagacgtgctgattaaacaagccagccacatgaccactgaccgctttatcgacggcggcaagactgaacttctggatagttctctgaaagcaattcagaccgaaatggggccggttggtattcaggttctcagtctgtcgtggatgggcaagccggagtacccgccgagcgttatcgagtccattaacgccaaagtgacggcgaaccagaccacgctgcaacgtgagcagcaggttaagcaaaaagaagctgaagcaaacatggttcgcgcccaggcagcgggtgaagctgacgccaaggaaactctggctaaggctgatgctgaatctatccgcatccgcggtgatgctctccgccagaacccggaggttatgcagctggaagccatcaacaaatggaacggcacgctgccgcagtacatgaccaacggcgcgaataccccattcattaccgttaagtaa

SEQ ID NO: 220873 - DNA, 258 bp, Klebsiella pneumoniae
atggataattcctgggtcgataaaaatctaacctctatctcggtttcagatatcaccaagccgctcaccggccgcatcgctcgcgtcgattactggtggcttgagaaagatggccaagtcttcaaaacgaaacacagcaatgccttccagtgcaacaaagaccgccgtgtcattgagacggtttatgcacaaatgattcgcgacgatgggttttcagtaatcaatatccctgttgcttacgtggagccaagactatga

SEQ ID NO: 220874 - DNA, 741 bp, Klebsiella pneumoniae
atgacggtaactagacaaaagcctgaagtgagcagcgggacagcattcaaaaatcgagacatggtaacgcatccggcatttggtctggttcgagttggtcgtgtcaattcatccggcaccaatctgttcgactctgacatcgatcaccgcgagttaattgaattaacgttccatacagcggccattgagcaggatggatacagcaatcgcatcactaaaggagaagaccgcagccctcttctggtagctcgactcagcgcggcgcagtgggcagcgatggtatccagcttcggcgttggcgagggtgtcccatgcactctgtctaagatccgcgatggaaagctcgttcaccttcctgaaatagagaagtctgaaacgatgcacgagcgtttctctaaagatattgcagcgcgggtacagaaagacatcaccaggatcgaagcaattaccgaccagcttggttcgctgatcgccagcgggaaaattagcaagcgagatttgcgcgacatctacgattcgctttccagtgcagtcaataacctcccaggcaatatggcatttggcgcagaactaacacaggaagcagtcgacaaaattgttgcatctggaaaagcggaagtcgaagcgtatatcgccggcgctgcgatgcgtctggggcttgagcagatggtcacaaccggcccagaactcaacatcaacgaggatattttgaaaatgctggagagtaagaatggcgcctaa

SEQ ID NO: 220875 - DNA, 312 bp, Klebsiella pneumoniae
atggcgcctaattacggacaaatttttgaatgtctgaagtctatgtatgaggttgaaagcgacgattcggtctgggaaatcctcaatcaaagcgatgaccctgttgaagagatcgcgaaggctctgaagctattggggaatccgaacgtcgagctggagtgggatgctgatggtgagcctaacttttacactctactccgaaacggaaaatggttcgccaaggttcagctcaacggcgagatgagtaccggccagcaagaagcctttttaagcacgtttgccactaaacacgagaggaagccaaatgcgtaa

SEQ ID NO: 220876 - DNA, 153 bp, Klebsiella pneumoniae
atgcgtaacaaatacccaggttgctgctactactgcaagaattgggtcgccaaaggtgaaggtcattttgagcgcttcgctggtcgattccgcgttattcacgccgattgtgtgctgaaacaacgccaggcgaaatccgcggccgctgcgtga

SEQ ID NO: 220877 - DNA, 273 bp, Klebsiella pneumoniae
atgaaggctttattacaagtttgcgcatcacttaatacgtcatattcaccttattctattttagacgtgcctgacggaacgagcgatgatgacttgcatgtaatcgctagtcagatcctgccatcgctttatggtagcgaagataccgttacggttgacgaggatggtgtttgctggagtaacggtgaatgctggtatatcgaggacttgcgctttattagcgaggaagacgcggcacatttgacccgcatccttgggctttccacgatctaa

SEQ ID NO: 220878 - DNA, 153 bp, Klebsiella pneumoniae
atgccgttcctgtatttagcaacatcagtttttttgctctttgacagcgtattcgttggcagtttcagaaaagccttagcaccggtcaatggccggattgtagatgttttggtgggcgtgtttctggctatcactttagggaagttcttctaa

SEQ ID NO: 220879 - DNA, 339 bp, Klebsiella pneumoniae
atgaaaacgatttttgcagctaccctgactatcctgactttgctaccgaatgtaggcaactcagccgtgatgaaatgccagatgaacattatgcgcatagagaatggcgaaatgtccggcgctccgcatcgtattgcagaggcgatcctgacagctgactcccgccaattctatgccgtggtcggtgagcgaataatcagctcacctatactatcggagaacaaaggtaatttggccgcttaccattctggcactgcttactttatgcgaaaagactccttcggcgtgatctacgacgactttggttatgtgtttgatgaatgtgaaaaggtggcatga

SEQ ID NO: 220880 - DNA, 381 bp, Klebsiella pneumoniae
atggaagataaagaaatagagttttatcgtaatggtaatgtgagtatcactaacgctcgttttatggtaggcagcacgacttacgctatgcatggtgttacgtcagtaaagcgcggagaaaagattccatccaaggttggcccaattattactggcatcattggtatcttaatgattttcttagcagctacgctgatgtttaaagcaatcggtgtactggtcgttctctttgccatcttctggttcaagagcctcaaaacagaatatcttgtctttttaaatagcgcttctggtgagtcccaagccttaaccagtacggataaaagctacatcgatagcgttatccaccacctcaacgaagctattatccacagaggttaa

SEQ ID NO: 220881 - DNA, 1917 bp, Klebsiella pneumoniae
atgaaattcctaaatctgaaagttgaaaactttatggtcattgccgaggcgagtgtcgatctggacaatcgcggtctggtgctgattcagggcattaacgccgccgactccagtgccgcgagtaatggcgccggcaaatccacgctgatgaatgctttgatgtggtgtttgtacggggagactgccactggatataagggtgatgacgttctgaactcaacgacgccaaagaactgccgcgtttccgtgaccattgaagacgaaggtaagcaatatgcggtaattcgtcaccgcgctcacaaagaattcaaaaatcgtctcattgtccgcagtgaagacggtgatttgaccaaaggcaaggacacgctgactcaggaactggttgagaggctgatcggctcttcgaaagaagtattcatggcatccatctatgccagtcaggaagctatgccggatttgccaggcatgacggataaaaatttgaaggcgattgttgaagaagccgctggcatcgaccgtctgacaaaggcttatgctatcgcccgcgacagagctaatgcgatgagcgctcgactcgacagagccaacgctcaggctgaaagcacagtatcgcttatcacttcaacagagacggagattgagaccagtttagccgctgccgaggcgtgggagagaacacgttccgttaggctcgatgaagcacgagccgaagcgactctgatcgaagtcaaggtaacggaggccagcatggaaatggccgacatcccggccaccatcaacaaaattgagaaccaaatcacggatgaaaagaaaaagctttccggtagggctgagcatgataagaaagttcaggcagcgaacacaatggtggctgatgcagcggcggagatccgagcgactgaatcagctcgcgacagagccattagcgcagcaaaaaaagccaagctgaatgcggataatgtcaattcaagcgtaggcaaaccatgctcgacgtgcggcaagccatacaccagcgatgatctgtctcacgttcacgataactacgtcggcgaagtccgcaagtatgtagacgaagctaaatcactaacagcggatttagcggccaaaactgagcgtcacgataaaatcgtcgtactgcgtgatcgtcttgttgcgtcgacccccgacgtctccgcaatcactgagcgcatttctgagcttacccgcagtctgggtaacgtaaagtcacggcaagtcgaaataaaagcggcagagagcgctctggctcgcgcaaacgcacaagttaaagcgatctcagaagaagccaaccctcacaatgcagctatttcccgtcatcgcgaaaatctggcaatgcacaaagaaaagctgaaagagatccgacgcgaaatcgaagggatgaaagatcaggcactgctgcttgagaaggcgcgtcaggtttactctccggccggagttcgttcacatattctgacggcggtaacaccattcctgaacgataaaacggcggaatatctgagcacgatgtcggacggcaacatctctgccgtctggtcgacgatggataccacgaagaaaggagagatccgcgacaaattcaacattgccgttgagaagaccggattcagtaaagacttccgcggtctgtccggtggtgaaaagcggaaagtgcgtctggcttgtgcgctggctcttcaggatatggtcgcgaaccgggccagcaaaagcattcagttgtttatcggcgatgagatcgatgatgcactggattcggcgggacttgagcgtctgatggggattctggaagcgaaggcgcgtgagcgtggtacggtgatgatcgtctcgcacaaggagatgaagtcgtggttccgcgaaacggtgacgctggaagtcaaagagggccgcagctatgtcgtttaa

SEQ ID NO: 220882 - DNA, 354 bp, Klebsiella pneumoniae
gtggatatcaagcggcttttccagatgaagagaccatgccctgactgtcctttcctgaagagcggaggtatagagcttcatgagggacgtctggaacagattaaaaatgacttactggcagacgatcagagaccgtttcagtgccataaaacaacctactcaacaggcggaagatatgacgacgacggggagcgatatctaccgtcaggaaaggaggcttactgtgccggcgcaatggctttcttgtatgccaacagaagaatgaatgttccgatgcggcttggcatcatctatggcgccctgaatgtcgatgatttagaagccacaatcccgttaatagacaccagtgtctaa

SEQ ID NO: 220883 - DNA, 570 bp, Klebsiella pneumoniae
atggcgaagaaaacaacaaaacaaaaaggcatcaaatacaaccggcagaaacatatctctgacaaaaacatggcgacaaaatttgacccgcgcttgaaagaggttgttctgtatacggacggatcatgcctgaagaacccaggcggtgctggtggagttgcggccatcgttcgttttggcgaacaccataaaacagttcaagaaggttttcgctccacaaccaataaccgcatggaaatgctcgctgcgatccgagggttggatctacttaatcaaaaatgcaacgtgacgatctacacggatagccagtacctaattaatggcatttcgctgtggattaaaggttggaaaaagcgcggctggaagctggcgaacggtgagcgagttaaaaatgtggatctctggcaggaattggatgcggcggtgtccggtcatcgtgtccgttggtgttgggtcaaaggccataatggaaacccagacaatgagctatgcgacatgatggcgcgatcggccgctgaatcaccgacgatggttgatcgtatttacgaatcaatttctgcctataattga

SEQ ID NO: 220884 - DNA, 525 bp, Klebsiella pneumoniae
atgatcagtctccttcttatcagaaaacacatcaatcgccgcttcgatctcattcacaaaacctatcaggctgaaattagtcttttatcgagtcgaattgccgcgctcgagtcccgtcttagtcgggtagagggtagtgctgcagatgccgacggcaaagtgtcacgtccgtggcaaatttccaaggaaggaaatgtcacgttagagaaagcagttgtcgaaacggcgctgatatcatcagggataattaccaatggaaaagtatcaagtaaagaggctaagacctctggcgatactggtttgcgggctaactttggctccggtcgtgctgactccaaccggtcttctactggagcaggctctgcccagccacaatacgactcatacgccgggtacgaaggcgccacattctcagggtcagtctcctcgcaccacaaccaccaccacgggcatgactgcggaagcactggagggtatgactctggatgctccgattcgtccttttcatcagggtcttgtgactaa

SEQ ID NO: 220885 - DNA, 156 bp, Klebsiella pneumoniae
atggcccgcgtcagcatcgcgctggcgctactgatgttatctgtgctggtggacttcaccagccggattatgtctgtagccgctgacggagtccttgtcattacggggcttgtgattctcatgccgatactgattaaaggcataaaagttaaataa

SEQ ID NO: 220886 - DNA, 789 bp, Klebsiella pneumoniae
atgaaagaattaattatcaaaacctctacgccatctatgacgagtgccgagatcgctgcgctggtgggcagtcgtcacgacagtgtgaaaagaaccatcgagcgactggttaaatcaggcgtaatcacttctccaccattggtggaaaagcccacggcaggccgtccggtggcggtttatgtgttttctggtgaagaaggaaagcgtgacacctatgtcgtcgttgcgcagctaagcccagagtttactggtctactcgttgaccgctggcaggagctggagaacgctgcaaaagagccgccactcccgcgtacctacaaagaggcgctactccatctggtggcccaggtagaagagaacgaacgtctgactgaacagaatgaagcgctggatgaagcgctgagcatcgctcgccctaaagctattctcatggatcgcttagccggaacgtcagagcaactttatggtatcaacgaagctggtcgcattctgggtacgtcaggggctgttatggcttcctgtatggatatggttggcaatgtctttgctaaaagaaaatactccaccaccccgcgccagtttgtgaagcaattcattgatcgcgagtacggccgcaacgtaaccagcaccagtggcggtcacattcaggcgaagtttacgtttaaggggctttgctatgttgcactccacctcgttaaacgcgggatcatcaccgtagacaccattccgtatcgcccatgccgcgacagcgtcgaagccgccatggcaatgaaaaagtcagcagcctga

SEQ ID NO: 220887 - DNA, 435 bp, Klebsiella pneumoniae
atgtgcattcgctgtgaagaacgtaaagcaaaaaaagaagtagtcctgagccacgccaacgaaatcgccgatcttgccatcttagttgacggtggagtcaaaggaatctcggatgcgctgcgaattacatctcgtcttgaggcattgagtagcgaaggtcttcttgagtctatgagtttgatcactcttatcgcccactttgccagccagaacaaagagctggaggctgacaacaagcgtctgcatgagactctgaattatatgacgatgagcgaaaaatctgcgccgtcggacggtaataaaatgtcgaatgaagaggcgttgcatgtcgtcgaaaccatcgtaaataccttcgaactggctcaggcacgagcaatggacggggctaatgcccagatccgcgaactgaagaatcgctttagcattaacaagtaa

SEQ ID NO: 220888 - DNA, 639 bp, Klebsiella pneumoniae
atgaatatcatcgacaaggctaaaatgttcgcggccggcgcccacgctggtgtaggccagaagcgcaaatataccggtgaggattacatcactcacccgattgcagtggccgagattgttcgcaacaacggcggaactgacgaaatgatcgcagcggcaatgctccacgacaccatcgaggatacacaggtcacgttcggtcacatcttcagtatgttcggggaccgcgttgctgaaatggtcgatgcgctgagcaataaggccaagccagaagacggcaatcgtgagacgcgattctttatcaacgtccgtgcgctacgtgagcgactcgacatgcagagccgcgtcatcaagctggctgacctgattcacaacactcagtcaattacgaagtacgatcagaaattcgcggcgcaatacctggctgaaaaggcgttcatgttgagcgtgatattcagaggtgtcgagattggtgcgtctgatgaagagattgagtccagagtcggcgaccaccctcttttggttgaagcggaaaagattgtcgccacagcgctttcccgacttcccgatgagctgttcttcaagtcagatcgaattaatgccggtctgatggagaaatggaagtcgatggaagcctga

SEQ ID NO: 220889 - DNA, 321 bp, Klebsiella pneumoniae
atgagcctgaatattactgaatcatacaaagtcgccgttatcagcaccgcccacgttactcaagcggactccgagatactgcctcaaatcagctttgacccaatcactgaccgtggctataactggattcacggtactgagtatggttggattatccgtgccggtcttcacgctaagtcatggaaggagtctttgcgcgaggaaggcattagctggtcgactatcgagaacatcgagaaagtcctgagtgccggctttgaggtggtgcatttcgaccgagacgcagatacgattgacgggttaaacatttgggaatggtag

SEQ ID NO: 220890 - DNA, 225 bp, Klebsiella pneumoniae
atgagcgtgaaaatgcctgatttattcaactactggactgtcgactcggttgctgagtgcatcgacggcgtgggtgaggaactgtaccgcaaactgtggtcgtttatcactccagagacggacggtgagaacgcgccgctggcgaaagtagcctgggagacgtttacggacgaagagaaggcgaaacttgccgctgctgtcgctaaagagttcccggaggattaa

SEQ ID NO: 220891 - DNA, 261 bp, Klebsiella pneumoniae
atggctaagttaacgaaggcgcaaaggcacgaactggatcagctgcgataccatcttgagcggggcattgcatatctcagacacgaaagtacggttgtttgttatcgacagaaccgcccggcaacatgcacgaccgattacaggtcgcatgacggcaagacgtcgctcgcgcctgtcagtatagaaatcggctcgaacatcgtcgggctatatgatgcgctgaaaattgttaaagattttttgaacgaacatagtcgatag

SEQ ID NO: 220892 - DNA, 366 bp, Klebsiella pneumoniae
atgtatctcaacgaaacacgaaacgagatttacgccatgaacaatactgagcgcctgttatcttcttactacgctacgctacgcaacgagttcaaagagaagcgaaagacgaacctgtccagcgtcactcttctggatatcgtcgcaaacggaactgcgatccgcgtattcaaagagaacaccgccagttttgataatggagtgtctagccgcgttgtcgttagtgtgcgccgcagtaagctgaagtctggctggactgctgtgcagaagactttccctatttcgcagcttgagacagccattgtgtacgcaaacaaaatggctcagaaagagatttcaagagagtcccttgctgctatcgcataa

SEQ ID NO: 220893 - DNA, 549 bp, Klebsiella pneumoniae
atgaacgcacctgcagacttcacttacggcatagacgctgagaatgaaagaaacctaaacacaacgatggattatttcaataacgcgcaacgcagaaaattacctgtaagggtggttacagcgaacgagctggttttctcgatgcttgttactggatttgacaccaagtcccatcgtatctatctcagcccattaaccgacaaccataaggctaatcgcgtcatcatacccgtcgattacatcatctcggcagagcacattgccgcctctgaagtcgatacagcctataagggtcaaacgacactgaagcgcggggattttgaggatggtggctttgtgcgttcggggaaagatttctttcaagttatccgatacgcccaccagcagggaaagcctataagggtctatctctcagacaaccgagtcttgaatggcgtgtccaccggcatgaatgagcagtcagcaggtataaggttgtcggacggcagagtcgtccagattttctatgattgggttgaccgaatcattccccttaatcaagaaatataa

SEQ ID NO: 220894 - DNA, 723 bp, Klebsiella pneumoniae
atggattgtatcaaaaatatggacgttaaaatcagtattttgacggtggagacagcgcagttacggccgaatccctggaatacgaatgtcgttggcgctcgaaacttcgacaagctgaaaaactcaatcgaccggcttggcttttttaagccgattctggttcgtgagttgctggacggcacttacgaaattctcggtggggagcaccgctggcgtgccgctattgagcagggtatggcaaccgttccagtcacctccgttggcgtgattgatgacaacaccgccaagcagatgtcactggttgataatgagcgttacggtgaagatgatgccgtcgagctgcagcgccttattgaaagtattcaggctgaaattgactattcgctggcagatattgccccgtatgacgaggaaatgactgaaacgctggcgcgtgagtccagtatcgacctggaagagctgggtctgttgggcgaagaggaagatcacgtcgttgagccggacactcgcgagaagaaggagcgtcttggcgttgaacaccagactatgcgcttcaaagtgtcatttgacacggcagagagcgtgacggaagtcatcaaaactatcatccgggagcaggggattaaaaccggcagcgaaatggaagacgctggcgaagctctggtgtggctcactcaatatttggatttgcccctatatttccagacacctgttatcacttaa

SEQ ID NO: 220895 - DNA, 606 bp, Klebsiella pneumoniae
atgacgaataacgccgacataaaaaaaaggaacttcctgactcagaatgaaattgagtctttacttaaagcggccgataccggtccttatgctgcacgtaattattgcctgacgttactgtgcttcatccatggcctgcgcgccagcgagatctgtcgtctacgaatatcggatatcgaccttgctgcccgatgtgtttacatccatcggcttaaaaaagggttttcgactacccacccgttgctggataaagagatctacgccctaaagcgctggctggccattcgcagcagctggccgcaggccgccagcgaatggctgtttctctcccgcaaaggtaatcccctttcccgccaacagttttatcagattatcgcgtcctcagggggactggcggggctgccactggagatccacccgcacatgctgcggcactcctgtggctttgcgttggcgaatatggggatcgatacccgcttgatacaggattatctcgggcatcgcaatatccgccacaccgtctggtataccgccagcaatgcgggacgcttctatggcatctgggacaatccccgtgacaaacagcgatcgtcgctgatccaatag

SEQ ID NO: 220896 - DNA, 897 bp, Klebsiella pneumoniae
atggcttttctctcacgtaatctgattctcgacctgctgctcaccgcgctggcgcccgctatctgggggacgacctacatcgtcacctcccagtttctgccccctgaccgcccatttattgctgcgctgctgagggtgctgccggcaggtatcgctcttctgatctggagccgtcgttttccgcaacgcggcgaatgggcaaagctgatcgttaccggcatcttaaatatcggcgcgtttcaggcgctgttgttcatcgccgcctatcgcttacccggcgggctggcggcggtgatcggcgcgatccagccgctgctggtgatgctcctcgcctggtgtgtcgaccggcagcgctcgccctggctggcggtgttctccgccatcgccggcatactcggtatggccatgctgctgctgtcgccgcacaccgtcctcgacccgctgggcatcggcgcggcgtttctcggggcgatcagtatggcgctgggcacctggctctcccggcgctgggcgctctccctgccgatcgtcgcgctgaccggctggcagctgacgatcggtggggtggtgctggccccggtggcgctgatcgttgaccctcctttgcatcagataacagtgctgcaggcggccggctatctgtggctgtgcctggcgggcgccatgctggcctatggcctgtggtttcgggggattggccgcctctcaccggtggccgtgtcggcgatgagtctgctgagcccggtgaccgccgtggtactgggatggatattcctcggacaaaagatccaggggatggcgctgatgggattgatcgtggtgctggcgagcgtgctgtctatccagctcgcgctggcgcgtcaggcggcgggagcaaaaacgaaaaaagccccgtaa

SEQ ID NO: 220897 - DNA, 897 bp, Klebsiella pneumoniae; identical to SEQ ID NO: 94333

SEQ ID NO: 220898 - DNA, 1182 bp, Klebsiella pneumoniae; identical to SEQ ID NO: 94334

SEQ ID NO: 220899 - DNA, 609 bp, Klebsiella pneumoniae; identical to SEQ ID NO: 94335

SEQ ID NO: 220900 - DNA, 903 bp, Klebsiella pneumoniae; identical to SEQ ID NO: 94336

SEQ ID NO: 220901 - DNA, 309 bp, Klebsiella pneumoniae
atgttagagttttttaaagaaatttatgcttcagtaaaatccaactctagtgaaatagttaaaaattactatattggagcatttatattctcgtggctcactattaactggaaatttggtttaacgatactttttagtgaaagtaagattgaagagagaatagataaagcaggtttttatctaaccactgacaagtgtctgactctcccctttattgtatctgtttccatttgtttattgctgcccattattaatatgattattgcttacgctcaaagaaaccctaataagtatttgcgcggcgggtga

SEQ ID NO: 220902 - DNA, 528 bp, Klebsiella pneumoniae; identical to SEQ ID NO: 94152

SEQ ID NO: 220903 - DNA, 270 bp, Klebsiella pneumoniae; identical to SEQ ID NO: 94153

SEQ ID NO: 220904 - DNA, 1176 bp, Klebsiella pneumoniae; identical to SEQ ID NO: 94154

SEQ ID NO: 220905 - DNA, 1248 bp, Klebsiella pneumoniae; identical to SEQ ID NO: 94155

SEQ ID NO: 220906 - DNA, 1752 bp, Klebsiella pneumoniae
atgatacaacgcggcatttccgcccttaaagactgtctgggcgcggataatgcttcggctcttctcaggcccgcagaattgcgggtcggtgaggcggccgccttttattttcctttacccgctgattacaccggccttgagcgaagactacggattggttttcccaacggtttcccgtctgaatcccctagccttcaggttgaaccttcaccgtggttagtctggccccatgccatggcgtccgggttgtgtctccatggattcagggaaaagcccgttacgggctcgcctgagaaaattgttcaggacagcttgtcccgttttgcgagcattgtgtctttttctctggaaaacgcagatcctgcacggcgtgagatggagtttcagaatgaaatttccacttactggctctggcagcttaaacgatcggcacgtagcctgattcttctgggggaacctgaatcgggttcagttttgtatgttgtaagcgatccgaggtataccggacatactggtctcaacccggtatgggtttcgtctgacaagaacgctatccgccggcatttcagacatgccactggccgttcggttgtgataagaagcccccatgaagcaggtttctttgtcaaactgacgtctttgcctggcattaaggtgcctgaacctcacgcgtttctcgaatggcttgctccccatatttctgaagaatccctggccgcgatgtctgaatggtcagaaaaaagtagtgctttgctttctcgatgggttgtcatggcattaccgggtggggacggggcggcaagatttactgttaacctgtgcaccagaaagaaggaaacagaccgtacaaatttttacggcctgagatcctcacgccgtcagtccgggttaaagaaagaaggacctccggccagtattctgtcatcgcgtgtgaacgttattgatcgtggggcatttttttcacgggatcgaagtaacacagcaaaaacacttgagaactcgcatgttgtctttgtcggtgtagggtcgctgggatctgctgtgagtattcaactcgccagggccggtctgggcaggctgacccttatcgatcctgacagactggagtcacccaatctggggcggcatatgctgggtgctgaggatttaggcaaatttaagtctcaggccatgcgccatcgtctgcttcaggatctgcctgtgcttgatgtcaccgcgctggatacatacatcgaatgggttatgggtcaaaaacccgatattttcgaggatgttgatctggttattatcacgacagctgactgggaatcagagtctgccctctgggaaaagaaagcctccggagcgaaatgggggctgatacaggcctggagtgagccgcatacacttgtcgggcatgcactgatcgcacctgaaggccgctttgatgcaagatatctttttagcgatagaggtgacttcaagcaccggtttaccgactggccggatgggggcgttgtgcctcttcctgcctgcggtgaaagttttataccgggaggctcggcgggaatgaatggtgttgcaacaatggtcactcaggccgcaatacgttacctgacgactgtaggggatgtcactcaatggcattccagtgtgtatcgccctgatgaggccggagtgttaggaggacgctatacgggacctgtacttcctgaaggagttgtccagagtatttttgaacgtaactggccgaaacccgggcaaaacgcatga

SEQ ID NO: 220907 - DNA, 498 bp, Klebsiella pneumoniae; identical to SEQ ID NO: 94157

SEQ ID NO: 220908 - DNA, 543 bp, Klebsiella pneumoniae
atgaatgctagcgagattttcgtttcagtcgatattgaaacatccggcccggtcccgggattatttagtctgctttccattggggcctgtctggtgcatgcgcccgacgtgcgtttttatgccgagttgaagcctgactgtactggctttgatcctgaggcgctggcagtgacgggatttaaccttcaggcactggctaccaccggcatagcccccgcggacgccatgcttcagttatccacctggctcacatcccaccttcaaccgagccagaagccggtctttacgggactgaatgccccctttgactggtcattcatcaattactacttccataaatatacggggaacaacccatttggcttcagtgcattagatattaaagcttactttatgggggcaacaggctgtacgtggtctgagaccaaatcatcaatgatgacacagcgtttatctgccaaaggaagacccagccataatgctctggatgatgcattatttcaggcagagctttttgcgttgatgcaaaataaagggtcttga

SEQ ID NO: 220909 - DNA, 192 bp, Klebsiella pneumoniae
atgtccgccctgtgcggaaaaatctacaataagcgaatgcgtaatatttacgatgagatgtgcctgcggggtaaacctgaaatggtggccattggcgcgctgatgcggaaactggtgcactggtgttatggcgtcctgaagaccggaaccgtttttaatgacgaaggcctgaaaccggtactgtcatcctga

SEQ ID NO: 220910 - DNA, 1080 bp, Klebsiella pneumoniae
atgaaaacagcaaccgcagtcataagccgttgtgccttacgccacaacctgcagcaggtgcgacgtctggcgccacacagtcgattaatcgccgtaataaaagctaacgcatacggccacggtgccctggcaaccgccctcgccctgaaggatgctgacggttacggtgtcgcccgcctgtcggaagcgcttgtgctgcgccaggaaggcatcaccaaacccattctgctgctggaaggattcttatccaaagacgagcttcctttgctggccgagaatcactttgaaaccgtcgtgcataatattgaacagcttttcgcacttgaacagaccgttctgccccaccccattacggtgtggatgaaactggataccggcatgcatcgattgggcatccgtccagacctggctgaggaattctatcagaggctgtgcaactgccgcaacgtagtgcaaccagtcaacatcatgagtcacctctgccgtgcggacgaacctgaggaagaaaccacacacagtcagctggaatgcttcgacgcattcgtccagtgtaagcccggcgtacaatccatcactgcctctagtggtattcttctgtggccacaggcccatcgcggccaggttcgtcccggtatcatcctgtacggcgtgtcaccgatagtaactcaggatgctgcggacttcggctttgaaccctgcatgacactgacatcctgccttatcgcagtacgcgagcataaggcaggcgaacctgtgggctatggcggtgactggaccagcacgcgcgatacctgcctcggtgtggtagcaatgggctacggcgacggctacccccgcagcgcgccttacggcacacctgtgcttgtcaatggccgggaagtaccgttggctggccgggtttccatggacatggtcacggttgatctcggtcccaaggctctggatcaggtgggagataaagtcattttttggggcaaggaactgccggtggaacgcatcgcccgtcataccggtatcggcgctggcgagttgattactcgcctgacacaacgcacagcactcgaatatgttgatgactga

SEQ ID NO: 220911 - DNA, 786 bp, Klebsiella pneumoniae
atgaatatgacaatgacggttgtggcaggtgcaattgccctgacgatgatgttgaacacagctcatgctgcagaacagaaaacagtaaaactcggtctgagtccggcctatgcgccatttgaaagcaaaacccctgacggcaagctggttggattcgatattgatatcggcaacgaagtctgtaagcgaattcaggctaattgcgtttgggtggagatgtcttttgacggacttattcccgcgttagtaagtaaaaaaattgacatcatcaactcatcaatgaacatcacagaaaaacgacagaaaagtatctcctttaccaatcccatttatattatgccgatccaactggtcgccaggaaaaactccggattactaccgacagtggaaagtctcaaaggtaaaagtgtaggcgtgcaacagggcacgacacaagaagattatgctaaagcgcactgggccaacgctggagtaaatgtcgttacctatcaggaccaagaccaggtattcatggacttatccgctggtcgtctggatggcgcagttcaggaatcacagacagcacagcaggcatttctaagtaaagatgaaggtaaagaattcagctttgccggcgattcactgaaagaccctgtcacattgggacaaggtactggtatggggttacgtcagaaagatacagagttgcagcagcaggtaaataatgctctgaatgaaatgaaaaaagatggaactctactgaaactttcaactcagtattttaatagaaacattattgctgaatag

SEQ ID NO: 220912 - DNA, 774 bp, Klebsiella pneumoniae
atgtcagaaactaaattaaacgtcgtcgagttgcacaaaagctacggagagcacgaagtgctgaagggcgtctccctgcaagccagggctggtgatgtgatcagcattatcggctcttccggctccggtaagagtaccttcctgcgctgtatcaattttcttgaaaaacccagcgaaggctccatcagcgtgaataacgagatgatccacctggtacgggacaaagacgggcaacttaaggtagcagataaaaatcagctacgccgtctgagaaccagcctgaccatggtatttcagcacttcaacctgtggagtcatctgaccgtgctggaaaatgtgatggaagcccctgttcgcgtgttagggctcagtaaggaatccgcacgggaacgggcgatgaaatatctgtccaaggtgggcattgacgaacgggcgcaaagtaaatatccggccaatctttccggaggacaacagcagcgagtgtccattgcccgggctctggcgatggagccggaagtgttgttgttcgacgaacccacttcggcactggacccggaactggtgggggaagtgctgaaaatcatgaggcagctggcagaagaaggaaaaaccatggtggttgtcacccacgaaatggagtttgcacgtcacgtatccagtcaggtgatcttcctgcatcagggaaaaatcgaagaacaagggcctccgtccggggtatttggcaacccgcaaagcccgcgccttcgtcagtttttatccggtgcgctgaaataa

SEQ ID NO: 220913 - DNA, 717 bp, Klebsiella pneumoniae; identical to SEQ ID NO: 170468

SEQ ID NO: 220914 - DNA, 687 bp, Klebsiella pneumoniae
atgctgcatggttttggtgtactaattttccagggggcgctaaccagcctggagctcgccctgagttctgctgtactggcggtggcgatcggtatgctgggcgctgccggaaagctgtcgaaaaacgtttcagtggtaaaactgacgtcggcctacactaccctgataaggggcgtgccggatctggtccttatgctgctgatcttttatggacttcagattgcttttaacaaattcaccgaggtcttcgggctgagccagattgacatcgatccaatggtggccggcattttgacactggcctttatctacggggcttacttcattgaaaccttccgcggcgcttttatggccgtaccctgggggcagcttgaggcagcggatgcctttggcttcgccaggaggcagcgttttcagtacattctgtttccggcgatgatgcgctacgcactgcccggcatcggcaataactggcaggtcatgatcaaagccactgccctggtgtcactgctcggtctggaagacctggtgaaagccactcaactggccgggaaaagtacctggcagccgttttacttcgcactggtctgcgccgcggtatacctgttcttcaccacattatccaatgtcgtgttgtggtggctggaacgacgttacaccgtgggcgtgaagagggccgcattatga

SEQ ID NO: 220915 - DNA, 990 bp, Klebsiella pneumoniae
atgatgaataattttttagatctgacgcttcgtggcatggtaccggacgttcgcagtgagggtggaaaagacttatcctggcactggcggggggaaggaatactggagctggttccccataccggttaccagcgcgctatcgtgctgtcggcaggtatccacggcaatgaaaccgccccggtagaactgcttgcagcgatagtagatgacctgctggcgggtagattaccgcttgccgctcgtctgctggtactgtacggcaatccaccggccatccgcgccggacaacgctacctgactcacgatctcaaccgcctgttctccagccgtcatcatcaatatcctggtggggaagagtcggcacgcgcccaggagctggagcagaccgtgaccgacttcttcacccgggacagcgatagcgacaacatcgaacgctggcacttcgatcttcacaccacccgacatgcttcacacctgccgcgcttcggcctgctgccttttcagacccgccacggcagcgcggccttgcttagggcactggatgctgccggtttggatgcgctggtccaacataccgaaccgggtgccaccttcagccatttcaccagtgaacagctacgggcagacagttgcacgcttgagctagggggcgcccggcgctttggcgagaacgatctcagctcgtttggtgcggtggatagcatgttgcgcgccctgatcggagacgcgccgttgccggttcgtgctggcaaccccatgcgttatttcagggtaaaccggtcgctgattaaacacagcgagctcttgtgttttcatctggacgctgacgttccgaacttcaccccactcacggccggcaccctgatcggcgagctgccaggagaatgctggcgggtggaacacggcaccgaatggatactgtttcccaatcccaacgtcaccgtcggactacgcgccggtttactgctggcagaggaaaccgggacataa

SEQ ID NO: 220916 - DNA, 1500 bp, Klebsiella pneumoniae
atgttgcatccttcactctatatcgcaggtcagtggcggcatggccgcagtgctgaatttatcaagaccgatccgctggataaccagccgctgtggcggggccgggcggcggattcggcagacatcgccgacgcctgtgatgcggcgcgcacggcgttccccgtgtgggcgcggctgacgctggggcagcgcacggctgtggttgagcgtttcgccacgttgctggaacaacacaaggcgcaactggcggaagtcatcagccgcgaaaccagcaaaccgcgctgggaaacgctgactgaagtgcagtcgatgatcggcaaggttgacatctcgctacgcgcccttgagcagcgcaccggcgacagccataccccgatgaccgacggcgcggccacgctgcggcatcgtccgcacggagtactggcggtgtttggcccctacaatttccccggacacctgcctaacggccacatcgtccccgcactactggcgggcaactgcgtggtgttcaaaccaagcgagctgacgccgttcaccgctgaagagacagttaagctgtggcaacaagccggactgccgaagggcgtgctgaatctggtgcagggaggacgggacactggcgtggcgctggccgccagcccggcgatcgacggcctgttgttcaccggcagcgccggtaccggctaccagctgcaccgccaactggccggtcagccggaaaaaattctggcgctggagatgggcggcaacaacgcactgattatcgatgaggttaccgacgtgaacgcggcggtcaacctgactatccagtccgcctttatctccgccgggcagcgttgcacctgtgcccgtcgtctgctggtcaagcacggcgcggcgggcgacgcattcctgcaacggctggtcaccgtggcgggtcgcctgcgcgctggtcgctgggacgcggagccgcagccgtttatgggcggggtaatttccgcgcaagcggcggaacgcatgatggcggtacagcaggcactgctggaactgggcgcgacgccgctgctggcgatgacccggccggaggataacaacgcgctgctgatgccgggcatcctcgatatcaccggcgtcgatggcgtgccggacgaagagtatttcggtccgctgacctgcgtgacgcgctatgacgagttcgatgatgcgctgcgtctcgccaaccacactcgcttcgggctggctgtagggctggtgtcgccagaccgggcgctgttcgaccgcctgctgatggaagcgcgcgccggaatcgtcaactggaacaagccgttgaccggcgcatcgagcgccgcgccgttcggcggagtgggggcctcgggcaaccatcgcgccagcgccttctacgccgccgactactgcgcctggccgatggcctcgctggaaagcgcagcgctgacgctgcccgccaccttgccgccagggctcaaccttaatgatgcgcagagcgggaacagagaagcatga

SEQ ID NO: 220917 - DNA, 1038 bp, Klebsiella pneumoniae
atgatggttattcgtcccgttgagtcccgcgatctgcctgccctgatggcactggccggcaaagccggtgtcggactcacttccctgccgcaaaatgaagatattctggccgggcgcatcactcgttctcaggaaacctggcagggcctgcgcccccgtggtgaacagggttacctgtttgtgctggaagacacagatagcggccgtgtcgtgggcatcagtgccctcgaagttgccgtggggttacacgaaccctggtacaacttccgggttgcgccacttgtgcacgccagcacctcactgaacgtgtacagttcgcatcaaacattatttctcagtaatgaccatacaggttgtacagaattatgcacgctgtatctcgacccggagtggcggcatagccataacggcaaattactctccaaagtacggtttctgtttcttgccgcgttccgcgactgcttcgcccagcgcgtagtggcggaaatgcgcggctacagtgacagcaacggacgctcaccgttctgggaggggctcggcaaccgattttttgccatggacttcgcccacgccgactacctgaccggtatcggccagaaagcatttatcgccgagctgatgccccggtatccgttgtatatcgattttctccccgaagaagccagagccgtgattggggaggttcacccggatactgttccggcccgccgactgctggagaccgaagggctgcgccaccgcggttacgtggacatctttgacggcggcgccacgcttgaggcggaactggacgaactgcgggtagtaaaagaaagccgcaaagtcacggtgtcgaccaacgaagcgccagtatcgacacctgactccacgctgctggtcgccaatgatcgctacctcaactatcgcgcgacgttagcacccggccatttttctcccgaaggcgttctgtacctgacgccgtccacagcggatgcgctggaaatcaagacaggcgatcgcgttcgggtggtttccctcaatccgctggagaacctataa

SEQ ID NO: 220918 - DNA, 1239 bp, Klebsiella pneumoniae
atgtcccagcatgcgaatgcggtacaccgcgaagattttgacagatatatggttccggtatattcccctgccccgttcattcccgtacgcgggcaaggctcccgtgtatgggaccagaacggaaaagagtatatcgatttcgctggcggtatcgcggtgaatgcactcgggcatgctcatcctcagttgctggcgactctgcaaacccaggcggccagcgtctgtcatctgggcaatggctacaccaacgagccagtgttgcggctggcgaaacagctgattgacgccacctttgccgacaaggcgttcttctgcaactccggtgcggaagccaacgaagctgcgctgaaactggcgcggaaagtggcctgcgatagcggtgtgccgaacaaaacccgcattctggcgttctgcaacgccttccacggccgtacgctgtttaccgtcagcgtgggcggtcagccgaaatacgcgaaagacttctcgccgctgccgggcggcatcgagcatgtaccgttcaacgatcttgccgcagctgcagcagcgatcgacgaccagacctgtgccgtgatcgtcgagccgattcagggcgaaggcggcgtgctgcctgcggacacggctttcctgcaagggctgcgtaagttgtgtgaccgccacggtgcgctgctgatttttgatgaggtacagaccggcgtcggccgcaccggcgcgctgtacgcttatatggaatacggcgtcacaccagatattttgaccagcgccaaagcactgggcggcggatttccgatcggtgccatgctcaccaccgatcggtttgcccccgctttcagcgcaggcacacatggtactacctggggtggtaaccccttagccagcgccgttgccggtacggtactggcgttgattaatactcctgaggtgctggacggcgtggccctacgccaccactggtttatcgaaggattacaagagattaacgccagattcccgctgttcagcgagatccgcggccgtggattactgatcggctgcgtgatggatcaggccttcgccggtcaggctaaacggctcaccagctatgccgcagaagagggattgatggcgctaatcgccgggtccgaagtggtgcgttttgccccctcgctgatcatccccgaggccgatgtgcgtgaggggctggcccggtttgcccacgccgcggaacgcctcgccgccgcaaccgggagtgatgcacgatga

SEQ ID NO: 220919 - DNA, 918 bp, Klebsiella pneumoniae
atgcaaacaaccagtcgtattttcatggttcgtcccgcttcctttaccgttaatcaggaaaccgccgtcacaaattatttccagcagaccgcgcaaatccctgatgcagcacaatcccttgcgcttgccgaattcacccgctatgttgacaccctgcaacaagcgggtatcgacgtacatgttttcgacgatcccacgggaacggatacccctgattcgttgttccccaataactggctgacgctgggtcatcagggcgaggccatcctctacccaatggaagcgccaaatcgtcgcaaagaacgaaatcctgaactgatcgccacactgtcagaacaattcacgattaaccaggtcattgatctttccgcgtttgagcaacaaggggaatttcttgaaggcacggggtcgatggtgtgcgatcacgagaataaaatcgcctggatttgtcgctcttcgcgaagttcgccgcatgtcatgacgtcggtagaagaaattaccggttaccgcgcaatgtggtttaatgctgacgaccgcagacaacaaccgatttatcacaccaatgtaatgatgagcatcggcaaaaaatatgcggtggtttgctttgaagcgatcagaaaccgtcaggaagccgccgtactctataaagggctacgtcaggcaggtaaagaaattatcgatattaccctgacacagacagaaaacttctgcggaaacattatcgaattgcatgccgaaaataatggccatcccgttctggcgatgtcaaagagagcgtggcaggcgtttactgactctcagcggcatattctttcagattacgctactattgtcgctccgtctctggatattattgaacaactcggcggtggcggggcgagatgtatggttggtgaaatattcagcccacggcgttag

SEQ ID NO: 220920 - DNA, 1014 bp, Klebsiella pneumoniae; identical to SEQ ID NO: 200262

SEQ ID NO: 220921 - DNA, 423 bp, Klebsiella pneumoniae; identical to SEQ ID NO: 94181

SEQ ID NO: 220922 - DNA, 2766 bp, Klebsiella pneumoniae
gtgcagcttaatatccgccgtccggaagtcctcacccgctacgctgaacgggataccacactcagagagcatactgcgctgattaaggaatattacggttaccatgaatttggcgattttccctggtctttccgcctgaagcgcctgctgtacacccgggcatggctcagtaatgagcgacccggcctgatgtttgattttgccaccgcgtggctgcttcagaataaggtcctgctgcccggagcaaccacacttgttcgtctcgtcagtgaaatacgcgaacgggcaaatcagcggctgtggaagaaactggccgcgttgccggacagctggcagaccgcccgcgtgacggaactgctggacattcctgaggggcaaggaatttcaccgctggaacaactgaaaaagggaccagtcaccgtcagcggaccggcatttaccgaagcgctggagcggtatgtccggctgcgaaaccttgagttttcccggctgaattttaccggcctgcccgctatacagctgcgtaatctggcgcgttacgcaggtatggcatcggtaaaatatatcgcacgcatgccagagcaaagaaaactggccgtactcacagcatttgttaaagctcaggaaataacagcgctggatgaggccgttgatgtgctcgatatgctgatactggacatcacccgcgaggcgaagaaaacggggcagaaaaagcggctcaggacgcttaaagatcttgaccgtgctgcgctactgctggcgcgggcatgttcattgttgctggataagcaggctgacgatgctgaactgagggagaccatcttcagctgcgtaccgaaaagcaggcaggcagaatccgtcagcaaggttaatgaacttgcccgccctcagaacaataacttccatgatgaaatggtggagcagtacggccgggttaagcgttttcttcctgcggtattgcgggatctgcatttccgcgctgcgcctgcaggagaacatacgctggccgcgattcattatctgaccgaactgaacggcccgaaaaagcgcatcctcgatgatgctcctgaacatatcatcaccggcccctggaaacgcctcgtgtacgatgcggaaggccggatacaacgcgccggttactcactgtgtctgctcgaacgccttcaggatgcactgcgccgccgggacatctggctcgaaaacagcgatcgctggggagatccccgtgagaagctgttgcagggtgaagagtggcaagctcagcgtatccccgtctgtcgtgcgctgggacatcccaccgatgggcataaaggcgtgcaacaactggccgttcagctggatgagacctggaaagccgtcgcatcccgatttgaagggaatgcggaagtccatgtttgcaatgacggtaaatatccttccctgaccattagtagcctggagaaactggaggagccacagtcattgctttgtctcaacagtcgggtcagacagttgcttcctccggttgatttgacggaattactgcttgaaatagacgccagaacaggatttacacgggaatttatgcatgtcagtgagtccggagcacgggcgcaggatctgcacgtcagcctgtgtgcggtcctgatggctgaagcctgcaatatcggactggaaccgctgataaagcacaatataccggcactgacccgccaccgtctcagttgggtgaaacagaattacctccgggcagaaacactggtcagcgccaatgcctgtctggttgattttcagtctacgctggagcttgccgggcgctggggcggtggcgaagtggcgtcagccgacggcatgcgctttgtcacgccggtgaaaaccgtcaattctgggcctaacagaaaatattttggttccgggcgtggcatcacctggtacaacttcgtctctgatcagtactctggattccacggcatcgttgtccccggcacattacgtgattccatttttgtgctggaaggccttctggagcagcagactgggctgaatccggttgagatcatgacagacacagctggtaccagcgatattatttttggcctgttctggctgctgggatatcagttttcaccccggcttgccgatgctggcgaagcgatattctggcgagtggataaatctgcaaactacggtgcactggatgcgctggcgcgaggatgtgcagatctgtcgaaggtagagaaccagtgggatgagatgatgcgaaccgccggttcgctgaagctgggtaccattcatgcttcagaactcattcgctctttgctcaaaagctcgcgcccatcaggattggcgcaggcgattatggaagtggtgcgcgtcaacaaaacgctgtaccttctcaattatattgatgatgaagattatcgtcggcggatcctgacacagctcaaccggggagaaggccgccatgctgtggcgcgagcgatttgctacgggcaacgcggtgagatcagaaagcgctatcgtgaagggcaggaagatcaactgggcgcactgggcctggtcactaacgcagtggtactgtggaacacgctttatatgcaggaagcactgagttggatgcgcagtcatggagaagaaaccggggatgaagatatcgcccggttatccccactgatgcacgggcatatcaatatgctggggcattatacgttcacgctaccggaggatattctgaagggagaaatgaggacattaaatttctatttaaacaatgaattatctccttaa

SEQ ID NO: 220923 - DNA, 2022 bp, Klebsiella pneumoniae
atgaaaatgacacggctttatcctctggccttggggggattattgctccccgccattgctaatgcccagacttcacagcaagacgaaagcacgctggtggttaccgccagtaaacaatcttcccgctcggcatcagccaacaacgtctcgtctactgttgtcagcacgccggaattaagcgacgccggcgtcaccgccagcgacaaactccccagagtcttgcccgggctcaatattgaaaatagcggcaacatgcttttttcgacgatctcgctacgcggcgtctcttcagcgcaggacttctataaccccgccgtcaccctgtatgtcgatggcgtccctcagctttccaccaacaccatccaggcgcttaccgatgtgcaaagcgtggagttgctgcgaggcccacagggaacgttatatggcaaaagcgctcagggcgggatcatcaacatcgtcacccagcagccggacagcacgccgcgcggctatattgaaggcggcgtcagtagccgcgacagttatcgaagtaagttcaacctgagcggccccattcaggatggcctgctgtacggcagcgtcaccctgttacgccaggttgatgacggcgacatgattaaccccgcgacgggaagcgatgacttaggcggcacccgcgccagcatagggaatgtgaaactgcgtctggcgccggacgatcagccctgggaaatgggctttgccgcctcacgcgaatgtacccgcgccacccaggacgcctatgtgggatggaatgatattaagggccgtaagctgtcgatcagcgatggttcaccagacccgtacatgcggcgctgcactgacagccagaccctgagtgggaaatacaccaccgatgactgggttttcaacctgatcagcgcctggcagcagcagcattattcgcgcaccttcccttccggttcgttaatcgtcaatatgcctcagcgctggaatcaggatgtgcaggagctgcgcgccgcaaccctgggcgatgcgcgtaccgttgatatggtgtttgggctgtaccggcagaacacccgcgagaagttaaattcagcctacgacatgccgacaatgccttatttaagcagtaccggctataccaccgctgaaacgctggccgcatacagtgacctgacctggcatttaaccgatcgttttgatatcggcggcggcgtgcgcttctcgcatgataaatccagtacacaatatcacggcagcatgctcggcaacccgtttggcgaccagggtaagagcaatgacgatcaggtgctcgggcagctatccgcaggctatatgctgaccgatgactggagagtgtatacccgtgtagcccagggatataaaccttccgggtacaacatcgtgcctactgcgggtcttgatgccaaaccgttcgtcgccgagaaatccatcaactatgaacttggcacccgctacgaaaccgctgacgtcacgctgcaagccgcgacgttttatacccacaccaaagacatgcagctttactctggcccggtcgggatgcagacattaagcaatgcgggtaaagccgacgccaccggcgttgagcttgaagcgaagtggcggtttgcgccaggctggtcatgggatatcaatggcaacgtgatccgttccgaattcaccaatgacagtgagttgtatcacggtaaccgggtgccgttcgtaccacgttatggcgcgggaagcagcgtgaacggcgtgattgatacgcgctatggcgcactgatgccccgactggcggttaatctggtcgggccgcattatttcgatggcgacaaccagttgcggcaaggcacctatgccaccctggacagcagcctgggctggcaggcgactgaacggatgaacatttccgtctatgtcgataacctgttcgaccgtcgttaccgtacctatggctacatgaacggcagcagcgccgtcgcgcaggtcaatatgggtcgcaccgtcggtatcaatacgcgaattgatttcttctga

SEQ ID NO: 220924 - DNA, 1578 bp, Klebsiella pneumoniae
atgaattcttcctttgaatctctgattgaacagtatcccttacccattgccgaacagttgcgccactgggcggcccgttatgcctcgcgaattgccgtcgttgatgcaaaggggtcgttaacctacagcgcgcttgatgcacaagttgacgaacttgccgcaggtctgtcatcactgggtttgcgttcgggggagcatgtaattgtgcagcttcccaacgacaacgcgtttgttaccctgctgttcgccttgttaagactgggcgttatccccgtgctggcgatgccctcgcaacgggcgctggatatcgacgcgctgattgagctggcgcaacccgtcgcttacgttattcacggggaaaaccacgcagagctggcccgacagatggcgcacaaacacgcctgcttgcgtcatgttctggtcgctggagagaccgtgagcgacgattttacgccgctcttctcccttcacggtgagcgacaggcatggccgcagcctgatgtttccgccaccgcgttgttgttgctctcaggcggcacaaccggcacgcccaaactcatcccgcgccgacatgccgactatagctataacttcagcgcttctgctgaactgtgcggcatcagccaacagagcgtgtatctcgccgtcctcccggtggcacataactttccgctggcctgccccggtattctgggaacgcttgcctgcggcggaaaagtggtgctgaccgacagcgccagctgtgatgaggtgatgcctttaatcgcgcaggaaagagtgactcacgtcgccctggttccggcgctggcgcaattatgggtgcaggccagggagtgggaagacagcgacctttcgtcgctgcgcgtcattcaggcaggcggcgcccggctcgacccgacgcttgctgagcaggttatcgccacctttgactgtaccctgcaacaggttttcggtatggcggaaggcctgctctgttttacccggctggacgatccgcatgccaccattctccacagccaggggcgcccgttgtcccctctggatgaaatccgcatcgttgatcaagacgagaacgacgtcgagccgggcgaaaccgggcaattgttaacgcgcggcccttataccatttcgggctattaccgcgcccctgcccacaacgcgcaggcctttaccgcgcaagggttttaccgcacaggcgacaatgtcaggctggatgaggtggggaacctgcacgttgagggacgcataaaagagcagatcaaccgcgccggagaaaaaatagccgcggctgaagtggaatcggcactgctgcgtttagcggaagtgcaagattgcgcggtggtcgccgcgccggacacgctgcttggcgagcggatttgcgcgtttatcatcgcgcagcaggtgccaactgactatcagcagttgcgtcaacaactgacccgtatggggctcagcgcgtggaaaattcctgaccaaatcgagtttctggaccactggccgctcaccgccgtcggcaagatagacaaaaaacgcctgacggctctcgccgtcgaccgttatcgccattctgcccaataa

SEQ ID NO: 220925 - DNA, 1101 bp, Klebsiella pneumoniae; identical to SEQ ID NO: 215999

SEQ ID NO: 220926 - DNA, 9492 bp, Klebsiella pneumoniae
atggataacttgcgcttctcttctgcgccgacagcagattccattgatgcatcgatcgctcaacactacccggactgcgaacctgtcgcggttatcggctacgcctgccattttcctgaatcgccggatggcgaaacgttctggcaaaatctgctggaaggtcgtgaatgcagccgacgctttacgcgcgaagagcttctggccgtcggtctggatgccgccatcattgacgatcctcattatgtcaatatcggtacggtgttagacaacgccgactgcttcgacgccaccctgtttggctattcgcgacaggaagcggagtcgatggacccgcagcagcgcctatttttgcaggcgatctggcatgcgctggaacatgccggttatgcccccggcgccgtcccccataagaccggcgttttcgcctcttcccggatgagtacctaccccggtcgcgaagcattgaacgtgacagaagtcgcgcaggtaaaaggtctgcaatctctgatgggcaatgataaagactatattgccacccgcgccgcgtacaaactcaacctgcacggcccggcgttatcggtacagaccgcctgctccagctcgctggttgccgtgcatctggcctgtgaaagcctgcgcgcaggcgaatccgatatggcggttgccggcggcgtggcgctctctttcccccagcaggcaggctaccgctatcagcccggaatgattttctctcctgatggtcactgtcgtccctttgacgcctcggctgagggcacctgggccggtaacggtctcggctgcgtggtgctgcgtcgcctgagagacgcgctgctgtcaggcgatccgattatctcggtgatcctctccagcgcggtcaacaacgacggcaacagaaaggtcggctataccgccccttccgtcgcagggcaacaggcagtcatcgaagaggcgttaatgctggcggccatcgacgacaggcaggtaggttacattgaaacccacggcaccggcacaccgctgggcgacgcgattgaaattgaagcgttacgcaacgtctatgcgcctcgcccgcaggatcagcgctgtgcgctcggttccgtgaaaagtaacatgggccatctggataccgcggcgggcattgccggactgctgaaaaccgttctggcagtcagtcgcgggcaaattcctcccttactgaattttcacacccccaacccggcgctgaaacttgaagagagcccctttaccataccggtgtcggcacaggcatggcaggacgaaatgcgctatgcgggcgtctcctcctttggtattggcggcaccaactgccatatgatcgtcgcctcgctgcccgaagcgctcaacgcgcgcctccccaatacggatagcggcagaaaaagtaccgcgctgctgctcagcgccgccagcgacagcgcgttgcggcggctggcgacagattatgcctgggcgctgagagagaatgcggatgccagctctctggccttcacagccctgcacgcgcgccgtctcgatctccccttccgcctggcggcgccattaaaccgtgaaaccgccgaggcgctcagcgcctgggccggtgagaaatcgggggggctggtttacagcggccacggcgccagcggcaagcaggtgtggctgtttaccggccagggctcgcactggcgcactatgggtcaaacgatgtaccagcactcaacggcgtttgccgacacgctggatcgctgtttttccgcctgtagcgaaatgctcacgccgtcactgcgcgaagcgatgtttaaccccgattcggcgcagctggacaatatggcctgggcgcagccggcgattgtcgcgtttgaaatcgcgatggcggcgcactggcgtgctgaaggactgaggccagacttcgccattgggcattccgtcggtgaatttgccgctgccgttgtctgcggacactatacgattgaacaggtcatgccactggtttgtcggcgcggcgcgctaatgcagcagtgcgcaagcggcgcgatggtggcggtatttgcagacgaagacacgctgatgcagctggctcgccagtttgagctggatctcgccgccaacaacggtacgcaacatacggtattttccgggccggaagcccatctcgcggtattttgcgccacgctctcgcagcatgacattaactatcgtcgcctgagcgtaaccggtgcggcgcactccgctttactggagccgatactcgatcggttccaggacgcctgcgcgggactgcacgcggagccggggcaaataccgattatttccacgctcaccgccgacgtcattgatgagtcaacgctcaaccaggcggattactggcgccgacacatgcgccagccggtgcgttttatccagagtattcaggtggcgcatcagctcggcgcccgcgtttttctggagatggggcccgatgcccagttggttgcttgcgggcagcgcgaataccgcgataacgcatactggatagccagcgcccggcgtaacaaagaggcgagcgatgtcctcaatcaggccctgctccagctttacgctgccggcgtcgccctaccgtgggccgacctgctggcgggcgatggacaacgtatcgctgcgccatgttatccgtttgatactgagcgttactggaaagagcgcgtctccccggcctgcgagcctgccgacgcagcgctgtctgccgggctggaggtggcgagtcgcgccgcgacagcgctcgatctccctcgcctggaagcgcttaaacagtgcgccacgcgactgcacgccatctacgtcgatcaactggtacaacgctgtaccggcgatgccattgagaacggcgtggacgccatgaccatcatgcgccgtggacgtctgctgccccgctaccagcagctactccagcgcctgctgaataactgcgtggtcgacggcgattaccgctgcaccgacgggcgatacgtccgcgcccgccccattgaacatcaacagcgggaatcactgctgacggaacttgccggttattgtgaaggttttcaggctattcccgacaccatcgcccgtgccggcgatcggttatatgaaatgatgagcggcgcggaagaaccggtggcgattatcttcccgcaaagcgcctccgacggcgtggaagtgctgtatcaggaattcagctttggccgctatttcaaccaaatcgccgccggggtattacgcggcattgtccagacgcgccagccccgccagccgttgcgtattcttgaagttggcggcggaaccggcggcaccaccgcgtggctgctgccggaactcaacggcgttccggcactggagtaccatttcaccgatatctcggcgctgttcacccgtcgcgcccagcagaaattcgccgactatgattttgtgaagtatagcgagctggatctcgaaaaagaggcgcagtctcagggtttccaggcacagtcttacgatcttatcgtggcagcgaacgtgattcacgccacccgccatattggccgcacgctcgataatctgcgccccctgctcaagccgggcgggcgcctgctgatgcgcgaaatcacccagccaatgcgtctgtttgacttcgttttcggcccgctggttcttccgctacaggatctcgacgcccgcgaaggtgagttattcctcaccaccgctcagtggcaacaacagtgccgccacgccggattcagcaaagtggcgtggctaccgcaggatggcagcccgaccgccgggatgagcgaacatatcattctcgccacgctgcccggtcaggcggttagcgccgtaacattcaccgcgccatcagaacccgtgttggggcaggcgctgacggataacggtgattatctcgccgactggtctgattgcgcaggtcagcccgaacggtttaacgcccgctggcaggaggcctggcgtctgctttcacagcgtcatggcgacgctctgcctgtggaaccgccccccgtcgccgccccggagtggctgggaaaggttcgcttaagctggcaaaacgaagcattttcccgcggtcagatgcgcgttgaagcccgtcatcctgctggcgagtggctgccgctatcgcccgccgcgcctcttcctgcgccgcagacgcattatcaatggcgctggacgcccctcaacgtcgccagcattgaccatccgcttacctttagcttcagcgccggtacgcttgcgcgcagcgacgagctggcgcaatacggcatcattcacgatccgcacgcctcttcgcgactgatgattgttgaggagagcgaggatacgctggccttagcggagaaagtgatagcagcgctcaccgccagcgcagccggattgattgtggttactcgccgcgcgtggcgagtcgaggaaaatgaagcactctctgcatcccatcacgcgctatgggccttgcttcgcgtcgcggccaacgaacagccggaacggttgcttgccgccatcgatctcgccgaaaacaccccgtgggaaacgctgcatcaagggttgagcgcagtctcactatcacagcgctggctcgccgcacggggtgacaccctttggctcccttcactggcgcccaatacgggatgcgccgctgaattaccggcaaacgtgtttaccggcgatagccgctggcatctggtgaccggagcgtttggcggattaggccgccttgccgtgaactggctcagagaaaaaggggcgcgacgcatcgccctgctggcgccgcgcgtggatgagtcatggctacgcgacgtggagggcgggcagacgcgcgtctgccgttgtgatgtgggcgatgccgggcaactggccacggttcttgacgatctggcggccaacggcggcattgccggagcgattcatgccgctggcgtattggctgacgcgcccttgcaggagcttgatgaccaccagctggctgccgttttcgcggtaaaagcgcaggcggcaagccagctgttgcaaaccctgcgcaaccacgacggacgctatcttattctctactcttccgctgccgccaccctcggcgcgccgggtcagagcgcccatgcgctggcctgcggctacctggacgggctggcccagcagttttccacccttgatgcgccgaaaacgctctctgtcgcctggggcgcatggggagaaagcggtcgggcggccacgccggaaatgctggcgacgctcgccagccgaggtatgggcgcgttaagcgatgccgaaggctgctggcacctggaacaggcggtgatgcgcggcgccccgtggcgactggcgatgcacgtttttaccgacaaaatgcccccgttacaacaggctctgtttaacatcagcgccacagaaaaagccgcaacgccggtcattcctcctgctgatgacaacgcctttaacggcagcctgagcgatgaaacagcggtgatggcatggctgaaaaagcggattgcggttcagctaaggctgagcgatccggcgtcactgcatccaaaccaggatctgttgcaactcggcatggactcgctgctcttccttgaactcagtagcgatattcagcactacctgggcgtacgcatcaatgcggaacgggcgtggcaggatctgtctcctcatggactcacgcagcttatctgttctaagccagaggcgacgcctgccgcttcgcagccggaagtgttgcggcacgacgccgacgagcgttatgcgcccttccctttgacgcccattcagcacgcctactggctggggcgaacccacctcattggctatggcggcgtcgcctgtcacgtcctgtttgagtgggataaacgccacgatgagttcgatctcgccatactggagaaagcatggaaccagctcatcgcacgccacgatatgttgcgtatggtggttgatgccgacgggcagcagcgaatcctggcgacaacgccggagtatcacatcccgcgtgacgatctgcgcgcgctttccccggaagaacagcgcatcgcgctggaaaaacggcggcatgaactgagctatcgcgttttgcctgccgaccagtggcctctttttgagctggtggtcagcgaaatcgacgattgccattaccgtctgcatatgaacctcgaccttttgcagtttgatgtgcagagttttaaagtcatgatggacgacctggcgcaggtctggcgcggtgaaacgctggcgccgctcgctattaccttccgtgattatgtgatggctgaacaggcgcgccgacagacatcggcatggcacgatgcctgggattactggcaggaaaaactgccgcaactgcccttagcgccagagctgccggtggttgagacgcccccggaaacgccacacttcaccaccttcaaatcgacgatcggcaagacagaatggcaggccgtgaaacagcgctggcagcagcaaggcgtcacaccgtctgccgcgctgctcacgctgtttgccgccacccttgagcgctggagtcgtaccacaacatttacgctgaacctgacgttcttcaatcgccagccgatccatccgcaaatcaaccagttgattggtgattttacctccgtcacgctggttgattttaacttctcagcgccggtgacgttgcaagagcagatgcaacagacccaacagcgcctctggcaaaacatggcgcacagtgaaatgaacggtgttgaggtgatccgtgagctgggccgcctgcgcggatcacaacgtcaaccgctgatgccggtagtgtttaccagtatgctggggatgacgctggaaggcatgactatcgatcaggcgatgagccatctgttcggcgaaccctgctatgtattcacgcaaacgccgcaggtctggctggatcatcaggtcatggagagcgacggcgagttgatgtttagctggtactgcatggacaacgtgctggaacccggcgctgccgaggcgatgtttaatgactattgcgccatcctgcaagccgtcatcgccgcccctgaaagcctgaagactctcgccagcggcatcgccgggcacattccccgccgacgctggccgctgaacgcgcaggcggactacgacctgcgggatattgagcaggcgacgctcgaataccccggcatccggcaggccagagcggaaataaccgaacagggcgcgttgacgctggatatcgtgatggccgacgatccgtcgccatcagcggcgatgcctgatgagcacgaacttacccaactggcgctgccgttgcctgagcaggcgcagcttgatgagctggaggcgacctggcgctggctggaggcgcgtgcgctacaggggatcgcggctacgctaaatcgtcacggcctgtttaccacgccggagatcgcccatcgctttagcgcaatagtacaggcgctgtccgcgcaagcgtctcaccagcgtctgctgcgccagtggctacagtgtctgacggaaagagagtggttaatccgcgaaggtgaaagctggcgctgccgcattccgctcagcgagattcctgagcctcaggaagcgtgcccgcaaagccaatggagccaggcgctggcccagtatctggaaacctgcatcgcccggcacgacgccctcttctccgggcagtgttctccgctggaattgctgttcaacgagcagcatcgcgttaccgacgcgctgtatcgcgacaaccccgccagcgcctgtctgaatcgctataccgcgcagattgccgccttgtgcagcgcagaacggattctggaggttggcgccggaaccgcagccactaccgcgccggtgctgaaggccacgcggaacacgcggcagtcgtaccacttcacggacgtctccgcgcagttcctcaatgacgccagagcccgtttccatgatgaatcgcaggtgtcttatgccttgttcgacatcaaccagccgctggatttcaccgcccacccggaggcgggttacgacctgatcgttgccgtcaatgtgctccacgacgccagccatgtcgtccagacgttgcgcagattaaaactgttgctgaaagccggcggacgtttgctgatcgttgaagcgacggagcgaaacagcgtattccagctggcgagcgtgggctttattgagggattaagcggataccgcgatttccgccgccgggatgagaaaccgatgctcacccgctccgcatggcaggaggttctcgttcaggccgggtttgcaaacgagctggcgtggcccgcgcaggaatcgtcgccgctgcgccagcatctgctggtggcgcgttcgcctggcgtaaatcgcccggataaaaaagccgtgagccgctatttacagcagcgctttggcaccggtctgcccattttacagatccggcaaagagaagcgttatttacgccgctgcatgccccgtctgatgcgccgactgagccagccaaacccacgccagttgccggggggaatccggcgctggaaaaacaggtggctgaactctggcaatcgctgctgtctcgccccgtggcaaggcatcacgactttttcgaactgggcggcgacagcctgatggcgacaaggatggtcgcgcagctaaaccggagagggattgccagggctaaccttcaggatctgttcagccattcgacgctgagcgacttctgcgcccatctacaggcggctacgtcaggagaggacaacccgatacccctttgccagggcgacggtgaggaaaccctgtttgtcttccacgcttcagacggcgatatcagcgcctggctgccgctcgctagcgcgttgaacaggcgcgttttcggcctgcaagcaaaatcgccgcagcgctttgccacgctcgaccagatgatcgatgagtatgtcgggtgcatccgtcgtcagcagcctcacggcccttatgtgctggcgggttggtcgtatggcgcgtttcttgcggcgggcgccgcacagcgcctgtacgccaaaggcgagcaggttcggatggtgttaatcgatcccgtgtgccgacaggatttctgttgcgaaaaccgggcggccctgctgcgcctgttagccgaaggacaaacgcctctggcactgcccgaacatttcgaccagcagacgcccgacagccagcttgccggctttatcagcctcgctaaaacggccggtatggtgtcgcaaaacctgacgctgcaagcggcagaaacgtggttcgacaacatcgcgcatctgctgcgtttactgactgagcatacgccgggcgaaagcgttccggtcccctgtctcatggtgtatgccgccgggagacccgcgcgctggacgccagcagaaaccgagtggcagggctggataaacaacgccgacgacgctgtgattgaagccagccactggcaaatcatgatggaagccccccacgttcaggcttgtgcgcaacacattacgcgctggctttgcgcaacctcaacgcaaccggagaacacgttatga

SEQ ID NO: 220927 - DNA, 690 bp, Klebsiella pneumoniae; identical to SEQ ID NO: 94068

SEQ ID NO: 220928 - DNA, 900 bp, Klebsiella pneumoniae
atggaaaatatggaaaataaaaggcaatttgatttgtggggtatcccttttgatggtgaagccacattagggtggccgggatcgcgttacgcaccggctaaagtgcgtgagtgtgcgcgatggattaatatgcgtattcagcagggaaaagtttattgtctggaaacagacagtgaaatggaagtaggtgatcagttactggtggatcgcggtgatgttgacataatacccagtgatacgcagaaaaccttcgctgcgacccgtaaagcggttatggcgtcgattgcagctaaccgtgtacccattatgattgggggcgacgatagcctgctgttcccggttgcccacggggttcatgatgcgcttccgggccggattggcattatccatttcgatgcgcatctggatttaatggatgagagtgaaatgcagggacgtcatagtcagtccagcggcatgcgccgctcactggagctggagcgcatcgcccctgaggattgtattcagctgtgcgaacgccatttcaactttccggcctccggcaagtttaagcatgataatgatttgattcaccttagtgcgcgtgaagtgctgaaaatcgggccggaagagacagtaaaacgtgctctggaacgcgttaaaaacgccgaccatctcttcctttccttcgatatcgattcggtcgatccggcatatgctccaggcgcgggcgcgcatgaaccaggcggcattacctctgaccaggcgttgcagatggtcagtatgttggcaccgcactgtgcagcaatggcgattactgaagtgaatccgactaaagatgtcggcgatatgacatcaacactggcagcttatcttgcctttaccttcgcggtatatggcagccagaaaagtaaggaatga

SEQ ID NO: 220929 - DNA, 693 bp, Klebsiella pneumoniae
atgaactgggatattattgccgataaccttggcatgtatgtggacggcaccggtttaacgctgctgcttacggtagtatcactggccatcgcctttatcatctcagtagtgctggcgctggcgcgcgacaatgcgccacgaccattacgttggctgatttttatttatgtcactgcttttcggggtacgccgttattgatccaactgttcctgatttattacgggcttgcgcagtttgatttattacgtaccagcttcctctggacctggctctcaagcccactcgtttgtgtattgttggcttttattttgaatacggccgcctatacgacagagatattcgcaggaggattgcgccatctacccactggcgaaattgaagccgccaaagcttatggcatgagctttaccacgctggccagacgtattttatttccggctatgttaagccgttcgctttcattatatggcaatgaaaccattatgatgcttcatgccacttcgctggccagcacagtaaccttaatggaagtaaccggtgtagcacgtaatatcagcctgaactattacatccagttcgaaccttatgttaccgccggagcaatctatctggttctgactcttgttctggttatggcatttcgctatttcgaaaaacgctatgcgggctatctgaatggcaagcgtagttaa

SEQ ID NO: 220930 - DNA, 690 bp, Klebsiella pneumoniae
atgttgggcaattactatttaatggttctgagtgcaggatgggtttcgctacaactggcgttcgcatcgttattattagccgtcattttaggattattgtgcgcactgggaaagcaatccggtgtccgctggatccaggcaatgatttcgccttatatcttgttggcgcgcggaattccagacctggttcttatgttactggttttttatagcctacctgctctgttaaatagcgccctgagtgagatgggggctgaatattctgtagaattcagccctttctattcctgtttaatgaccttgggatttatttttggcgcctatatgacggaaacatttcgttatgcgttaatcaatatcccacacggagaaatcgaagcagctcaggcatttggttttacccgtagcgcgatactgctgcgcattattatgccgcaactaatccgacttgccttacccggctttaccaacaactggctggtactggtcaaggcgacggcgctggcttctttactcggtttacaggacattatgttcagcgctaaaggggcggccgagtccaccggtaagcctttcacattttatctgctggcggctggtttttaccttgcgataacactggcgtcagtggcggtgttacatcgctttagccagcgctatgcgttggtggtacggggggccaaggcatga

SEQ ID NO: 220931 - DNA, 765 bp, Klebsiella pneumoniae
atgacaatagcaaaactgatcctgactctcgccgctgcaggttttgcgggatcgctgtatgccgcaccggacaaaatcaccatcgccaccgatgccacttttccgccgtttgaatccatcgatgcaaacggcaagctggtagggtatgacgttgatttgatgcatgccatctgtaaagcagcggcaatgaactgtcacgttatcagcgctccctgggatggcatgatccctggccttatgagtaacaaatatgatgcgctgatttcacaactgaccgtcacggatgcgcgccgtcgcgtgatggcattcagcgatatttatgatcgcccggtattccgctttgttgccaaaaaaggcactttcaccaataccagtcctgaagccttgaaggggaaagtcatcgcggtccagaccggtacgccgatggacacttacgtaaccaaacattatcccggcagcaccatcaaacattatgatggcggcagtgcgccttatcttgatttaaccgctggtcgtgccgatatttttatgagctatgaagcgcaaattatttatagttttctgaaaaaagaggacgggaaagattaccagctggtaggcccgcgtctgaccggtaaagatgcgccggaatttggtgaaggtgtcgcgatcgccattaataagaaaaacaccgcgctggtagaaaagattaatcagggacttgcaaaagtccgcgccgatggcgaactggactcacttaataagaagtatttttcagctgagtaa

SEQ ID NO: 220932 - DNA, 771 bp, Klebsiella pneumoniae
gtgttgaaacttaaagtggacgatatccataagcgctacggcgaacatgaagtgctgaaaggcatttcattacaagccagtgccggtgatgtcatcagtattatcggtgccagcggctcaggtaaaagtacctttttgcgctgcattaatttccttgaacgcccacatcaaggcgccatcagcgtcaacggcgaaacgctggtcactatgccctgcccccgtaccggcgagttgaaggccaaagatgcgcaacagttacgtcagatgcgcgcgcgtttgtcgatggtattccagaacttctgtctttggtcacatatgacggtactggaaaacatcatggaagcgccaatacgcgttatgaaactgagtaaagcggaagctcgtgaacgggctgaagccaacctgctgaaagtcggcatggaggcaacctcatggcaacgttatccgacgcatctttctggcgggcagcaacagcgcgtggccattgcccgggcactgtgtatggagccggatgtgatgctgtttgatgaacccacctccgctctcgatcctgaacgcgtcggcgaggtgctgaaggtgatgcaaaagttagcggaagaaggccgcacgatggtagtcgtgacccacgaaatgggatttgcgcgccatctttccagccaaactttgttcctgcaccagggccttatcgaagaacagggtacgccgcaggcgattttcgatcagccgcgtagtcagcgtctgcaacaatttttatcaggccgccttaagtaa

SEQ ID NO: 220933 - DNA, 600 bp, Klebsiella pneumoniae
atggcagacgacaaaacgaataataacgaccagcaagcaaataataacgcggatttcaatgtagggatacgcctgcgtgcggtgcgtaaagcccagggaatgcgcatagaagaagtagccgaaaaagtcggcgtcagtaaatcttttatcagccgtcttgagcgcaacgtcacccaggcatctatcgccaccttattgaaggtgtgtgaagtcgtcggcattactcctgccaaactgttcgatccaccctctaccaattttgtccccgccggacagggcacccctatcagcctcggcggtgaaaatatgcgagagtatctgatcagcaatggcgttaacgacgacatgatggttctttactctgaaatcgatccccagggcggttccggtgcagagccttataccctcaatgccgccgccgatatggtgcatgtcttaagtggtgagctggaaatcgtcgtggaggagcaacgttacctgctggctaaaggcgataccctcaccttcaagccttctctgccccatacctggcacaacatttccgacgataaaatatgtactgccatatgggtcatcgtgccaccgccgtccggaaattaa

SEQ ID NO: 220934 - DNA, 294 bp, Klebsiella pneumoniae
gtggcgcacgtcttcggtgaacgcactctggccacactggagcgtcttctgagcctgctgtcggcctttgaggtcgtggtatggatgacggatggctggccgctgtacgaatcacgcctgaagggaaagctgcacgttatcagcaagcgttacactcagcgcattgagcgacataacctgaatctgagacaacatctggcaaggctgggacggaagtcactgtcgttctcaaaatcggtggagctgcatgacaaggtcatcgggcattatctgaacataaaacactatcagtaa

SEQ ID NO: 220935 - DNA, 477 bp, Klebsiella pneumoniae
atgagagagcctgaatccctgacgtctgaacataacatcgctgagttctgctgccaggagcctgcccttaatgagtggttaaagaagaaggctctcagaaaccacagtaccggcatttcccgtgtctatgtcgtctgcgcagaaaacactaaccgggtcatcggttattattgtttatcttcgggtagcgtccaccgtaacacagtgcctggggcctatagacgcaacgcgcctgatgttattccagtcattgttttgggacggcttgccatcgaccaggcctggtccgggaatgggcttggtgccgcacttcttaaggatgctatataccgtacgcaaaacattgcctttcaggtcggggtgagagcactggccgtgcatgcgctgaatgaagaagttaaatgtttttacacccgttttggctttgagccttccatagtcaacacgctgacattgttattcccgataaaagtctga

SEQ ID NO: 220936 - DNA, 885 bp, Klebsiella pneumoniae; identical to SEQ ID NO: 94235

SEQ ID NO: 220937 - DNA, 1185 bp, Klebsiella pneumoniae
atgaagacacaggtcgcgattattggcgcgggcccctccgggctgctgctggggcagttgctgcacaacgccgggatccataccgtgatccttgagcgtcaaacgccgcagtatgtgctggggcgcatccgcgcgggaattctggaaagcggtaccgttgatctgctgcgcgaagcgggcgtggcgcagcggatggatgccgaaggcctggtgcatcatggggtggagtttctgtttgacggccagcgggtgcccgtcgcactgagcgagctaaccgacggtaagagcgtaatggtttatggccagaccgaagtcacccgcgatctgatggctgcccgggccgccagcggcgcgccgatcgtctatggcgtgagcgaggtggctatccatgacgccaaaagcgaccggccgacgatcacctacctcagcgaaggggaaacctgccgtctggagtgcgattttattgccggttgcgacggtttccacggcgtatcgcggcaaagtattccagctggcattttgcagacctacgagagcgtgtggccgtttggctggctaggcctgctggcggatacgccgccggtcaatccggagcttatttatgcgcaccatcagcgggggtttgtattgtgcagtcaacgctcactgacccgcagccgctattatctgcaggttccgctgagcgataaggttgaagcatggtctgacgagcgtttctggcaggagctgaaaagccgcttgccggaggagctggtatccaggttagtgactggtcactcacttgagaagagcattgcccctctgcgtagcttcgtcgtggagccgatgcaatatgggcggttgttcctggtgggggatgcggcgcatatcgttccgccaaccggggcgaaaggattaaatctggcggcatcggacgtgaactatctgtggcggattctgcgcgaatactaccatcgtggccgcagcgatctgctggcggcctactcgccactggcgctggatcgggtctggaaaggggaacgctttagctggtttatgacccgcctgctgcatgattttccggatcagaacgcgttcgacgctaaaatgcaggccgccgaccgccgctactatctgggctcgcgcgccgggctgaccaccatcgcggaaaactacgtgggcttgcccatggagcgtgtcgcctga

SEQ ID NO: 220938 - DNA, 723 bp, Klebsiella pneumoniae
atgttaccaggacaaggtaagtttggcgtcgttattagtaaaattcccgtcatgcaatcagggttaaaggtgatcttcaatgagaacctccctgattacgaactgagtttttgtcgttctcatgatgagctcacccttttacaactgcggcgggcggtgctggttgtcgcggatatctccggcgagattgcgcacccccgagccgtctgcgagcgttattactccctcatgacccagtaccgtgatattcactgggtttttatggtcagcgacagcctctatccgttggccgttgagctattaattcgtcctgaaagctcgttgatctccgagagcgagccggttaaccggctgattgaggtgatttgcgccggtagccgtgcggctgaacagattagccgtacgctgtttgccggggatgaggacagcgatttcgcaagctaccactctgcggcgatgctcactctttcagagcgtaaagttctgcgccttctggcgaaggggtggggaataaaccagatcgccgcgctgttgaaaaagagtaataagacgatcagcgcgcagaaaaacagcgcaatgcgtcgcttatctctacgcagcaacgctgaaatgtatgcctggatcaacagcgcgcagggaatgcaagagctgaatatcaattcagcttacggggagcaaatggaatggaaaaaaatagtacaacccgccatgtcgccatcgtag

SEQ ID NO: 220939 - DNA, 525 bp, Klebsiella pneumoniae
atggaaaaaaatagtacaacccgccatgtcgccatcgtagaaaaatgcgtgatgacggaaatggcatggcgctatatctttagtcgtgaagataatcgccgttatcatattcatctgtttaaaaatgtcagtatgctcagggcggcggaaataccgtttccctggtcaaccattattttttctctttcgggaagtcgttcttcacgagccgagagtctgctctttgttcatgaaatggcgcggtgccggccggaagtccaaacgattattctggctaataatgaaagtgaaatgcacctgatcggccatcttatgccggcctgtttgcacggcatactgaataaatccgcgccgcgacgcgggctacaggagcgtttgctgcagctactggacaatcatcatctcagcggcagcgaacaattttgcgacagagaggcgtgcaacgatccgctaagcccgacggagcacgccatccttcggtatatgtcgtggggggctttgttgaataaatcgaacttttgctga

SEQ ID NO: 220940 - DNA, 468 bp, Klebsiella pneumoniae
atgtcacgtatagatacgctggtctgtactgacgccaagaaaacgaaatatcgtttcgtggttttgacgatgatttttctggtgtatgccatcaattacgccgaccgaacgaatattggcgcggtactgcctttcatcattgatgagtttcatatcaataattttgaagccggggccatcgccagtatgtttttcctcggctatgcggtaagccagatcccggccggctttttcatcgccaaacgcggtacccgggggctggtatcgctctccattttcggcttctccgcctttacctggctgatgggcacggtgagctccgtgtttggcctgaagctggtgcggctgggactggggctgagcgaagggccttgcccggtggggctggcttccaccataaataactggtttccaccaaaagagaaagccacggcaaccggcgtttacatcgcggcgaggctttgttga

SEQ ID NO: 220941 - DNA, 1134 bp, Klebsiella pneumoniae; identical to SEQ ID NO: 212401

SEQ ID NO: 220942 - DNA, 927 bp, Klebsiella pneumoniae
atgttacaccatgatattcatgaaaagctactggcttataccgatagagaactcgaactgcttcgcgctaactatcaactgtgtcataaattcaaaagccatatggagcgaaggtttttcaaagacaactacattcatattgaaaagcagacccgatttactaaaattccgttgcattctcatggctttatcgagcttatttatatatatcagggtaaaatgcatcagaagattaatgaagaaagtctcactttaggtaagggggagatcctgcttatcaaccagtttgccagacacgaaattgaagccgcagggcagaatgatattatcatcaattttattattaagaccgaatttttcggtcgactcatgtccctttttgacgaaaataacatcatttcccgttttatcctttcagcaattaatggcagaaaaaaacatggagagcatattcactttaaagtgggggaaatagacgcaattcaaaacattatgcatgtcatcattagcgagatctacagtaataaccacttaaaagagatacgcgtcaatttcctggtgggactgttgatgaccgaactgctctcgaatgtgcaagccagcgattaccatatcaacggcagttacaatgaatcacttgccatggccgtgttgagatatattgataccgattataaaactgccagcctgaaagagatctcctgtcgtttaaatcagcctaattataaggtgagtaaactgataaaagacttcactggtaagaactttagcgatttgttggttgaaaaacgcctggatgtgttgatccatctccttaagcatactaatcactctattattgatgttattaatatgacgggttatgaaaacgcctcgcattgttataaggctgtctcttatacacatctccgagcccacgagacgtag

SEQ ID NO: 220943 - DNA, 2613 bp, Klebsiella pneumoniae
atgttaagtatcaattaccaaacggaaaacattattgtcgatcatctgccaattatggtgtgctggtctaccaattatcctcaaaagtcattttcgataaaagtgtataaaggtgccgaactggtatctcttatcgcaagagagggtaataatacaattgtcactctcgatgcaatatcgttacaaagctttacttcttataccatagaagtacttacccacggtgacaatggtgagaacaacgtttttagaaacagttttacaaccagtaatcttggccatttttctggccgctgggtgagcggtgggcatcacttcactaatgatattcattactatcgcggtaaacgtaatgtggtgatgagaaaaacaatttatctcgacgaagacctcctcgatgcctatatcagtattgttggtcttggtttttataaattgtatatcaacggtaaagaggtcacacgcggtgagctcaatactgactggacaaattatgctaaaattatttattatgatacttacaatataaagccgtttattaatcagccgaaaaatgaagtcattgttgagctagccgatggctggtttaatccagcaccgcttaaattatttggtaaatataacctgagagagaccttaaccatcggtgaaccacaggtcatcgctgacatttatatgaggtttgcagatcgcgaaatgatcatcggtagtgatgccgactggcaatattgcgaaggcgcttataccttcaataatatctatttgggcgagcgcctggatatgaaactgtttcgcggagacaacaccaccgatttgctgatgcctgactggaaaaatgtggtgctgagcaacgggcctgaaggccgtctggtctcgagttttattccgaaaattaaccatacgttgtctctcggggcagagcatatccacgtcgtagacgaagagacattcattattgatttcggtgccatcgtcaccggatttatcgatttatccattaccgcgtctgagaatcaacgtgtggaactgctctatagcgaagacgttgatgaaaactacgaactaaacactgactccacccttgcgggatttgtcggcaaacaggttactgaaggtgtgattattgacggcggaattggagcaccggcgagggcggaacagaaggatgcctttgaatgccgcagtgggaagaatcattttatcaatgcctttacctgtcattcgtttcgctatgtgcagttaagcggtattaatattgaacaattaaacaacgttcaggcgctttcagtacatactgtactaagggaaaacgggggcttttactgctcagatccttacataaataagctctttgaggttgctaaaagaaccaaactgaataacattcattcggtcttcggggattgtgcccgcgaacgtttcgcctatggcggagacattgtcgcgttggcccggtcgcaagtgtatcagtttgactctgccgctatttataagaaaactatctttgattttatcaatgatattcgtccctgtggtggtgtgacggaaactgcgccatttatgggaattaagactaatggagtcggcggggaaacgggccccctgggctggcaactggtattaccttatttgatagccattcactatcgacattatggcaatgtcaatctgctggccgaaagcttgccatttcttgagaagcagatcctctccctggaaatgcgcgactttgatgacctggtgacctgctgcctgggtgactggggaagccgcgttcatgatatgcgtaattacaaaaatggctcgccagctctccatttcaccagtgcttgtttctattattatcatttgttaattatcgcaaaaatatgtgatgatcttggctttaaagaaaaatggctaaaatatattggcaaggccaataaaattagagagaaaattttatcactctataagaatacggatggcagctttgccgatcgcagtcagaccagctttgtttttgcaatctacttcgatttgtgtgatgatatcgagagttcattgaatgcattgatcgatctcatcaaaaaagagcaaaatgttatcacttgtgggatttttggccaaagttttgcctatgaaatatttcatcgctatggtcataatgaattaatccttgaatggttaagagtcgaagccggattcaagaaaatgcttaaaaatgatgccagcacattgaaggaatttttcggtgataacctgaatggttcgaataatcacgcgatgttcagttcttattccagttggctgtttcaggctttgggcggcattaccgtcgctgaggaggcggttggtgctgatgttattttaatcagtccatcctttactgacacgattaactttgtggattgctggcatcaaaccatcagagggcgtattgagtgtcgctggcggcgctataaaaaaggcattgaattagtcatcaaagtgccatttaacctcaaaaaatgtacccttaaattaccaaaagtgtatcaacttaataaacaattacctgcgccgatagactgtgatacctatcatcacttttatgacattaccgatgcaggtgagataaaagtactattgtaa

SEQ ID NO: 220944 - DNA, 810 bp, Klebsiella pneumoniae
atgacgatgtgtcgggttttgtgcgttgcccggaccgggttttatgcgtggctgcatattccggtctctgcgcgggataaagataaccagcgtctgctgacgctcatccgcgattcatattccctgagcggtggcgtctatggctatcgtcgggttcatggcgatctgaatgagatcggtgaaacttgcggcaaaaaccgggtgggtcgtattatgcaactgaaccggattaaagccgtacgcggctataaagctccgcgtcgtatcgctggccggccttcagtggttgcccctaatcgcgtgcagcggcagtttaccgttgtccgggccaatcaggtctgggtcaccgatattacttatatccgcacctggcagggctggctgtatctggcggtggttatcgatttcttcgcccgtaatgttgtcggctggtcgatgaagcccactctctcacgcgaactggcactcgacgcgctgatgatggcggtctggcgacgtaaacctgacggcgaggtcatcgtacactcggaccagggcagccagtacggcagtgacgactggcaacggttctgtcgggccaataacctggcaccgagcatgagccggcgtggcaactgctgggataatgcggtggccgaatcgttcttcagttcgctgaaaaaagaacggatcataaaacgtatctataaaacccgggatctggcccgggcggatatcttcgattacattgaagtgttctacaaccgggcccggcgccacagtcaccttggcggcgtcagtccggagaccttcgcacaggcctcgtcgtga

SEQ ID NO: 220945 - DNA, 285 bp, Klebsiella pneumoniae
atgggcacaccacgatttacacctgaatttaaggaagaagccgtccgtcagataacggagcgcggttattctgttgctgaagtatccgaccgtctgggcgtttctgcgcacagcctctacaagtggctacgggctatcaagcctgataacagcgaacagcatgcccgggatttactggaagccaaaagcgagatcctgaagctcagggcacagctgaagcgcactgaggaagaacgggatattctgaaaaaggccgcgcggtactttgcaagggagcccgactga

SEQ ID NO: 220946 - DNA, 2019 bp, Klebsiella pneumoniae
gtgagtttacaaacaaatttaaaggggcgtctacgaaatacctcgctgccgaaaagtcatggcctaatgccagtatttgaggctgtagtaaactccattcattctattgaagaaatggataatgcctccgaaggaaagattgttctccgcatcaatcgcgcctctcaaggcagtctggatctagacacaaagtcccagccgccaatcgtcggctttaccatcaccgataatggctgtggttttgacgaggctaactttaagtcatttaaaactctcgattcggaccataagattgacaaggggtgccggggtgttggtcgcctgatgtggctgaaagtctttgctctggtcgaagtggaaagccactttttcgatgttggtggtaagcttaaaaagcgcgcatttcgcttcaacgataaattaggagtccatggtgaaaaggttgtagaggctacatctcaaaagccaggcactcttatcaagctggttgattatgatgaaagctttcgaaaacaggttcctgcaaaaggcctgtccatagcaaatcagttgctcgaacatgtgctctggtattttgtgcgacagggaagcgcacccaagatacttctagaggacacggacgaggtttttgatcttgaccatttgcttgaagagcatatgcatgccagcgcatttctcgaaaccattacaatccgtgattaccaattcgacttaacccatatcaagtttcgtgcatccgttaataaaaaacatcaattggcactctgcgcagccaatcgactggttaaagaagaatctattcagggaaagcttcccggcctgtacggaaaaatttcagacgcttccggtgaatttacttatacctgctatgtatcttccgactaccttaatcaacacgttcgcagtgaacgtatttcttttgatattgcagaagatgttgaggatatactcaacgaagtgagttttaaagacattcgggaagctgtattaacgcgtactaaagagtatctgcaagatgtcctgacagaaaacgtgtcggctggtcgcagacgagtagatgatttcatcaacactcatgcgccacgctatcgccccattgccaattatgttgcagaagaattactgatcgttgaccctgaaaaatcagataaagagctggagctacacctgcacgctcagtggtatgaggtggagcgtcagttagtgagcgaaggccatgacatcatgcagcctcagaataaggagcatgtagaggaatacaaagaacggctagctgagtacttacgcaaagctggagaccttaaaaaatcagaccttgccaattatatttctcatcgtaaggtaattatcgacctgctacaaaaatctatcgagaggctagaagatggaaagtacgcccgtgaagatatgattcacgagctaatcatgcctatgcgtaaagattcaaccgaggttttcctagactcttgcaacctttggttgatcgatgaacgcttggcatttcataattatttgtcttctgataaaacgctcaactcaatgccaatcactggcaatggctcaaccaaagagccagacttgctcagcctgagagtgtttgataatccacttcttgttaacgaccagagcagcttcccacttgctgctattactgttatcgaaattaaacgccccatgcgtaatgatatgcgagaaggcgaagataaagaccctattgatcaagcactcagctatttagagcggatacgtgagggcaaggtcactacaaaatccggtcgccctattccgagcaataatgatataccaggttattgttatgtactttgtgacctcactgaatctatgcatcggcgctgtcgtcgagccaacttacggatcacatctgatggaatgggctatttcggttacaacgaaccttctcatgcttatatagaagtgattagttttgaccagttagtggaagcggccaaagagcgtaaccgggcattcttcgataagcttggactgccttccacctag

SEQ ID NO: 220947 - DNA, 762 bp, Klebsiella pneumoniae
atgaatattatagatactctgcaaaacgacctagaacgcgcagcagcgctccaaaatataatgatcgcaagagctactggtgcccaaaatgaggctaattcagattatgtacttctaagggcctatttcctacaaaatcaatcattgctacaacttttacctgattttgtaagaactaaccgctccttaaaagaattttggggatatataaaaaaaaccgaaaagtatgatcctcgcagagaaatcatttataaagcttttcagcccctcttcgactatttagaaggaaaaaataaaaccccagcggatgaagatatttctaatgtgttaatgagatttgatgaggatagtgtccacactgtttggacgaaagcgctagaacgacgccatacagatccagatggagcaataacatctgcaagaacacttctagaaaccgtttgcaaacacattctggatgatatgggggtggcgtacaataataaaaatatagaaatgtcagagctttataaaatattatcaaaagaacttaatttatctgccgaccaacacactgagagtattttcaaacagattcttggcggttgttccgcagttgtaaatggattaggtactcttcgcaataaactaggtgatgctcacggaaagaatcgatcatcaaccaagccatctccaagacatgcagaattagccgtaaacttatcaggatctatggccctgttccttactagcacatggctaaatcttaaagagaaaagttaa

SEQ ID NO: 220948 - DNA, 1938 bp, Klebsiella pneumoniae
atggagatggacaactggtggtttggctggaaggggttcacccccgaacgaccctgtccaggcaaggttgtgttgatggttggtgcagggatttccatagagtcccccacgcagctacccggcggatacgcactaacggaagcactgcttgaccatttgcttgacagccgagcggcttctgaaattaaaacggtatttagccaatgtgagcagtggatggggcggagcttaccacgcctagaacacgtgcttgataaagcttttgaaccttcaaccgttgaaggcgttgagcgtagcggtgctgcacgcgaactgttgcgcatcttttccctacgtcccccgaatgcgaatcatcacctgattgccgattacctgattaagcagcgcagctggtgcattaccaccaattttgataactgcatcgaacaggctggccgtcatcagatccctgtgcacgttatcgatcctgataccaaaacctttgacatcctgcaccgggaatacggtgaagactggggcatcatcaaagtgcatggcaccatcgagcacggctgctcggggcttggagcaacgcttgcagacctagagcatggactgcctgaagtgttcaaaacacttctcgaacaggttacaaatcaggccgatttaatggtggtcgcgggctatagtggcaccgaccatttcgacattaatcactggattcgcgagcgctggaacggagatcgtacaactcggttggtatggatcgaccaccatcaggatgaggtggaagagttctggcggctgagcgaacaggaaaatcgcgagccgagagtttactggcagggagcatttggcggtatgaaggttcagtacggaccaacgtcagagctgctgactgccctgctgggaatttcccgtagaactttggtcgatgctcgagatggtagtgactggtggcgaactgctctagcagaatattacatcccaacggagaaagagaagtaccttaccggtacccggctagccagttcgattgggcttggtcaactggctgaagaacaactccgctatttgaaacgcctgctagagaacgacgaaatgttggcgccttttgaagctgagatttactactcacgcgggtttattgccggagcgttatggatacaaaactatctgaaaaaaccgctcgaagaagctaggaaagtgaaccgcacaggcctcattcgcgctaaagggaaacctgcaaaagcacttttattttatctcgtgcagtacttaaggagttgccatagcccttcattcgatgagcaaatagacgcttttgcttgccttcttgatattgccgaacggtggcagcgatggcgattctggcagagcaaacctttgcggtacttaggcgaaaagatatgtaccattttctgtaattatttcatgaagcttgagaatggaaagttgcctctatatttgcaggggagggcgcaaatgcagttcattcgcttagccaccctgtttcacgatgaagaggtcttttccttcggcgaggtctggaacttactataccgagagagtagtcccccgaatttttataccccacacggcccggtaattcgcggtttttatctcattgaacgcagtactgctcgtgaggaggaccgaatcgcagacttggtgctggcaaatattaattacgtcaatatcctactttctgctttgcggcgtcgctggcctaaagggagccaaagcgtgctggaagaacggcagcgccatggggaatatctggattcgggagactatgttgtgacgtatatcgtgcagctgttaaccgaaagctcgcagatcgtcagcgttctgaacgccacgcatttgcatattctgattgccagagtatggcttagggcggatagcattttaggcggtatcgaatactgggagcagcagcggctgtattttgcttaa

SEQ ID NO: 220949 - DNA, 132 bp, Klebsiella pneumoniae
atgcttgatgagcagcagaagatacaggtcatagaacgtctgcaacttgcccgtcagtttctgtctgaggatacggcgattgagcgattgttgaagtgggaaacgccggaagagcggttaaataaaggatga

SEQ ID NO: 220950 - DNA, 1131 bp, Klebsiella pneumoniae
atgtcagagattaattcacacgatgacatacagactttacctcaggagcgggaaaaactttatcaattggtttggagtgagcctgcggagcgtataactgcgctgtatgacattagtactgagttattggcgaaacgatgcagcgagatgtgtatacccaggccgcttgctggttactggaaagcgctggctaaagggagcgcgcctgcaatcccggcgctgcctgccctgaaaaagggaggggcggtaaaggtacttgagaataacaccccatcagtgcaaccttctgccattgcggtaccaaaacaagcgtctccagtaacccggaagcaagcacctgttacagggaatggttatggattgataaatgatctcaaaaagtttctgccagcttcctcagttacagaagatggctattacaagcccacgaaaaagaaattactggatctcaacgtttctgatacgggatttgacagtgcaatagaattcctgagtcggttctttgatgccctgggaaaaaaggggtaccgtgttacgctggatgtaccggaagaaaggctgcatcgtgcggatattgatattaaggaagatccgaaagggggagggtatcgttggggcaacttatggcggccttatacgccaagtattatttgtgttggggatatgtactttgcgtttaatcttgctgaattgacggagtatgttccagcgaaaaaagtcaaaaatcgctatgtacgtgatgaacagatgggacggtgggctcggggaagaaatagtgagctttttcttcacgtatcgagacatactttgcctaccgggcgattactgttgcaactttactcgccttattcttctgcagaatggttacttcagttccgacagacaaagcagtgtggattgattagccagatccctaagatgatttcagcaatgcaagaggctgttccgctaatttcaaagcaattagaaaaggccagaatagaagccgaggagtggcgcattcagcgtgagcgggaacatgctatatatctggaaaaggagcgaataaggcaggaagaaaaagcgtacagcgccagtcgtaccgagctgaaatccattatggttcagtggactgaagacaaacagctgtaa

SEQ ID NO: 220951 - DNA, 330 bp, Klebsiella pneumoniae
atggcaacggcaagaagcggctatacgctgcaggtgataaaggcagggcagcaggggcatgttgaaatgagatgggggcatctcgcagacgttgatacgcgcgcggcggcggcggctatcatgcagcatatcgggcattcttcgtcctcgcggggcctgcaggagatcagcctgtcgctgaccaatgccgccagcggtatctcggtggagcttcatcacccggcctcaggggaaagcgctaccccggcttttattgaggctgagttaaagaaaattgtgcagatcgttgatggctacgaggcggcagaagatacccatattgtggagtag

SEQ ID NO: 220952 - DNA, 2331 bp, Klebsiella pneumoniae
atgatgaatgattcgctctgccgcattattgcgggtgaacttcaggccagagccgaacaggtagaagctgccgttcgcctgcttgatgaagggaacaccgtgccgtttattgcacgttatcgtaaagaagtcaccggcggtctggatgacacgcagctgcgtaatctggaaactcgcctcggctatctgcgcgaactcgaagaccgtcgtcaggcgatcctcaaatccatcgctgaacagggcaaactgaccgacgcgctggaaaaagccatcaacaccacgctcagcaaaaccgaactggaagatctctacctgccctacaagccgaagcgccgtacacgcgggcagatcgctatcgaagccgggctcgaaccgctggctgacctgctgtggaacgaaccggcccacgatccggaagcggaggccgcaaaatatattgatgccgataagggcgtagccgacagcaaagcggccctggacggcgcgcgctatattctgatggagcggtttgccgaagacgccgcgctgctggcgaaggtccgtgactatctgtggaaaaacgcccacctggtctccaccgtcgtcagcggtaaagaagaggaaggcgctaaattccgcgactacttcgatcaccatgaaccgatcgccaccgtgccgtcgcatcgcgcgctggcgatgttccgcggtcgcaacgaaggcgtcctgcagctctctttaaacgctgacccgcagtttgacgagccgccgaaagagagccacggcgagcaaattattatcgaccacctgggcctgcgcctgaataacgccccggcggacagctggcgtaaaggcgtcgtcagctggacctggcggatcaaagtcctgatgcatctcgaaaccgagctgatgggcaccgtgcgcgaacgcgcggaggacgaggcaatcaacgtcttcgcccgcaacctgcacgatctgctgatggccgcgcccgccgggctgcgcgccaccatgggactcgatccgggcctgcgcaccggggtgaaagtggccgtcgtcgacgccaccggtaaactggtcgctaccgataccatctatccccacaccggccaggccgccaaagcggccgtcgccgtcgccgcgctgtgtgagaagtacaacgttgagctggtggccatcggcaacggtaccgcctcgcgtgaaaccgagcgtttcttcctcgacgtgcagaagcagttcccaaaggtcaccgcccagaaggtgatcgtcagcgaagccggggcttccgtttactccgcctccgagctggcggcgcaggagttcccggacctcgacgtgtcgctgcgcggcgcggtctccatcgcccgccgtctgcaggatcccctggccgagctggtgaaaatcgacccgaaatccattggcgtcggccagtatcagcacgacgtcagccagacccagctggcgcgtaagctggacgcggtggtggaagactgtgtgaacgccgtcggcgttgacctgaacaccgcctccgttccgctgctgacccgcgtcgccggcctgacccgcatgatggcgcagaacatcgtcgcctggcgcgacgagaatggtcagttccagaaccgccagcagctgctgaaagtcagccgtctggggccgaaagcctttgaacagtgcgcgggcttcctgcgtatcaaccacggcgacaacccgctggatgcctccaccgttcacccggaagcttacccggtggtcgaacgtattctggccgccacccagcaggcgctaaaagatctgatgggcaatagcagtgcgctgcgccacctgaaggcagtggacttcaccgatgagaagtttggcgtcccgacggtcaccgacattatcaaagagctggaaaaaccgggccgcgatccgcgtccggagtttaagaccgcgaagttcgccgatggtgtggagaccatgaatgacctgctgccgggaatgattctggaaggtgccgtcaccaacgtcaccaacttcggcgcgtttgttgatatcggcgttcatcaggacggactggtacacatttcgtcgctttctgaccggtttgttgaggatccgcacaccgtggtgaaagcgggcgacatcgtcaaggtcaaagtgatggaagtcgatctgccgcgtaagcgtatcgccctgaccatgcgtctcgacgagcagccgggcgacagcaacgcccgccgcggcggtggtcaggagcgcccgcagggaaatcgcccggccgcgaaagccgccaaaccccgcggtcgcgaggcgcagcctgccggcaacagcgcgatgatggatgccctcgccgcagcgatgggtaaaaaacgctaa

SEQ ID NO: 220953 - DNA, 273 bp, Klebsiella pneumoniae; identical to SEQ ID NO: 23289

SEQ ID NO: 220954 - DNA, 969 bp, Klebsiella pneumoniae
atgataacctggtttacagtgacatgtttctacttttctaggtcgcacgttctcatacggaatataaccatgaacaattcatttgagtgcagcaagagaaccgatatcaccgaacaaccgcagagccatgatctactcatcgcaaacggaaatgaaacggccaatttgctacgccacctggcaaataacgagatcgactccgactattttgcagttgtctcggaatgcgaaagctacgggcaagaaactgacgcagagctatcaatcacggcgtttgcccttcgtgccgctggttacgttgatgcgctggtagagtcactggagaaggccctgcagcgtattgctgagctggataaagactgcagagtatacgaaaataacgtaaaaaatcttcttgaacgtgccggttcagcagagtcctcgtgcgcagaggctgctcggattcttcaaagtggtgagcgcatggcattaactcgcgccatcactattctgctggcaaatggcatgaaggtggaggctgagccagtggcggtatgcactgtaaagggcggtcaaatgtgccctgatggtgtgcacgaacttttcgccgcccctcagccaacgctggtagtgccggaagaagctactccggacagtatcgagattcttgccagcgccaggcgtcgtgaccacgctgtattccagtgggatgaagaccagcgaaatgcggccgctgattcctggaacgctttccgggccgctatgctccaggcagtcaactctccggtaattggcattgaccaggcaacaggtgctgacagaacagtggaagttcgctacgtagcacctcctggttacgtgatgttaccgaaggaaccgacaaaagagatgattgatgccgggtggctgcactacatggccaccaagaacccttcatcaaaaggcacatacaaagccatgctcgcagccgccccacaggaggtgaaatga

SEQ ID NO: 220955 - DNA, 387 bp, Klebsiella pneumoniae; identical to SEQ ID NO: 23295

SEQ ID NO: 220956 - DNA, 321 bp, Klebsiella pneumoniae
atggctattgaaattaaagaacgctataccaccgctgttatcagctcagctcacatttctaaagatgatgcagtgttattaactgaagccagttataatcctcgttctgaaaatggtcgtaactggattcacgcaaatgaatatggttacattattcggataacttgtgataatcaggaatggaaacaacatttacgtgatgatggtatctcctggcctactatcgaaaatatcgaaaaagtacttaacgcagggttcgaatgtgttcactttgatcgtgacgcagatattgtggatgaacttattgcgtgggactggtaa

SEQ ID NO: 220957 - DNA, 246 bp, Klebsiella pneumoniae; identical to SEQ ID NO: 23401

SEQ ID NO: 220958 - DNA, 648 bp, Klebsiella pneumoniae; identical to SEQ ID NO: 23402

SEQ ID NO: 220959 - DNA, 174 bp, Klebsiella pneumoniae
atgccaactaagaatgaggctttaaatttattagcggttgcgattcaggccgcaaccgacagtggtcttttcgataatgagatgttaggcgctgttgctaacgcagactcaattaatgatttctgtgatgccgtatcttttttgtccggagaaaaagacaaactccaacagtaa

SEQ ID NO: 220960 - DNA, 621 bp, Klebsiella pneumoniae
atgtccgaccatgtgaagttttatgattactatattgtggaagggccagaggttcaggctctaattgagtccttcgagccgatttcacagaagcggtcagaattaattaaagaagccatgacactcgttgaagccgtaggttgggtcgactcccagagttttggtaataagggggataaaatacagtcattcgtctggaaagcagatcacaaattcccgtgcgaaatcacgattaaaagacgaagctatatggataaggtaccggtgattgtagcccgggggaaaggaaatacatcggatgggcgggaattcaacaaaaaactcgatgtaattattaaaaatgttaataacaaactcggtcctttcccatgctggtcttcatacataattaatcattttggcatcatgcacagcgcccacggtggaccagtagccaatcgccctttcgctacagctatcttgacaacttacggtggtacaatccctggaaggcaggatgcattagctttcgccatacctaacaggaatgatgggtataataaaccagttatcatccccccaaacttcaagaaactaacttatggacagttttacgacataacacacccccatcttgtttag

SEQ ID NO: 220961 - DNA, 351 bp, Klebsiella pneumoniae
atgaaaattattttagcattgccgattattatcggggcattcattcttactggttgtaagtcaccttcggaagtccgtcagagtggtccggaagaaatatttcattcgaataagaatgtgaatgatgtttctgagtgcattttatcaggctggcaggaaaaaagttttctaacaggacctgtcccggtatatattcagccttataaaaacggtaagactgtctatatagacgtatatacttgggttgcagatgtgattcctgaccaagatgggaaaagtaaagttatttacttctctcaaaatgccagaagaagcgctgaaatgaaatcggtgatcaaatcatgcatataa

SEQ ID NO: 220962 - DNA, 339 bp, Klebsiella pneumoniae
atggctattgagatattcacctggagtccgcgggttaatccccagcagaccgttaactttcgtgtccggaaggcgcagttcggtgacgggtatacgcaggtatccggcgatggtattaacacccgatcacaggattgggagctgagttttgtcggtacggaggactatatccgtccgattaagcagttcttcgaccgtcatgcaggcacccgcgcgtttcagtggaccccgcctctggaagaggtggggcttttccgctgcgaacaatataaaccggtgcctctgggcggcggaaattactcactttcagccacttttattcaggcatttaaaccatga

SEQ ID NO: 220963 - DNA, 3336 bp, Klebsiella pneumoniae
atggcagacgtcgcatctttagcggtcgggctgcacctgaacgcagccagttttaaatcccagctgctgggagcgtatggcgatgcggagaaccagtcacgacggtttaaccgtaatgcccaggcggacgcgaaaaagacggaagacgcctataagaaggtcggtctgtcgatatccgggatggccagccggctggcggggctggcaggagccggcctttccatcggtacgatcgtcaccacgtccagacaatatggacaggcgttatcagatctgcaggccatcaccggtgcgactgcagctgaaatgaaagcgctggatctggctgcgcaggaaatggggcgcacgacagagtacagcgccagccaggccgccgaagcgttaaagctgatggcgtcggctaaaccggagcttttaaaaacgtccgatggactgcagaaggctacgaacagcgcgcttatcctggcgcaggccgccggcacaacgctgcccgatgcgaccagaacgctggcgctctccttaaaccagtacggggcgagcgcgcaggaagcggatcgttatatcaacgtgctggccgccggcgcgaagtacgggtcgtcggagattgtggatacagcggccgccattaaaaatggtggcgttgcagccgcacaggccggcgttggttttgagcagctgaatgccgcgattcaggtgctggcagagcgtgaaattaaaggcggtgaagccggcacggcgctgcgtaacgtcatcctgaacctggaaaagggcacagacaagagcctcaagccatccgtggttggtctcagccaggcgctgaccactctttccgggaaaaatctatccacggcccaggccgtaaaactgtttggcgtggagaacctgaatgcggcgtctatcctggtccagaaccgttcaaagcttgatgagctgaccgcttccctgaccggtaccaaaacggcgcatgagcaggcatccatcagggttaacaacctgaacggcgatttgctggggctgagcagtgcgtttgaagggatggtcattaagatcggccagagcagtaacgggccactccgcagcgggattcaggttgccacggaggcactgaacagcctggcagacaatttcaacaccgtctccagcgtggcgctttacagcctgatccccgtgttatcctcgaaactgactgcagggctgcgggagaatatcgcggcctggcgggaaagccaggcggcggtaaaagcgcgggcgcaggctgatgcggatattgcccgcaaaactctggattcgacagctgccatcctgaaacagaacgacgctgagtttggccactaccggcagatggagcggacggctaaacagtacgggatgaatatcagttaccaggatgagtttacccgcctcatccgacaggaaactgaacaaaccaatctggccagccaggcgaaactgaaactggcggcggcaaaccggcaattgtcgatatcagcccgcgcggcctccgttgcggtggggctggcaagaggtgcattaaatttaatcggtggtccgttcggcgccgcgatgctggccggttcgggcctcctttactttcatgagaaagcaaaggaggccaggcagtcagccattgatttaaaagatgccgtagtcgaaaccagtgaagcgctgatgcgcctctcgcttaaccagctaaatgtgaagcagttcgacctggaggatcagtacgaaaaccaggtcgtgcagcgtaaccagctgatgaaagagattcaggatgccgacagtcgtatcgacagcctgaaagggtttgaccccttcggacagctggaaggggtaacaaaaggccaggcgcgtgcacgggcggatctcgatagcgttaacgagggactccgcaaaaccgaggaaaacattaagcgtgtcagtgatgcaaaaacactggctcagctgggtttatcgggaaaaataacctcccttacggacgatctgaaaggggcgttaagcacgccccccaaagagaccggagatggaaatccctggggcggcgatggcggtaccggcacggggaaaggcagtaagtccaaggtcgaccagttcaaaacgctgcggcagcaaattgaagaagcccatgcgtccagcctggccagaattaacctgcaggaaaaggacagtaacagggagctgcaggaagcggcgaagaaaaatggcgccagtgatgctgacctgcagcgcgcgctgttaatgaacgcagagaattaccagaaacagcgactggatctggccgcgcagtattcccccgcccaggaaactctgcgaaaagagcaggaagccagccgggacctggctgagcttttcaaagcccgccttcttgatgaaaaagagtaccaggccgcacgaataacgctggccagagatactgcgaaagagctgctgcaggcgcatgccgatgaaatcgctgcgccggcactggatatcgccggcgaagttgatccactggtctcgctgcgcaatcagcttgcgcagcggcaggcattgctgcaggcgtactaccagggcagcgcgatcagcaaagaacagtacgaaatgctgatgcagaaggcgacgaaagaatccgccgatgcgcagtatcagacgtcactggagttataccgatcacagggagaattccagagcctggccgtcgggttatttgaaacggcccatgagcgctcaagcaacttcctgacgagcatgctgacgcggacgagaagctttaaggagaacatggctgacctgttttcctcgctcacgcagtcgatcataaaaaacctcgttgatatggccgctcaggcgctggtcaccagttccgtcatgcaaaccattatgggcgtggtgggcgtcgggaccagcgttgtcacgggcgctgcgggcgcaggctcggggacggcgatccagaatgccgccagtaacttccagttcaacgccaaaggcggcgtttacgactcgccgtcgctgagcgcatacagcaaccaggtctacgactctccgcagttcttcgctttcgcaaaaggggccggcgtatttggcgaggccgggccggaggccatcatgccactgacgcgtgccggcgatggttcgctgggtgtacgcgctgtcggtggtggtcagaacgccggcgcgtcggaagggccaaaagtctatatcacgattgaaggcggaaacacctcaacgcaggcgccgtctggttttgagcagtttggccagcagatcggctcgtttgtggagaaaaaatacagggagctgatggcgcaggatatgcgccctggcgggatggtctggaatgcagttaaagggcaacgctaa

SEQ ID NO: 220964 - DNA, 390 bp, Klebsiella pneumoniae
atgatagagctggcgattaagggtacgctggagcgcatcaccggcatgaatgcgtatccgcttttactgccggacacggtccaggaaggagcgacctttcagcgtatctctgacccggagatggtctcgggaatgctgcgaacggggatcgtctctgcccgtatccaggtgaacctgtaccttctcgataattacacctcactgctgcagctggataaaaaaatctgggcggaactgaagtcagtcgttcatggccagctggagggcatcccggttcagtatgtggagcgaggcggtatccatcaggataaaaaccagctgacgaatcgtcgcattcagtatcgcctgacccgcgatttcatcattcactacgtggaggactcctcgtga

SEQ ID NO: 220965 - DNA, 339 bp, Klebsiella pneumoniae
atgagcctgaaaccgggtgatatgaactgtcgcattgcaattagctacgttcagtccggtcgtgggccgctgggcgaaccgctcccggaaaagcaggttgaatcgggaaaagcgtgggcaaaacgggagctggtatcggggcgaaaagtccgcacgctggatcagcagcaggtggtggaaacctgcctgtttacggtctatccgggcgtgctggttgatattgactggaaaatcacgacgaaaaatctggtttataccgtccggaatatcgaccgcaaaacagaccggatcattatcacgggggaggctgacgggcggcatgatagagctggcgattaa

SEQ ID NO: 220966 - DNA, 921 bp, Klebsiella pneumoniae
atgacaacgaaattaattaacctgccgcacctggcagatatggtctttggcgtgccgcattacgtgacgcggcaaacaatggactccgtgaaagcggtgctcatcccccgtattcaggggatcaccgaagatgccgtcattcagatggcgctgaatccgggtaaatcacctgcagctgagcaggttcagcccaccggcggggtggcagtgatccccgttcacggcattcttgttccacgccgggggcagattacggcgatgtgctccgagctgaccagctacgagcggatccgcgggcagctgcaggcggcattaaacgacccctcaatcagcgaaatcgttctggatattaactccggcggtggcgcagcggtggggtgcaaggagctggccgattacatttatcagtctcgcgacacgaaacccatcacggcgattgtgaactacagcgcgtattccgccgcgtatttcatcgcatcggcctgcagcaaaatcatcgtcagccagaccagtggcgtggggtcgattggtgtgatcatggagcacctcgatacgtcgaagatggaagaaaaaatggggctgacgttcaccaccatttaccggggagataacaaaaataacggcacccaacatgaaccactgagtgaagagtcgctgggtatgttccaaggcatgatcgacgaaatgtacgagacgtttacggggtcggtggccgaatatcgcggcctgaatcagcaggccgtcattgatacgcaggcggggctgtattttggccctggcgctgtgtccgccggcctggcggatgaagtctctgacccccaggcggcgatcaatgctatcgcggcaaagtatcagcaaccccgtcaaaaaacctccattcagatgcaggcagccgcgatggatctgcaaaccaaaatgtaa

SEQ ID NO: 220967 - DNA, 1260 bp, Klebsiella pneumoniae
atgttcctaccccagatgttcaggggccgacaatactcgggtaatagcttctgggaagccatgctgggcggggttcgttcaagccagagcaaaactggcatcataatcacgccggaaaccgctcttggactttcagcggtccgggcctgtgtcaccctcctggcggagtcagtcgcgcagctgccgtgcgaactctaccggcgggataaaaatggcgggcgccagcgtgcgacggaccacccggtttatgacctgattcactcccagcccaacaggaaagacacctcattcgagtatttcgagcagcagcaggggttgctggggcttgagggaaattgctactcgatcatcgaacgggacggaaaaggctacccgaaagagctgatccccattaacccgaaaaaggtcattgtgctgaaagggccggacggtatgccgtattacgaactcccggaagtcggtgaaattctgccgatgcgcatgatgcaccatgtgaaggtcttttctctggatggctatatcggcagttcccccattcagacgaacgccgatgtcttggggctgaatctggccgttgaggagcatgcggccgcgacattccggcgcgggacaacgatgagcggggtgatagagcgtccgaaagaggctgcgaccattaaaagccaggatgctattgatcgcctgctggcgaaatggaccgaacgccattccggtattcacaatatgttctctgtggcactgctgcaggagggcatgagctacaaacaactgtcgcaggataacgaaaaggcgcagctgctacagtcgcggcagtggggcgtggaagaggtctgccggctctataaaatcccgccacatatggtgcagatgctggcgaaagcgaccaacaacaacatcgagcaccagggcctgcagttcgtgatgtatacgctgctggcctggctgaaacgccatgagggtgcgatgcagcgcgatctacttctgcccagcgaacgccgcgatttgtacatcgagttcaacgtttccgggctgctgcgaggcgaccagaagtcacgctatgaatcgtatgcgctgggccgccagtggggatggctatccactaacgatatccggcgtatggagaatctaccgccaattgctggcggggacaaatacctgacgccgctcaatatggtcgacagcgcgaagatccttcctggcgataagtcgccgacagcaaaacagctggccgaaatagaatcccttctggccagagcctga

SEQ ID NO: 220968 - DNA, 231 bp, Klebsiella pneumoniae
atgtgcaatcgtcagtttcagcaggggacggccgccctgaacgtgctcaaattggatcccatgtacggcttcattcatccgcgactggccatccgtttccagaacggtcaaagcgccatcaacgtattcaattttgaaattcttcatcgggttctctctgttgctgttttctttctgtggcagctccagcacaatgactcgagattaaagtcatcgtctgtaccgccatga

SEQ ID NO: 220969 - DNA, 165 bp, Klebsiella pneumoniae
atgaagaacttaaaaattgcatacgtagacgagaagctggaggggattgagtgtgacggattgtcctgctcatcgctgcccgtttcagagtttcccatcgacagtaccgctttaactcttctccctcaactcatgctcgaggatgcttatgccgccacgagctaa

SEQ ID NO: 220970 - DNA, 201 bp, Klebsiella pneumoniae
atgatcaagaagcatatacgcctagaaatggaatcaaacgcccaaacaatcgacgaattgaacaaggaaattgggcaattgaaatgtgtcgttggttttttgatgactcaattaacacctgattccaggcaggctgtcattgataacttgaaagaatttggactaaatgattcagccaaggaatttactcagttcctttaa

SEQ ID NO: 220971 - DNA, 351 bp, Klebsiella pneumoniae; identical to SEQ ID NO: 106611

SEQ ID NO: 220972 - DNA, 603 bp, Klebsiella pneumoniae
atggcaggggcattgttttcactttctgctggtggggtgatgtttgcaacagctgttgttattatcatctttagtgctatgctatatgacagtatagttaaaagacgttctaaaaatattaactcaccagagtttacaggatcacctcaactagcatcttgcaattgttcaggaggtactgtcctgctttatcttgattttgatggagtcctccatcgaagaatgaatgagacatttgaaagaatgcctctactggaaaaaattttaaaacaatgtccagaattacgtatagtcgtgtccagcagttggagggaaacaatgactttagaagggcttaaatacctttttccggtagcattcagacacagaataataggtgttacaccttcacttcaggaagtgaaggataccgaatatgttcggtacagagagtgccttttacatgccagacatatgggggtcaacaagtttattatcattgatgatgaatcacaccgttttccacctgggtgcgaaaatctggtatcaacgaattacagtgaggggatgactgaccaaacagtagcatctgtcattatgaaatattgtcagtacttaacatga

SEQ ID NO: 220973 - DNA, 1620 bp, Klebsiella pneumoniae
atgtctattaaaccccaggccatcatgctgctggccggctggctgctagccgcgccggctatggcacttaccgctactaacgacgggagcggcagcaacacctatatgtttatcgacaacgatgtcgatgatgaatatttcatcaccaccagctccctgtcaccgcgcttcactggagccaatatctggacgaaatataaaacgaaccagcgtagtctgggatacatgggcaactcaggctggagttacagcaaccgctattttgatctctggatagacaactccccgattaaccaaccgtttctcgggctccgctgcatgtcaacgggcgcaaactgcccggcttcgggctatatccccgccgatgtactcgacaaagacggcttctatcacgcgatgtccggcaacagcgtggccaatggttactacggcgccggggtgctgagtcagtcggcatatgagtattttcgtaatcggccggtgggaaccatcgatagtttgcagttgaatctttgctatatggactccaaagctgattatgactttgcttccggcgttcgctgtaaagatctccccagcggaggaaagtgggtttactacacgatgaacctcgaaaaggtctcgcatctgaccttgaacagtaccggcgcgatggcggaagtgtggattgccagcgacggtacgccaagcgtcaacctcggctctgaattgtgccagatgggggtggtagggagcgcttcggggatcatttgtaaaatggtgtcttacagctttcaggaaaccaaaaccctcaccacttcgcttgatttccggatggttatcgatacgacgctgctgggattttccccttcttcgtctgacgtcaagtacagcggtgatggcgccagctggaccaatttcggctcgatcagcacctataacaaggtcttcaaaccgtctggggagtacatctatgtctttctgtccaacgcctttttcaaaaaagctctcaaggcgggcacagatttaaccaacaaagatgagctgttcaccttctattttgataactccgtgactcctcaatcaggttattatcagtttacgccatcaacactaattaacatcatcccgcgtgaatacggcatcagcattatcgccagcgacgggagtgctcatccaaaagcatctggcaagatcggtagcgaaacgcccatcacctttgagtataaagttactacctccgcgtcgcgtcaggcggacagcatcaccgcccaggtaactggcgacgccatcaacatatatggtcagccatactgtctgtttacctcagcagacgagacgctaaaagtgccggtcccggccttcctcgaatggacttccgctgccgggaacgcggtaagagtgcgcaacagctgcggtgaaaaccccgttgatatgaccaacgccgcctgggttcagacggcctggaacgccaacgtcaacgatggtttcttttttaccaccacgctgaaactgctgtttccgatggatgactcgcattcacagttcactactgatggtcatgactggatgggaaccgtcagcgccagcggggatgtaaaagtgaccgccacctgggttggcgtcgaccggggggtatga

SEQ ID NO: 220974 - DNA, 129 bp, Klebsiella pneumoniae
atgatagcaatatatgtcccgatgccgaaagacaccagaaacacaaccaagatcccaaagagcgctaccagtaaagatgtgcagatagatatcaaattaattgtcttgcgtgcgtctcttgatacataa

SEQ ID NO: 220975 - DNA, 981 bp, Klebsiella pneumoniae
gtgaaatatattgctatcagccaaccgggcggcccggaggtattgcagatccgcgaaggggagatccccaccatcggggagcatgaggtgctcattgaggtgaaggcggcgggcgtcaaccggccggatattctgcagcgccagggtctgtatcccatgcctgagggcgtcacccccgtgcccggcctcgaggtggcgggcgtggttgttaaggtcggcgcgcaggtcacagcgtttatgcccggcgatcgcgtttgcgcgctgaccaacggcggcggctatgccgaatactgcgccgtgccggcaggccagacgttgccgatcccggcgggcctcagctttagcgaagcggccgccattccggaaaccttcttcaccgtctgggcgaacgtcttccagctgggtaagctgcagcctggcgaaagcattctggtccacggcggcgccagcgggattggcaccaccgcggtccagctgtgccacgcgctggggatgaccgtctatgccaccgtcggccaggacgaaaaaattgttgcgctacgtccctatgctacggcgattaactacaaaaccgatgattttgccgagaaaatcggccagctgaccaacgatgaaggggtggacgtcattctggatattgttggcggcccttactttaaccgcaaccttgggctactgaaaaaggatggacgactggtcatcatcggctttatgggcgggcgaatcgctcatgaggttgatattcagactctgatgctcaagcgagccaccgtcaccggctcgaccatgcgcggccggacgccagcggagaaacagcagattgccgaggcgctgcgccgccacgtctggccgctgcttgaggcagggaaatgcaagccgctgatctacgccagttacccgatggcggagattgccgaggcccatgcctgtctggacagtggtcagcatctggggaaagtggtgatcacgatgacgtcgtga

SEQ ID NO: 220976 - DNA, 1344 bp, Klebsiella pneumoniae
atggatcagacgtgcactctggaaggctttctcacccgcgttcaacagcgcgatcctcatcaaaccgaatttgctcaagccgtccgggaggtgatgaccaccctgtggcctttccttgaggaaaatccgcgctatcgtcagcttgctttgctggaacgtctggtggaaccggagcgcgtgatccagttccgcgtggtgtgggtggacgaccgcaatcaggtccaggtcaaccgcgcgtggcgcgtgcagttcaactcggccatcggcccgtataaaggcgggatgcgttttcacccgtcggttaacctgtcgattctcaaattccttggcttcgagcagaccttcaaaaacgccctgaccactctgccgatgggcggcgggaaaggcggcagcgatttcgatcctaaaggcaagagcgatggcgaagtgatgcgtttctgccaggcgctgatgaccgaactctatcgccaccttggcccggataccgacgtaccggcgggcgatatcggcgtcggcggtcgcgaagtcggctttatggccggaatgatgcgcaagctctccaacaacagcgcctgcgtcttcaccggtaaaggactctcctttggcggcagcttgatccgtccggaagccactggttacggcctgatctacttcaccgaagcgatgctcaaacgtcacggcctcggcttcgaaggcgctcgcgtggcggtctccggctccggcaacgtcgcgcaatacgccattgagaaagcgatggagcttggcgcgcgggtggtgacggcctccgactccaacggcaccgtcgttgacgaagcgggcttcaccaaagaaaaactggcccgcctgatcgacattaaagagcgtgcccacggccgcgtggccgattacgcccgcgaatttggcctcacctatcttgaaggccagcagccgtggtcagtgccggtggatattgccctgccttgcgcgacccagaacgaactggacgtcgatgccgcccgccagctgattgccaatggcgtcaaggccgtggcggaaggcgccaacatgccgaccaccatcgccgcaaccgacctgttcctggaagctggcgtgctgtttgccccgggcaaagcggccaacgccggcggcgtggcgacttccggtctggagatggcgcagaacgccgcgcgcatgggctggaaagcggaaaaagtggatgcccgcctgcatcacatcatgctggatatccaccacgcttgcgtgcagtacggcggcgaagcgaagcagaccaactacgtgcgcggcgcgaatatcgccggtttcgtgaaggttgcagatgctatgctggcccagggcgtgatttaa

SEQ ID NO: 220977 - DNA, 1344 bp, Klebsiella pneumoniae
atgaggttctggcccgcctcgctgcagtcgaggctgatggcgctgctgtttctggcgctgctgctggcgaataccttaaccctgtcgctgctgttttatgagcgtatgagcagcgctcgcagcgtgatgctggggaatctggcttccgatgtcgccaccagcgtggcgatccttgaccgcctgccggccgctgagcggccacaatggctgccgaagctggcgcgcggcaattatcgctatctgctggacgccggggagcgcggcgattacccggacagctggcgcgcccgggacgcagcgcgctccctgcaggaggcgctgagcgcgcagtatccggtaagtattgtggcgatccccggcccgaggcagcatattcaggcccatattacccttcacgacggcgcgccgttgaccctcgacctgtggccgaaactaccggccatcgcccgctggctgccggtggtgctgatcgctcagtttgtcctcctgctggcctgcgcctggtacgcggttcgccaggtattgctgcccatctcccgctttacccacgcggtaaatgccctggagccggccagcgacacggcgggaactatggccgagcaggggccggaggaggtgcgtcgcgccgcccgcgcgtttaacgcgatgcaggcgcgcatccacgatcatctgcaggagcgagcgcggatccttgccgccatctcccacgatctgcaaaccccgataacccgaatgaagctgcgggtggagatggccgaccagccggaactgcgcgataagctactgcaggatctcgacaatatgacccgtctggtgcgggagggcatcgccttcgcccgcacctcgcagccgctggaggaggcgcgacagcggctgaatctcgatgcgtttctcgacactatcgtctgcgattatgccgatgtcggccggccggtccagttttgtcccgaagagaccgccggggtggtgtggatcccgccgcaggctctgcgccgggtgatgaccaatcttatcgataacgccttgaaattcggtacgacggccacggtaaccctgacccgtgacgccgtgggggatatcacccttcatgtgctggatgaggggccggggatcccggaggcgtcgctgcaggaggtgctacagccgttttatcgcctggaggactcgcgcaatcgcgataccggcggcaccggcctggggctagcgatcgccgcgcagctggtcagccagatggacggcgcgctgcgcctggccaaccgcccgcagggcggcctggacgccagcgttcgccttgccgcggcgggattgtatcctgctgtatctccggggaagacggataactaa

SEQ ID NO: 220978 - DNA, 1284 bp, Klebsiella pneumoniae
atgaaccccagaattattatttcaggtgttatctcatgttttctgcctgcgaccttatgccatgcggccaatctaagcgacgacggcagcttccagttaaatggatatggcatggtggctggagattttcagagcgaactaaaccgtcccaaaaacatgtcgttgcataccgatcccaccggacctaatcaggatcctcgtggcaaaatgggcgatttgggaaacagtttctggcacgattactggacatcgctggctatcactaaaaaatggcaggggctggcttctcccgagcaatgggctgattacacctatgaaatggtgggttacggcgataaaacggtagaaacggcacagaattatgggcgctttggtgggctctcttttcttcccgagggcgcaaacatttgggctgggcgtcgttacctcgatcaacgtattaatatcttcgcttacaataccaaagaagtacatattgattccggcctcggttataacagtaagaattttgatttgaacgttggtaccgaccagatcgactggtccagcgataccgcgccgcaggcgatagaaggctcgcggcgcatcgttgatatagcttatcgtatcgatcagacagagctgggtatgacctatgttaaagaaattgatgacccattgggcactggcaagcagaaagcaattagtttttccgcgaaatacagcatgccgtctttttggggagtggcaaagggacaatcgacagtcaaattacagtatggtaaaggggttattgctccttatctgaacaccagtcgtattaccgtccttagcgaagagggcgattgttcaatgcgtttttccaccgacggaaacttgacgttatttgataattttgccgtctcgccggctttcatctatgaatataccaagcgtgaaaaaactgctgaccgaaccacctttatacctgatacaggttattcagggggggacatgacctatggttccgcaaatgaaaccgggatctttaccggcgtaaacgttaaacaaaatattcatcaccaaaatctctccatgttgtatgaagtcatggtgaataacactatcaataaaaatggcgtcgcaggtgccagcggcgtcggctacaaaattgccgccggcccggccctgcaactggatgttttaccgtatgtcgcgccgattctcagtttgacggttacctacgcaggcggggacaaagaggtcacgttattgccggaagactcggagtggcgagtcgggtatcgaatggaagtctggttctga

SEQ ID NO: 220979 - DNA, 1647 bp, Klebsiella pneumoniae
atgaaaaaaacgattatttcctttaccgcattagcgatgttcgtcagcgcggcgacgcatgctgaagcggatacctcgaaaaaaaccgacttcctgctgattggcggcgggatcatgagcgcctcgctcggcacctggttgcaggcgctgcagccggactgggatctgaccatggtggagaaactggacggcgtggcgctggagtcttccaacggctggaataatgccggtactggccactcggcgaatatggagctgaactatacgccggagcgggcggacgggtcgattgacgtcagcaaagcgctcgatattaacgagcaatttatgatttcccgtcagttctggtcggcacaggtgaaacgcggtattttgcacgatccgcactcgtttattaattccacgccgcatatgagcttcgtctggggtgataatgtggattatctgcagaagcgttataacgcgctgcagcagaccaccttattccaggggatgaaattctccaccgatcacgcgcaaattaaacagtgggcgccgctggtgatggaaggccgcgatccgcagcagaaagtggcagccacctggacgccggtgggtaccgatgtcaactacggcgaaattactcgccagctgatcggcagcctgaagaaaaataaccacttcaccctgcagacctcctctgaggtaacggatttcaaacgtaatgccgacaactcctggcacgtaacgattaagaatgtgcagagcggggaagcgcagactattgacgccaaatacgtctttatcggcgccggcggcggcgcgttgaagctgctgcaaaaaaccggtattccggaagcggacaactatgccggcttcccggtgggcggctcgttcctgatgaccgagaacccggcggtcactgtgcagcacctggagaaagtgtatggccaggcttcagtcggcgcgccgccgatgtcggtgccgcaccttgatgcacgttacctcgacggtaagcgcgtggtgctgttcgggccattcgccaccttctcgaccaagttcctgaaaaatggttcgttcttcgatctgctcagcactaccaccaccaataacgtgctgccgatgacccacgtcggtctcgacaacttcgatctggtgaaatacctggttagccaggtgatgctcagcgatgatgaccgtttcgctgcgctgaaagagtactacccggacgcgcgtaaagaagactggaaactgatccaggccggccagcgcgtacagatcatcaagaaagacgcagagaagggcggcgtgctgaagctcggtaccgaagtggtggttgatcagcagaaaaccatttccgcgctgctcggcgcttcgccgggggcttccaccgccgcgccaatcaccctgaacgtgctcaagcagatgttcccgcagcagtttaactcgccggagtggcagagccgcattcacgctattgtgccgagctacggccagaagctgaacggtaacgtggcgctgacccagcaggtttgggatgacaccgctgcgaccctgcagctgacgaaaccgccggtgatccagatgccagcggctgcgcctaccgcgaccgccaagccggcagagacgccgcgcgaggcctcgccgcagcacgatatggcgctgtaa

SEQ ID NO: 220980 - DNA, 534 bp, Klebsiella pneumoniae; identical to SEQ ID NO: 153905

SEQ ID NO: 220981 - DNA, 843 bp, Klebsiella pneumoniae; identical to SEQ ID NO: 153898

SEQ ID NO: 220982 - DNA, 507 bp, Klebsiella pneumoniae; identical to SEQ ID NO: 23325

SEQ ID NO: 220983 - DNA, 678 bp, Klebsiella pneumoniae; identical to SEQ ID NO: 23322

SEQ ID NO: 220984 - DNA, 2406 bp, Klebsiella pneumoniae; identical to SEQ ID NO: 23320

SEQ ID NO: 220985 - DNA, 960 bp, Klebsiella pneumoniae
atgaataccaagataaaactgctgacaacgataatccttgcgacgatgtccttttcatcgcattcacgggtctatgagtacaccattaaggatatctacggtgcggagaaatcagtcagtgcggaaaccggcattcttaacactaacgaaaaaattcagttgagcctgatttccggcctagatcgcaaagtacacgtatctgtccggaagtcaggaacggaggtttacagcacgacaaccgatagcattaaggtaagtgatcgaattaaggcatcaacaggtgaagagttctacgggaaaatcatcacgcttcctccccttagtgatggaccgtatcaggttatctctgaaatacttaacacacagggtgctctggtagactccaccacacaggatttcaccatagatagtgtgggccctacagcggacgatttgagcattttacagaaaccggggtatgaaatggtcacccagggagaaaggtgggaactgggccttggagccgaccaaaaactatatgtgaacgttaacaacgttaaagcagtcgctggtttcgataaagctacattacaggttattaatcccgataatagcgtctattccattactgctatggactatgatagcgggtcttcctccctgtctgctgcatggactttagggaatcggaaaaaggcctcctggatgcctacatcaaatgctgatgtagagtatcgtttccgggttacactctttgacaaagcaggctcccgaaaagtattaccggaacagaaatttgtatttgatgaccaactgggtgaatacactcttattgctatacgggaccccgaagcgcaaacaagcgttgttccagggttcacttcgggttatatagcttataaagcgggtatgacagttaatcaaaacccgattaccttaatctatcgtatggctttgttgaataaatcgaacttttgctga

SEQ ID NO: 220986 - DNA, 1638 bp, Klebsiella pneumoniae
atgcctgacggaaccgctagtttttcctctaaagaagaggagaaaaaagcggaaataaaacttaagaggcttcatcgttctattaacctcttcgaagacattcagatggaagagaaaactggtaatcagtttccgctttcaaaagtaatgcttgctgaaatgtattcgtttatggttagtgatggaaacatgactggtgacggttctaatatcgtttcctacattgaaatgtatattttaaacaagcttcgtgtaaatcagctcgggcaagaaggcgttcctgaaatattgaatgaattttttgctcttgctgatactgttctattcgacatgaaagaccgttttgattctttgattctcgaagccacaggggttaattcaactcttatggcatgtgagttaggattgaaactatatgaagaactagaaaagttacgtgatgatctaaaagataaagaagaacaaaaccgattagatgactctgacggcactgatgactctgacggctctgatgactctgacggctctgatgactctgatgactctgatgactctgacggctctgacggctctgacggctctgatgactctgacggctctgatgactctgacggctctgatgactctgacggctctgatggctctgatgactctgacggctctgacggctctgatgactctgacggctctgacggttctgatggctctgatggttctgtaacttctgcacgtacaacacaaagtttctcaccagcgcaattaagaaaggcgattgaagatcttgatgaatacctagacacagaggctgaacaggataattctcatgattttcatgaagctataaaaaaatccatatctcaaatggcatcttctttcagtgatgctgaaattcaaaactttggttttcgttttggttttatcactctgaccgaggaggactataataatgctctagctcactctcgtgagctaagaaagttactttcttctttaaataagcaaactgtacggcgtaacaacaggctaactgatcgtggatctcgtattcatagtagaaagcttgttgaagtacctatgggtgcaacctctgtgtttaagaaaaacggggagggatacaaaaggtctgatgtaggtgtaataaacctgcgtgatatctctgtatcaatgcatgacgtatcagttttagccttaaaagcaaatcttgcatttacccttgcttgtgaatcggtgaacaatattgatgttgctgatcttgtttatccagttcaaaaagaaggttatatagatatacttaagttttttaataaatctgtatctagttgcttttcaaattatgaaaatgtttctagcggattacataccccaactgcgacagcgattaattcatgcgtggaatatttctcacgtttgaatttctcacgtaaagttatctttattgcgactgatggtgacccatctgaatcaatagatgatgtatgctcagcagttaaaaatgctaaaaaacatggcatagatattgtttgtgtcggttatggcattgataaacctctaggctttgatggtgtttattttaaaaaaataaacgatatctctgaattaaattctttgtataaagatttaatcagaagcctagtttaa

SEQ ID NO: 220987 - DNA, 2319 bp, Klebsiella pneumoniae
atgcaaaaattaaccgttggtttaattggtaatcctaattccggcaagaccaccttatttaatcagctgaccggcgctcgccagcgcgtgggcaactgggctggggtgaccgttgagcgtaaagaggggattttcgccaccactgaccaccaggtcacgctggtcgacctcccgggaacctactccctgaccaccatctcctcgcagacctcgctggacgagcagattgcctgtcactacatcctgagcggcgacgccgacatgctgattaacgtggtcgatgcctccaacctcgagcgcaacctctatctgacgctgcagctgctcgagctggggatcccctgcgtcgtcgcgctgaacatgctggatatcgccgaaaagcaacaggtgcggatcgatatcgacgccctcgccgcccgtctcggttgcccggtcattccgctggtatcgactcgcggacgggggatcgaagcgctgaagatcgccctcgaccgtcatcaggcgaacagcgatcttgagctggtccactatccgcagccgctgctgcgcgaagctgacctgctggcgcagcagatgtcagcgcagatcccgacccggcagcggcgctggctgggtctgcagatgctggagggcgatatctacagccgggcctatgccggcgacgccgccgataaactggatatcgccctggcgaatctcagcgacgagatcgacgacccggcgctgcacatcgctgacgcgcgctatcagaccatcgccgccatttgcgacgccgtcagcaataccctgaccgccgaaccaagccgcttcaccgccgcgatggacaaagtgatcctcaaccgcttcctcgggttgccgatttttctctttgtcatgtacttgatgttcctgctggcgatcaacatcggcggcgcgctgcagccgattttcgatgccggctcagtcgcgatctttgtgcatggcattcaatggctgggttacaccctgcacttcccggactggctgaccgtgttcctcgcccaggggatcggcggcggtatcaacaccgtgctgccgctggtgccgcagatcggcatgatgtatctgtttctctccttccttgaggactccggctacatggcgcgcgccgcctttgtgatggatcgcctgatgcaagccctcggcctgccagggaaatccttcgtcccgctgattgtcggttttggctgcaacgtgccgtcggtgatgggcgcccgcacccttgacgcgccgcgcgagcgtctgatgaccattatgatggcgccgtttatgtcctgcggcgcgcggctggcgatcttcgccgtcttcgcggccgccttctttgggcagaacggcgcgctggcggtcttctcgctctatgtgctgggcattgtgatggccatcctcaccggcctgatgctgaagcacaccattatgcgcggcgaagcctcgccgttcgtgatggagctgccggtgtaccacgtcccgcatatcaagagcctgattatccagacctggcagcgcctgaaaggctttgtgctgcgcgccgggaaggtgatcgtcatcgtcagcatcttcctcagcgcgctgaacagcttctcactgagcggtaaggtcgtcgacaacatcaacgactccgcgctggcctcggtgagccgggtcattacgccggtgtttaaaccgatcggcgtgcatgaagataactggcaggccaccgtcggcctgtttaccggcgcgatggcgaaagaggtggtagtgggtacgctgaacaccctctataccgccgaagatatccagaatgaggaattcaatccgcagaccttcagtctcggcgaagaactgctcgctgccgtcgatgagacatggcagggactgaaagacaccttcagcctcagcgtcctggccaaccccatcgaagccagcaaaggcgatggcgaaatggccaccggcgccatgggggtgatgggcagtaaatttggcagcgcagcggcggcatacagctacctgatcttcgtcctgctctatattccctgcatctcggtgatgggcgccatcgcccgcgaatcaagccgcggctggatgaccttctccatcctgtgggggctgaatatcgcctattcgctctcgacgctctattaccagaccgttagctttagcgatcacccgcgctacagtctggtatgtatcctggcggtagtgttgttcaacgtggtgctcttcggcctgttgcgccgggcgcgcagccgggtggacgtctcgctgctggccacgcgaaaaacgccggcctcctgctgttccagcccggctggcgattgccactaa

SEQ ID NO: 220988 - DNA, 228 bp, Klebsiella pneumoniae; identical to SEQ ID NO: 135073

SEQ ID NO: 220989 - DNA, 279 bp, Klebsiella pneumoniae; identical to SEQ ID NO: 94194

SEQ ID NO: 220990 - DNA, 615 bp, Klebsiella pneumoniae
atgaaacgtgtcgggataaaggctcaggttggataccggagcccgcgggcacgtaaaggcgaagccagtatcgtgtcgcccaacaggctccagcgacagttcaatccggatgctccggatgagcgttgggtaacggacataacctacatcaggacccacgaaggctggctgtatcttgccgtggttgttgatctgttctcacgcaaaattatcggctggtccatgcaatcccggatgacaaaggacattgtcctgaacgcactgctgatggctgtatggcggcgtaatccccaaaaacaggtgctggttcattcggatcagggcagtcaatacacaagccatgagtggcagtcgttcctgaaatcacacggcctggagggcagcatgagccgtcgcggtaactgccatgataatgcggttgcagaaagctttttccagttgttgaaacgcgaacggataaagaaaaagctctacggaacgcgggaagaagcccgcagcgatatttttgattacatcgaaatgttttataacagtaagcgtcggcatggttctagcgatcagatgtcaccgacagaatatgaaaaccagtattatcaacggctcggaagtgtctag

SEQ ID NO: 220991 - DNA, 786 bp, Klebsiella pneumoniae
atgaataacctggttccagttggatctccgccatctcccggcacattgctcccggtggccatcgattaccctgccgccctggccctgcgccagatggcgctcgtgcaggatgaactcccgaaatatctgctggcgccggaagtcagcgccctgcttcattacgtgccggatcttcaccgtaagatgctgctggcgacgctgtggaacaccggcgcgcgcattaatgaagcgctcgcgctgacccggggggatttttcgctggcgccgccgtatccgttcgtgcagcttgccacgctgaaacaacgggccgaaaaagccgccagaacggccggccgagctcccgccggtagccaggctcatcgcctggttccgctttccgatcaccactacgtcagccagctgcagatgatggtggctaccctgaaaattccgctggaaagacgaaacaagcgcaccggcagaatggagaaggcgcgtatctgggagatcacagaccgtaccgtccgcacctggcttagcgaagcggtggaggccgcagcggccgacggggtgacgttctcagtaccggtgaccccccatacgttccgtcactcctacgcgatgcacatgctgtatgccggcataccactgaaggttttgcagagcctgatgggccacaaatcgattagctcgacggaggtctatacgaaggtgtttgcgctcgatgtcgcggcgcgccatcgtgtgcagttccagatgcctggcgatgaggcggtggcgctgcttaaaggacggtgttgtgattaa

SEQ ID NO: 220992 - DNA, 642 bp, Klebsiella pneumoniae; identical to SEQ ID NO: 94281

SEQ ID NO: 220993 - DNA, 306 bp, Klebsiella pneumoniae
atgcagtttaaggtttatgcctataaaagagagagccgctatcgtctgttcgtggatgtgcagagtgacatcatcgatacccccgggcgacggatggtgatcccgctggccagcgcccggctgctgtcggataaagtttcccgtgaactctatccggtggtgcacatcggggacgacagctaccgcctgatgaccacggacatggccagcgtcacggcctccgtcaccggggaggaagtggccgatctcagccaccgggaaaatgacatcaaaaatgcgataaacctgatgttctggggaatttga

SEQ ID NO: 220994 - DNA, 219 bp, Klebsiella pneumoniae
atgaagcagcgcatcactgtcaccatagacagcgacagttatcagttactgaaatccgcagacgtcaatatctccgccctggtgaacagggccatgcagaatgaggcccgtcgtctgcgtgccgaacgctggcaggctgaaaatcaggaagggatggccgaggttgcccgctttattgatatgaacggttcattcgccgacgaaaacagggactggtga

SEQ ID NO: 220995 - DNA, 1374 bp, Klebsiella pneumoniae; identical to SEQ ID NO: 94280

SEQ ID NO: 220996 - DNA, 429 bp, Klebsiella pneumoniae; identical to SEQ ID NO: 94279

SEQ ID NO: 220997 - DNA, 846 bp, Klebsiella pneumoniae; identical to SEQ ID NO: 94278

SEQ ID NO: 220998 - DNA, 396 bp, Klebsiella pneumoniae; identical to SEQ ID NO: 94277

SEQ ID NO: 220999 - DNA, 585 bp, Klebsiella pneumoniae; identical to SEQ ID NO: 94276

SEQ ID NO: 221000 - DNA, 843 bp, Klebsiella pneumoniae
atgactgacgattttcagaaagaacagctgatagcggcacgctatggcgagaaagacaggcctgaaaatattatctggaacaaacagatagaagggttactctgccaccgttcagtcagaagcttttcgccgcaacctctgcctgaatactggtttgaaactctggtggcagccgcacagtctgcctcaacatcctcaaatctacagcaatggagcgtagtagcggttaccgatcctgagcttaaggcacaggtaagaaagctgtccgctggggatagcggtctggctaatggctacattgaagaagcgcctgcgatacttttatgggtggctgacctgtcgcgtaatcatgatatgaccgtggcggatggtctgaatccgggtgtgcatgaatatctcgactcatttgttatggcgactgtggatgcctcgcttgcctcgcagaacgctactgtggcggccgaatcaatcggactgggaaccgtttatatcggggctacacgaaacaaggcaaaagaactggccgaacttattcaactgcccccgcacagctacgttgtatgcggactggttgtcggatggcccgatccgaaaagcaacgcaagtattcgcccacgcctgcctcagagcgtggtcgctcaccataaccgctacaacgcatctgactttgacgcacatgttaaaagctatgaagaagcgttccatgcgtttcgtgaaggactgggaatgaaagacaaaacctggaaacaggccgtacaaagctcagcaacaagcatggactatatggacggacgccagaaccttcgcgctacgcttgaagatcgcggattcggttttaaataa

SEQ ID NO: 221001 - DNA, 195 bp, Klebsiella pneumoniae
atgggctatacatcatggggccccatcgatctggtcagtaactccaccgcggaattaggtaagcgttacggctttatctacgtcaatcgcgatgatacgggacggggcgatcttaagcgctacagaaaagcgagcttctactggtatgccgatgttataaaaagtaacggtgaaacgctggtgccaaatatctga

SEQ ID NO: 221002 - DNA, 132 bp, Klebsiella pneumoniae
atgcaccctgataaagaagacaccgcagcaacagacatgagaaatttcgtgatgttgttcatttatataccttatttgttaaagggatttttaagcaaaggttgtaaattcagttttaaccagtttttataa

SEQ ID NO: 221003 - DNA, 7623 bp, Klebsiella pneumoniae
atgaaaaatataaatatcacagcaaaagatacaggtgtgaaatacaccgtcgatggcaatcaagttaacttaaacacgcagtcagttgttgtgttgcatattaagcgagaggacatcagttccttctccaggcaaggtaatgatcttgttctaaaaataaacgacggcagtactcttacgctgaaagacttttttgtgaatgatgccaatgggcatcatagcgatttagttttacaagatgacgatagtggggctctgtggtggcttgaaggggcaggaaccagcgatgcccattattctctcatcagtgatatctcaggattattagctgcaggcagttctggtggcagcattgctccatgggtaatggccggggcggctttgcttggtataggggcgatgattgcaggatcttccgataaagatcattcgtcgcattctccgaacgatgatactgattctgatgcggacagtgattcggattctgactcagacagcgataccgaccctggcggcagcgaaagtgatgccgatgccgattctgatacagactccgacagcgattcggattccgacagcgattctgactcggacagcgactcggattctgacagcgactcggactccgacagcgactcggactccgacagcgactccgactctgacagtgattccgactctgacagtgattcggactctgacagcgactctgactcggacagtgattcggattctgacagcgattcggattctgacagtgattccgattctgacagcgactcggattcggacagcgactctgactctgactccgattcggacagcgattcggattccgacagtgattcggactctgacagcgactcggattccgacagtgactccgattcggacagcgattccgacagcgattccgactctgacagcgattccgacagcgacagcgactctgacagcgattcggactctgacagtgactcggattctgacagcgattccgattctgacagtgactcggattctgacagcgactccgattccgattccgacagcgattcggactcggacagcgactccgactctgacagcgactctgattccgacagcgactccgattccgacagcgattctgactctgacagtgactctgactctgacagcgattcggattccgacagcgactctgactcggacagcgattcggatgctgacagtgactctgactccgacagcgattcggattccgacagcgactcggattctgacagcgattcggattctgacagtgattcggattccgacagtgactcggactctgacagtgattcggattccgacagcgactccgattccgacagcgattctgactctgatagtgactctgactctgacagcgattcggattccgacagcgactctgacagcgactccgattccgattccgacagcgactcggactctgacagcgactccgattcggacagcgactctgactctgacagtgattccgactctgacagtgactcggattctgacagtgactcggattctgacagcgattcggactccgacagcgattcggactccgacagcgattcggactccgacagcgactccgactccgactctgacagtgactccgattcggattctgacagcgactcagactcggacagcgactcggactccgacagcgattcggattctgacagtgattccgattccgacagcgattcggattctgacagcgactcggattctgacagtgattcggactctgacagcgactccgactcggacagcgattccgactccgacagcgactccgattccgacagtgattcggactctgacagcgattccgactctgacagcgactctgactcggacagcgattcggactctgacagcgactccgactcggacagcgactccgactcggacagtgactcggattctgacagcgattctgactcggacagcgactctgactccgacagcgactctgactccgattcggacagcgattccgacagcgactcggactccgacagcgactcggattctgactccgactctgactccgacagcgattccgactccgacagcgactcggattccgacagcgactctgactccgacagcgactcggattctgacagtgactccgattcggacagcgattccgacagcgactccgactccgactccgacagtgactcggactctgacagcgactctgactccgacagcgattcggattctgacagcgactctgactctgacagcgattcggattctgacagtgactcggactcggacagcgactccgattcggacagtgattccgactccgacagtgactcggattctgacagcgattccgactccgacagtgattcggactctgacagcgactccgattcggacagcgactctgactcggacagtgattccgactctgacagcgattcggactccgacagtgattcggattcggacagcgactccgattctgactccgactcggacagcgattccgactctgacagcgactcggactccgactccgactccgattccgacagcgactcggactccgacagcgactctgactctgacagcgactcggactccgacagcgactcggattctgacagcgattccgactctgactcggacagcgactcggattctgacagcgattccgactctgactcggacagcgactcggattctgacagcgattccgactctgactcggacagcgactcggattctgacagcgattccgactctgactcggacagcgactcggattctgacagcgattccgactctgactcggacagcgactcggattctgacagcgattccgactctgactcggacagcgactctgactccgacagcgattcggattctgacagcgactctgactcggacagcgattcggactctgacagtgactccgattctgacagtgattcggactctgacagtgactccgattcggacagcgactctgactccgacagcgacagtgattcggactctgacagcgattcggactctgacagcgattcggactccgacagtgactccgattccgacagcgattcggattccgacagcgattcggactctgacagcgattcggattctgacagcgattcggactctgacagtgactcggattcggacagtgattccgatgctgacagcgattcggactccgacagtgattcggattctgacagcgattccgattcggacagcgactctgacagcgactccgactccgacagcgattcggactctgacagtgactccgattcggacagcgactcggattctgacagcgactctgactccgattccgattcggataccgaaccgcaggcaaataatgatacccatacggcggctatcgataccgtagacggcaaccttaacaacgtgaccggaaccgcaagccagctgcttggtgtctccttactcaatacggtggatgtctccctgctggcggcgaactccacgaagttctcggttagtgaaggaacaactgaggatgtgacgatagctgtcactggttcaacgttgctgagtctgcagtcagtactggcactggtggggcaactggtgggcggcgcttcatccattactgccgatctgtcgatagtgaataccgacaccggtgaggtggtgcagattattccggatgccgtgagcctgacgccgtctctggcgctgctcaatctggtttactccggcagcgcgaccttcagcgacctgccggccgggaactacgcggtggtggtttcttcaccgcaggcttccggcggtctggccgcagtggttgatgaactggcgtcagcaaatctgctgtcggttgcccaggcgacaatcacggattctacgcagtacacctcgacggcaattgccggcaatgtgctggttgcggatgcagggggtgatgtagcagacaccggtgatggcattacggtaagcaaaatcgcctccagcgtgcagaccacgccgcttgatgtgacggctgcaggtgttgtgataaatggtctttacggtcagctgacgatccatacggacggcagctatacctacaaggcgactggcgatgcggatgctgttggccaggccgatatctttacctacacgatagtggatgcggatggtgatacggcaacggctacgctgacgattaatatcgtggcaggaagtgatatcggtgagtcggatgctgatgcagattccgacagcgactccgattctgacagcgactctgactccgacagcgattcggattctgacagcgactctgactctgacagcgactcggattctgacagtgattccgattccgacagtgattccgactccgacagcgactcggactctgacagtgactccgattcggacagcgactctgactccgacagcgacagtgattcggactctgacagcgattcggactctgacagcgattcggactccgacagtgactccgattccgacagcgattcggatgctgacagtgattcggactcggactctgacagcgattctgactctgacagtgactcggactccgacagcgactcggactccgacagcgactctgactcggacagcgactccgactcggacagcgattctgactcggacagcgactcggattcggacagtgattcggattccgttgaggcaatacctgataccaatagttctgaggttgtgcagcagtacggcaatcttaatggtactgaaggcaatctctcgcaactggttggcgtctcgctgctgagcacgattaatgtgtcgctgttgtctggcagtagcttccgcttcaacgtggacaacaacacaacagaggatatgacggttgatgtcagcggcgtgtctctgctttcaacggctgggctgttaacgtcgatagtcaatctgctgggggctggaaatacgctgacagccgatctgtcggtgattgatatcgcgactggacgcgtagttgctatcgacgcgggaagcgtgagtattagcgcaacgttgcttggtgggttggtctatagcggaacagcttcctttgagaatctgcctgctggtagctatgcgctggcgatatcctcaccaaattccgatggagttctggtgagcctgatcaacacgctcgcaggtgcaggagtagccacctttgtagaagcaacggtaaccgattcgctcggttatagcggaagtaccgttacaggcaatgtgctggagggatcggataacggcgatatggccgatagcggtaccgaccttacggtaacgtcggtaacggccaccactgctgcaggtgagactttctcagtgaatggcggcaccatatcggtaacgggtgcttacggcgtactgactattaacgctgacggcagctatagctaccaggcatcaggtaaggccgggtcggcaggtaatgcggatgtatttacctataccattacggatggtaatgggctgcaatcaaccaccaccctgactatcaatatcggtcaggaggtcgagaccgcccaggctaatccggatacgcaggcttattacgtcggcaacgtcgaagataatcttgatatccaggggggcaatgtcgttcaggtggcgggcctgtcgctactgaataccgtgaatgtcgcgcttccgaccaatggctttaagtttgtcgtggctgaagggactgaacaggatgtgacgttaggcgtttcggggtccactgcccttagcatcgcgctaggcgccgttaccctggatctcattctgatcaataccgacactaaccagatagtcggcgttattaaggatggaattacagcaacgccgacaggtttccttggattaagccttgaatacgcgggaggaggggaatttgaaagaattggcgccggtaactatatggttgttatttcgtcgccgactactgaaggattgattggttcgatactgaatctgaatttgggcaccagcattagtatggaggtgacagattcgactaaatacgtgacggggaatgttctgcacaccgatagcgatggcgatgttggtgatacaggtaatggaattaccgtaagcagcattcagtttggatcgcagatcgaaacagtcactgccggcggtgtcacgattaacggtacatacggtactctgataatcaagtctgacggtagttatagttaccatgctaatggaacaacaggggtgggtcagagtgatgtcttcacctacacgataacggatgggctgggtcatacatcgtcgactacgctgacgatgaacattgagtcaacgccaccggtagcggttgatgatatcgcctccctgtcggcggcaacggcaatgcagtcggttacctggacgcaaagcgtcagcaatcttgcagtgccaaacacggcagtagcggctaatgcgacatcggcggcgaaagtcaccagtcagaactttaccatcgctgaaggccgggaggtggatggagcatctatcactctcaacttgagtggtaaccgaaccagtggtctctcactactaaatggcgatctttctgggacggtctctcttatccatcatgtcactgttgatggtgtcacaacagatgtaacggtgtggacgagttctctgacgatggctctggatggttctctccttagcccgtcatccgatacggatactgtgacgctgaacatggttaacggcggcattccgctacaactggcggcaggtgattatactctgagtattagtcatacgatgcatgctggcacggcgttgtcctacaacctgtcagcgagcgtagcaggaacagagatccataccgatgcgcatctgacggtcgggcaatctgtggcagggaatattctcgacggttccgatgcgaatggaacaccagacacgcttggttcgctgcatagcggctttacgataagtggcgaaaacaatctgggtatcgcgaccaactggaccttccattctgatggcacagtaactaacgatacgggaaccagcgcatctaatggaaatgcggtgctgtatggtgaatacgggatcctgaccattaatgggcaaggtggttacacctatcagttgaacgggggtgtgaataccgatgcaataacgtctaaggagacatttacttatacccttattagtagtgatggcggcagttcgacggcgaatctgacgatcgatctgcacccgcagatcgccggcagcgtcaatgacgatagcgttcatagtaccgcttacgatgacaccttcagcatgggtgtgggagccgatacgctggtttacaacctgctggcggatgacaacaccggaggcaacggtagcgatatctggagcgatttctcggtcgcccagggagatcatatcgatgtttcggcgctgttggtcggctggaatggttccagcgatacgttgggtaactatattactctgagttatgtcggcggaaacaccgtggtgtctattgatcgcgatggaacgggtggaaacacccatcaacctgcgacgttgattacgctacagggggtccatatcaattcgctcgatgagctaattgataccaataactcgaactaa

SEQ ID NO: 221004 - DNA, 1437 bp, Klebsiella pneumoniae
atgcgtctatttcaaaaaaaagggatggtcagcgtttacagctgtagcactattttcctgtcaatctgcgtggtattaacggttgacgcagaggaactttcttttccgcccaccagcatcagcacccagaggttaaacgatactcagcaggtcgccggatatagcgaagagcttatcaaccctgaaagtcatcttgccggtccactggatattgctaccgcagtaaaatcagcagtcaattggcatcctgctatcaatcaacaggtgagtaaacttcaggagcaggtgcaaaaagtggatgtagcgaaagccaaatattatccgcaggttaatgcgggtatgaataatgggtacagtaacacctactctgattctggatattccccctcattagttgtctctgtttcgcaaatgctgtacgactttggcaaagtctccagttcggtgagagcggcggacgctgccgttgcccaacagcaggcgatggtcatgcttaatatcgatcaggtggctcatgataccgcgggtgcagtggtacagctgcagggttatcaaaagctcgtgaaaatagcccaggcccaggtcgattcgttaaagcatattggcgatcttattcgccagcgcaacgacgccggggcgacatcgctttctgatgttgtgcagacggatacccgcgttgagggcgcgcaggcgacgcttatccagtatcaggcagcgcttgagcgctggaaggcaacgctggcgacgtatcttggtctcggaagtattacctccgtaaccgaaagcgtaccgcaggctatggatgccgcctgcgccgttagtaaaattgattatcgaaccgtaccagcggtgctcgccgctttggcccaggctacacaggcacaagcccaggtagataatgccaccgcgcaaatgttgcctacaatctcgctggaacctcaggtaacgcattacctcaatgataattacgccaacagcgcggtattaaataaaacgcagtattcggcatgggtcaaagtagaaatgccgatctaccagggcggcgcgctaacggcttcccgcgaagcggcgcagcaaacgctatctgcggcgaatgccgggatcagaaacgcgcaactcgatgccagccagaagttgagcgcctcccgcgacgaggcggtaaacctgaaacaatctatcgccatccagcgccgccagcaattgcttggcgaacaaacccgcgccctgtatcaggatcaatatttacagctcggcacgcgtccgttactcgacctgcttaacgtcgatcaggaaatttatcaggcgcaatttaatcaggtattaactgaagctcaactgcgaaatctggaactggactgtctgttcagtacagggaaaatgcgcgccgtttttgctctggataaccaaagaattcagggcgtggagattcgaccatga

SEQ ID NO: 221005 - DNA, 171 bp, Klebsiella pneumoniae
atgagcgaacaaccccagcgcagcgatattccgcatttacaggattgggctaacgctatggcttttgtcgccagccattatcggcaaagttactcaccggggacgcttcatgccgcggcggagtgggcgacgcaaaaaacgctgcctgatgcgcttaaacggctttgttga

SEQ ID NO: 221006 - DNA, 1875 bp, Klebsiella pneumoniae; identical to SEQ ID NO: 94315

SEQ ID NO: 221007 - DNA, 636 bp, Klebsiella pneumoniae; identical to SEQ ID NO: 94316

SEQ ID NO: 221008 - DNA, 1206 bp, Klebsiella pneumoniae; identical to SEQ ID NO: 94317

SEQ ID NO: 221009 - DNA, 771 bp, Klebsiella pneumoniae; identical to SEQ ID NO: 94318

SEQ ID NO: 221010 - DNA, 1218 bp, Klebsiella pneumoniae
gtgaagtccgcgccgcgctggccgctgcatccggcacccaaggaaggcgaagccctgtcctcatggctcaaccgggtcgccgcctgctaccagatggacgtgcacgagctgctggcccacgatcttggtcacagccaacttgatgacctggataccgcaccatccttgtcgttgctgacggcgctctgccagcgcagtggcgtcgagctggagcggttgcgcagcatgagtcttgcaggctgggtgccgtggctgctcgacagtctcgacgattcggtaccagcagccttggaaacctatacattccaatgcgcggtgctcctgcccaagcgcacccgcaaggtgcggtccatcactcgctggcgtgcctggctaccgagccagacgattcgccgggcgtgtccgcagtgtctgaacgatccaacgaatcaagctgtgctactcgtctggcagctccccttgatgctgagctgcccgcagcatggctgctggctggagtcctactggggcatgcccggccggtatcttcagtgggaaatcgccgatgctgcgccgcgccctgccgatgacgcaatcgcctgcatggaccggcgcacctggcaggcgctgacgacgggttttgtggagctgccgcgtcggcgtgtccacgccggcttgtggttccggctgctgcgcaccctgcttgatgagctgaacacgccgctctcgcactgcggcagttgctcggcgagcatccgccatgtctgggagcgctgcggccatccgctgcgcgccgggcagagtctgtggcgtccctacgagattctggccccggcggtgcagtggcagatgctggaggcggcggccaccgccatcacgctgatcgagtcaaaggcgctgatcccgcgcggggaacaggccgcgctgtttcagacggagccgcacactggtttcaccaacggcctgccggcgaaggtgccgaagccggaacccatcaaccactggcaacgagcagcccaggccatcgatgaggccatcattgaagcgcgacacaacccggagacggcccgcttgctgttcacactggcgtcctacgggcgacgcgaccccgaatccctggaacgtttgcgcgccacgttcaccaaggagggcatcccgccggagtttttgtcacattacgagcctgaatggccgtttgcaggtcttagactaaatgacgggttaagtgacagtttttga

SEQ ID NO: 221011 - DNA, 909 bp, Klebsiella pneumoniae
gtggacgaatatcccgtcattgacctgtcccacctgctgccagcggcacagggtttggccaggctgccggcagacgagcgcatccagcgcattcgcgccgaccgctggatcggctacccgcgcgcggtcgaggcgctgaaccggctggaaactctgtatgcgtggccgaacaagcaacgcatgccaaacctgctgctggtcggccccaccaacaacggcaagtcgatgatcgtcgagaaattccggcgggcgcacccggtcggcaccgacgctgaccaagaacatatcccggtgctggtcgtgcagatgccgtcagagccatcggtgatccgcttctatgtcgcgctgctggctgcgatgggcgcgccgctgcgcccgcgcccacggctgccggaaatggagcaactggcgctggccctgctgcgcaaggtcggcgtgcgcatgctggtgatcgacgaactgcacaatgtactggctggcaacagcgttaaccggcgcgagttcctcaacctgctgcgcttcctcggcaacgagctgcgtatccccctggtcggggtcggcacgcgcgaggcgtacctggccatccgttcggacgatcagttggaaaaccgcttcgagccgatgctgctgccgccgtgggaggccaatgaggactgctgctcgctgctggccagcttcgcggcgtcactcccgctacggcggccatccccgattgccacgctggacatggcccgctacctgctcacccggagcgaaggcaccatcggcgagcttgcacatctgctggtggcggcggccgtcgccgccgtggagagtggcgaggaagcgatcaaccaccgcacgctcagcatggccgactacatcggccccagtgagcggcggcgacagttcgagcgggaactgatgtga

SEQ ID NO: 221012 - DNA, 1680 bp, Klebsiella pneumoniae
atgacatcagacactccaccgattgccgcgcaaggcgtggccaccctgcccgacgaggcatgggcgcaagcccggcaccggacggaaatcatcgggccactggcagcgcttgaggtggtcgggcatgaagccgccgatgaggcagcccaagcgctgggcctgtcccggcgacaggtatatgtcctgatccgtcgcgcccggcagggtactggcctggtaacagacctgacgcccggccgatccggcggcggcaaaggcaaggggcgcttgccggaaccggtcgagcgcatcatccgcgagctgctgcaaaagcgcttcctgaccaagcagaaacgcagcctggcggcgttccaccgcgaagtcgcgcaggcgtgcaaaacccagaagctgccggtgccggcgcgcaacaccgtggcccagcggattgccggactacacccggcgaaaatagcccgcagccggggcgggcaggacgctgcccgtcccttgcaaggcgcgggtggcattccgccagaagtcaccatgccgctggaacaggtgcagatcgaccacaccgtcatcgacctgatcgtggtcgacgagcgcgaccggcaaccgattggccgcccatatttgaccctcgccatcgacgtgttcacgcgctgcgtactcggcatggtggtcacgctggaagcgccgtccgccgtctcggtcggcctatgcctcgcgcatgccgcctgcgacaagcggccctggctggaagggctgaatgtggaaatggactggccgatgagcggcaagcccaggctgctctatctggacaacgcggccgagttcaaaagcgaagcgctgcgccgtggctgcgaacagcatggcatccggctggactatcgcccaccaggccagccgcactacggcggcatcgtggaacggatcatcggcacggcgatgcagatgatccacgacgaattaccggggacgaccttctccaatcccggccagcgcggcgagtacgattccgagaagatggccaccctgacgctgcgcgagctggagcgctggctcgcgttggcggtaggcacctatcacggctccgtgcacaacggcctgctccagccgccggccgcgcgctgggccgaggccgtggagcgcgttggcgtcccggccgtcgttacccgccccaccgcgtttttggtcgatttcctgccggtgatccgccgcaccctgacccgcaccggctttgtcatcgaccacatccactactacgccgacgccctcaagccgtggattgcccggcgcgagcgcttgcccgccttcctgatccggcgcgatccgcgcgacatcagccgcatctgggtactggaaccggaaggtcagcactatctggagatccactaccgcaccttgtcccatccggccgtcaccctctgggaacaacgccaggcgctggccaaattgcgtcagctcgggcgcgagcaggtggacgagtcggcgctgttccgcatgatcgggcagatgcgcgagatcgtgaccaccgcccagaaggccacgcgcaaggcgcggcgcgacgctgatcgccgccagcacctcaagacgtcggagccaccggccaagcccataccgccggatgtggacatggctgacccgcaggcagacaacctgccgccggccaaaccgttcgatcagatcgaggagtggtag

SEQ ID NO: 221013 - DNA, 213 bp, Klebsiella pneumoniae
atgaacgcaaacgccccgaacactgccagttgcaccacctgctgcgtatgctgcaaagaaattccgctcgatgccgccttccccccggaaggcgcggaatacgtcgaacatttctgcgggctggattgctatgaacgcttccaggcacgcgccaaggccgcgacagaatctgacattgcgcctgtccctggcggttcgcagccgtcagattga

SEQ ID NO: 221014 - DNA, 1362 bp, Klebsiella pneumoniae
atgactcgaagtgaaataaacgtctgggatgtgagacgaggcaccaacagtcctcgagttgaggagatccgatctgaagctcagcgcgacctttctcgattgattcactcgtctcctttcagacgattgcaatcaaagacacaggttcttggtctgggtgaaagtgatttctatcgcacacgactgactcattctatggaagtcgcccaaatcggttcaggtcttcttgctaagctaaaaaatatatataaaggtaaagaggaagcgcaatttttaccagataacgatctgatgcaagcagtatgtctcgcacatgatattggacatcctccatttggtcacggcggtgaggtagctcttaactattgtatgctggattacggtggttttgaaggaaacggccagacgcttcgcattctctcgaaactagataagtataccttagaacacggactcgatcctacacgcagacttctgctaggcatactgaaatatccggttaaatactcggaactagtggttaaaaaagacagtatcccggccactatcggatcgccgaactggctctttaagtcatctgattttaaacctccaaaatgctatctagattcagaatgcgatattgtagaatttgctctctcaccatttactgaacatgatcggaggctttttacttccgttaaagatggtcaaaccaaatccgatcataaaaaagcttcttataaagctctcgatacaaccatcatggatcttgccgatgaaatttcgtattcgctgcacgatttggaggatgctatttctctcgggatggtgacacgagcaatgtggatggagcatttcagtggacatgaaaccttatttactgactgccatggaaaaacattttccggaacatgtgaatctgtcgcggatagcctttttggtaaaagttacaagagaaaagagtgcatcgggatgctggttcacctgatgattacaagtgttgagcttaatacaaagaatgcagcattcaaatgtggcatgctcaaatataatgcggtccttccggaagcggtcgaagcactaaggttgaaaattttcaaactggtcgaaaacaaagtaattaagcatgaaaatgtacagcagcttgaattcaagggacaaaagttgattgttgagcttttcggtgtgctggctaacgatccgtgtcggtttctacctgcctcaacgagggaaatttacgagcagcagattagcttagacgagaaggctggtatgcgagtcatttgcgactatgtttcagggatgactgatggctatgcaacaaagctttatgagaagatccttatcccacgcaaagggtctatttttgaccatctctga

SEQ ID NO: 221015 - DNA, 714 bp, Klebsiella pneumoniae
gtggccgattatataaacagcaacatattatgtgagtcatatgttcatgttgagccagaatggttgaaacaggtaagtgctgtaattcgtgaagaaaagttatcactaattagaaacgaaatagaggattttgctgacaaaagaataaaattctttttatctgatgatgttttaattgaaattaaatttactgaaggttcaattaaagcaaaggtaactgcttatggtccaattattttattgatcggttctgcaatattaaattactcaagctttagagaaagtgtgaagcagttggcctctgatatgtatcgtgcgtcatcaatgttatcctcagaaatgcttttccagacaaactctagaaacaagagtgaaatccttcgtattgaagccagaaaaggaatcgttgggtccatagagagaattaataataaaattgattccattaactctcaattagatggtaaagaactatcacccacacgtataaatagcgagttacttgatctaaatgatatgatcctaacgctactatcgaacctaaaaaacgcagaagatacaaaattagttgcttcatcattaagtgatggtgtatctaaattatcaatacgtaaatctcgctttaagctcaagaataagctcgatgaatcaatgtatgcaagcctctttaatgagaagaaaagtattattaaaaatctcgcccaatataaatga

SEQ ID NO: 221016 - DNA, 1011 bp, Klebsiella pneumoniae
atgtattgttctattgcatccataatattatgcttgccagtattatattttggtggtggagtttgggccattgttttaagccagttaagcacatcagtaatcagttacataatcttagcgacttcttctaaacttaaacttagacctattttcaataaatcaagctttactgaattaagtcgttttggtataactacgacgtttacaaaactagttacttcaattagtatagataatgttattattggggtgtacggtagcgtcaccactttaggaatatatgcctttagtcgcagggtttttggttctattgctgatgttttgaataatgctattgcgaatgttagctatcccctttatgcatcagtgcaaacaaaaccatcgcaattaaagaatgttttttttaaaacgacctttttctcaactctattgagcttacctgcttttacgggattaataataatttctcctcatcttattccacttgtattcggagctcaatggcttgtagccattcctgtcattcaagtttgttgtgtaatcggttttatttcatgtattggctcactgcaaatgtctcttattaagggcttgggaaatactgcttggattctcaagtatcaaatttttcagcagataacgacagctcttttagtttttttgtttgctaaggatggagcactagtattaattgtatcgatagctattaagacttttatcatatggccttatacggtttactatatatctagaattttaggcgttactactttttcttatatttctaattttattaaacctttaacttctgttgtcctgatgtatctaggttgctatgttatagacaggcaattaagtgcggctaatgagttgttgaatgtattagtgttgattttatctggtgttgtaatatattgttttttcatattcatattggccagaaaagaaatttctgaatctctaacagcaattaaaacgagaaagaaacaaaaggttgaaaattatgagtga

SEQ ID NO: 221017 - DNA, 861 bp, Klebsiella pneumoniae
atgagtgactttgcaattaattttataattcctgttaggcattataggtcagtacaggattggcagagtgttaaaaccaatcttgagcatacgttgaagtcaatctttggacaaacaaacgataactggcattgttatattatttgtaaccgcggtacagatttgccaaaatcagctaatcatgaaaatgtaactgttttagagtctgattttgaatttatatcgttaccaaataaaagtgttgatcctgaagcttaccatgatttgatccgtaaagataaaggggcgcgagtttacgaagccttaaaatattgtaaagctaatgatttttttatggttgtagattatgatgattttgtacaccgagaattagttgaatttatcaatgataggatcaagaaaaatgcgggagaatacttttatggttggcttatcgatgtaggatatgtatattccggaggtaatgtagctcttttgaataaatcatttgatacaatttgtggtacatcaaatattgttcgagtttctttttttgaaaaattttatgatgagtatgggaatttgccacttttatacattaaagagttactaggaagccatcgttacataaaaaaatatatgagcaaggctggttattcttatggcagcttgcctttccctggagctgtatataatgtggggatttctaattcatcaagccaaacgggatcagtagtgaaagaaatcttttcatttagaaagtttttaaaaatgccacgtacgatgataaaattatggctctctattagattattcactacaaaaagcaagaggatgttcaatatctgtctcttatacacatctgacgctgccgacgaatag

SEQ ID NO: 221018 - DNA, 723 bp, Klebsiella pneumoniae
atgagggacaatgattttttcagctggcggcgggatatgctgcaccaatttcagtccatggccaccggcgaggaggtttataatctcctgcaacgtgaaaccgaagcgctggaatatgattactacacgctttgtgtgcgccacccggtgcctttcacccgcccccgcgttacgttccagtcgacttacccccgcgcatggatgtcgcactatcaggcagaaaattatttcgcgatagatcctgtgttacggccggagaattttatgcgtggccatctgccatggaacgacagcctgtttcgtgatgcgccggcactgtgggacggggcgcgtgaccatggtctgcaaaagggggtgacgcagtgcctgacgttgccaaaccatgctcagggatttctctctgtctccgcgaacaatcgtctgccgggcggttaccctgaagatgagcttgagctgcgtctgcgaacgctgactgaactaagcttgctgacgctgctgcgtctggaagatgagatggtgatgccgccggagatgaagttcagccgccgcgaactggaaatcctcaaatggacggcggaaggaaagacttcggcggaggtggcgatgattctctcgatttcggaaaatacggtgaatttccatcagaagaatatgcagcggaaatttaatgcgccgaataaaacgcaaattgcctgctacgccgtggcgacagggctaatctga

SEQ ID NO: 221019 - DNA, 264 bp, Klebsiella pneumoniae; identical to SEQ ID NO: 94215

SEQ ID NO: 221020 - DNA, 831 bp, Klebsiella pneumoniae
atgctgatgtgcgatgcgaccggtctgtcgcaacgtcgtgcctgcaggcttacaggtttatccctgtcgacctgccgctatgaggctcaccgtccggctgctgatgcgcatttatcagggcgcatcactgagctggtactggagcgcaggcgttttggctaccgtcgtatttggcagttgctgcgccgtgaagggcttcatgttaatcataagcgcgtgtaccggctttatcacctcagtggcctgggcgtaaaacgcagaagacgtcgtaaagggctggcaacagaacgtctgccgctgctccgtccggcggcgcccaatctgacctggtcgatggatttcgtcatggacgcactttccaccggtcgcaggatcaagtgtcttacctgcgtcgatgatttcacaaaggaatgcctgacggtcactgttgcctttgggatttcaggcgttcaggtctcgcgtattctggacagcattgcactgtttcgaggctatccggcgacgataagaactgaccaggggccggagttcacttgccgtgcactggatcaatgggcctttgagcatggtgttgagttgcgcttaatccagccgggcaagccaacgcagaacggatttattgagagctttaacggacgatttcgcgatgaatgcctgaatgagcactggttcagcgatatcgttcacgcaaggaaaatcattaatgactggcggcaggattataacgagtgtcgtccacattcagcactgaattatcagacgccatcagagtttgcagcacggtggcgaaatggaaaatgtgaaggtaaacaaaccgaccttactaactga

SEQ ID NO: 221021 - DNA, 327 bp, Klebsiella pneumoniae
atgtgctgcactgacatgcctgcgggggcgctttttgcgcaggttgaggccttccagacagtaaatccggtgtgttttcttgtggttaacaggcctgccttcccgccgcagctgaatatgaatacgcggacaagcgtagcggatccgggtttccgctatttcccggatacgcagggttatcgcccgatcatcccgccggctctgccagtggtaaacggttctgctctgcatcagcagtccgcatccccgtcggacactgatacggtaagccccccgcagaaaatgcaccgcctgacgcttctgggccggcctcagaactttttttga

SEQ ID NO: 221022 - DNA, 390 bp, Klebsiella pneumoniae
atgaaaaagacccgctataccgaagaacagatagtatttgcgctgaaacaggccgaaaccggcactcgggtggaggaagtctgcagaaagatgggcatttctgaagccacattttacaactggaagaaaaagtttggcggcatgggcgtgacagagctgcgccgcctgcgccagcttgaggaagagaatcagcgtctgaaacgtctggtggctgatttaagtctggacaaggtgatgctgcaggaagttatcaaaaaaagttctgaggccggcccagaagcgtcaggcggtgcattttctgcggggggcttaccgtatcagtgtccgacggggatgcggactgctgatgcagagcagaaccgtttaccactggcagagccggcgggatga

SEQ ID NO: 221023 - DNA, 732 bp, Klebsiella pneumoniae
gtgattcggactctgacagcgactccgattcggacagcgactctgactccgattcggacagcgactccgactccgactcggattcggacagcgactccgattcggactctgacagcgactccgattccgacagtgactcggactccgacagtgattcggactctgacagcgactccgattcggacagcgactctgactccgattcggacagcgactccgactccgactcggattcggacagcgactccgattcggactctgacagcgactccgattccgacagtgactcggattccgacagcgactcagactctgacagcgactccgattcggacagcgactctgactccgattcggacagcgattcggactctgacagcgactcggactccgacagtgattcggattcggacagcgactccgacagcgactcggattctgactccgactctgattccgacagcgactcggactccgacagcgactctgactctgacagtgactcggactccgacagtgattcggactctgacagcgactcggattccgacagcgactctgactcggacagcgattcggactctgatagtgactccgattcggacagcgactcggatgctgacagcgattctgactctgacagcgactctgactcggacagtgactcggattcggacagtgattcggactctggatttgcccctatatttccagacacctgttatcacttaa

SEQ ID NO: 221024 - DNA, 573 bp, Klebsiella pneumoniae
ttggaagcggcgggggtcactgtcaatgcgcaaggggccatcgttatcgaccaaggcatgcgcacgagcaacccgaacatctacgcggccggcgactgcaccgaccagccgcagttcgtctacgtggcagcggccgccggcacccgtgccgcgatcaacatgaccggcggcgacgcagccctcaatctgaccgcgatgccggcagtggtgttcaccgacccgcaagtcgccaccgtgggctacagcgaggcggaagcgcaccacgatggcatcgagaccgacagtcgcacgctgacactcgacaacgttccgcgagcgcttgccaacttcgacacacgcggcttcatcaagctggtcatcgaggaaggtagcggacggctcatcggcgtgcaggcggtggccccggaagcgggcgaactgatccagacggcggtgctcgccatccgcaaccgcatgacggtgcaggaactggccgaccagttgttcccctacctgacaatggtcgaggggttgaagcttgcggcgcagaccttcaacaaggacgtgaagcagctttcctgctgcgctggataa

SEQ ID NO: 221025 - DNA, 573 bp, Klebsiella pneumoniae
ttggaagcggcgggggtagccgtcaatgcgcagggggccatcgtcatcgacaagggcatgcgcaccagtagcccgaacatctacgcggccggcgactgcaccgaccagccgcagttcgtctacgtggcagcggccgccggcacccgtgccgcgatcaacatgaccggcggcgacgcagccctcaatctgaccgcgatgccggcagtggtgttcaccgacccgcaagtcgccaccgtgggctacagcgaggcggaagcgcaccacgatggcatcgagaccgacagtcgcacgctgacactcgacaacgttccgcgagcgcttgccaacttcgacacacgcggcttcatcaagctggtcatcgaggaaggtagcggacggctcatcggcgtgcaggcggtggccccggaagcgggcgaactgatccagacggcggtgctcgccatccgcaaccgcatgacggtgcaggaactggccgaccagttgttcccctacctgacaatggtcgaggggttgaagcttgcggcgcagaccttcaacaaggacgtgaagcagctttcctgctgcgctggataa

SEQ ID NO: 221026 - DNA, 264 bp, Klebsiella pneumoniae
atgctgtacatcatgagtctgcagtggcttctggtatccgattgcgaacaacggggttgtattcaccagctgcacataatgagtctgctgtggcttctggtatccgactgcgaacaacggggttgttttcaccggctgcaaattatgagttttctgtggcttctggtatccgactgcgaacaacggggttgtcttcacctgctgcacattatgagtctgtggtggcttcgggtatccgactgcggacaagctgaggggggttaa

SEQ ID NO: 221027 - DNA, 126 bp, Klebsiella pneumoniae
atgctgtacatcatgagtctgcagtggcttctggtatccgattgcgaacaacggggttgtattcaccagctgcacataatgagtctgctgtggcttctggtatccgactgcgaacatggggtttaa

SEQ ID NO: 221028 - DNA, 450 bp, Klebsiella pneumoniae
gtggcagcggccgccggcacccgtgccgcgatcaacatgaccggcggcgacgcagccctcaatctgaccgcgatgccggcagtggtgttcaccgacccgcaagtcgccaccgtgggctacagcgaggcggaagcgcaccacgatggcatcgagaccgacagtcgcctgctaacactggataacgtgccgcgtgcgcttgccaacttcgacacacgcggcttcatcaagctggtcatcgaggaaggtagcggacggctcatcggcgtgcaagcggtggccccggaagcgggtgaactgatccagacggcggtgctcgccattcgcaaccgtatgacggtgcaggaactggccgaccagttgttcccctacctgacaatggtcgaggggttgaagcttgcggcgcagaccttcaacaaggacgtgaagcagctttcctgctgcgctggataa

SEQ ID NO: 221029 - DNA, 351 bp, Klebsiella pneumoniae
gtgtcccggctggcccttgatgccggggtgagcgtgcatatcgtgcgcgactacctgctgcgcggattgctgcgtccggtggcgtgcaccccgggcggctacggcttgttcgatgatgccgccttgcaacggctgtgcttcgtgcgggcggccttcgaggcgggcatcggcctggacgcgctggcgcggctgtgccgggcgctggatgctgcggacggcgatgaagcggccgcgcagcttgccgttctgcgccagttcgtcgagcgtcggcgcgaagcgttggccgatctggaggtgcagttggccaccatgccgaccgagccggcacagcacgcggagagtctgccatga

SEQ ID NO: 221030 - DNA, 414 bp, Klebsiella pneumoniae
atgaccggcggcgacgcagccctcaatctgaccgcaatgccggccgtggtgttcaccgacccgcaggtcgccaccgtgggctacagcgaggcggaagcacatcacgacgggatcgagaccgacagtcgcctgctaacactggataacgtgccgcgtgcgcttgccaacttcgacacacgcggcttcatcaagctggtcatcgaggaaggtagcggacggctcatcggcgtgcaagcggtggccccggaagcgggtgaactgatccagacggcggtgctcgccattcgcaaccgtatgaccgtgcaggaactggccgaccaattgttcccctacctgaccatggtcgaagggctgaagctcgcggcgcagaccttcagcaaggacgtgaagcagctttcgtgctgcgccggatga

SEQ ID NO: 221031 - DNA, 714 bp, Klebsiella pneumoniae
gtgatcgccaaacttggccagcgcacggatacctccgatgccgacggtcaggtggtggaagagcgcccgctgactttttgcgacgaacagctggcggcggcgctggacagcttccgcggcgagacgcagcaggtgccgtcgatgtattcggcgctgaaatatcagggcaagaagctatacgaatatgctcgccagggtattgaagttccgcgggaagcccggccgataaccgtctatgagctgctgtttattcgccgcgaaggcgatgagctggagctggagatccactgctcgaaaggcacctacatccggacgattatcgatgatttaggtgagaagctcggctgcggcgcgcacgtgattttcctgcgtcgcctggcggtaagcaaatacccggtcgagcggatggtgaccctcgagcagctgcaggcgctggtcgatgaggcggcggcgcaggatattcctgccgctcagttgcttgatccgctgctgatgccgatggacagcccggcctcggattacccgctggttaatattccagaaacctccgcagtctactttaagaacggcaacccggtacgtcagtcaggcgcgccgcttaacgggctggtgcgggtgatggagagcgagtccggcaagtttctcggcatgggcgaaattgacgatgaaggccgcgtggccccgcgtcgtctggtggtggaatacccggcgtaa

SEQ ID NO: 221032 - DNA, 630 bp, Klebsiella pneumoniae; identical to SEQ ID NO: 209761

SEQ ID NO: 221033 - DNA, 1584 bp, Klebsiella pneumoniae; identical to SEQ ID NO: 209759

SEQ ID NO: 221034 - DNA, 744 bp, Klebsiella pneumoniae
atggctcctacactaatagaatcctacagaaaagatctgagcgagtggcctcacacaggggacactcgttctgttcgtttcggcttcctccttgcctccaggtcacttttcaaaatctcagaacacgaaatcatcgcaccagaggatgatgtcgttcgctacattctcattgagcgtgtaggtgcgaacatccccgatgttgaactgagcaacatgattttagactacgaagatgacgggctaaacgagcaagacattattcaggaacttctccgatctggcgtcgttgatgaggctaataacgtcaccactggacgggttgggcttcgtaactatagcttcgttgaagatggccaggacatagattgtttccaggtcgctggagcttatatccagcctacgagccatcgtaaaggcatcatgagcaggacatatgttttcatgctgaactggtatgagcatttagtttgtgatgatatgcagacgatacctggtgcgcgcatttgggctggcccgatgattcgtgctggtgaagtgcgaatctataatgagaatggcggttcattcgaagatgtgcttggcgagaaaggtattggtaggcataacggcttcctgccctggaaccgaggtcgcttatttgacacctcccaatgggaccctaatcagctccaaactacagttcaaaaatttatcgtgctgattatatcccgaggaacctgcctcagaattggctttatcccctga

SEQ ID NO: 221035 - DNA, 396 bp, Klebsiella pneumoniae
atgcacgacgtaatgaacgaaaaacgttctattcagacaattcgtgatcataccagcatcattgccacgcacacttttaagcagcatatgcttcaggtgcgcacacttgacaatgaagggatgactgcgcctgaagattttcacttcattgtcaccttcaaagatgatgtggacaatgctgatgctacggttaagccgttggcagaagcagtcctgcttggtgatcgcgttcgtttcattgttaaacctgcgaaacagtaccctgagatggctcgatcaatgcccgatctcgttgaggttattgaacattctattcgtcgtttctttgatactaatggtagaattatgagcaatattaaagctaatggttctgctgagaaatggctcctacactaa

SEQ ID NO: 221036 - DNA, 840 bp, Klebsiella pneumoniae
gtgagtagaaacccgtgtgaagtacatgaatggcatgctctcggccgagaagcatcattagtcaggcacctcattgggtcaggtgctacggctataggtagggccaattacgcagataagatgggcgaatattacactgcgttctttggactttcagttgggttagaaaggctttcaaagttaatactggttgcgcattatgctattgagaaccaaggaagaatgcctgacgagcgagttgtgagaaaatttgggcacaaactaattgacttgaccaacgaggttgagaatatttctgaaaaaatgcaactgtcgctgagctattcacgccctatacaagaaatcccccaaaagatactagaatgtctagattcatttgctgatgctcgacgaggtagatacgcaaattttgcttcattagacaaccccaatttaaccggtgatgagcctgttaataaatggtggggcgaggtagcggagtgcatactggaaaagcattattacggtaaggtcgctcaaagacgtgttgaaggtagtgctgaattaattgatgctatgatttcaccgtttacgatggtgatacacacgaatgagaatgggaatactatgctagacgttaaatctgcctctatacgcactggccaaaatgctattgtgcaaaagtgggggaggtattattctttagctatcgttcgctggcttgcaacggttttatctgagctctcccatatcgcttgctataaacatggtatagacggtttttttggtctaaatgaatactttgatagttacactgttgacgatagttttttaaaaactagaaaggtatggcctctttag

SEQ ID NO: 221037 - DNA, 708 bp, Klebsiella pneumoniae; identical to SEQ ID NO: 210994

SEQ ID NO: 221038 - DNA, 894 bp, Klebsiella pneumoniae; identical to SEQ ID NO: 210998

SEQ ID NO: 221039 - DNA, 546 bp, Klebsiella pneumoniae
atgtgcgatccggttattgctggtggcgcaatgctcgccatgagtggcattcaggcatacacccagtaccaacagggaaagtatgcctcgaaggttgcagaagcgaacgcagatatagccacagctcaggcaaatgatgcaataaacagaggtaacgctgaagctgagaaacggcgcagagagacccgacagcggcttggtacacaggcggcgacaatgggggctaccggcgctgatttatctacaggtaacgcgctggatatatttggcgacactgcccagtttggcgctcttgattcgctgacgacggtgaataacgcgcaacgcgaggcttacggttatcaggttcaggctgccaactataaagcagaagccagttcagcccgtaaacaggggaatgtgggagcagcaacaacattgctcaccgcgcctctgaaggcatacggtgcgtaccagatgtttggtgggacgtggagtccgtttactcaaagcactcctgcgccaatcggggcagcggcaggaaccagattacccggaggattataa

SEQ ID NO: 221040 - DNA, 2622 bp, Klebsiella pneumoniae
atgccagtcgtaccaacagtatccggacgtcaggttgagagtcgtggagttcagtcagcaggtttgcagacgttttctcagccaggtattggtgatgcttttgttcgggcagggacagaggcaattgatgttttggggcaggcaaaacagcgtgccaatatcgctctggctcaggaggcatctcttaacctcagtcagataagcagcgatctgctgaataatcctgaaacaggattgcttaacctgaaagggaaaaatgctattggaaaaggccatgagtatacgcagcagtttgatgctcaggtcgaacaactggctatgtcgctgccggatgaacaggctcgtaatgctttcatgcagcaggcgcagcagcagcgcattcagttcactacgcaggccgggaggtacgaaataggacaggttcgccagtatgaggcggatatgcaggatgcgacactaaaaaacctatcgatgcagttccgtaacccgacaatggcaaaccaggcaggattgaaggcatatcatagcatcatcgcttacggcgaagcccacggccagagtcaggaagagatcgaacagaactgggtttcgtggcgcgagaatgccgcgaacggtgcggcggaggcgtggtatgtgccgatgtatcaacagatgatgggtccgaacggcaagattgaggtaaccgatacaccgagtgaggcgcagttattctctgcaataatctggcaggagagtggcggaaatcagtacggaaaggacggaacacctctggtgtcgccaaaaggcgctgttggcgtagcgcaggtgacggaagatactggccccgaagctgcccgccttgctggcgtgccgtgggaccgagataaatggttgaatgacccgcgctataatgcccgcttggggcaagcttatttcggcgcgcagatgaagaaatacgacaataacccggttctggcagtagctgcctataacgctggcccaggaaaggttgacggctggattaaacagattggcgatccgcgcacaggcgaagtcagtaacgcccagtttgccgcagctatcccatacgacgagacgcgcaattatgtggcaaaagtaactggcagtgctggagctattcctggatctgcgacgatggaaaacctcatcgcacagccattctggaacgccatgagtccggacaaaaagtcgcagatgatgagcaaggttgctggcatgtacgacatgcaggcttcagccggtcgcgttgcgctacagagtcgaatgcaggacgacctatccaaaattgaggccggtaagcaggtgacgcctatttcagcgcacgaatgggccgccgttatgccgcttcaggcagcgcctgccgagcgcctgcagatggaaaaaaccttccagcaataccagcaggcaatgacgctacaacctgtttatcagaccattatgcagggcaacgtccagcagggtaccgccgccgtgcaggcaatggcaccgcaggaaaacgaccctgactttaaatacaaagcagagctttatgcatcggcaaaggtcaagcttgggcaggtactgaaggcgcgggaagcggatccgggggcatggctgcaacaaaactctccggttgtgcaggctgcattccagcagtacctgaatgacccttcatctggtgaatacctagtttcccgcatacagtctgaaaaagaccgcctggggataatgagcaaaaaagttttaccggagtccatggtcaacgacgtactgcagcgtattgacaacacgcaggaatctagcgtaaaggccattcagtcggtggcgcagtcgttcggcaaatactcggatcaggtgatgcagcaggttcagaagagcgcttatcctgcgttgcaggttgtcatggctaccgagaacccgcgcgcggcaaatgcgctctggcaaaaccgtagcgttaaaactgctgacttacgcggcagtcttgagaaaaccgacgcggatagcgccgactcgtcatggaatgaccaatcgaaagattttgctggcacgatggttgttcagcctggtggcactgccgtgtggaataacttcaacgagcagggaaaacgacttacttacatcaacatgcagcgcggaatgtcggcgtctgatgcagcaaaacaggcgtatcaggacatcctcggcgagcagtaccagaccaatggcacttggcggctacctaagcgtgcagggatagatattcgtgacgttaacgatggtgccaatgcgtatctgaaaaacctgtcagcagatcagattatgccgcttattggtgacccaaggctacctgatgaggtcaaccgtgagcagagtatctcccgcattcgtgataatgcgcagtgggttaccaacagcgacgaaacaggacttaccctgatgctcaacgggctgatcgtcaacggtgccgacggcaacccgattacggtgccgttcaacgatctggcgaaactgggaacaaccaaccgatcagtatggaacagcattaccaagttcattgatactccggtgaaatatactcccggacagtctaaggaatacagcgcagaaagtcagcgcgacaacctgattaacattttccagaacggccagcaatcaggacgataa

SEQ ID NO: 221041 - DNA, 1698 bp, Klebsiella pneumoniae
atgccaatttacacagatgatccgggacagggaattaaccagccaattggcaacgcgccagcagggcttggcgaatcgctgctttcttcccttaagcagggatttgaagaggggccggtcatgtccggctaccgctttgcgcaggccgactcgctggcgaatgacccaaactctacagttatcagtaagcaggaagcggatgagctcctgaagcagtacggcgtaaagagcataaacgtgccagattctggcgttacgcaggcttttctcgatcatgttattgccgaacgcaaagattctctggcacgccagcagatcgcgatgtcggcaccgagcgggtgggtagccacgccgcttaatttcgcagccagcctagctggttcaatggcagatcctggtaacgtggcgctggcgctggttccgttcgctggagaagcaaaggcggcttctgtgcttggccgatttggcgagcgatttgttgctggtgcacgcatgggggcagcgcaggcgttggtgaccgtgccgcttaccgggctggcagcggcggcggaaggtgacgacttcacctatagcaacgcgttggaaagtactttctttaacacgatggctggcggtctaatacatgctggcggcggccttatcgccgatatcgtgcgaccgcgtcgcgttcccgatgctgcaacgggagagtccccggcgttttctggcgatgcgcagccaaccccggtgataacgcctgacaacattccggcgggcgtgaatatccctgaggttggcgctaacgcagatctggcggcggccatttccagtgaagcggagagctacgcatacagccgggcttatgacgacgtggttcctgactatatggcgcgccagcaggagttacagagcgggcagatcggtaacgttgccgacctgcgtgccgagcttgcggctaatcaacgtcatgctgactcgcttgatgcgacgctgcagcagcgcaccaaaaagtatcaggggcagcggatgaagtttaaggatgcgcgctctagggcactgaaagagattcaggccgagaaagacgccatcgctgcacgcaatcaggagatcaacacatcgctggagcagaacgcgacagcagagcaggcgcgctggcgccagtctcagatttcccgcggcgagatccccgacgacctgaaagtcaccatttccgagcgtgcgcagcagatcctggacggcatgcagatgtcgccggtcgctggcgcagttcgcactgccgcaagcgccatcagggatgctgactggaacgtgaaccagcaggcgtatcgcgctgcgctggcacacatgatggaaggacgtagcccagatgttgagcccttctatgaactgcacaaaccagcactgcgtgaacgcgccatccatcgcatacagaacccggcacggcaggttgatgaaacggctcgcccagcaagcgaaacagccgatcgggtttatcaagaaacgcaaaaggcagatcatgaaattaccgctgccgctgcagaccttgataacgagctcaacctgagtaacgccctgcttgacgatatcgctgtcgataaccctgatcttgcgaccacgttgcgccagaaactcaatgatattcgtgccgacgccagcgacaatagtatgagcaacgctttccgggcatttgccgcctgtatgattaaccgggggatgtga

SEQ ID NO: 221042 - DNA, 2550 bp, Klebsiella pneumoniae
atggcagcaaacgaatttttgacgcagtgcgagcgcagtgtaaatgctgccgctggtcgcgagctttcttccgatgagatggagtcgctggtgcgtgacatgaacgacaccactaggcgaattctggcgaccaatgaggcgctgtctctggaagaggccgcgatgcgcgcagcggaagaactgagcaatgccgatatgctggcaaaacagattgaggctcgcaataaggcaatcaacgcccgtattgccgcacaacgacttagagagcttcgtactatctggaaagaccgcccggatatcgggcttgaagcaatgctggttggccgcaacgatgcgcgtaccggcgcccgccggtcggtatcttcggaggtggcgcaactgcgcggcaagtatcattccggtatcaactacgattttgaccgtgccgggctggtgcaattcatcgccagcggcagcaatgaccgggaaattgccgatgcaatgtggcgcatagggcgcgggcagtcaactgacggtatgacaaagcaatccgtaagcgctgcacaaatcatcatgaaatggcaggaaactgcgcgcattgatgagaaccgcgccggggcatggatacgcaaagagccgggctatatagtgcgccagtcacacgacatcatgaagatccgcgccgcaggttatgaagcatggcgaaatgctattctcccgcgccttgatgagcgcacttttgacggcgtggctgaccgcgagcagttcatgcgtaacatttataacgggctggcttccggcgtgcatcttacatctgaaaagcccgattggatgaatggctttaagggatcggcgaacgcagctaaacgcgccagccaagagcgaattttgcacttcaaagatggtatctcgtggcacgagtacaaccagcaattcggcaccggcagcctgcgagaagcgctgtttggtggcttaaacagcgctgcccgcacaacgggcatgatgcgcgtactgggcactaacccacagaacatgtttaagtacctgacggacgccattgctgaagatatcagcaaatccggaagaccggcagcgttggctgactacatgacgaaggtgcgtcgcattaaccgtaccgtaatgccgcaggttgacggctcgctaaatattcctggcagcgtaggctgggccaatgcgtcggcggctgtacgcggctggttgcgtatgagccaacttggtggcgcggtaatctcatcgtttaacgacgtgcctatcgccgctaccgagatgcgctaccaagggcagaattttatgcaggcgttgcttggtgctatgagaggccgcttcacgcgttacaacagcgcggagcagaaagagatcctttcctctatcggagtttattccgactccatgacgcaggaaatcatccggcgcatatctggtgatgacacgctgaatggaaagcttggtcgcgcgcagcagcttttctttaagtacaacctcatgaacttctggaccgagagcggtcgcaacagcaacgccatgatgataaccaactggcttgcaaagaatgctgaccagtctcatgcgcggctaccggaagacctgcgacgcgtgctggatctgcacggtattggcgaacgtgagtgggaaatttttcgcaacatggacatggccgatagcgaaggtcgtaagttcatgacgaccagcggcatccgcggcgtgcctgacgaagtgattgccggttatgtagagagtaaggggatcaaaccaacgcagcgcgctatcgctgacgcacgcgatcaattggaagggcagttgcgcggctacatccttgaccgcctgaatatcgccatgtcagagcctggcgatcgcacgcaggcgtttatgaagatgggcacggtgccaggaacggtggctggggaagcaatacgattcgctggtcagtacaaatcgttcactgcaagcttcatgcagaacgtactaggacgcgaagtattcgggcgtggttatattcctgctgggcttggtgagtcgaaaaccggatcgctgacgaatgcgctgctacgtaacgggaagggggctttccttggtgctgcaaacctctttgtctgggcgactatgtttggttatatctccatgcagtcaaaactcatgctgaaagggcaaacaccacgcccggcagatgccaagacgtttctcgcagccgcatctcaggggggcggtcttggcatcttgggtgacttcatgtttggtgaggtcaaccgcatgggggccgggccggttacgtcgctaatggggccagcagcatcgaacgctgacagcattatcacgctgctccagcagaccacgagaggggatgcagatttgggtgactggtatcgcacggcacttgacaatacgccattcctcaacgtgttctggcttcgtacggcgatgaatggtttaatattgaaccggatacaagatgcccttgacccaggctctcttgagcgttatcagcgccgtgttgagcgtgagcaggggaacgactttctgatcccaccatcgcagttcatgctaggtaaataa

SEQ ID NO: 221043 - DNA, 561 bp, Klebsiella pneumoniae; identical to SEQ ID NO: 17186

SEQ ID NO: 221044 - DNA, 546 bp, Klebsiella pneumoniae
atgagttcgtctgcgtcgcagaatgataaaaatcaaattgtcagatataagggtcgagtgttgcatacgcaaaatttctcggccctttgtgcatctgatcttgagctgaagaaagtatctgatgcctttacccagtattggaaaacgggataccatccatctcttggtaaagatgctgcatttgctcgtccgacagaaatgcttaaactaaatgtcaggcatactcatgtcgataaccaagactatattccagaagatagtgataaaaaacacactggtaaaaaatcatcttgggatgcatggaaaaatatagcgtctgtacaagtaaaatgcataccaacaagtgattgctttttagtttattcggtaaatcacaatcgtgatgcgctggttatgttttttgttgacgcagatgctcacaacataactgagcaagaagagtttaaagaggaagcaatcactatcagttatcaattctttgagaaaacaaaaacagaaccaatgcctttagaagaagatcttttttctgataaatggaaggaatag

SEQ ID NO: 221045 - DNA, 720 bp, Klebsiella pneumoniae
atgcgtaatatagctattgataagttgccgataacaactcattgcaacatccctgtaatgactacagaaatgcttgctgatttgtatgacacagaacccaaactgattcgtcaaaactatcaacgaaatgcagatcgattcattgagggaaaacattgtttcaagctgataggcgaagaattacgagcatttaagaacgagtcctctcaaagaggtttgcttaatattgcaccaaaagtaagtcatcttttcttatggaccgctcgcggtgcagcacgacatgcgaaaattcttgagactgaaaaagcgtgggaggtcttcgaaaaactggaagattgctacttcgacagaaaacccgcaaatgtcagtggagatgttcgtctctcaggtggagctgatttatcaaaggccactcaggtaattgaaaaattcatgcccgccattatggaggcgatcaagctggaagacaaaaaagaatacagtgccccactgaagcccggctaccgcagcctgattcattctccgtctggtgttctcggcctgacggagaactcactgctgatgaatctgctgaaccagttacaggaagacgggcacgacgtatcgggcgcggcggcggagctgaccaccatgttctgctacatcgtcggtgtgagcaaatgcctgcgtgatatccagacccacgcggagtacatcaacgacaaggcagggttcttctga

SEQ ID NO: 221046 - DNA, 507 bp, Klebsiella pneumoniae; identical to SEQ ID NO: 21769

SEQ ID NO: 221047 - DNA, 261 bp, Klebsiella pneumoniae
atgccagagcggtaccagtatcctgtcgacgaaggttttgcggatcgtattcacaccccggaaggggtcagatccctggttgtaaaatcacagctgatggagttgctcagggagatggagcgagacggccacgatgtcagcggtgcggcggcggaactggtggcactggttaactatgtgacgagctcgcagttgtcgatgcaggatctgcaaacacatctcgactattgtgccgaacaattacgaaaacaaaccagataa

SEQ ID NO: 221048 - DNA, 885 bp, Klebsiella pneumoniae; identical to SEQ ID NO: 210789

SEQ ID NO: 221049 - DNA, 3117 bp, Klebsiella pneumoniae; identical to SEQ ID NO: 210790

SEQ ID NO: 221050 - DNA, 336 bp, Klebsiella pneumoniae
atgcgtgatctgatccttcaactcagcaaaagttcgatttattcaacaaagccggtggggattgcacatacctatattgcgcaaaagaaaattgaaactgcggctaaaaaagccggacataacgttaaaatcgagacgcaaggaaccatcggcattgagaacccgttaaccgctgatgagattgctgcggcagatattgtcctgcttgctgccgatgtcaaagtaacgggcgaggagagatttgccggcaagaaagtcgttaaagtcgcgacggaaacggcagtcaaatcccccaataagttgattgaaaaactcagtgaaatagtcaattcataa

SEQ ID NO: 221051 - DNA, 1107 bp, Klebsiella pneumoniae
atgtctctaaaacaaatatggcaagcagcaaaccctaaaggacatctgctgaccgctatctcgtttctgatccccattgtctgtggctctgggtttattatcgccatcggcatggggcttggcggaacggtgcaggacacgttaactccgggacaatttgatgtatggcaggcgatggccaccctgggcgccaaggcgcttgggctgttgccggtggtgattgccgtgggaatatctggctcgatcgccggcaaaccaggcatcgcgccaggatttgtcgtcgggctggcggcgaataccataagcgcaggctttatcggtgggatgattggtggctatattgcggggtatattgcgctggcgatcattaaaaacgtcaaggtgcctgactgggcccgcgggttgatgccgacgctgatcgttcccttttttgcctccattatcagctgcatgattatggtctatatcatcggtacgcctatcggtatctttacggaagcgcttacgtctttcctgagaagcatgggcacgtcgtcgaattttgtgttaggcgcagtcataggcgcattgtgtattgttgactttggcggcccgctaaataagacatgctttgctttcgtgctgaccctgcaggcgcaggggataaatgaacccattaccgcacttcagttagttaacaccgctacgcctatcggatttggcctggctttctttattgccaaactgctgcgtaaaaatatctataaccgtgaagaagtggaaaccttaaaatcggcggttccgatggggattgtgaatatcgttgagggttctatcccgatcgtcatgaatgatattgtgcgcggtatcgcggcggcggctatcggcggcgcgtgcggcggggcggtcaccatggtctatggtgcggatgcgacggttccttttggtggagtattgatgatccccacgatgtcacatccgatggcaggcatcatggccctgctggtgaatatcgttgttaccgccacggtctatgccgtcatcaaaaaagatatccctcgcgacgtgattgttgataatgattacgaagaagaggatatcgacctggatgatattaaagtgagctaa

SEQ ID NO: 221052 - DNA, 621 bp, Klebsiella pneumoniae
atgctcgtcactgattcacttcttgcatacaccctcgctgccacactgcttactcttacaccaggtctcgataccgcgctcatcctgcgcacggcgaccgctgaaggtggacgcaaagccttgcatgccgcgttaggcatcgatctcgggtgctttatttggggcgccgtggtggcctttggcttaggggcgctgctggaggtttctgagttggcttataccttgttgaaatggtgcggagcgggctacctttgctggctgggcatccagttgcttctgcgcccgcgccagcaatttaacacccacccggccgaatcagattccacgagtaactggttcctgcgtgggatgctggggaatgtgcttaaccccaaaatgggcgtcttctacgtttcgtttttgccccagtttatccctgccgggcattcaccgatcagctggacctttctcctggtcaccatccatgtattgatagggacgctgtggtcgttaacgctgattaccgccactcgctatgccgccggcatcctgaaaaaaccggccgtagtgaaatggatggaccgaacgaccggctgcctgtttctgttgtttgccgcgaagctggccatgagtcggcggtag

SEQ ID NO: 221053 - DNA, 504 bp, Klebsiella pneumoniae; identical to SEQ ID NO: 213132

SEQ ID NO: 221054 - DNA, 981 bp, Klebsiella pneumoniae
atgtcgattaagaagctcgaaggtggtcaatatgaagtggacgtatggccgcgcggacgtaacggaaaacgtatccgcaggcgatttgagaagaaacaagaggcagttctttttgagcgttatgtactagccaacgccgacaaaaaagaatggctgggcgcgagcgttgaccgccgcaccttaagcgagttgttagatacctggtggctgctgtatggacagactcaggaaaatggcgagattgaaaaacggcacctgaataaaacgatcagggcgttgggtgatccagccgttaaccgactgaacaagcgaatgattgcacagcaccgaagccaaaggctggaagacggtatcagtgcagcaacgatcaatcgggatatttaccgtttgtccgggatgttcagcacgttgataaagctggaagagttcaggaaggataacccctgtaagggtctggaaccactgaaagaagcgcccccagctatgacctatctcgccaaatcagagatcagcaaattactggacactctgaccggcgacgatcgacgcgtagcactgctatgcctcagcactggcgcacgctggggtgaaggcagcacgctgcgcggtgagcaggttaatcacgggcgcgtgacgttccttaagaccaaaaatgggaaaaagcgcacggttcccatatcggaagaactggagaaagagatcaagaccagcgacaccgggccactgttcaaagttgactatgaaaacttctgcgaacggctcagacaggttaagcccgatttaccacgcgggcaggccacgcatgtgcttcggcatacatttgcaagctggttcatgatgaacggggggaacattattgcgttacagcaaattctggggcacgccagcatacaacagacgatggtttatgctcaccttgcacctgattacctgcaacacgcagtaacgttaaaccctctcggcggcgggttggcggtgtga

SEQ ID NO: 221055 - DNA, 282 bp, Klebsiella pneumoniae
atgactgagaaagatttagaggggttcattgaagtgcgtcacgccgttgacgcagttccatacccaaaattcgccgagttaatcggtaagaagcccgccacggttaagagcatgattgaagacggtaagttgccgatcatcccgtggaagaacccggacagcctgggcgcccgtgctgagaactggatctatattcctgagttcaaccgcgcaatgcgtgacgcctactacaaccgtccgagagagcagcgcgacgcttggttgctgtggatcggtctttga

SEQ ID NO: 221056 - DNA, 204 bp, Klebsiella pneumoniae
atgagccagaaaacagccaaccacgaaaaccgggtgcgtgaatgcaacgacattctggacacccatttaaaagatatgcaaacgggcttcatgattcgcaccaatagcggcgagtttatgatcagggataaaaagctgattaagaaaataaccaaagacgtggcccgccatgttgatggtgaattgcttaaattgggaatgtga

SEQ ID NO: 221057 - DNA, 231 bp, Klebsiella pneumoniae
atgcacgatgaaggcccatcactggcaagcctgcttaagcacgggtgccaggttacacacttcaaaaactcacgcggctggctggaaacaccagacggaagattttttaagcccgaaccggcgaaggttaagtttatcaaaggtaaaaataaaccatttatttatacccaaagaataaataaaggcttcctgcttacactggctgaattatttaaaaagctaattaagtaa

SEQ ID NO: 221058 - DNA, 213 bp, Klebsiella pneumoniae; identical to SEQ ID NO: 21404

SEQ ID NO: 221059 - DNA, 972 bp, Klebsiella pneumoniae
atgatccgcccgttcatcaaatgggcagggggtaaaacccgtgtcctccctgacctgctgccgcatcttcctaaagccgactgcctgatcgaaccgttcgtaggcggcgcatcggtatttctggcgactgaataccgccgctatgtgctggctgatatcaacccggatcttattaacctgtatcgggaagtcacccgttacccggacttagtgatcgatgcggcccgcgaactgttcaacagcaagaatagcccgcaggggtacaacgaagtccgagccgcgttcaataagcaggtaggtacggtaaaaagcggtgggttgcgttatggcgtagaaatggcgtgcatcatgcgcgctgctcaattcctgtatctgaatcgccacggttataacggcttatgccgctacagtcgtaagaccggctttaacgtgccgtttggcaagtataagagcgtctactttcctgaaaatgaaatccgcctgtttgcagaaaaggccaacgatacaaaggcaatatttctttgcgcgccgttccagcgttctctacaggtcgtcacgggtggcgatgttctcgtttactgcgatccgccttacctgcctgaaagcaaaacagccgattttacccaataccacaccgaaccattcacggaagacaaccaccgccagttagtccaggcactgctggaagttaaccgtaagcatggcgtgaaggtcgtcatttccaacagcgacaccgaagccacccgcgcgatttatcagcctttcaagatgcacgaaatcagcgtgcaacgttccgtcagcactgacaaagacaaccgccagaaggccaaagaagtgatcggcgtgctgcctgtctgcgactgctgcgggcgttacggcggcggttgccctgattgtggcgccgtaatgggtgatgcgacctacaacgcgatggttgcggcgggcacgtttgacgatcaggaggctttttaa

SEQ ID NO: 221060 - DNA, 309 bp, Klebsiella pneumoniae
atggcaaaaatctatatcgctggccctatgagcggtttgcctggattcaatcggcaggcctttaaccgtgcagccgggcacgtagtgcgacgcggaaacgttgcccttaatccggcgattttgccggatggattagagcaggcggaatacatggatatttgcttcgccatgttgcgttgtgctgacgggatcttcttgctggatggctggcagcagtctgccggagccagggcagagcgcgcgcttgctgaaaagttagggttggatattcagcaccaactgattgatcggctggagggggggtcatga

SEQ ID NO: 221061 - DNA, 222 bp, Klebsiella pneumoniae
atgatttcgcttcatgatggagatgcctctttcgcctcatcttttacgaaggttgtttattctgaggatggcaaacagtgcttttcggctgggtttaagccaaccaaaggtaaaaaattcgttgtcctcctgttgggtgaggtggataaaacagcgattgattatgatcttgaagctgcattaaaccggcttggcttttaccggaaagaagataaccggtaa

SEQ ID NO: 221062 - DNA, 2352 bp, Klebsiella pneumoniae
atgagtgaagcccgtggccgtcgcgccccttctccacctccaccgtttccgggtagcactgacaatgctatcccttacgcttatggcgggaacaaaccataccagccgattggcgttgatgtagcgccggggctggatggtttcgactatctcacgccggacggcacccgcaagcatattgcgttgagtgaactggtagcggaggacgaaaagccggagcgcagcaagctgctgcgtcgccgtctggcttcccttccgcagtatatccgccgccactttgccgcgaagctggatgaactggacgcgaaagaccgcaaagcggcagatcactggctggttaatacctttgagcgccacgtattaacgcgtattgatagcgtgaacagtgtttaccagcctgacactgtgatgtccggcattctgctgccaatccgcgatcagcttttccgtatgctctgggcagggaagaaagagttaaaaagactggcttatacgcttgccgatatctttacgagcgagtttatacgcgagtccgatcaccaattggcgcgcaccggcgatcctgagttcgcggcgctttctggctatggccgtattgcgtcgctggcggtgcatctaaaaacgccgatccccggctggacagcgtattgcaatgaagaacttgaagcggaggacgcgttacgcgcggttctccgtcttgagtcaccgcaatggtggttaaaccgtctgcgccgtatccatgcccggtggcgtgagcatttgatgatcgcagcgggatacgtccagaaaaaatcttctccatacagtagcgccccgtgccttacggaatggctggcccagaaaaaggctaaccgtgaataccttaaggctatggaactggaagaccaggacacgggcgagcgcatttccctgatcgataaagtcgccggcagtgttgccaatccggccaaccgtcgccgcgaactcatgacgagaatgcgcggatttgaagatctggcgaagctggaagggctggccggtgacttctacacgctgacagcaccttcccgctatcacgctatgcagcataacgggcgccgtaataacaaatactgtggcgcgtcgccgcgtgagacacagcaatatctttgcaaagtctgggcgagaacccgcgccgcatggaagagaaaagggatccgtgttttcggctttcgtgttgttgaaccgcaccacgatgcaacgccgcactggcacttacttcttttcatgcgcccggaaaaggtcgaacaggcgcgcgatatcttccgaaaatatgccctgagagaagacggcaacgagccgggagcgtgggagcaccgccttgaatttaaaccgattgatgacgctttaggcagcgcaaccggctacatagcgaaatacatttcgaagaatatcgacggcttcgcgctggatggtgagaaggacgacgaaaccggggaagacctgaaagaaatgtcactccgcgttagcgcgtgggcgtcgcgctggtcgattcgccagtttcagcagatcggcggtgcgccggtcacggtatatcgcgaacttcgccgcctgggcaatcgtgaacttgttttacaccctgaactggaaaccgcacggcaagccgctgatgcaggcgagtgggataactacgtattagcccagggtggcccgttggttgagcgcgataatctgcgtatccgtctgaactatgaaaccactgaaaacggcaacgcctacggcgatgatgtccagcgaatcaccggtatctattgcccgattacgggcaatgactctttgatcttcacccgcaccactcaatacaaaatcgtgccgaagcgccagagcgctgacggtgtggccgttgacgttggtttttcaggcggcaacgccgcacctcggagttctgtcaataactgtacgcgggatcccgcggcaggtgctgacggtgttgaacatgccgatcacgaagtgggcgagacggtgaattttgatgcgctttcacggcaggaaaagcgagaactggcacagaggctaagtgacgatgtgcgaagtaagcggaaaaaacggccaccggaacgggaagacggggccgggatatccgtgaaagagcagcagatcagtgaactgctggcgctgcgtgggattgatgccagcgacggaatggtcagatcgatgatggccggtgcgtcagtggcgtgcggcgatcttgttatgaccgtgcaggacgggcggctggtatcgcgcaaccgcgcagcgtccgggctggataagctgccgtcgcaggtgatggcggcgaagcaaaaaacaagtgatcttgtgaacaggatgaaagcagcattttcgcggaactaa

SEQ ID NO: 221063 - DNA, 999 bp, Klebsiella pneumoniae
atgacgaaccataatcagatgagtcagatatattctaaattcggccgggccgggtttaatctctcttacatccgcaggttgttgcctgactggtgggatgagaagcttgctgacaccccatccgggcgccagtatgcgtgcctacaccttgcgcgtatgtttagcattctcccggatagcctgaaagatggtagcgaaggggtatgctttaattttggtggaaaccataaatataaacatcgccaaaatgtagccgagaacgatttagatatcgctactgctgttgcctatactgcggccggtattgtcgcgtctaattttaaagtcccttacgatgccagtgcagtgctggatcctttggcgatacgaacccagattcttactaaggaatcatgggtgtcgctagatagcctggtaacatactgtcattcgattggcattcctgttgtttatctaaaatgcttccctcaagctgccaaaaaaatggccgggctggcgctaatgagtcatgggcgcccggtgattgttcttactcagcctcagaaatacggctatatgctgtttgatctcgcgcatgagttaggccatatcgccagagggcatctgaacgcagaaaacgggcagtgccatattgatgcaaaaattgagaatgcttcgacggacaacgtagagaaagaagccaacgagttcgccttccaggtcatttcggggcagaagtctttacgtattgttcctaccgctggcaggttgaatgggccaggcttggctcgcgcggctcaaaagtttggaagtgataatcacattgacccaactcacatcgctttaaattatggtttcgcgcagaactgctggggcgttgctgttaacgctgttaaatcactctgcgctggtgaagactcagatcaggattttgtgagggccatgatgaaaagcgggatggatttagaaaatattcacgaagatgatcttaaggttttagaaaatctaatcggggaataa

SEQ ID NO: 221064 - DNA, 639 bp, Klebsiella pneumoniae
gtgattgttctttctgacaatgatgtcattttgaagctggcccagtgcaatctgttatcacaactgccagtggtttttaatcaaccccccgaacagatcttcattaaccctgctgctcgttttcagcttctgccaaaaaatcctgataaagcaatcaggaagtgtggtagtcaggttgtttacgagcaggtgggtgccttcatcgaatctgtgcaggatatcccggaagttcaggactcacagcttattgagcttttggggagtgtgcccggaattgatgtaggcgaacagctattgcttgcatcgtgcatagagaacccggaagccatcttcatgacaggtgatcgccgctgtttgaatgcaattgttgcaaaccaaccagcccttgccgtagtgcatcagcgcttattggatgccgttgttacatttgagtcgtcacttttgctatgtgtccacggtacagatcgggctcaagtttatgaaaatttggtgagtaatcctaaacctgacggcatgttgaaattggctctttcaaacgcaggcgctgcaatgtgcgaatgtattttttcccatactcgtgagttttacgattaccttgccttcaaagatcgacttcctgatcgggggtggggaagataa

SEQ ID NO: 221065 - DNA, 1050 bp, Klebsiella pneumoniae
ttgagcggcaaaaagaaattcagggcgtcaactgctgcgccagccagcacggccagcaacgcaaccaccccgctggaaagcgtggaatctttcagctttggcgacccgatcgcagtcaacgatcgcgcatctcttatggagtgcctcgaatgccataacaatggccgctggtatgaaccaccgatcagtccctacgggctggcgcgcatgttcgacgttgccgcctatcaccagtcaccgctgatatttaaacgcaatgttatcgccagttgctacataccacacccgctattgacccggcaggagttcaccgcctgggtgcaggattatttaattttcggtaactgttacatggaatgccgccgcaaccgactcggccagccgattgaactgcggcacagccaggcgaaatatacgcgacgcggcatagacccggctcaattctggtttgttccgcgctacgttgacgatcacgcgttcgaaccgggcagcgtctgccagatcaagaaccccagcccgcaccaggagatctacggcgcgccggaatatctggccgcgctacaaagcgccatgctgaacggtgaagcaacggtgttccgccgtaactactacattaacggcagtcatgcgggtgtgatcgtctacctcactgacccggttgcgaataataacgatgtggaaaagcttaagaagtcgctgaaagatgcacgcggcaacggtgcttttaaaaacctgtttgtctacgcggcgggcgggaaaaaagacggcctgcaaattatgccgttcagccaggtggcggcgaaggatgagtttaccggcatcaaagacgccacccgcgacgacctgttagccgcgcaccgcgtgccgcccgttctgatgggggtaatgccgaataactccggtggcttcggcgacgtagagaaagcggcgaaggtattttccatcaacgaacttgccccgatacaagaaagcctgaaagagttaaacgactggctggggatcgacgtggtgcgcttcaacccttacgcactgttgcaggcagcaatctga

SEQ ID NO: 221066 - DNA, 1713 bp, Klebsiella pneumoniae
atgaatacagccgaagacctcagcacaaaagccaaaagcctctactggcaggcgtttagcatcactcagatttctaaggaaatcggggtgagcattaacacgatctacagttggcgccgccgctatgaatgggataaagccacccccatacagcgggtgcaggatcgcacgcacgttcgttacctgcgcctggtggaaaaggacgacaaaaccccgaaggacttcaaagaaattgacctgctggcgcgccagcttgaccgctttgaacggcatgagcgacgcgaccaggagaaaaagaagaaggcgaagaccccgaaaaaccatttcaccgaagaacagataacccagcttcgcgccctggtctttgattcgctatacgagcatcaaaaacgctggttcaaacagtggaaccggcgtaaccgctttatcctcaaatcgcgccagattggtgccacctggtactttgcccgcgaagcgctgttgcgtgcgctggaaaccggaaataaccagatattcctgtcagccagccgcgcccaggcgttccagttcaagcggttcattcagaagctggcaagggaaataggagtagagcttaagggcggtgatgccattgagttaagcaacggtgcgatcctgtattttctcggcacctccgctgcgacggcccagagctacaccggcgatctgtaccttgatgaagtcttctggatcagtaatttcatcaaactgcgctcggtggccgcaggcatggcgacacaaaaaggactacgccgcacctacttttcgacgccttccagtgaagaacatgaagcctatcccttctggactggcgatcagttcaatgaaagccgccgccgatccgatcgggtagatatcgacaccagttataaggcactgaaaaacggcaagctatgcggggataacatctggcgccagatagtcacgctggaagacgccatgaagcttggtttcgatctggttgatattgatgaaatccgtagcgaaaactcccttgacgaatacgccaacctgtacggatgtaccttcgttaaagcaggggaacgcgccttcgactacaacgcaattttgggctgcggcgttgatggctacatgccggacgcgtggcccgactggaacccgtttgcaccccgcccgctgggtaatcgccctgtctgggttagctatgaccccaacggcagcagcggcaaaggcgacagcgccgggctggttgtgctggccccgccagccgtgccgggtggtaagttccgcgcggtagagcgccaccagttacgcggcatggagtacgaagagcaggccaattttattaaagagatcaccacccgctacaacgtgcagcacattgctatcgacggcacggggatcggcgatgcggtttatcaactggtgatcaagttcttcccacaggcggttaaatacaactattcaccggttcttaagcggtcgatggtgctcaaaatgttgatggtcattcgtgccgggcgctttgagttcgacgccggaatgatggatctcgcacagtcgtttatgaccgtgcgtaaagtcaccgctggcggcgttattacctaccagtccgatcgcgcccgtggcagcaatcacggcgatctggcatgggcaactatgcagggcatttacaacgaaccgatcggcgcggaagtgaccggcgataacggcagttttgtggaggagttttaa

SEQ ID NO: 221067 - DNA, 846 bp, Klebsiella pneumoniae
atgccaatgacaaattttttccgcgccgcagtagagggcgcaacctgtgacggccgcgtgctggaacgtcagcacatcaccgaaatggccgaacagtacgatccccaggtatatggcgcccgcgtcaatctggagcacattttaggctggtcgccgacaagcgatttccgcgcgtatggtgacgtggttgaagccaaagccgaagagattgccgagggcccgttaaagggcaaactggcgcttctggtgaaggtggacgccacggacgaactggtagaactgaaaggcaaacgccagaaaatctaccatagcattgaggtgcatccgtcctttgccgacaccggaaaagcctaccttatggggctggcctgtaccgataacccggcgagcctgggcaccgaaatgatgaagttttgcacccagaacgccagcgccaacccactggctgcgcgtcactacgcacctgaatgcttcttcactgaaaccctggaatcatccctcgaatttgcgcaggaagagccgccagcgtccgacaccgggaagaatttcttttcccgtatcaaggaaatgctgaccggaacccgccagcacttcgatcgtgaaaatggcgatatccgccaggcggttgaactggtagcggaaagtcagggtgaattgctggacaagatggaaaaactgagcgcagggcagcttaagaacaagcagaccgccgaagcggtggataagttgcgctctgagttcgacgagatgaaagcgcagctttctacccaggacgccagtaaataccgccgcccggaagcgaccggcgcaactgaaaaatctaacgcccagcttgctgactgctga

SEQ ID NO: 221068 - DNA, 1047 bp, Klebsiella pneumoniae
atgcgtaattctacccgtgaattgtttgatgcgtatcttgagcgacaagctgaactgaatcacatcaataagtcccacgtaacaaaggcgttcagcattgatccgagcgttgagcagacgcttgaagacaaggtgcagcagtcttccgaaatgttgaagaagattaatatctacggcgttaacgatcagtccggtgaaaaaatcggtctgggtgtgagcggcccgatctccagcaccaacaattccaccaccgatcgccgccagcctgtttccgtcacggcgctggattcaaacaagtacacctgtaataaggtgaacgcggatactttcgcctcttatgcgcagcttgatgcctgggctaaattccccgatttccagcagcgtctgagcaatcagatcatccagcgtatcgcgcttgatcgcatcatgatcggctttaacggaaccagctacgcggataagtcagaccgcaacgccaacccgcttttgcaggattgtggcatcggctggctgcaacagtaccgcgcaaacgcgccgcaacgtgtaatgaaagatatcaccgtgaccagccgcgacgattccaaccaggtgatcgctaaaggtgattacggtaactacgactcgctggtttatgacgcggttaactcactgatggacgagtggtacaaagattcgcccaatctggtggtgatcaccggtcgtaacctgacggttagccgttcgttcccgatcatcaacgctgtcagcaccaataacccgaactccgaagcgctggccggtcagttgatcgcatcgcgtaagacgatcggcaacctgccttcgttcatcgcgcctttcttccctgatggcagcatgtttatcacttcgtgggaaaacctgtcgatttactggcaggaaggtgcgcaccgtcgccgcattgtggaagagccggaatataaccgcgtctctacttacagttcgtcaaatgatgcctatgttgttgaagattacggcttcggctgtctgatcgaaggcattaccgccgccgaaccagcaccggcaccataa

SEQ ID NO: 221069 - DNA, 849 bp, Klebsiella pneumoniae
atgttgacacctgctcaacaacattttaaccgcgtgatggctgaacgccgccacgccagccgtgagccgtcgcagcttgaaatgacggcctacgaaaccatgcttcaccgcctgcgactggataaagcccgtttaagccgtgtccagtcccagaaggctaaagcggatttaaaacgcgaactgctgccggactaccagccgtggatcgaaggcgtacttacggcagattccggccagtctgacgacgtgttaaccaccgtcatgatctggtgctgtgactgcggaaacatcgctgaagccctgcgcattggtcagtatgtcttgcgccataagttgccgatgccggatcagtatcgccgcaccactgccaccgtactggtggaagaaatttgcgatcccgtcctggctgcattcaaagctaacccggctgttgcgccggtcgccgctgacctgctggaagcgttacggggcttaaccctgaacgaagatatgccggatgaggtgcgctcaaagctgcttaaggcgctggggtatacgctgcgcctgactgacaacgttgaatcgcttaccgctgcggttgaatacctgcgccaggcggcagtgttgaacccgaaaaaagcaggcgtaacccgtgatattgagcttctgcaacgtgcgcttaagaagtccgggcaacctgatgacggtgagggcgcagacggcaagccagaagcaaacaacaccgaaacccagacggcaacgccgccagcccagccaaaagcgaagcgggaaaccaaaaagcccgccgctaaaagcaagccggcagcgaagaaaagaaccacgacagcccgccagaaggcggcgtcataa

SEQ ID NO: 221070 - DNA, 489 bp, Klebsiella pneumoniae
atgagtctggtagccactgagccagtacggccaccatccgatccagtgcctgatgatggcggcgcgaaggttgaaagcctgccattctggccggtcatttcgctggctgaactacgccgcgcgatgcgtcttgatgggcaggtgacaaccgatcgcctgatgtcgcgaacggtggaagcggtggcccatgttaatgatcagcttttcctgtggcgccaggtgcagattgatgcgggctatgagtcattggcagaaattccggccagtccggtgaatggcacttccgtgaaggtatggcgctataaaaacgccgtgtattcactcactaaggcgctgttgattgaaggctaccgcgatattgacaccaccagtaaaggcgaagaccacgcggcggcattgagcacgcagatcgatacgctgtggcgggatgtgcgctggtcaatccgtgatatccaggacgaaagccggggcctggcggagttggtgtaa

SEQ ID NO: 221071 - DNA, 201 bp, Klebsiella pneumoniae; identical to SEQ ID NO: 15003

SEQ ID NO: 221072 - DNA, 330 bp, Klebsiella pneumoniae
atgcacgacacaccaccgggattactcgaacaaacaatgaaatggatcgctacttatctgccgacactgtttgcggctggtgcggcgctgagtatttcggcgctaatgagcctttacgatgggcagtctttgcttaaaaccgccaccggatcgctggtatgtgggattgtcacgcttgctgtgtccggttcgctggaatatctggggcttccgtccaacgcagtaacgttcgtgggcgcctccatcggatttatgggagcggataaagtccgcaacaaagttactgggtttatcgaaaaccgtatcggcggaatgaagggcggggaataa

SEQ ID NO: 221073 - DNA, 480 bp, Klebsiella pneumoniae
atgaaagaaccatcatggattgttgaaggtcgtaaatatattggtgaaaaggaaattaaagggccagagcataacccgctaattttacagttctggaaggatataaaacgaggcggtattaaggacgacgaaacgccgtggtgtgcggcttacgttgggggagtgctggaacgttcaggtatcacatcaagccgctttgaatcagccgcatcttatcttaattggggggtgaagctggataaacctgcatatggttgtgtggtggtattcagccgtgacggcggcggtcatgttggctttgttgttggtcagcaggcaaatggcgatttgatggtactgggtggaaatcagagtgatgcggtgaatatccgtgcgttttctacatcgcgggtatctggatatcgctggccgaaagatattcctgtcgatgttcaaccattgccgcagctatccggtacgcgctccgtttctgagtcgtga

SEQ ID NO: 221074 - DNA, 531 bp, Klebsiella pneumoniae
atggggttgtcacgctggaaagtgatcgtttgtcttgtgctggccgctgctgctgtatggggttttagccactggcgttacagcgccggttacggtgatgcagatcagcactggcgtgaaaagtgggcgcaacgtgatgcacgcgacgccaccgcgctggcgcaaaggcaggctgaggccaggacagaagaacaacgccgacaaggtgaaattgatgcgatcagaaaacaaaccagtcagcagcttgctggcgtgcaggctgctgccgatcgtgccagtgctgtttctcgtgggctgcacgccaaagccgacgaactcgccagaagactggcagaccgtgaacgtgcctgcggtgccggaactcccggcagaagcgaggcaaaagccagcggtgccgcattgcttgccgacctgtttaagcgggctgacgagcgagcgggggaactggcaagagaagctgatgaagcaagagccagaggattagcctgtgaggctgcgtatgatgcggttaagtccggggggaataagtaa

SEQ ID NO: 221075 - DNA, 495 bp, Klebsiella pneumoniae
atgcttaaacccgatttactgcgccagatgataagccagcatgtgccctggctgcgcgaaaatcccgataatctggcggtttatctgcgaaaaggtcgtatggtcagcaccggccagcgtgctgctgcgtttgagtatcgctatacgctggaagtgctggtgatggattaccctgaatctctggatactatcagcgtgccggtgctggcatgggcgcgcttatatcagcctgatctgttgtttaacccggacagacagcagaacggcataacattcgaagccgatattctgagtaacagcacgatggacgtactgatccagattcaggctgatgaagcggtaatcgtcacccgtgaagatggcgagatcgtcacccgtcaccgtgctgaccctgcaccggggccggaaattggcacgtggtcactggtatttgttgatgaggtcagcggcgaaacatggcaggacaacaaaccgatcccctcttccagcagttag

SEQ ID NO: 221076 - DNA, 645 bp, Klebsiella pneumoniae
atggcaggacaacaaaccgatcccctcttccagcagttagacgactggttagccagcgttgccgcgcagctttcgcccggacaccgtcgcaagctgacgcgcgacgttgcgatcgggctgcgtaagcgccagcaaaagcgtatcgccagccagaagaaccccagcggtgaaagctatcaggcccgccgccgcaaaattctgcgcacccagggcgggataaaattcgtatggaatgatgaggccagggagttacgcaactggcgaaccacgggcaggggtgagcaccgcgcaatcaccggctatgacgttgatcgcggtgccctgcgcacgttctataagcgcgatatccagcgctatattgaaatcaatctcaaccagtcaaagcaaaaccgcaccagaaaggatccgatgttccgcaagctgcgcaccgcacgctttcttaaggcttacggtacgggcggcatggcagtggttggctttcaggggcataccgccgaaattgccagcgttcaccagtacggtgaagtcgataacgtggtgccgggtgcccgtgcacgctacccggtgcgtgaactcctgggcatgaccgagggggatttagactggctggtcgatactgttgtcgccttcatgcaagagatttga

SEQ ID NO: 221077 - DNA, 630 bp, Klebsiella pneumoniae
atgaatttaaacgaactctatcgccttatctgcaatctcgcccgcattggcaccgtgctggaagtggatacggaaaagtatcttgcacgcgtcgaaaccggcgagaacaaaaccgactggatccgctgggcagtgccgcgcgccggtgaagccgtgacgtggtgggcgccgacagtgggcgaacaggtttatattttgtgcccctgcggtgagatggagacggcattcattgccggaagcctttacagcgaagacgcaccgccgccagatgctggcgctaccacctgcgtgatcctgcacccggatggcgcccgtatttcatatgacccggaggccagcgcgctggttgtcagcggggtaaaaacggcaagcgtcaccgcgtcggaatccattaccgccaccgtgccggtggtaacggtcaaggcagatacgcgcgttaccctggacacgccggaagtggtctgcaccaacaagctgatcaccgccacgctggaagtgcaaaagggcggggaaatgaagggcaatattacccattcaggcggatcgctttcgtctaatggtgtcgttgtccattctcacaaacatagcggcgtccagtacggtggtagtaatacaggtggcccggtatga

SEQ ID NO: 221078 - DNA, 363 bp, Klebsiella pneumoniae
atgagtacagtccgttacagcggcatgaatgccagttcaggccatgccatcaccgacaacgagcatatagcgcagtctatcggcgatattctgttaacgccgatcggttcccgtgtaatgcgccgcgcttacggttcgcagcttttcaacctgatagatcagccggtcgataacgccataacgaagctgcgcgttatgtctgccatctacagcgccctgtatttatgggaaccgcggatctctctgaccagtatcaccctgagcgcgccgggtgccggtcggctggttgccactatccaggccaatcgcaccgacaatcagacgccatttaacgctgatattacattgaggggccaggcatga

SEQ ID NO: 221079 - DNA, 912 bp, Klebsiella pneumoniae
atgagcggcacgatcgatttatcgcagctaccgccgcccgtggtggttgaaccgctggacttcgaaacgcttttcgcgcagcgcaaggcggcatttattgcgatgtacccggaagacgagcaggaagagatcgcccgcacgcttgagcttgaatcggagccgatcaccatgctgctggaagagaattgctatcgcgaattgctgttgcgccagcgggtgaatgaagcagcccgcgcggtgatgctggcttattccacggatagcgatctggataatctggcggtcaatttcaacgttgaacgtctgaccattcaggaagaagacgacagcgttacaccgccaattgaagccgtgatggagtcagacccagatttacgcacgcgtacccagcaggcttttgaaggtctgagcgtggccgggccaactgcggcgtatgaattttgggggcgttcagcagacgggcgcgtagctgatatttcggcggtgagtcctacgcctgcctgcgtcaccatttcggtgctgtcgcgcgaaggtgacggaacggccagcgatgatctgctttccgtggtcgctgctgccctgaacgatgaagaagtgcgcccggtggccgacagggtaacggtgcagtctgcggagatcgtgccgtatcagattgatgcaacgctttacatctatccggggccggaagctgaacccgtccggcaggcatcggaacagcagttacaggcgtatattgccgcgcagaatcgcttagggcgcgatatccgtctttcagctatctacgccgccctgcacgtcgaaggcgtccagcgcgtggaactggcgcagcctgttgcggatattgtgctgagtgactaccaggcatcgcactgcaccgaatacaccataacggtgggtggttacgatgagtaa

SEQ ID NO: 221080 - DNA, 615 bp, Klebsiella pneumoniae
atgagtaatgacctgttaccacccagcgccagccgaatggagcgcgtcgccgcgcgcgtctgtgcgtcgttgggtgaagtgcccgtgccgctgcgccagttgtggaacccgtggacgtgtcgggctgatctgttgccctatctggcgtgggccttctccgttgatcgctgggatgaggcctggccgataaacacaaaacgaaaggcggtggccgatgcgttttacctgcataagtacaagggtacaacgggcgccatgcgccgggttgtggagccgttcggcttcttcatccgggttaacgagtggtggaacatcgacaccgcaccgggcaccttcacgctggatattggcgtggaagaccagggcattagtgaagaaacctatcaggaacttgaacgcctgatcgccgatgtgaagccgtgcagccgtcatatgctgggaatgtctcttcacctgcaaacaaccggcgatctgtatatcggcgcgggcagttattccggcgatacgctaaccgtgtacccgtattttcctgaaaccatagccgtgggcggtgatgattacaccggggcggcaatccatttaattgacaccgtggagatcgcaagtggcgactaa

SEQ ID NO: 221081 - DNA, 1179 bp, Klebsiella pneumoniae
gtggcgactaaatattatgccgtgctaaccaatgtgggcgcggcgaaactggcaaatgccacggcattgggtgcgcaggttgaaatcacccagatggctgtaggcgatggtaacggcgtgttgccgacgccgaacccggcacaaacggcgctggttcatgagctgcgccgcaagccgcttaatagtctgagcattgacccgaataacgccaaccagattattgccgagcaggtgatacctgaagacgagggcgggtggtggatccgtgaaatcggtttattcgataaagacggcgatatgattgccgtagccaactgtgcggaaacgtataagccgcagttacaggagggaagcgggcgcgtacaggttgtacgcatgatcctgattgtcagcagcaccgctgccgtaacgctgaaaattgacccttcggtagttctggcaacccgacagtatgttgatgatcagatcatccaggtgaaaagctatgttgatcagaaaatggcagcgcatgtagctgcggctgatccgcataaacaatacgcaccaaaagaaagtcccgctcttactggcaggccgactgcgccaacggcggaaggcaaagatagttctactcaaattgcaaatacagctttcgttcaggctgctattgctgctttggttggctcttcgcctgaagcgctggatacgctgaatgaacttgctgcggctttgggtaatgatcctaactttgctaccaccgtaacaaattcactcgctggaaagatggataaatcggcaaatggttcagacatagaaaacgtttctgtttttctacaaaaccttggtttgggagaagcggcgaaaagggatgtgggcacaggagataatcagataccggatatgggagcattcgcttctggttcgggatggttcaggctaccaggtggatatattgttcagtttggcactttttcaggaaacacgacccgctttatcagtggacacttccctataccattccctaatcagccgatggtttcagtcagtgttatgtctgatgccgttcagtcagacccgtcgagtcctgccccgcaggttttgtctgtaaattttgaacatatcagtaattcagcgtggcgtgtggcaaccagtgatatctcacagcaatacagattcagttatgtttcgataggacggtag

SEQ ID NO: 221082 - DNA, 441 bp, Klebsiella pneumoniae
atgcagaaatatattttcagtgccgataaaaatgcgtttttccctgtggagcttaaaatcgcttatcaggaatccggcgaatggcccggtgatggaatcgaaattgacgacactgttgccgccgaatttatgaaggaagcaccagaaggaaaatacagaggtgtcatcgacggaatgcctgcatggattgatattccaccgccaactcatgaggaacaaattgctgcagccgaactggaaaagcagcaattgattaatcaggtcaacgaatgcataaacagtaagcaatggcctggtaaagcggcgattggtcgcctgaaaggtgaggagctggcgcaatataatttgtggctggattatctggacgcactggaactggtcgatacttccggtgcgccagatattgaatggcctacgcctccggcagttcaggccagatga

SEQ ID NO: 221083 - DNA, 393 bp, Klebsiella pneumoniae
atgaactatgccgttatagaaaatggtgttgtcaccaatattgctgtatgggatggtgagagtgactggcagcaaactaacgcattagttctgcctgtgtccgataatgtaagaattggttggtactatgaaaagggaaagttttcgccacctacgcagccgccaaaaacacatgatgaattacttcgtgaggcagaagcacagcgccagtcgctgattgatgcagctatggcttccattagtctgattcaactgaaattacaagccgggcggaagctggtgcaggcagagaccacccgacttaacactgtgttggattacattgacgcggtgacggcaacagacacgagcaccgcgccggatatcatctggcctgaactgccggaggcgtag

SEQ ID NO: 221084 - DNA, 582 bp, Klebsiella pneumoniae; identical to SEQ ID NO: 35547

SEQ ID NO: 221085 - DNA, 450 bp, Klebsiella pneumoniae
atgatgatgattctggggatgttccccttttcactgcaaaccacaccttaccagagtgcgaataaaaccaactcctggcggcacgtcaaaaacgatcgcgtggggaaatccccgcgctatcagttcatcggcgcagatgaagaaccgttcgtactcagcggcacgctgtaccccgaaataagcggcggtgatgtgtcgcttgtcatgctggaaactatggctttttccgggcgcccgtggcccctgatagaaggcacgggcaggatctacggcatgtatgtaattgagcagatcacgcaaaaccggacggagttttttaaggacgggaaggcaaagaaaattgatttcacgctcaacctgaaacgggtaagcgaggacatacgggaaaagctggctgaaaccaccaccgacgatctcttctctctggtgaaaaccaacctttcgatataa

SEQ ID NO: 221086 - DNA, 2928 bp, Klebsiella pneumoniae
atggcagaccgcaatttaaatatcagggtggcattcagcgccctgaataatatgtcccgccctgtcaacgcggcgcgccagagtgccgccgcgttggcgtctcaaatcaaccagactaaaaccagcattaaagggcttgagcgtcaggcaaccagctttgaccgcctcaccgcagccaataaaaaaaccaccgaacaactggcccaggcgaaagaacaggcccggcaaatggcggcggcttatggcccgttacgccagcgcagcgccgaacaagttgccgccctcaatcagcaacgtgcagccattcgccagttaacccagcagcagaaaggcgagcagacgcagcttaaccagttgcgggccagcttctacagcgaaggcattgcgatcagcagcgccagccgggcgacggaacagatcaaccagcgcaccgcgcaatacaaccgccagcttgctgaacagcaacgacggcttgacgctgttaaccaggcgcaggcccgttacagccgcgccaaagaaaccggcgaaaagatgacgagcgggggaatgaaaaccgccgcagtaggggcggcaacactcgcacctgtcgccgctgcggtgaaatcctacagcagcctcgaagacgcgatgaagggcgtagccaaacaggtaaatggcttacgtgacgacagcggcaaccgcaccccgcagtatgaagaaatgcagcgggcgatcatggatgccagcgaaaagctgccaatggctaacggtgctgttgactatgccgccctggtcgaaggcggcgcgcgtatgggcgtcgcaaacagcgatgatccctggcaaaagcaaaaagccgatctgctgtcttttgccagcatggcggcaaaagcttcggtagcctttgaactgcccgccgatcagctttctgaaagcctggggaaaattgccgggctgtataaaatccccacccagaatattgaacagttaggcgacgccataaactacctggacgataacgcgaagtcgaaaggctccgatattatcgacgtactccagcgcgttggtgggcttgccagccaactggattacaagcaagccgccgcgctgggttccacctttctgacgctcggcacccctgccgaagttgccgccagcgccaccaatgcaatggtgcgcgaactctcaatcgctacggttcagggcaaaaactttatgcagggtctggacgccctcggcctcagcgccgaaaaagttcagaagagcatgtcagtggacgcgatgggcacaatcatttcagtgctggaagcgtccaaaaaactggccccggatcagcaggtagccaaccttacccagatttttggcaaagagttcggcgatgatgcgcagaaacttgccaacaacctgcccgaactacgccgccagatagaactgacgcagggcgcagccgctaaaggttccatgaatagggagtctgatatcaataaagcttccctttctgctcaatggcaactgaccaaaaccggcgcggttaacgcattcagttcagcaggtgaaacccttcgcgatccgctgatggatatcatgcttaccgtcagtaaggtggttggcagcgtccgccgctgggtggaggcaaacccagcgctggttggttcaatcatgaaagtcaccgcagccataggcgctttgctggttgtcatgggtggcctgatgctgtccatcggcgcagtacttggcccaatggcacttgttcgcctcagcttcacctcgctggccggggaaggaggaatagcgcgtctgactggcggagtaatgcgcctgggtggtgcgttccagtggcttgctggctcgcctatgcaggcattgttaagcgccggtcgcatggtattcggcccgcttatcacgctactggctggcatttctgcgcccgtctggggtctgattgctctctttgctgcggtagcagtggccgtaattaaattctggcaaccgattaaggcatttttcagcggcttctttaccggtctgatggctggccttcaaccaataacgcagtcgtttaacgccgtattcgcaccactggccccgatttttaacagtatcggcaacgcgatcagcggcgtctgggaatggtttaccaaactactggaaccgatccagttttccagtgaagcgctggcatcctgcaccagtgcaggggaaaccttcggtaaggtggttggggccgcaatcagcgcgctgacgcttcccattcaggccgtagccaaagggctgggctggattctggaaaagctgggcgccattcccgacgcagcgaaagcagcgcagcaggttgcgcagcaaatgacgccggaagcggtaaacaatctggcagaccgggttaacgccttttccggtgacgtgcaggcagtcgcgaaggaaagcaaaaaagccgaagagaaaaagaaaaccgatgagcagaagaaacaggacaacctgattaactcgctcaaaggcccggccaacatcgtgccgaagatgagcaacagcctggacaagatcgccaccaataccacggagaagaaagacggccccggcgaaattgtcttcaagaataagcagccctatatcccgatccgtggcggatattcggaaccgcttaagcaggcgcagcgccagctaccatcccttaccgattgggtgacgcagcaggccggatcgctgatcgcttccgttacgccttggcaggttgagaagcccgccgcacggatgcctgtttcggcgtctccgtctgcggcttccgtcgctgcgctgatgcctgctccgggtggcgatgtatataaccttaacttcgactttagcggccagaaactggatgaagaaaccattatcaggcgcgtgcgcgaagaacttgcgttagcgaagcaacaggccgaccggcgcaagcgctcccaactgaccgatcacgtctaa

SEQ ID NO: 221087 - DNA, 336 bp, Klebsiella pneumoniae
atgagcaaaaccaaagaaaacaccgttattcttaccgcccctattacgcgcggtaagaccaaaatcaccgaagtggcgatcacttccgtgcttaaacaggctggatcactgcgcggcttaaaagcctatgacgtgctgacttccaactatgacgcgctggttattctgctgccccgcgttaccgctccggcactaaccgccgatgagattgcccgtatggatacctgggatttttgccagctagccaacgcggtggttgattttttgcaaccctcttcggatctgaccgcgacggatacgggcaacgaatcatccgatgcccctgcgaacgcatag

SEQ ID NO: 221088 - DNA, 516 bp, Klebsiella pneumoniae
atggcactgcctaagaaactcaaatatttcaatatgttctttgacggggataactacttcggcatggtgccggaaatcacccccgccaaactcaccaaaaaaaccgaagactaccaggcgggtggtatgccaggttcggttgcggtggatcttggcttcgacgctggcgccctggatatggatatcacgcttggcggtctggatgccggattgctgaaaaaatggggcgttaccactgcggacgggatacaaacacgttttgctggctcctatcaggacgacgcaaccggcgacgctgtaccgtgcgaaatccagacgcgtggccgcttcactgaactggatcccggttcagcaaaagtcggggatgacacttcgcataagtacaccctgaaaaacacctattacaagctgaccatcaacggcgaagagattatcgaagttgatgtgctcaacatgatctacaaagttgccggtgtggatgtgctggaaaaacaccgcgctaacatcggcctataa

SEQ ID NO: 221089 - DNA, 1194 bp, Klebsiella pneumoniae
atgaccactaactaccatcacggtgcaaccgtcacggaaaccaccgaccttagcacgatgatcaccgacattgattcggcggtgatcggcgttgtctgcaccgctgatgatgcggacgaaacagcgttcccgctggatacccctgtactgattacccgcgtggctaacatgctgggcaaggcaggtaaaaccggcaccctgtttaccaccctgaaagcgatttcagaccagaccagcccgcaaaccattgtgatccgcgttgctgatgctgcaaatatcgaaccgccagaaggcggcaccgcacagacccaggatcaactggttattggcggcaccgatgcaaacgggcgctttaccggcatgtacgcgctgctgtctgccgaaatgcgcgtaggtgtgcgcccgcgtgtactggctgttccagggcttgatacggaagcggtagccgcacaactcggcgtcattgccgaaaagctgcgcgcgtttgcttacgtggcagcgaacggttgcaacacaatcgccgaagtgaaggaataccgcgagcaattctcccagcgtgaaatgatggttatctggcctaatttcatctgctacgacaccaacgccggggctaatgccaccgtgcccgtgggtgcccatgctgttgggatgcgagccaaaatcgacgcaacgcagggctggcataaaaccatttccaacgtgcccgttaataacgtgctggggatggatcgggatatctatttcacgttgcagggcaccgataccgacgccgacgaactgaacgcagcaggcgttaccacgctgatcaagcaggacggctaccgcatctggggatcgcgtacctgcgacgcggaaacgtatatcttcgaaagctatacccgaaccgcgcagatagttgcggataccgtcgccgaagcccatttcgcctatgttgataaaccgcttaccccgtcgctggtaaaggacattgtggacggcatcaataagaagctgacctcatacgtgacggctggcaagctgctgggcgcccgctgctggtatgacccggaaccgaatacctcggaaaccctgcgcaatggtcaactgaccattaagtacaactacacccctgttccaccgctggaaaatctcagcctggtacaggagttcaccgacgaatatttcgctacgttttccagcgcagtgaataactaa

SEQ ID NO: 221090 - DNA, 1119 bp, Klebsiella pneumoniae
atggacacgacagaaaaccgatattcgccgcgcccggcgttcagtattgagattgaaggtaagcagcttacggcgctggataaccggctgatctccctttccctgacagataaccggggctttgaagcggacacgctggatctgactctggatgatgcagacgggcaggtagccttaccatcacgcggcgcaaagatatcggtggcgctgggctgggataatgatccattggtttttaagggcgtatatacggttgacgagatcggacactctggcccgcctgaccagctaacgatcagtgccagaagcgcagatttccgcgatacctttaacgtgaagagggaatatagctggcacgatattaccgtgggggatgtggttgccagcattgccagccgttacgatctgcgtgcgggcgtcagcgaagaactggcgaagattgagatagaccacgccgatcagacgagtgaatcagatatcagcttcttaacgcgcatggccgaaatgctgggcgcggtggcaaccattaaaaacggtatgcttctgtttatcacgccgggcaagggagtaacgcagagcggcaagccgctgccggtgatcgagatagtccggtcaagcggtgataaacatcggtttaacgtagctgaccgcgacgcgtacacgggcgtaactgcatactggcttgatctcaactttggcaagaaaccatccactaccgtgaagaaaaccacccgcaggcgacgaaccagccaggccaaaaagaaagaacccgcatcaagcaaaaaagaaggggattatctggccggggccgaaggcaacgtttttgttatccgtaaaaccttcaagacggaaaaggcggcaaagcgtgccgcagcggctaagtggcgggagttgcagcgcggggcggctacgttcagcatcaccctggcgcgtgggcgcgcggatttgtacccggaacagccagccagtgtttatgggtttaagtccacgatcgacagtggaagctggacgataacacggtgcgttcacgatgttggcgggggagggtttaccacgtcgctggaactggaagtaaaaatcgacgactggacagcggagagtgacgattcaacgtcttaa

SEQ ID NO: 221091 - DNA, 612 bp, Klebsiella pneumoniae
atgcgggtactgtttcaccagcatgacggaaatagacggttcattaaaccagacccagccagcgcccggcgcgatggtgccacaagaagcttttccacgaagtcaccacggcgaagatcagctatcgctggcactgtaaaaataacccgcctacatggcgggtttcttatacctgttacccctgatattatttttcaactttcacagtggtgcttaaaaggtagggatatgaaaaagttaatcatggtacttgcgctgtttagccttgttggatgtaagcccggtgctgataaagcggttgagttggggcagaaagaagttgcttcaagtatgcgcgatcctgatagcgcgaaattcaggtatgtacgttttgttcagaaagacgaagctgctgatggtgctgttgtcggttacgtctgcgggcaggtaaacgccaaaaatgcgtttggtgcgtatgctggttttgcaccttttgaaatggaattgtcgatgaagtcgaaggggttcttctcaaaaggggtaacttactctgtatttaacaagcaactgtattcagacccaggacaggtaaacatggccgaatatacgaagaagtgcggccctgatcaatag

SEQ ID NO: 221092 - DNA, 903 bp, Klebsiella pneumoniae; identical to SEQ ID NO: 213133

SEQ ID NO: 221093 - DNA, 1035 bp, Klebsiella pneumoniae; identical to SEQ ID NO: 211282

SEQ ID NO: 221094 - DNA, 864 bp, Klebsiella pneumoniae; identical to SEQ ID NO: 212201

SEQ ID NO: 221095 - DNA, 1794 bp, Klebsiella pneumoniae
atgtttaagtttaaggcttcttatgtcgcactggcggcagtattaacctcgtcggtagtttatgccgaccccacaagctatacgcactcttccggcgccacggttatcgatattgaaaagccgaatgccgccggtgtctcccataacctgtaccgcgacttcaacgtcggcaccaatggcaccatccttaataacagcggcgatgatgtcagccacagcacatttggcaatatcgcccgcaacaataatctgaccgccggcagcgcttcggtgattttgaacgaggtgacctccaaaaacgccagtagcctgaagggctttatcgaagtcaacggtcagaaagcggatgtggtaatcgccaacccgaacggcatcacctgttccggctgtagctttgttaataccaacaaggctatcctgaccaccggcaaggttaatatgaccgacgatggcgccatcggcagctataccgtaacgggcggcaccctcaccatcggcgaaaatggcatgaacgccgccaacggctacgcggttctgctcgccgacgcgattaagattaacggtaaagtgcaggccaacaacgccctggtcagcgcgggcaacttcaccatggataacagctctggctcggtgacctccgccggtaaaaaggccaccctgatccagatgacggttaacccgcagtacagcatcgacgtcagcagccttggcggcattgaggccaacagcatcagcatggtcggcaataatatcggctttggcgtacgtaataagggttctattatctccaacggcacgctgatgctcaccagcaacggtaatttgctgaacaaagggtcaataacgggcaaaggtttgctgagccaggtttccaccgtcacgggcatcaccaatgacggtagcatcgccggcgcctattatttaatgctctccagtggcgattatatcgttaacaccggttctctctccggcggccagctgattgccaccgctaacggcaacatcaccaacggcgactcaggcacgatgaccggcaccagtggattaagcctgaccagcggcgggaaaatccgcaacgaagaaaaagcctccctgctgtcaaataaccagattgccgccacggcaatcggtgatttcctcaatgaaggcaaaatcagcgccaaacacaccagcctgacgtttgtcggcgacagctttaaaaacaccggcaatattaactctactggccaaaccaccattcagtcgcttacacaggacggcagcgccaatacgggcgagatctataacctcggcaatatcaccggcgaaaatatcaatctgcagaccaatggcacgctggcgcaaagcagcagtggtcgtattgaggcaaccaacgccattaccgcccacagctactggctgaaccaaaatggttatatgaatgccgccgatatcaccaccgatcacggcgtagtgaataattatggcaatattactgccaaaaatatttcaatcacgacctactcagatatcaccaacgaagggcagatcagcagcaccggcgacctgaccttaaataccaaaaataaaggcgcgatctacaattattcaaccctcagcgcgggcggcaacatgacgttaaccgccaccaaagtggtcaatggtggtaaaagttgcggcatactgggcctggcgaaatgcggagtcgggacgttaactgctgacaagctggtactgaactcatcgcagaaatatgttagcgacatgggtggaaaacagtatttgaaccacggcagcctggcggctgcaaattga

SEQ ID NO: 221096 - DNA, 1671 bp, Klebsiella pneumoniae; identical to SEQ ID NO: 211277

SEQ ID NO: 221097 - DNA, 348 bp, Klebsiella pneumoniae
atgagagatatgtacgaaataatggaccgttggggagcttgggcggcatctgacaatagtggtgttgactggcaacccattgcagctgggtttaaaggtttgctacctcatggaaagaaaacacgccagcaatgcgatgatgatgaagggatcatgattgatgggtgtgtggcgcgattgcgtaagtataaacctgaagaatatgagctaattattgctcattttgttattggcatctcattaagaaccatcgcgaagaagcggaagtgttctgatgggaccataaggaaggatttgcagtctgcaatgggatttattgagggagtcatcagtattctaacttattga

SEQ ID NO: 221098 - DNA, 1251 bp, Klebsiella pneumoniae
atgcaaagttacgggagtctacaagcacaaatggctaacttttcaacagttgtagagctgtatcgagcatcatcgaaaccgcgtttcgatggtcgttcgttctctgcaactgttgttttggatgatgctttaacatgtattataaaatcattattaaatgccaacaaaagcaatggctatttcgaagacatcgaaattgatgatgaattatttgatgaagataataccgaagacatccagaaccacataggaaaaaaagttgcctacacttttattacacctagaaacggtgcagaacgtttctatagttcccttgaagacttcctctctataaacacactaaagaaaggtgttttacctaatagttattatattacagacagcgatttttattcgttagatgatgataagccgtctggcattaataaaatagaaaaaatatgttccattattacgttgctatctgaaatagctcattatcatgatacaaagtcagaatcatcaaattaccgtctagtttttgtaaaaaactcagactctaaatcgacatctgttgttttagaaacttgcattacagacaagatgctacaaactgatggcataaatgatgatgtattaaaaacactgctatctccagaagactctgcgtccccccaccacttagaaaaaattggtattttccgcaatactattgttgaacacacgatagaaaacaatttaaatttcgagatgttaatttgtaactggcctttgtttctaaaattatacaacaacaatctgtcaacttacatgagtggtttttcattccataaggccaggaaggatgtagctactgccgaggctgagtttgccgaaaaaatatcaaaaataatcactgaacttacaggtaagattttatctattcctgtttctcttctagcatcggtaggaattattaagctcaattccatatcggagatgagcctcgttttagcaggggtcgttctaacttcttttttgttacatatggtattagtgaatcaggaaaaacaactcaatatagtaactcatgctaaagatctggcttttaaatcctttataaaaaacagcacgagttatcctaaagaattgaatgatgatatacaggtagccataaaagaattaattaaaaaccaagcgaaatgtcaaatgacaattcgcttgtttatgtgtttaacttggctaccgagctctattgcctctgcaatattcctttctagattttttatttaa

SEQ ID NO: 221099 - DNA, 1149 bp, Klebsiella pneumoniae
atgagcgtagaaataaaacatgtaatagttcatgagcttattaaagaagccaaaaaagattttgacttctctaacccatataacttgagagaaactcccttagataaccaaaacccagttgtcataaagttaattactgaaatctcttccttatatggttcaaagggaaattcagctcattatggcgtattcaaagaagaaacaacagagcaagggcctattccatcaaagtttgatgaatacactcaaaatactgactgcacatcagatttattcgtaccactgtcaattgccatcatgaaacaattagtaaaaaaagcccaagaggaaatatggtcttccggtggctttattgtgttttgtgattacactataaatgacaatcaatttttcttgatcgcaatgattaaaaagaaaaatggtgtcaccataagcacgaaattagaaccagaagaaatgattcatcttgatttatcaaaaatccatcaagcagccagaatcaatttcgacttatttgaaaaatttaagcatgcaagtgaaagtgaaaaaatcgatagcagctacttaagttttgttagtaaaggagttggtcaatcagcctctgcatacttcatcgcggcaataggttgtgataaatcccttgcagcaaccaaagcgactaaaaaactcccttccgaggttaagaaattctttacaagcaaacctgaattaaaagaacacgcaactaaatttagacatgagatagtttcttacctcgataagcaagcatcaaatgatgtgtcagcaaggttaagtgatatcgaaacaattgcattatcacatatgacttaccttaatgatgaaatacgagagagctatgttaaggagttaatggctcatttaaacagcgaagacataagaattcccactgaatttgttgttagtaagcgtgcacttaaagaggtgaaaaatcttacttacaaaggtgatgatattggtttcagttttgaaaaggcacttcttggcgagacagctgactatgatgtttggtacgatgaagaaagtgggcggctttcatttactaatctaccttcagaaatgaaggtagcactaagccaagcagtccgagaaaatgcaaagttacgggagtctacaagcacaaatggctaa

SEQ ID NO: 221100 - DNA, 309 bp, Klebsiella pneumoniae; identical to SEQ ID NO: 138910

SEQ ID NO: 221101 - DNA, 588 bp, Klebsiella pneumoniae; identical to SEQ ID NO: 15280

SEQ ID NO: 221102 - DNA, 417 bp, Klebsiella pneumoniae; identical to SEQ ID NO: 177149

SEQ ID NO: 221103 - DNA, 294 bp, Klebsiella pneumoniae; identical to SEQ ID NO: 102210

SEQ ID NO: 221104 - DNA, 294 bp, Klebsiella pneumoniae; identical to SEQ ID NO: 102300

SEQ ID NO: 221105 - DNA, 924 bp, Klebsiella pneumoniae
gtggcaaagcaaaagttcaaaatcaccaactggcccacctacaataaagccctcatcaaccgtggctccataactttctggctggatgatgaagctattcaggcctggtatgagtcagcaacaccttcttcacgaggcagacctcagcgctattctgaccttgccatcacgactgtgctggtcattaaacgcgtattcaggctgaccctgcgcgctgcgcagggctttattgattccattttttctctgatgaacgttccgctacgctgcccggattacagctgtgtcagcaggcaggcaaagtcggttaatgtcagtttcaaaacgcccacccggggtgaaatcgcacacctggtaattgattccaccgggctgaaggtcttcggtgaaggcgagtggaaagtcaaaaagcatggccaggaacgccgccgtatctggcgtaagctgcatctcgccgttgacagtaaaacacatgaaatcatctgcgctgacctgtcgctgaacaatgtgacggactcagaagccttcccgggtcttatccggcagactcacagaaaaatcagggcagcatcggcagacggcgcttacgacacccggctctgtcacgatgaactgcggcgtaagaaaatcagcgcgcttatcccaccccgaaaaggtgcgggttactggcccggtgaatatgcagaccgtaaccgtgcagtggctaatcagcaaatgaccgggagtaatgcgcggtggaaatggacaacagattacaaccgtcgctcgatagcggaaacggcgatgtaccgggtaaaacagctgttcgggggggcactgacgctgcgtgactacgatggtcaggttgcggaggctatggccctggtacgagcgctgaacaaaatgacgaaagcaggtatgcctgaaagcgtgcgtattgcctga

SEQ ID NO: 221106 - DNA, 1011 bp, Klebsiella pneumoniae; identical to SEQ ID NO: 214760

SEQ ID NO: 221107 - DNA, 1272 bp, Klebsiella pneumoniae
atgttcgccctggctgacgtcaactccttctacgccagttgcgagaaggttttcaggccggatttgcgcggcaaacctgtcgtcgttctcagtaacaacgatggctgcgttattgcccggagtgctgaagccaaactgctgggtataaagatgggaaccccctggttccagctcaaagaggcgcagtttcctgaaaaattgtacgttttttccagcaactacgagctctacgcgagcctgagtaaccgtgtggtcgccctgctggaagagctgtcgccccgcgtcgaacaatactcaattgacgaatgtttcctggatgcccggggaattggccactgtatggatctggaggattttggcaggcagctgcgtgggcatgttctcagtggaaccggactgacgatcggtgtcggcttcggcgccacaaaaacactggccaaatcggcgcagtgggcgtcaaaggaatggccacaattcaggggggtactggcgctgtcgcccgaaaatccacgcagaacggcaaaattactcagcctgcagccggtggaagaaatctggggcgtggggaaccggatagcgaaaaagctgcacgttatggggatcaccaccgccctgcagctgtcgctgacgaaccccacatttatccggaaaaacttcaacgtagtgctggagcgcacggtacgtgagctgaacggcgagagttgcatttcactggaggaagcgccgccgccgaaacagcagattgtctgcagtcgtagcttcgggcagcggatcaccacctacgaagaaatgcgccaggccgtctgccagtatgccgagcgcgcgtcggaaaagttgcgcggtgagcgacagtactgccggcatatcagcaccttcatcaagacatccccttttgcggttaatgagccgtattacggtaacgtggccacggaaaaactgaacacccctacccgtgacacccgggacattatcgcggcagcggtcaggtctctggacaggatctggctcgatggccaccgctacgcaaaagcggggataatgctcaatgatttcagtccgaacggcgtcgcgcagctgaatctgttcgatgacgtgcagccacggccgcacagcgatgcgctgatgaaggtactcgacggcattaatcattccggactcgggaaagtctggtttgccggacggggtattgcgccggactggcagatgaaacgggagatgctgtcaccggcatataccacccgctggaaggagctgccggttgcccgtttctga

SEQ ID NO: 221108 - DNA, 1080 bp, Klebsiella pneumoniae
atgttgatgcagcatatcggtgtcggctattttgggtattaccgagcaactgcttatgcgatgaaacactctcttatgcccgagattgcgaagttaagaatgaaggctctgaacttctgggataagcacgggatccgtgccgcagctgatgcttttgacgtatcaacgcgaacactctactggtggcgccggttactgcgcaccggtggtccagaagcactaattccaagaagcaaagcccctctggttcgccgttcaaggcactggcatcctgatgtactcaaggagatcaggcgtctgagaactgagttacccaatctcggcaaagagcagatttttgtcaggctgaaaccatggtgtgaagcgcggcattttacctgtcccagcacgtcaaccattggaagaatcattgctggtgctcacgataaaatgcggatgatccccgtacgcctcagcgccaggggcaaagcccggttgataaaaaaacgctcagtgaagcccagaagaccaaaacaataccgcccggtaaaaacaggcgaactcatagggatggacgcgattgaactcaggatgggggacctacgccgctatatcattaccatgatcgacgagcacagcgactatgcgctggccctggcggtcccttcactcaacagcgatattaccagccatttcttcagcaaggccacaaagctctttcctgtcgctatcagacaagttgtcactgacaacggtaaggagttcctcggtaactttgataaaacgctacaggaagcctcgattaaacacatctggacctatccgtacacaccgaaaatgaatgcgacctgtgagcgatttaaccggacacttagagaacaatttattgaattcaatgaattgttgctttttgaggacctgaatttgtttaatcaaagaatggctgaatatctggtgctgtataacagcaaaaggccacataaatcactcgaactgatgacgccagtggactatattttacgtgagagtaaaaattgcaatatgtggtggacccatacacctccttgcaaattgcacggtaagaggccatactggtgttga

SEQ ID NO: 221109 - DNA, 822 bp, Klebsiella pneumoniae
atgcgtttagcatcccgatttggacttactcattccattcgtcaggaacgcccactgactaacgatgaattggtcaaggttgtaccttctgtgttttcagaagaaaagcataattcacgtagtgatcgctatacctatattccaaccattacactgctggataaattacgtgaagaaggtttccagccattttttgcctgtcagtcacgagtaagggatgaggataaacgggggcatactaagcatatggtaagacttcgccgtgaaggggccaataaaggaacagaagtacccgaaatcattcttcttaactcgcatgatggatcgtccagttatcaaatgatcccgggtatgttccgttttgtatgcacaaatggccttgtgtgcggtacgtcgtttggtgagattcgtgtacctcataaaggtgatattgtgggaagggttatcgaaggtgcttacgaagttttgggaattttcgataaaataactgaaggcgttgatgtcatgaagtctattaccttaaccaaggaagaacagcgtctgtttggacaagctgcattaacctaccgatatgaagatgaaaataaatctccggtcagtattgaacagataattcatccgcgccgttatgaagataaaaaatatgacatctggactacatatcaaagggtccaggaaaatctgattaaaggcggtttgcctggccgaactgaaaaagggaaaagaacaacaacccggccagtaaaagcaattgatggtgatgtcaaactcaataaggcattgtggttaattgcggagaaattccgcactcttaaaggctaa

SEQ ID NO: 221110 - DNA, 369 bp, Klebsiella pneumoniae
atgaatgctgtattaagtgttcagggctctgctgtccctgaaaaaaccaaaccatcttttatgtcccgcgttttcaataaaaagaaagccctgaaagccgctaaagttgcgctgccggttgctgctgtggcggcgttcttcccggatgctgcgatggccaccaccacggcaaccgacctgatgaagtccggggatgcgaccgttaaaggcacgtttggtaagcagtccagcgtcgtcaaatgggtggttctggcagaagttgtcgccggcggcatcatgtacatgatgaccaaaaacgtgaagttcctgtttggcttcgcgattatttccacctttatcaccatcggtatgtcggtcgccggttactga

SEQ ID NO: 221111 - DNA, 306 bp, Klebsiella pneumoniae; identical to SEQ ID NO: 92373

SEQ ID NO: 221112 - DNA, 552 bp, Klebsiella pneumoniae
atggaacatggtgccagacaaaataccacccgcgttatcgctgtgggatttatcagtctggggacactcctgaccctcagtcttgcgaccaatattatccagggcataaataattaccgtctgcagacggaacagaaagtggcggtgacaccgatgttattccgagccccctttgcggtgtctcagaaccaggctgacgcctcttatattgagcagctgggcctgtcctttgttgccctgcgtctgaatgtcacgccggaaacggttgatgcccagcatcagcagcttctccggtatgtattacccgctgcgcagaacagcctaaaggtccagctggctgaagatgcgaaacgcattaaagacaataacgttaatgccaccttttatatgacctcgatccgtgcgtggccggcagagaaccgcgtggatatccggggtgagctgaaaacgtggattggggattccaaaccctacagtgaaattaaaagttatgtcattcagttcagtcgtgtcggtaatgataccaacgtgttgatttcgtattttcactga

SEQ ID NO: 221113 - DNA, 768 bp, Klebsiella pneumoniae; identical to SEQ ID NO: 213641

SEQ ID NO: 221114 - DNA, 423 bp, Klebsiella pneumoniae
atgtgccgacagctgcgccaggatctcgctcatcggctgattcaggttgatgcttaccacctcgccttcgccggcctgacgcagatgttcaggaatatattttcccggattgctctccagcttctcgatccagataccgtcgcggttaattttggctttgatattgcggtcggcggagcaggagacgcccatgccgatcgggcaggaggcgccgtggcgcggcagacggatcacccggatatcgtgggcgaagtatttcccgccaaactgcgcgccgaggccgaggttctgcgcttcctgcagcagctcctgctccagctgcacgtcgcggaacgcctgaccgtgttcgttgccttcggtcggcagaccgtcgtaatagcgggtcgaggccagtttgacggtcttcagcgtcgcttccgctga

SEQ ID NO: 221115 - DNA, 1251 bp, Klebsiella pneumoniae; identical to SEQ ID NO: 211577

SEQ ID NO: 221116 - DNA, 891 bp, Klebsiella pneumoniae
atgcatcgtcttcatccctatcctgatgtgcaggtgatgtttcgccgcctgctgatcgccaccctgattggccttctcgccgccctggcggtggcgctgtttcgccacgctatggtggttctggaaacgctgttgctcagtaatgacagcgggagcctggtcaacgccgcacagtcgctgccggcgtggcgtcggctggttacccccgcgctgggcggcctgacggcgggaaccttactctggctctggcaacgacgcagcgtcgcgcgtccgcatgccgccaccgattatatggaagccctggagaccggcgacggctgtttcgatacgccggcaagcctggtgaaatcgctggcgtcattgctggtcgtggtgaccggcagcgcgattggccgggaaggcgccatgatcctgctggccgcgctggcggcctcgctgtttgcccgtcgcttcacgccgcagagtgaatggaagctatgggtcgcctgcggcgcggctgccgggatggccagcgcttatcatgccccgctggccggcagcctgtttattgctgaaattctctttggcacgctgatgctggcctcgcttgggccggtggtgatctcggcggtgatcgccctgctgttgacgcagtttcttaatggcggcgccgcgccgctgtatcacgtcgtgttacagcagaacctcagcgccctgcactatggcttaatgctggcgactggcctgctggccgggctgtgcgggccgctgtttatctggctgatggactacagccaccgcgggttcgttaaactgaagctggcgccgccgtggcagctggcgctgggcgggctgattgtcggcggcttatcgctcatcaccccggcagtatgggcaacggctacagcgtag

SEQ ID NO: 221117 - DNA, 858 bp, Klebsiella pneumoniae; identical to SEQ ID NO: 211571

SEQ ID NO: 221118 - DNA, 273 bp, Klebsiella pneumoniae
atgtgggcggtggatatgccgcttaacccgtcgctggcccgcgatattatcgaaggtatccgcgccaaaatgcgcagcctggtgaatcagggctacctcatcggcggtgattgctggattgatgacagcgttaacgacaaagacagcctgaaagccgggaagctctggatcgactacgactatacgccagtgccgccgctggaaaacctgatgctgcgccagcgcatcactgaccgttacctggtggatttcaccacccgcgtaagcgcataa

SEQ ID NO: 221119 - DNA, 1125 bp, Klebsiella pneumoniae
atgtttcagaaaatcaaaattcgcaaaatgacaatcagccgggcgctggacaaatacctgaagacagtatccatccacaaaaaaggtcatctacaggagttttatcgcgtaaatgtgattaaacgtcaccctattgctgaacgctatatggatgacattaccactgttgatattgccaattatcgggatcaacggttggcgcaaattaacccccgaacggggcgtcaaataaccggaaacaccgtccgtcttgaacttgccctgttgtcatcattattcaatatcgcccgtgtggaatggggaacatgccgcatgaatcctgtcgaactggtcagaaaacccaaaatcagtagcgggcgcgatcgtcgcctgacttcaggagaagaacgccgactttcgcggtatttcaaagaaaaaaaccaggctctttacgtcatttttcatctggcgctggaaacagcaatgcgacaaggtgaaatcttgtcattgcgttgggaacacgtcgatctgcaacatggggtagctcatcttccaacaaccaaaaatggtgctccacgcgatgttccgctatccaggaaagcccgtagttacctgcaaatgctgccaatacagcttaacggtaatattttttcttacacatcttcgggattcaaaagtgcctggcgaacagcacttcaggaactgaagatagaaaacttgcattttcatgacctccgtcatgaggctatcagccgatttttcgaacttggtacattgaatgtcattgaagttgccgcgatttcaggccatcgctccctgaacatgttgaaacgatacacacaccttcgggcttatcaacttgtcagtaaactcgatgcccgacgcaagcaaaccagcaaaatcgctccctattttgttccctacccggcaacggtcgagaacagaaacgggcaagtcgttgtgactctgagtgatttcgacctggaaacaagcgcagccacaaaagaacaggccatatttcatgccagcgtgttgctgctacgaacactggcacaagccgcccagcgaggagaacgcgtccctactcctggcgaacttcctacaaacattgatgaacgggtaatgatttgtccattaacaaattag

SEQ ID NO: 221120 - DNA, 654 bp, Klebsiella pneumoniae
atgatagaacaactacagagtgattttttattctggatatttatttacttcctgatagtaggtttgcttatcagaaacattcatcttaccagaaaaattaaatccatcgaaaaaaacaaaatgttcccagcggaggaatatgctgtcctggacatagaacagcatatgtccaataaatatattgggcggctagtaacccgttttatgaagagaactaatggtgcacctttgttaattgtgtttccagaatacgataaaggagacaacaatgaagacaaaaattctccaccattccaacttgtaaaactaacatccaacatcaacaatattaaagaaatttattccaatgatgattcaaactgttttctgaataatatttcggcacaaaaaaatttatatacaacgcactctggacctagccaggcatggattgaacatgcatatcctttgcaacaagtaactattctcttacaaggcactcgtcatagtgaaagggaagatataatcagtcaacttgagattattctttccagactaaaaaatggagaaaatacaggttttgagcatgacgatgattttggatattcatttcagtatgatgccgcagcagtaggaaaatcatcatttttcgacgaagcggcaggaagaaaataa

SEQ ID NO: 221121 - DNA, 519 bp, Klebsiella pneumoniae
atgaaaatcttattaacaatatttatttatctgcttaccgcttttcagtctgcaaatgcaggtggaataccttatacatttaaccagaaaattcttcaggggaaagttattcgcgttctcgatggcgacaccatagaaattaaaacactacccgcaaaaattgttgtgtatgaagttccgatccgagtccgattgataaacatcgatgcccctgaaaagaaacaaccttttggacgctggtcaactagtcagcttaaaactctggttgcaggtaaacaggtgacagtctcttattcacataaagaccgctacggacgcattatcggtcatgtgttcacgacgaacggcacggatgccagccgctttatggttcagtctggcgctgcatgggtatatgaacgttacaacgtggatgagtcattaccggctctgcaacgggaagcgcaggaacaaaaacgcggtttgtgggccgatgcaaatccggttccaccgtgggagtggcgatacaaacataactaa

SEQ ID NO: 221122 - DNA, 405 bp, Klebsiella pneumoniae; identical to SEQ ID NO: 80401

SEQ ID NO: 221123 - DNA, 588 bp, Klebsiella pneumoniae
atgtatatacatattgttcctaaactttatcatctcatggctaataaatgtagccttaaatctatttccatacctgagcttgattttataattgatagtgaatcattgtctgtaggcagaccgtggcctaataaatgtttatgggttggaatgcgaaaaggaaggaagtcagttaatggcctcgttttgcaaacagataaaaaattaagatggtttactactatatacacctgggatattgaagatatggggttaatttaccatcaagtcaatacctatatagaagatgatgattttgatatggtttcacaggaaattcttttaaatggttcttttgataagtggagtaacagggttcattcagcttatgaaaataagcctccagccagaatccagcccaaaatggagtccttattaaataagcctggtgaaaacagtcatgatgtgtggaaagagttcgaatggggtgatttccttctgtccagagaagaaagccttttacttcatactattcagtctgaacgattgaatacagattgttctttattcaaaagacaaccgtctattgaaagcgtattagttatttaa

SEQ ID NO: 221124 - DNA, 2166 bp, Klebsiella pneumoniae
atgaaactttttatcgcagaaaaacccgcagtagcaaatgatattgttaaggcgcttggtggcaattttacccgtcatgatggctggtttgaaagtgataatactattgtgactaactgttttggtcatattatcgaatcacagccccccgaaaactataatcctgaatacaaagagtggaagattgaaacactccctttgcgtctttatcccgtaaaataccagcctgtagaaagcgccgaaaaacaggttaaaacgattattgagcttatcaggcgtgctgatgtgaccgaaattattcatgctggcgatcctgatgacgaaggacagctacttgtcgatgaggtcctggaatatgcaggcaacacaaaacccgttaagcgcgttctgatcaacgacaacacccttccggcagtgaaaaaggcgctggcaaatcccaaaaataaccgtgacttcagaggactctatctcaaggctctggcgcgttctgtagccgacgcgatatacggtttatccatgacgcgtgcttacacaatcccggcaaaaactaaaggctataaaggtgttttgtctgtcggacgggtccagacacccgtgcttggcctgattgtaaatcgcacccgtgccaataaaaatcataaatccagcttctactacaccatgaccggacattttcaacgcggcgctgatgttatcagggcgaactggaaacctggtgagttcgcaccgctgacagaccgcaaattgcttgataaaacctgggcgaatggaacagcaacatcacttgcaggaaaaccagccacagttgaagcggcagcaacagatgataaaaaaacggctgcaccgttgccctttaacctagtacgacttcagcagtacatgaacaaaaaattcaaaatgactgctcaaaaaacgctggatatcacacagcagctacgcgaaaaatacaaagcaattacttacaaccgttcagattgttcatatctttcagacgaacaattcagcgaagcaccacaaataatcgatgccctgaagtcggtgtttgatcagccaatggatattgatacgacacgtaaaagcaaggcatttaacagcgcaaaagtaacagcgcatacagccatcatcccaaccgttagcgtaccggacgtaaacgcactgagcaccgacgaacgcaacgtttacctggcaattgcacaacactatcttgtccagttcatgcctgaaaaggcatatcaggaagtatccgtcgccattcagtgtggtgatgagtcgttttatgcccgtgccaggaaaactacagacagcggatttgaagcgtttcttggtgtggaaaatgccggggacgatgaagcagaagtcgaaaatgatgattccgcttttgatcttctctgtaaaattcgcacaggagaaacagtgacgacaaaagaagtggttgtgaatgagaagaaaacaacgccaccgccattattcaccgaagccactttgcttgccgcgcttgttcgtgtcgcagattttgtcactgatccagtgattaaaaagttactgaaggataaagatcgggataaaaaagacgaacatggcggtattggtacgccagctacgcgggcttccatattggaaacactgaaaaaacggaactatatcaccctggaaaaaggaaaacttattccgacagataccgggtatgcgcttattgatgctctgccggatatagctgttaatccagatatgacggcattatgggcggaaaaacagacactcattgaaaacggaaaaatgaccatcgaacagttcgttgacgaactgtacaatgatctgataccgatgatcagtaatgcgaacagtgctgaaataaaagtttcccccagcgcgccgtctggtcagtcacaacgcctgtcctctccttgtccttcctgtggtaaacagattgttatcaggccaaaaagctattcctgtacaggatgtgaatttaagatatggaaagatttctgcggcaaatcattaaccgataaacaaattgaaacgttaataacaaaaggagttacaagtgaattgaaaggtttcattagtcaaaaaacaaacaaagaattttcagcaaaagtaaaactggttgacaaagcaaccgggaaactgggatttgagtttacacaaaaaagtaagaaataa

SEQ ID NO: 221125 - DNA, 228 bp, Klebsiella pneumoniae
atgttcttcaggaattgtacaatgaaaacaaaacaagactggctctttcagttaagacgttgctcaacactcgacacacttgaaaagattattgaaaaaaaccaaaacagcctcccaccttctgagcttgagtcgtttaatgccgccgccgatcacaggcttgcagaactcacaatgaataaactctacgataaaatccccccatccgtctggaaatatgtatattag

SEQ ID NO: 221126 - DNA, 432 bp, Klebsiella pneumoniae
atgtttttcctctacgatacctacaatttcttctactacctgataaagttaattgtcattcagccacaatatatttgtgtctatatgatattcttttttttcaatgcagggatagcatatagcatcaccaatgatatcgaggatcaagtatgtcgatggcttttattcgtaagtatgttacatgctctgatgattccccttgcaattatcatgccaccacaggaaatacttcaggaaacagagaaaaggcaggaactacatgaatcaatacccaaaacatgcaaattaaaggcactggatgctcaacaaggtggtttattcggcgttgataaagatgaatgggtattccctgacaataaatcattctatctgcctgaaaagtaccgtccagaaaacaggattacggaactagccatgatgaaagaaggataa

SEQ ID NO: 221127 - DNA, 2724 bp, Klebsiella pneumoniae
atgaacgcatctgattttctgacaaagcatattaatcttgcctggaaagatgcgaaatcctttctgcttgaagtttattcacagcagttagaaaacacgccatatacgcgctatccaacctacagacgccttacgcatcatgaagctcgtgagcgtcttaactcactgaatttatctgaaaaaacattacgaaatactatcaggtttgagcgtggcaagctgtataatgatctgcgagagatgagacgcgagttgaagttaataccacgtgaacagcgtgatattgccgtgggtgtgattgtttacaaaaaactaaccacacttgagcgtctttctgaactcgacacagatgggcgacacattattcgtcaatatcatgctgactggcataaggataaagatgaaatgaaagcccttgaacgtctcaaaagctatctcaacttcgatgaaatcaacgccatttctgctgacgaacccgaactttcgcttcagaaagcggtggattcccagcgccgcttagaagaggcgaaaaaggttaacaccaaactaaaagatcttgtgatggataagcaggattccaggattgtttatcgcgatcaggaatcggaaaagcctgtctttaccgacaaagggaactttgtcgttgcgggtaaaaatccctcaaaagaagagatcggaataatgcttgagtattccagggaaaagtttggtggtgtactcaaacttaccggctctgaagacttcaaaaaaatgtgcgctgaagttgccgcagagcaggacatgaagattattttacgcccggagcagtatcaacagatgatgctggaattaaaagcagaacttcagggtaataagtttgagcaggtggaaacacaggaaaatagccaggagtcagaatccagaatagagaaaggtgatgcattgaaggaacaggccaccgaacaggaacaggccaccgaacaggcgcaggctacagagcaggcacagaccacagagcaggcacagaccacagagcaggcacagaccacagagcaggtacagaccacagagcaagcacaggtcgcagagcaggccacatcttcatatgatcctggtgttattaccagggcaaacaccctggattcacagatgcttagtaaaggcacaaatggtgaatttggctatttgaaatctctggatagcgatgaaaatgagatttgggaagtgctggggcatgtacctggagacagcgatgatatctttagtgttgccagttttgataatgaaaacgacgcaaaagaattttgcaaaattgtgaatgagttaggtattgacagaacacaggctctgattcaggagcagcttactactcaacacgatcaggctactgcgcaggtgcataataaacaggaaatttattgtataaactttagtcgcttccatgatttgaatgaaggtatcgtctttcattctaaagatgcggctattcagtgttatgaggaaagcaaatcttctgcaatagaaaaatatgaaagcaattatttaaatggtgatggttttgatactgttgtgcttatgtctaaaactgtctcaaccgatgaattatcctcttatccagagggggcattagtaacgtttgataggccatttgaagtaattgccaattcatatgaagaataccgtactccagtgtatgcggtttctttctcgaaggatgagtttagtgaagatattaagacttttgagtcattgcacgacgcatctgaatataaaaataagatgcttcaggagcacgggcttaaccaggatgatatcttaatcacacctgtaacaagagaagaaatcgcctttaaaggaattaaggacgctgttaatgacgctaatatggcagtgatggaacaggcgggggattcgtccagagaatcaccagaagagatactcgccagtatttctgctaacgagcatatgatctccgggcttgaaaacttcctggttaaagaccgttctcagttcagttcctgcaatggggatatcgttgtggaggcggaaattaccaggggggaaggtggtctttatcaccttgcggtcgctggtaagcatggcttagagcgtggtgatgcagttgccagagtggatgttacggagcagcaatttgccgcgatcactggaaaaacaccttctgaagttttaacgggggaccaaacatcggctcgtgttccggtaattacaggtatccatttcagtacaagggctattgaaaatgtgaataaactggaacaacagaaggattatgtctatttctcaacacatgaaggcctgaatgctgaaataaaagatttcagctctctcaaggatgctattgagtggggccgggttgaatgcgagctacatgatctcaataagcgcgatactgtcatttatcgcgtcgagtctgaacatatttctcaggggattgacgctgtaatgaaaaatgctgaacgcgtggagcgtcatgaaattgagaaagcacagggacgggattgcacgccggaagacggcaagattcttgaggcaattgatcgctttgaggacaagttcagaggggaaggactgaagttcgaaagggagaaggccgaatccgatttgcttaatcacggattcactcgtgaaatggcagaagatgctcttggaaaacaatttgtccaggccagagaagaacatctggaattgcagcaacagcgtgacaattcacaggacatgcattaa

SEQ ID NO: 221128 - DNA, 300 bp, Klebsiella pneumoniae
atgactcaagagaaaaacttaacgaaagaaattcttggcaaacgtcaggacgagagggaggttacaagtcgtgtcctaaaaagtttgccagaatccgtcaatctgaagcaacagtcggattgtcacgtatgccccaacgcggtatggtttacggaatcaatggattcacaagacccgactctgtcagtgtattgtcagatatttcgcagcgtgatctggcagagcaattaccgcaaagagaacatcctggtcaggatgtgcgacgggattatgatagacaattcacagagtcaggaataa

SEQ ID NO: 221129 - DNA, 333 bp, Klebsiella pneumoniae
atgctctttgtaaagatcccccttaactctacttataatttttccgtaatccgcatctttacgcggatagtctttagggctatcaagattatatttattattaataaattcctgtatagcatcaagctgttcaattgtatgccctttggtaacatctcccactggattcaggaacttttcagtaatcaaatttactttaggaattacaatatgaatatgtggttttctttcaacaagttcaccagtgctattatcctggatatgacgaattttaggcaaatgagcttccgcataaaaagagtattcatcaggatgataagcattcatcaataa

SEQ ID NO: 221130 - DNA, 402 bp, Klebsiella pneumoniae
atgaaaaagatcgagagtttattatctccaatatgcgaggctataaacgaaacaaaatcgaaatcaaaacaggctgtcttcaatatgtatttgcaaaatatacttgaagcaaagaaatattatacatgggagcaaatagctgattacataaacaacaacaccaagacagaactagcccaaaagacttatataaatatgacagagagggctaaaaaaagacaaaaatgcactgaaccaaaagaacaggcaaaaaccatagatgtaattgatcagaatgaagctaaagacgatgaaccgagagggggggtaaaaggttttttttcaaacattagtgagaacaaaaaagaaatagagcacgatccaagtgctacgaatgaaaaattcataaataaatatctttaa

SEQ ID NO: 221131 - DNA, 753 bp, Klebsiella pneumoniae
atgaaaaactcaatcaatttcatccttcagggtaaaggtggtgttggaaaatcattcgcgaccgcaatactggcacaatactttattgatgaaaatcacatggataatatcgtagtcggtgacacagacccggttaatacaactacggttaaagtaaaaagattaaatgcagatttgatacaaatcactgaaaacagcaaagtaatacaatccaaattcgatccaatgttcgaatcaatgctgactaatagtcagaatacttttgttattgacaatggcgcatctacatttttaccgttaattcagtatttcaatgataactgtgttatggacatgtttgaagatgtagaacaagacgtttatatccatactgttatcgttggtggacaagctcttgcggataccttgcagggatttgaagaactgaaagaactggttaaaggaagtaaggtaaaacttattgtctggataaatgaatttcagggtattccagcacttgaaaatatcccattgatagaaactaaattcattgaaaaaaacaaggatgtaatcgctggcgttgttgttattcaggacagaaaaagtgatgcctttgcctctgatatcaaagagctaacagaaaaatcactaacactgaaagaagctcttgagtctgaccattttggattaatggctaaatcacgattaaaacgagtcttcaatgacatttacaaacaattagatagcatctatgacgatgaacacggtgaataa

SEQ ID NO: 221132 - DNA, 726 bp, Klebsiella pneumoniae
atgaacacggtgaataatatgagtacagttaatcagccagaattaaaacagcctgaaaaggctgtttccagtgaagatattgataattttattgttgatgtattcaaggagacagggcataaaatatctaaagatgatccagttatttcattgatttttctaaaccaaaagatacagaaaaaattcagcaatgagttacaagctaacttcacagctctgtctgaaggcttcagacaggtcgtttcatctgtagaaaatgactatattcaaagattcaaaaatatcgttgagacgtgcggcgatctggataatgaaataaaagaaaaagtagaagagggaaaaaacgatctaaaagaaacaagcgttgaggtaaaagaaaaattaacagatgatattattgaactcatatctggaattaaacgcaaccaggaaaaaaacaacaaattatatgaagaaaagttgaattcattatctaaggctgtaaagcccttcagtacaagaacagccattgcaatttgtgctctgtgcacattatgcctgtctgcggcattttctggcgcaacctggtatgttgcacaacatgaaaaggaggcaagtctgcgcttctatgcaagagcatttcttgatatgaaaaaaataactgaagagagcatgagaaaattaccaaaatcagaccagcaaaatataaaactcaaactagaagaaattgattcaagaaaaccataa

SEQ ID NO: 221133 - DNA, 420 bp, Klebsiella pneumoniae
atgaccacttttaccaacgacaacaaggaactaattaaagaaatccgagagcgaatcggcagcctggacgtccgagacaatattgagcgtcgggcttatgaaattgctctggcatcgctggaagcagaggcagttatgttctgtatatcaggacaaaatgtagattcagaagaacatgtatcaaccagcaaagcggttgttgatgcctgggttgaagaatggaatcaggttgacggaagtccaggcgaaccactgtacaaaactatgccactctactatcacgctgccttgccagcgccggtagtgccggatgaaatgtattggcaggatgcgccagttgaaggcagcagcaaagcggctgcatacgctacaggctggaacgcctgccgcgccgctatgcttcatgggaaaggagagtga

SEQ ID NO: 221134 - DNA, 264 bp, Klebsiella pneumoniae
atgccaactttaacaaaaaaagaacgggcatggttgaacgaattacaggacgttcttgatcgctgcccatcaccgaaaaaaattggtttttacaccattggcgataaaagcatttacctgtatgacctgcgccgcatggatgaaatcatggaggctcttgataatcgttcgtcaatggattggtgtgttgctgtccatgatatgaatgccggatttgatgaaaagattttattcccctcatcagttgaaagcacagcaggataa

SEQ ID NO: 221135 - DNA, 516 bp, Klebsiella pneumoniae
atggcgttaacacaccacgaactctgtcagattgcgtacaagttccttaagcgcaacgggttcaaggtttgctttcatgaccgctttgttgctgtaaccagtaccggagaacagccagatgctatgggattcagaaattcagcatcatgcctgatagaggcgaagtgttctcgtgctgacttgttggcagatagaaaaaagcgtttccgtaaaaatccctcacttggcatgggcgactggcgattctttattagtgagccggaaattatttcagttgaggatttacctcccggctggggattacttcacgttgttaacggaagagtacggaaagtacatggatggcccaggggtaattgctgttggggtaatcctgacgataagccatttaccgggaataagcaggttgaatgcgattacatgttatctgcattaaggcgcatggagctaagaggacaccttaatgaaatatatgacggtgtaattgttaataagaaagaaggaaacgcagcatga

SEQ ID NO: 221136 - DNA, 321 bp, Klebsiella pneumoniae
atgaccactttaaccgacaaagaactgattaaagaaatcagagagcgtataggcagcctggacgtccgagacaatattgagcgtcgggcttatgaaatcgcactggcatcgctggaagcagaagcgccaaatttgcctggtggtttcacaattgaagaagcaaaagaattacacgaaaatctggtaaaaagtcacgtaagcaaggctttaagtggcgaaaaaatgaaaaaagaaaatcgtgatgccgatttgcgctggattcatggcgtaatagttcaggctgcgtggtttgtgaaagcatcactagggcagaacgcatag

SEQ ID NO: 221137 - DNA, 444 bp, Klebsiella pneumoniae
atgactcaactaatcccagaaaagatactggaaatcatagatgatcatgatcgtgcagaaaaaaagcaacgcaacaaaatcggtttcatttatttatgtctctgtttagcaataattggtgttgccgcgtatacctttatatcaacgattagcattaatgtggtaacaatcatcataatgcttttcggtgtgtttatgattgtgatttttaagagctatttagactcatggagtgggataattcttagcagtgaccacatattgtccatactcgataaaaccaaagattacccagaaattaaacgtatagttattaatcgtctgctctccggctcaatactcacgggtaaagatgaagagtacatatacagccaactggaaaaggcccaacaaagcaacgaacgtgaaaagagattgcaagcaattaaagagtatacatcgtaa

SEQ ID NO: 221138 - DNA, 261 bp, Klebsiella pneumoniae
atgcattttatctctttccttaaaagatatttcggaattgaatacatccaggactgtggggcagagtttcttttcgtatatgaaaagggagaatttagcgagcctttatttatactgcgtgaatattctttaaatcctgaagttcagagaaaaagttggattgtaggtaatgtatattccacattagaacacggaaaagaatattctgaacaggaactaagaaaaatgattaaggagggtaaagtaatcagcaaatactaa

SEQ ID NO: 221139 - DNA, 261 bp, Klebsiella pneumoniae
atgaagataagaaaaggtgacagacaatattatctgaataaagaaggtgatacgtttcatctggtgaagcgagtaaaaactttttctaagtctgcgactttaggaaaaacgaaagcaacggtgaaaactgttgctgatcttgtttttcatgagaaggcattcgacactatcgactttgccagcgacggattaagagataatgataaagaaattgtttttatgatgattcaggaaatgagcgaagaagaaaatgctaactga

SEQ ID NO: 221140 - DNA, 225 bp, Klebsiella pneumoniae
atgaaacaatctacttttcctgctatcgtctctacaactggtcatgtgttttctgttgtgcgcgtgacgctttgcacaatttgccttaaacatgaaaaaacaggcgaggcttatgtcgtcatttttacagactgccataatatccgtgattataaaaagggcgttgttccggttcttggggaactttatcaggaagatgtcgatttgattaccggaaaaagttaa

SEQ ID NO: 221141 - DNA, 210 bp, Klebsiella pneumoniae
atgaaagttcttattggtaatataaatattgataattatcatatgctgtctgcattagcagggattgcgggatttgacaggagcattgagtttacatgtgaaatatcagcaagtatcgaaattatggaggatgatttcgtaaataaagctggtatattaaagatgttagatgaatttattgaaaatgatttttcaataaatctcgtctag

SEQ ID NO: 221142 - DNA, 324 bp, Klebsiella pneumoniae
atggaaaaccacgccaaatttgttgctactgaaattcttaatcagcttggtggaaaccgctttattgctatgacaggcgcaaagaactttacctgttttgatgaaaatggtgagtctggtctttgctttcgtttaccttcaaattttgcaatgaagggaattaatttggttaaaatcaaattaaccttctctgatacatacctggtgacattttaccgtgtccgtggagctacagtaaaagaaatatcaaaatttgataatatttattgtgatcagcttgaatgtttatttaatgaacaaaccggacttgcaaccagattgtaa

SEQ ID NO: 221143 - DNA, 243 bp, Klebsiella pneumoniae
atgactattgaaaatacaccggaaaacataaagaaattacgaaaaaaaattggccttacccagacagagtgcggtgagatttttggcgtaggcttaagtacatggcagaaaaaagaagctaaaacccacaaccagcttaatttatcgaaaggtgaatttgagtacctgttattacttgcaggggagcaccctgaatacgtcctgcataaaaaagctgaatcccgctcaccggaggaaccgtga

SEQ ID NO: 221144 - DNA, 255 bp, Klebsiella pneumoniae; identical to SEQ ID NO: 21654

SEQ ID NO: 221145 - DNA, 543 bp, Klebsiella pneumoniae
atgaactctttttttgaacagtatcaccctgtctttgaagttgtctgccgtatcctggggaacggctggcgcgtgaacaaacttgatgattgtccgtctcgtataaaactgacgtcaccgcagtttaaaaattactctgtgcatattcggatggaaaaagaccgattttctgttgtggggagtgtggatagtcgttcctggagtagtccgtatcatgtttgtacgttatccaggaagcggaatcccgttgatatagcagccaatatcgagcgaaaaattttgctaaatgcttcgcaggaggtgttacaggcgattgagtatgagaaacgccaggcggcaaaaaaggacgaaattctgatcctgaaaggtatgttatcgcaacttgtccagcttgaaagttggtatggggcattgacaggctttaaagctgaaaatggattgaacggtaaagtcaccgagcagggcgagcgttatgatttgcagattaggggtttgagtatagatcaacttgttaaaattacaggatatttgaaacagttatga

SEQ ID NO: 221146 - DNA, 516 bp, Klebsiella pneumoniae
atgaatatccaggaagcattaaacgtttttggattatccggcgaattaactgaaaaagatatcaaagcagcatacagaaaagccgctttaaaatatcatccagatcgtaacccgttaggggctgaactgatgaaagcggtaaatgcagcttttgatgtcttgatggcaaatattgataaaataaatcagttccagagcgctgatgaacatgcacgatataattacggtgatgacctggaaaaagtattaaacgttctttctggtttatctggtctggtatttgaagtgataggtaactgggtatggattagtggagaaactattacacataaggaaactttaaaagaaatcgggtgtaaatgggcggcaaagaaaaaacaatggttttatcgtccagacgaacataaaagttactggaatcgtgaagaacacacgatagaagaaatccgcgcaaaatacggtacaaccggacagcgcagggcgacagggtggcaacgcgtggaaaccagagcgtaa

SEQ ID NO: 221147 - DNA, 330 bp, Klebsiella pneumoniae
atgaaaacattgacttttaataacggcactgtttctgttggcgatgtgtttgtatcttcctggggatatgagcaaacgaacgttaatttctaccaggttatttctgttcatggcaaaaaaacagtaactgttcaggagattcgcgcttcagttcatcggactcattcaatgagcggatataagactccattacttaatgatttctgtggtgagccattaaaacggcgagtgcgtgattattacagttcgccagcaattgaaattgaggaattcgaaacagcatataaaggatcaccggaagaaaaacacgagttcacatcatactactaa

SEQ ID NO: 221148 - DNA, 666 bp, Klebsiella pneumoniae
atggggagagcattacttgtcgcatcagataaaggcggtgtaggaaaaagcaccacagcaacaaacctggcttcttatctggtaaataattcacgaacggtcatcattctgaagaccgataaaaacaatgatattcttagctggaacgaaaaaagaaagcagaatggcttattaccggttcctgtttatgaagagtatggcgatgtatcagaagtcattaagcgcctgaaaaaaatatgtgaagtgctgatcattgactgtccagggcatgacagcaaggaatttcgcagtgccttaactgtagctgacattctgcttactctcgttaagccgtcttcagatttcgaagcagaaacgctgactcatgtaacagaaaaagttcgcacagctcaacagatcaatccagacctgcaaccctgggtacttttcacgagaattaacacgacaaaaccacgccacagaaaagcagcgattgatctcgacaagttactccgggagaacccggtgtggatacagccacttcgtacacgtatttcagatttagatatttttgaagcggcctgtaatgaaggcgctggcgttcatgatgtacgtcgcgcatccagcctttctacagctaaagcacaaatagagcttttggcgcaagagttaggcatcaatccctaa

SEQ ID NO: 221149 - DNA, 573 bp, Klebsiella pneumoniae
atgcagccaaaaaaaacacccgtgattgtggtcaaaaaacgccgcgttctggtcatgccagaaaatcctgtggtgaatgaaaagccgcaggaagtacaaaaatcagcagttaatgaaaacaagaaagtacagaagaaagatgctgtagcagagaaaacacataaaaagcagcctcagccctggtatttgaaaaaacaaatcacttttcccccaaaatatccgaaagaatattttgaaaagtgtttcaataaagttcgtgctgtttttcctgaactatggacagacgaaaaaaagaacttgcccctgaaaagcgggattctccaggacgttgagaaatacctggcggataacccggatgtggatctgacgattgaagagtggaattgtgcggttcaggtgatgacgttccggtggcaatatcttcagaattgtactgtaccaggcgcaacacgttacgacctttacgggaaacctgctggtacagtaaaaaaagcacacgcaacttatgcgcaactggttctcgatgcccgtaagaaagccagcgagaagaaacaattaaaacgtaagggataa

SEQ ID NO: 221150 - DNA, 162 bp, Klebsiella pneumoniae
atgaaacagccgaaaaacgccctgacctggtgtttattaatcgtgtgctgcacattgttaatattcacgtatctgacccggaatcgtttgtgcgaggtccggctgaaagatggaaacagggaggttacggcaagtctggcttacgaatccaacggtaagtag

SEQ ID NO: 221151 - DNA, 162 bp, Klebsiella pneumoniae; identical to SEQ ID NO: 22640

SEQ ID NO: 221152 - DNA, 1029 bp, Klebsiella pneumoniae
gtgcagcttgctgtgattagcaaacgtcactggtctgaactatcaccggaagagcaggtccgtttctggcaggactacgaagcgggtattgaaagctcattcctggtcctccaggaaaacaaaggcggaacaacaaaacgtcgccggggtgaacattccactaagccaaagtgtgagaatccagcctggttccgtcccgacaactataaggcgctgggcggacagttgggccacgcttacaatcgtctcgttaaaaaagacccggtcactggtcagaacacactcagaatgcacatgtcgttgcatccattttatgtactgaaacgtcagagtgtcggtcgcaaatataaattccgaccggagaaacagcggctgcttgacgcaatatgggttgtacttgtgagtttttgtgatcgtggattgcacactgtcggcatgtctgtctcccgcctggcagaagaaataagcccaaaagacagtaagggagacgtgattcctgaaaccgcagtcacagtatcgcgcctttcccgtctgctggcagagcaggtttcctttggcacgttgggaacgtcagaaaagacgatatgggatcgtgaatcccgccagcgactgccgaaatacgtctggatcaccgaaactggctggaaaatgctgggagttgatctggtgaaacttcaggaacagcaacgtaagcgccttgcagaaagtgaaatccgtctgcaattgattaaagaaggcgttatccgcgagggcgaagaaatctctgttcactcggctcgtaaacgctggtatgcgcagcgttctctcgatgccatcaagtcccgacgtaagaaagccgcggagcgcaaacgtgctaatcgcctggcaaaactgccgtatgatgaacagcgaaacgaaattgcgcggtttattctgaagcgtatgccgccggacgaagcatactggtgtactcaagaaagattagagcaactggtagccagggatctacgtcagcttgaactggccctgacagcttcgccaccccactag

SEQ ID NO: 221153 - DNA, 453 bp, Klebsiella pneumoniae
atggcgcgtaagttaaaaattaatcctgtcattcctgaatgtgtggcagatttgaaaggatatccactctatatcatcgttgcttattggggattaagaaataataaaacgctcacaacaacggatgttagccgtaatttccttattacacagcaacaatcttatgatgtgcttacctacatttaccaagaagcacagaagcagataacagcaactaaacgaacactatttaacgagcacaaaagaagaattagtgcgttcaggattcttgatattgacaaaggcatattgcgcaccccaaaaaaagagattgcatatgccagctacgacaatataccaactgtaacaatgaaaagtacccgttgtgagatccaggatagttttacagaactgcgccgctggatgtgttcaagaaagacaggtgatcgagtggaggtatttttgaatgtctaa

SEQ ID NO: 221154 - DNA, 978 bp, Klebsiella pneumoniae
atgattgacgctataattacgccaatagttacatctattccgttactcttattaattttagttgcgctgatattcgttaaatctgccgtcaaaatcgtgccacaaggtaatgcctggacagtggaacgctttggtaaatatacccatacgctttcccccggtcttcacttcctgatcccggttatggaccgcataggtcaacggatcaacatgatggaaaccgtcctggatattcctaaacaggaagttatttcgaaagacaatgcaaacgtaactatcgatgctgtttgttttgtccaggtcattgatgcagcgaaggcagcttatgaagtcgataatcttgcatcagctatttcaaatcttgttatgaccaatatccgaactgtcgttggtggaatgaatctcgacgatatgctttctcaacgtgacagcatcaattctaaactgttaacggttgtcgattatgcgactgacccgtggggaattaaggtcacacgtattgaaattcgggatgttaaaccaccaaaagaactgactgaagcgatgaacgcgcaaatgaaagcggaacgaactaagcgtgcccggattcttgaagcggaaggtatccgccagtcagaaattctgaaggcagaaggggagaaacagtctcaaatactgaaagcggaaggggaacggcaatcagcatttcttcagtccgaagcacgcgaacgtcaggcagaagcggaagctcgcgcaacaaaactggtgtcggatgcaatcgctgaaggtgatgttcagtctgttaattactttattgcgcagaaatacactgaagcactccaggcaattggcacagcatcaaacagtaaactggtgatgatgccgcttgattcaagtagcctggtgagttcggttgcaggtatcagtgaactgctaaaaaacgtatcacaggatactcccaaagttgatatgaaacaggctcaacaatatttgtcttaa

SEQ ID NO: 221155 - DNA, 300 bp, Klebsiella pneumoniae
atgaaaacttatgggttcatccttcttattttacatataatccctatgggggcatggttctttcttctttttattacaaacgatgagaacaaagtagaaaaaatacaaaaccacatcgtatcaatatttccattatggctgaactggggaggggtgatgatagcgatggctctgctgcccctgttaatatggagttttaatggcatattcttcggcttctttctgctaatttatgcatttggcgtttataactaccttcatcttcttcattcaatttctcccttttatcatggagattag

SEQ ID NO: 221156 - DNA, 444 bp, Klebsiella pneumoniae
atgttatggtatacactatttcttctgtgtattgcacttgaacttataaccggaacaggatggttactcttaatcagtcttggtgcattatcaagcgccattgtgggcttttttcttccgatatcacaagaagccaatatatgcttctttgcgtcaatcagcatactggcgtcgataattaagttcttctatgacaaaaaacataagaaattagacactctcctggtgaacccagggcattcacgttttaaaggaaaagaatttacgctcagtgacgatattgttaacggcaaggggcaattactcattggtgatacattctggcctgttgagacgttacacaatgaaaactaccttgcgggaacaagagttattgttacagacatgcaaggaataactcttaaagtaatgaccatcgaagacaagagtgaaaacaaggaataa

SEQ ID NO: 221157 - DNA, 132 bp, Klebsiella pneumoniae
atgaatgcactatgtatttttattatcagacttctggataaggattttattgaagtctacaaaaaaacgctaaaaaaaattactgcattacatattttattgatggtgttaagtgtcacaggaatagtatga

SEQ ID NO: 221158 - DNA, 663 bp, Klebsiella pneumoniae
atgcgaaacgcaaatgaaggaatttctcttgcagctattgtagctaaagaaacaacaacaggtaaatggaatggtactggtgggggtattggtttaggtactggtggtattggcttattcatcggaggtgtttctggttctaaacaagagcagacacaaagggcaaaaaactttgaatcgcctaaagaggaagaatacagtctattaaatgtatacggttcgataataaaagttctcgtttttggcgtgctatttggtttatctgcccgtttatttacatctttatcaaacactggttctgactttgctgaaccagtaacaaccaccacagccacaggaaagattcaatctattatgggtggcatggcagaaatggtaagcattttaggcaccgttgtcccttttttagtaattatcacagcaatgatctggtttctgtttttcagcagcaaacgagaaaaagaagagttaacacgagttgaacgtgaagctgctaaaacaaaactccgtatagatgtctatcgccgtttacgttacgttgaaagcgatcatgtcgtttttgacccgattacaggccgggaggttccggcagaacggacgtgtattaataaactgattgaggcacttgttgatgaaagcaacgacatctcaaaaagaaattga

SEQ ID NO: 221159 - DNA, 216 bp, Klebsiella pneumoniae
atgagtgcttttattaagctggcatctgttctggcgttatttattagcccggttgtggttgcaatagcaggagaacaatctcactgtacaaaaatcaacgaatacccattcatcgtcactcaatgcgacgacggaactgtgacagtggtgaatgtgataaataaccgtgtagctgtgtgccgtaaaggggaatcatgcaaagaaataaaattataa

SEQ ID NO: 221160 - DNA, 258 bp, Klebsiella pneumoniae
atgaaaaaaaacgacgatttaatcactttaccatctcataacagccacgctctcgattacatcattaaaaaagcgtttacaccacgtaaaaccaaaacatcgacagcgacccacaacgtttatagttacaataaagaagaatccacattaaatttccaaaaaattggagaagcaatttttttcggcacagacctggtaattaagctgaagccaaatattagtgcctctggtgaactcttcatctgccagaaggactaa

SEQ ID NO: 221161 - DNA, 987 bp, Klebsiella pneumoniae
atgaacattgtttctgaaactcttgagctagtaacaaccattgttgaatccacagcggcgacgaacgccgctaaagtcgcacaagcaatatctcctacattctttgctgccatagccttatacgttatttacctaatatttgaaatcacgtatgcccaacgtgacgtcctgatgagcgaggtaactaaaaatatcggtgcattcgccctggttggtgcattcacttattcagcgccttattacagccagtttgtcattccttttgtcatgcacgctggcgctgatctttctgctgctataactggtgatgcaggaacggcaaccagtgttgataatttatgggattcactaagcaaatcactggatggttttctgttacaaagaatgtcccaactgtctatgacagatgtaagcggctatttgctttcattcaccatatatataataggctatctcggtgggatgatattaatctattacactgctatttttttatgtctatcaacttttatggtcggaatcttactatctgcgggaatattatttatctgtttttccctattcgcatcaacaagaaatatgtttgctgcatgggttggcagttgtttaaactacattttattaaaccttttctacactatatcgtttagttttttattgtcatttatcactaaaaatataaatatcagccaaacaccaagtttatttgatgctgtaacaattctacttgttattgctatttcggtatttcttattgaacaagtcggcactctttgctcaacgcttacaggcggagtcggcatcaatggcttgacctcggcagcaaatggatttgctgggaaactggctgctgttaccggagttagggcactaagtaacgctggcggtaatctcgccaaaacaacagcgataaatttaacacgagcagccggaagcaaagcaaccgacatgctatttcatcgcaatggaaaacttaaagctgggtga

SEQ ID NO: 221162 - DNA, 648 bp, Klebsiella pneumoniae
atgaaagataaagtattatcatttctccttgctggaataattaccataacatcaccatcaatctttgcatctggtattccagtagtagacgttacagcgatagctaaaacagttgaagaggggttaaatcgtgctgccgaagcagcaagacagcttgagcaacttaagcaacaatatgaacaaacgataaaatacgcagaagaacagaagaaaaggctggaaggtttcactgatttcagtaatgggtttaatgacgcctcaaattatatgaaggattcattatccacaatcactgatagtgctaaatcagatctaaattcgctacgctctcaatataacctctctagcgatgtcgtagagacacagcaaagatatgatgcaatcctggctaagatcaaattttatgaaaatttcaatactcaaatgcaggaaagggcgaagagactcacaaatttacaaaaagaattttctaatgccgacactccacagaaaaaagcagatttatccaaccaactgaacacagaaaaattgacaatggagttgcaattgaagcaatatgatattgctgagagacaaatgaagtttgaacaggaagctgcatatgaatctcgacgcattaatatcgttaatgaaatgttaaggcattaa

SEQ ID NO: 221163 - DNA, 237 bp, Klebsiella pneumoniae
atgaagaaaacaattatcatttctcttgctgtattctgcggtttgctcgccggatgtgacgacaaaatccatgatgtatcttactataaggaacatcacgaagaagctcaaaaagtatccgacaaatgcaaggctggcgaaatcacaaatgataattgtaaaaatgccaacgaagcactctatgatctaaaacgaaaagaaatcatgagtcaaatgcttgggcgctccaataaataa

SEQ ID NO: 221164 - DNA, 810 bp, Klebsiella pneumoniae
atgaatgagccattagaggcggaattgcactctttgtttagttttgatatctatcctggtgcatcatcagaacagaatactggagttaagttggctatggcgcggttttatttaaatgttccgtttgaagaaaaggatttggctaaacaaaaaggggcgcaatgggaccaagagcaacggaaatggtttgttccacagggaaaaaatccaatttattttattcggtggataaaagaattaaatgaacatgattacaatgttttttcgcaacgtttttatattgcggaaagttaccagtcttgttggcgttgtaagaaaacaactcctgtgtttggtatttttttacctcgttggtataagtatagagacgttatttggggagttgatcctgccgaatgggaagattgtatattagatgaatggtatgaaacatcctcccctaagggtatggagtattttgattcaaagaaaaatatgatttatcggtggttaaccagtagagtatggtggactgatttaacgaaaattgaaataatttcaacctctgctctctcaaggattaatgagtattcaaaattatattatccatctcatagcaaaacagcaaaaatgaactattacgcgaatcattgttgtcattgtaacgcaatgcaaggtgattttatgatgtttaatgagccagggggtgtgttcttccctgtaacatatgaacaggcggagaaaataagattccatgaagtcaatgaaacaatatttgccaaagcaagttatagtttaatacccgaagccggaggtttcatagatctttaa

SEQ ID NO: 221165 - DNA, 633 bp, Klebsiella pneumoniae
atgaaatccatcattttatcgatggttgccgccaccgcattactgtcaggctgcgcggatagcaaaacacaaccagtacctgagtcaccgttaacctcaaatgaccaccagataacgttgaaaattgataccgtgcgaacagacctgccggacagttctcctgtctgtttgaatggtatgaatatatacgaaagtctgagcgagcggcatccaggcttgtttgccaaaaatcagaacgtgattttccgtagtgcattctttgatgacggtcaggcgatatcctccgaaacaatccgcaaaataatgcagagcaccccgtgcgttgaatcacaaacaacatctgccggaagctgggaacctgccacggaactgatcccccgtcaggcaatatccggtgacacactggctgaaaaagatcggactgctggcttcacaatgcggatagcaccggagattgagcgtggaaatttccacctgctactcacaaccactgacccgatacggaaacagactgtcgagcagaatattttactcaaaccggaccagtcccttatcgtgagtggttttactggagttaatgctgatagccaaagtgagaaccggattgtcatcattacgccacacgtgcgttga

SEQ ID NO: 221166 - DNA, 300 bp, Klebsiella pneumoniae
atgaaatccatcattttatcgatggttgccgcaagtgctatcgcactctctgctcccgtatatgcgtctgatccgtgtgcttccgttctttgtctgtacggtaaagctatcggtagcggcggcgggagcgaatgcaaaagcgccgaaaaggacttctttaatatcatcaaaaagaaaaagggatctattcgctggagcaaaacctttgatgcccgaaaagcgtttctcaatcaatgcacgaccgcagacccggcggcgatctcaaaaatcatgagtaagttcggacgttcctggggttaa

SEQ ID NO: 221167 - DNA, 1236 bp, Klebsiella pneumoniae
atgaaaaagatcattattattcccaccacattattgctgaatgcgtgttcccatgcccctgaacccgcacaggcaaaaggaggttggtatgaactgaataccacaattgagcaggtaagagcagacacataccataacgggatggtccttcagcagcccgtgtcacagccaaacagcactgttcaatacagcaatgataattatctcaaaaaggaagccataaacgtaactcccgcgcctcgtattgcagaaaccgtaaaaccacgttctgagcaatcagcgacagcgccaaaaaaccaggacagcaataatagttttctgaagccaacaaaaaacagcataacttcatctggtgagataaaaacagcagccaaaggagcaactaaacagcattctgaacaaccagcactccctcccgcaaagccaatcagtagcaacaaccatcaggcacaaacggcacaaaagactgatcagcagacaaaaccgcgtcctgaacaaccaccgctaatgtcaaaaagcggttttctgaaaaaaaacgctaacaacgctgttccggccaccacgcttacaggcccatcaacacctgaaaagcaaatttactttgttcgccatgatggtaaaggctcgctgcaaaaagcagtaaaagaaattgtcccatcggactggacggctgaaatatccccggaggtaacgaaaactttccgtcgcccgatatcctggcagggcaacgatcaatggccttatgtcctggataaaatgcttcgcaactacggtctgacggtaattaagaacaccgaaaaaagacatcttctgattgattttcaacaacagaaagggaaaacatcacaaaaagcacctgtatctcctgacaaaacccctgcatctcctgtcaggacaccagtttcctctgacaagttacctcaaaaaccgctaacgcctgtcaccgttccgcaaaaaaagacagaaaaactcacctggaatcttaaaaaaggttcgacgctgcgggatggcctcaccgaatgggcgtcaagttcgccgtgtggtacttcaacctggaatcttgtatgggatactcctgtgaactacagaatagatgctcctcttattttccggggaaactttgaatctgcattaaaagatacgctgatgctttatctttcagcagataaaccgttatacgcattcaggaatattgcacaatgcgtaataacaattaaagacacacaacaggagtaa

SEQ ID NO: 221168 - DNA, 438 bp, Klebsiella pneumoniae
atgggttggttcttcagcttgctcctgatattcctgtcaataggcagttactatctgacagataacaataaccaaaccatacagcgaatgaagttgcttcctgcaaaacaggaagcaattgaatttgtctatttcgcaaatgttatcaatgactatctttataaatatccagacaaacgtaattcaggaggaacgttaacatctgagcaaatcggtataacacccgtttatgatattcatcatattatttacggtaagcgagtttatatctggtctgccgatacagaaggtctgatgtctgctttgcagcagcaaacaaaacattcagcaatgttaggaagagtaaaaaataagaagattgtcgataatcaggggaatgatatggggataactatcccttcatctatccctgaaggctcaattgtatttattaattaa

SEQ ID NO: 221169 - DNA, 399 bp, Klebsiella pneumoniae
atgcaggataatgatgatgtcagcgagcttgatattgccactcgtgaagtccttatcttacgatgcaatcttattcagcttgcttctgaatatataaaaataaatcctcttaaaaacacccgaatctacacagatttaattcatcgttcagcagatgttatcaaaaatatcgaacaaggtaacatccagaataaacataattatctgtcacaggatgtaaaacacacgcttgttttatacgacctgtacaaatcagactttgaacaatgtccgggggcaaaatcccttatacctgtcagggaagaaattgtctcgctgaaagaacttctttccggcgctaatgagctggacagtatcgttcgtcgcccccgcaggaaaaaacgttcttcacgaatttaa

SEQ ID NO: 221170 - DNA, 585 bp, Klebsiella pneumoniae
atgcagttatcagcggctgttctggcagcactgataagtcagtgtgcccctgatgtatcacccgatacgatgaatgccctgattatgactgaatcaggggctaatccatatgtaatagcgaatgtttctgacggaacaagtaagtattttaaagatgaaaaaggagctatcgaatatgcagaaaaattaaccacagaaaataaaaggtttagtgcaggtctgacacagatatacagcaaaaatttcccatcactcaatctgactaataaaacagtttttgacccgtgtacaaatataaaagcaggagcggcagtcctgacggacaattatctgaaacaaaaggagggtagtagtaataaaaaaattctccgcgctttatctttgtattattcgggtaacgaatcaacaggatttattaaagaaaagaaatttaacaacacttcttatctggagcgagttattcgtaacgcgaataactatatcgtgccatcaatccgtgaaaaaactgatgaatcagaaataaaacccccgaatgatgaagagaaaacatcaccggactgggatgtttttggagattttaattaa

SEQ ID NO: 221171 - DNA, 291 bp, Klebsiella pneumoniae
atgaaagtcaaatcaactttgcagtattttatcctggcgtttttcctgtcactaaccgcctccgttgcctatgcaggtggactcgacaccgcaacaaataccatgacagaacttaagacatgggcatttagctttggtggtgtttgtgctttgtgttacctgatctataacgtcatcatggcattcatggagaagaaaagctggtctgatgtaggaatggcgcttgtctattgttccctcgctggcggtgcactttacgccgggaactgggcgctggaactcttcaaataa

SEQ ID NO: 221172 - DNA, 2358 bp, Klebsiella pneumoniae
atgcacaaagtcaaattaaaaaacagtgacaatatggatgttgctcgtgaatatcccgattatcgcttccatgtaacagacagtattatctttacttctgacaggaaaatgctggcttcacttgttgtagcaggcattccatttgagacagagaacgataatgttcttacaaatttatttaacagcgttaaaaacttcctgattgggttaggaaaggaaggcgacctgtatttatggactcatcttatcaagaaaagagcaaccatcaatggagaatggaattttgacaatgattttttaagcaggttttcaaaaaaataccttgctctgttcacatccagcgcattctataaatcaacatggtatctgacatttgggattccctacgatgatgttgataccggaatcgagcgcatgaatgaaatgacacaacaggcgcaaaaagcacttctaccatttaacgcttctttattatccgtttacaatacttatattagtgaagtggcagactatctatcactattgctaaatgcagaacataacatgattcctttatcatccacccccttatcatccagtatttgtgattctgaatggtattttggtgctgatgttcttgaactgcgtaacaacgaatcggatagtaaaaaattcgcaacgaattatattttgaaggatttcccgatagaaacaacccccggacaatgggatttccttctcaagcaaccctatgaatttattcttactcaatcgtttatttttgaatcacccacaaaaaccctgaagaacattgattcgcaattaaacaaactgcaatcagctaatgatgcagccaaaacacaacaggaagaactcgaagctggtaaagaagcggtcgcagctggaattacgttgtttggttcactacactgcgcattaacggtattcggtgatacaccagatcaggccagaagcaatggtataaagctctctgctgagtttattacttcgggtaagggattccgcttcagtcgcgcctcactcgcatcaccttttgtttttttcagtcatatgccgctgaataagaggcgtccactggatacccgaagaacaattaccaacctggcctgtctgatgtcttttcacaattattcctccgggaaaaaatcaggcaatcctattggtgatggctccgccataatgcctttaaaaacggattcaggcagcgtttactggttcaatacacattacagcccaccggaaaaaaatgttaccggacaaaaaattgccggacacgcaatgtttcttggcgcaacaggcacagggaaaacaacatttgaagcaacagccagcggctttcttcaacgctttgaccctttaatgtttgttgtggattacaaccgttctaccgaactttttgtccgcgcatacggagggagctatttcacattgcaggaaggtatctataccggctgcaatccgtggcaactggcagaaggcccggaatcgcccgtctggcacagacttctcgcatttctgaaacgctggacacaggttctggcacgagacaaccagggcaacccctgttctgatgaacatggcattgaattaaacgctgccgtggaaagcattatgcgaatgcctgtcgaagaacgccggacagcccttcttctcgatatagtcagtcctgaacttcagacgcgtctcgccaaatggtgcgacaacggcgaatatgcctgggcggtggattccccccggaataccttcaatccactgcatcataaaaaggtgggatttgatacaaccgttgtcctggacacaaaaaacggtattcatcctgcctgtgaacctttactcgcggtcctgtttttcttcaaagaaatcatgcaacgcggcggcaatctgatgctctccattattgaagagttctggatgccagcaaactttcctatgacgcaagacatgattaaaagcgcactgaaagcggggcgcatgaaaggtgaaatgatgtggttaacatcacagtccccggaagacgctataaactgcgcaatttttgcggcgctggtacaacaaaccgcgacgaaaattctcctgcccaatcccgatgcaaaatgggaaggatataaagaaattgggcttactgaaaaagagtttgaaaaactcaaagagctgacgaaggagtcaaggaccatgctcatcaagcaatctggctcttctgttttcgccaaaatggatttgtttggattcgatgagtttatccccgtgctttctggctctgaaactggcctgtctatttttgatgagattattgctgaaaaaggagatgtagctcctgatatctggataccagaactcctgaaacgcctgaacggttaa

SEQ ID NO: 221173 - DNA, 735 bp, Klebsiella pneumoniae
atggaaaacacaaactattatgaacattcaaaaaaagaagcctccaaaaagaaatttgaagaaaagaacgaaaaaaaggattatttcaaggccatacgtgactttgagcgcagtgaaattgaaatcataaagaaaaaggcaaaaacatttaccattctcgccattggtgaatttgttgtaatttgcattcttggtttcgcaatagcctcccttgctccattaaaaaccgctgtaccgttccttgtgcgagtggataacagcactggatatactgatattgcccctcaattatctgatgctaaggaaagttatcaggatgttgagactaaatatttcctgtcaaaatatctcattaactatgaagcatacgactggcagactatccaggaacaggccgatacagtaaaaacaatgtcttcccaaaaggtgttttcagcttatgacaccatgattcgtgctgattcctcaccactgaacattctgaaaaacaactacaaaattaaggtccagattaattcagtaatccttctaaggaaggatatggcgcaggtgcgtttcaaaaaaatggtactggatttatctggtaaacccgcccccggatacagagcaacagagtggatttcgacgatttcttttgactgggataaagatatcaaaacagaaaaagagcgccttgtgaatccgctgggactgcaagttctgagctaccaacctgatccagaggttataaaatga

SEQ ID NO: 221174 - DNA, 768 bp, Klebsiella pneumoniae
atgcttaaacgcactactgcgatagttcttttgtcgatgctacaagtacctggtgctttagcagctatgtacggcacaccatcggaacgagacgggcgtattcagaccgtagattataacgagcaggatgtatttaatgtgcgcgtaaaagcaggcgcacaaacaacaattaagttcggacaagacgaaacaataaaagatgtcggaattggtgatccagaagcctggtcagtatcggtcagggacaacactctgtttctgcgtccaaaagcagaagaaccggatacaaacgttaccgttcagaccaataagcatatatatcctctttacctgatatcaaccacgaaacaacccacgtatattctgcgctttaattatccgaaaccaccgtcagctaccgtaatgaatgaaaagccatttccatgcactgatggtggaataattaatggtcattatcaactcaagggggacaaatcaattttcccttatcaggtatgggataatggcgaatttacatgcatgagatggactaataaacaggaaattccggtcctttatcgtgttgatgccgatggaaatgaacatctggttaacggagacagaaataaaaacacaatggtttattatgacgtggctgaaaatctccgtttgcgcctgggtgatcaggttgcagatatcagaacatcatcaatcgttaatcgtccgtggaataaaaaaggtacgtcaaacggaaaaacacgagtagagaagttcagctatgaaaaataa

SEQ ID NO: 221175 - DNA, 1140 bp, Klebsiella pneumoniae
atgaaaaataaagatgatgaaaaaaataatgacgcgggaaatcgcggaattatcgaagtaaaaggtaaagcagcaccaaaaaaaatattaatcctcatcatattactgattgccgcgttatttgtgatcattatcttgtttaaagttctttcacgagaacaggtcgttcagcaaacacctcttgagaagtctgacgagacactggtcacaaataccaacaatggcgtttcactgacaacaatgatgaaaaacatcgaagaaaaggaaaaaatcgatgccgctaaccgcaggaaagcacaggaggagcaagaacagaaacaggcagacaatgccccgtcagcgccagcatcacaaaaggccgatcaaacagccgtcaatgtgatagccaacggcactccccaaaccgccagtggagatccaaaccaaccacaaccattgccaaaatccgtccgacaactgatgggcgacacaatggtgaagatcgacaatcaggaaccaggcgaaaaaaaccaggaaagagatgatttacagggcagtcagtacgcagacggaaaggtatcccctgtgctgaaccgccgatatctgttatctgcgggaacagcattatcctgtgtgctcaaaacgaaaatcgtaacctcttatcccggtatcacaatgtgtcagttaacacgagacgtctggtcggataacggcgaagtgcttcttgcccgtaaaggagcattactgatcggggagcagaataaagtcatgacacagggagtagcccgtgtgttcgttaactggacaacgctcaaagatgaaaatgtcaatgtgcgcattggcgcacttggcactgacagtctgggcgcttccggccttcctgcatgggtcgataatcattttggtcagcgttttggtggtgcattgctgctgtcattacttggtgatggtttagatattctgaaaaacagcacgcaacaaacaggctcaaacagcaatatcacctacgaaaacacatctgacgcaacaaaagaaatggcaaaaacaacgctggacaatacgataaatattccccccacggcatatattaatcaggggactgtattgtctgttattgttccgcgaaatatcgacttttcatccgtatatgaacttcagtaa

SEQ ID NO: 221176 - DNA, 1056 bp, Klebsiella pneumoniae
atgaataacatcagagataccagtaatatatcacaaccacgagataacagtaaaaccgcaagacgatatctggatatgacgggtatccagtctgttcttaatattgaacatgtcacagaaatatctgtgaataaaccaggaacaatatggtttgaagggaaaaatggctgggaatctaaagatgcgccagacgcgacttttgataatttaatgacacttgccaaaactctgacgaacttatcaaagataaaaaaaccacttagccatgataatcccattgcatcggtagttcttcccggtggggaacgtggacaaatcatcattccacctgcaacagaaaataacagcgttgtgatatctatccgtaagccatcattaacgcgctttactatagatgattatgtccgaacagggcgttttgataatgtcaggattgcgacgaaacacgaagccatcctgactgaacggcaacgctacctgtatgaattatcccggcgtccagatggtcaatctaaagctcaatttttaagagaggcagttaaagaccgtcttaattttttaatcgtaggtgggactggctccggtaagacaactatagcaaaggcaattgcagatatctttccacctgaacggcgttatataaccgttgaagatgtaccggaaatgtctctgccgctgcatccaaaccacatccggcttttctacaaaaaaaataccgttgaagcgaaggaaatcattgaagcgtgtatgcgattaaagccagatcacatctttcttgctgaacttaggggtaacgaagcatggagttatctggaggcgcttaatacagggcatgaaggctcaatcagtaccattcatgctaataatacttatgcctcattttcacgactggcaagtattgtaaaacaatctgatgttggtatgactgttgatatggacctcatcatgcgcacgataaaaacatcaattgatgtcattctttttttcaaccataccagaatgactgaactgtattacgaacccgaagaaaaaaatcgctttttgagcacaatgtaa

SEQ ID NO: 221177 - DNA, 1959 bp, Klebsiella pneumoniae
atggatgcaaaaaaaacgggggggttaattctcttcctgttactgcttcttgtgggtgtgcttatagcctcaaactatctcggtggatacacagcattaagatattcatccgttgatatgtctttgctcaagtgggatacattccattctgtaatctcaacattttctggcaacccacaatataaaaaactcgtttttatggcatggtttggattcagcgttccattaatattctttgccatattcatgttaattgtcgtgattgggattatgcctaaaaaagtcatctacggtgacgcccggctcgcaactgatatggacctgagtaaatcaggttttttcccggataaaaaatcaccttacaaacatccaccaatactcatcggtaaaatgttcaaggggagatacaaaaaacaatttatttatttcgccggacaacaatttttaattctttatgccccgacacgttctggtaaaggggtggggattgttatccccaactgcgtaaactatccaggaagtatggtcatactggatatcaaacttgaaaactggtttttatcagccggattcaggcaaaaagaattagggcaagaatgctttctctttgcgcccgccggatacgcggaaactatcgaccaggccattaaaggacagatacgctctcaccgctggaatcctctggattgcgtcagtcgcagtgatttacttcgtgaaacggatctggcaaaaattgccgcaatccttatcccggcaagtgatgatcctatatggtctgattctgcacgaaacctttttgtcgggttaggactttacctgctggacaaggagcgttttcacctggaacagaaagccaaaggtcataatgtaccggacgttcttgtttccatcagcgccatactgaaaacgtcggttcccgatggcggcaaggatctcgccgcatggatgggacaggaaattgaaaaccgtagctggattagcgataaaacaaaatcattcttctttaagttcatgtcagcaccagatcgcacaaggggaagtatagaaacaaacttttcatcaccgctgagcatcttcagcaaccctattactgctgaggcgacgaatttcagtgattttgatatccgggatattcgtaaaaagcccatgtcaatttatcttggtctgacaccggatgctttaatcactcatgagaaaattgtaaaccttttcttctcattactggttaatgaaaactgtcgtgaactaccggaacacaacccggacctgaaataccagtgtcttattctcctggatgaatttacatcaatgggtaaatcggaggtcattgaacgcgctgttggttttacagcaggttataaccttcgctttatgttcattcttcagaatgaaggacaagggcaaaaaagcgatatgtacggtcaggaaggatggaccacattcactgaaaacagtgctgttgtgctttactatccgccgaaatcaaaaaatgctctggctaagaagatttcagaagagattggggtgcgtgatatgaaaatatccaaacgctcaatttccagtggtggtggtaagggaggaagttcacgtacacggaatgatgatgtaatagagcgcccggttcttcttcctgaagaaattgtgtctctccgggataagaagaataaagccagaaatattgcaatccgtgaaattataaccagtgaatttagccgaccatttattgccaacaaaattatctggtttgaagaaccagagtttaaacgccgcgtggatatcgcacgtaacaatcatgttgacattccaaacctgtttacacaagaagtcatggatgaaatagcaaagattgcagaaatttatctccctaaagctggaggaaaaaaagtcatggttgccggaggcaatgtgattactaatccagaccttgataatcacgataaaacagacgtatctgaataa

SEQ ID NO: 221178 - DNA, 519 bp, Klebsiella pneumoniae
atgagaataaaacatttgaatatgataaatatgaatatgatgaaagaagccattgatgttttgataaactctgaaaaacatattctgattataggcgaaagtggaactggaaaatcaacacttttaacagaattgctaatcaatgacactgacgttaaacattttgatttctgtgatatttataaacgccatgaacaccatccccctctaaaacaccattatctttgcgatgaaaattttgattattttgactttttatctgtacctgaaaaaacgttggttcttaatagtgtagccatcggtaacaacttacgggaatcaaaagttgttcagtttattgttcgatttattaaaacagccaggaaacgtggcaaacgtcttattgttgtcactactccttcagatggcggcgtgcagatacaaaatcttttcgacacagttatatcgttaacccgctcttacgatgaaataggatgcacagttatcattccagtaccggagttaattaaatatgaataa

SEQ ID NO: 221179 - DNA, 1644 bp, Klebsiella pneumoniae
atgaataaaaaattgctttgtttattaatatcctcttttttattatcaggctgtgcaaacttcaaaaaaatcaatgctaatgaacttgcagccgaaagagacgcacaaaaagcgactgaatacgcgaaaaaaattcgtaataacccggttatccaggactcaacaaaacaatggattaatacaacgccaattattgaaaagcaggtaaagcaatcagcgccgccctgcccgattgtgattaatactcgttcagatattgagctacgccagatcgcacaacgcatcacacaaacctgtcatatcccggtacgaatcagcgccgatgtctggacctatctgaacggtacaggcactggctcaacacaacaaatgacaggctcaattccagcacctgatgcaaatggaatggttcctctggcgtcagtaggcagtcagccagtaaaagtctcttctggcggtacatcactccctgaactgaatatctccgggcttccagccctactgcaaaccgtatcctcacggctgggaatatcctggaaatacgataaaggtcgtatcacattcttctatctggaaacgcgctcattcccgatcacatatatggacagcaatgtggcatacaactcaaaagttgtgagcggcacaatgtcttccagtggcagtaccggctctaccagttctggcggtatgactggcgacgcatcaaatacgcaaactacaaccgtggaaatgaaatcatcgctgtacaacgacctgaaaagcgaagtttcctcaatgctgacaccaggtacagggcgcatgtatctgtccactggttcactgacagtaacagataccccggatgtactggacagcgttcaggagattgtgaacaagcgtaataatgaaatgagtcgtcaggttgtgctgaacgttgaaatcctgagtatcaagaaatcaagccaggaacaggcgggaatcgactggaacgcagtatttaatgatggtcatcttggtctgagtcttggtggctcatttggtaatgccgccgagaatgttattaccagtggtgtatccatcgtggacggtaagctggctggctcaaaagcatttctgaaagccctgtcgtcacaaggcagcgtcagtgtcgtaacgcaaaactccgctgtgactaaaaacctgacgcccgtccctatgcaaattgccaatcagcagggcttcattgaaagtgtcacaaccgattccaccgccaatgtgggatcatccacgtcactgaatgcggcaacaataacgacaggattcaatatgactctgcttccatacattcagccggattcacaaaacctgcaattgctgttctcaatgagtctgtctgacaaacctacttttgaggtgttcgaaagtggcggcagtaaagcacaaacaccgaatgtggatttgaaaacaattaatcagactattgacctgaaatcaggccagacagttattctgagtggattccagcaatcaaaccggaaaaccagtaagcaaggtgtaataaccccctccttctttggacttgggggtggcattaacagcgaagacggcgacacgattctggtcgttttgattacaccaaatgtgcttaattccggctccagtgcagtaataaaaaatgtgaactaa

SEQ ID NO: 221180 - DNA, 1311 bp, Klebsiella pneumoniae
ttgtctgagaataatcagaataaccggaatttcacttcggttattaaaaacaagcgtgcttttttctccggtctggactggaaaacgcttccttcagaagaaaagaatgcgcgtacattcgcaagaaaaaacgacgctgaatattttctctcctgtcagtatcaggattcagaaaatgaaaccaaaacgatggtggcatttatcagaaaagaggatcttcccacaggggcgtcctcattctggtcactggcactgatgataaaacccctcatcgaacctgacggatacgctatctgcgaactcggtgatctttatggctttgtttcctgcgtcaataacgttctcgtcaacgatgttgtaggtaacaaaagtcagatcatgagtgctttgacaacatttcttgagtttaatgaaacaccagaacccggctggaaactataccagcctgaatcatgggatatcagccaggcactcccctcactcactctgtctgcgttgattgacgtaaaaaaaccgccgaaagaggcggcgtttactcgcgtatcccgaaaacgtcagttcatgatttatggcggaagtgccattctggccatactgctctggaacgggatcaccatgtaccaggaataccgggaaaaagaagctgcggcagaagctgcacgtcttcgtctggcaaaagaaatggcagacaaacaggcaatacagattaccccaccgtggcaacatttacctgaaataaaaccatttattgataaatgcattgataaatgggatgcactgcccttatcgatcgccggatggcgttttgaccttgctgaatgcagcacatccggtaatgacgggctgttacgcacatcatataaggaactgagcggcgttacggtcgaggacttcagcacacggatacgagaaatattccaggggacaaccacagcaacttttgtattgccagaaggcagcgccgggggattttctcttcctgtcagttttgacgtttcgcctgatccaattaccccggacacattgccacaggcaacagatattcaggaacgcctgacaacatttgcacaaaaaatgaggttaaaactcacctggcaggaaattgaaaacacaaaaacagatgaagaaggccgtccaataattctcccgtggaacgagtatgaattaatgattcagaccagcaccccgccttcaatacttttcgctaactttcatgaacctgccgttcgcttccagtatgcaggaataaaactggaagaaggaagactgaattatgagattaaaggtgcattctatgttaaaaataattaa

SEQ ID NO: 221181 - DNA, 516 bp, Klebsiella pneumoniae
atgagattaaaggtgcattctatgttaaaaataattaaaccagcaattatttctgtctgttttttcagttcacttgcttacgcaacagaatctgaaagcacgccaaaagacgaaataaaatattcatctccgaccattttacaggtagagcagattcaggctgaaacggtaatttacgaagcaaagctggcgcgtcagaaggctgtcagtgaattgcgtaatcttgatttgaatggtgtagcgtccgcaacgccagcaataacgccctcttccgggtattcttctcttgcagataccgatataccagcgcaacgtgtagccgctaaatcacttcgtgttattgaaatatttggtacaccacaacaaatgtcagcacgaatttctctcctggacgggtcagtaactgatgtcaaggtcgggcaaagtattcctggtactccttataaggtggcatcaatcaccggtaatggcgtctggattcagaatggtacagagaaacgccagcttattctttaa

SEQ ID NO: 221182 - DNA, 1539 bp, Klebsiella pneumoniae
atgtttttttctgacgcagactatcccggaaaagatatttctgatgttgtatacgtcagtatatctgaaaaagacgataaacctgttcatgtttatatcgctgataacagtaaaggacagcgtgctgttcaggcttatattggcactctgaatgttaaatatcccggacaggtaaatataacctggaccactcttgatgttatcgcatcccgctaccaggacagcgaaagaaggtctgattcaaactcatcacaacacttaaacagcaaccaggaaaaggtcattagctacctggcgaaagcaaacaacctgggaagttccgatttgcacatcacacctggtcgggacggttccgagttcacttatgtcgaagcacgcgtgcatggggaactggaaattctggatgtcatcccgcgtaaagaagggctggaattgctgggtgctgcctattctggaatgagcgatgttatcaaaggtacgcagtttgacccggcaataccgcaggatgcacgtatcgcagagaattttctgaagcctgtaaatctttttggggcgcgctattcgcattatccgtgcgtgggtggtgtgtacgcggtcttccgcctgattaaagatgacagcgaggatattcccactttcgaagaacttggctacatgccacaacaaatccagacaatcaggcgaatgttacaacgcccggaaggaattatcgttttatccggccctacaggatccggtaagtcaacgactctgagaacggcttcagaagcctatctgagcacgtttggtttcaaccataacgataatatgcgtctcccccgaaaacgccttttcaccattgaatcaccgccggagggccgcattcccggcgcaatacagacggcagtcagggattccgtcgatggctgggttgacgcgattaaatccgctatgcgacttgatccagacgcgatactgaacggcgaaattcgtgatcacgcatcggcattagcagcaatcaaagcctcgatgacaggccaccttctgctgacgaccttacacgccaacgatgcactgaatattattgagcgccttgaaatggagaatattcaggccaggctgattgcagatcctcttctgtttatcggtctgctgagtcaacggctggtacaaaaactctgtccttactgtaagcgcacttatgctgaaatggcagacaaactgagtacagaagaacggaaactcattgaggaaaattgcctgccggaacaggtccggctgcgcaatcttgacggttgcgagcactgttataaaggcgtaacgggaaggacggttatagcagaagtcgtctcacccgacgcacgtttttttcagttatatcgtcagtccgggcgtctggaagcaaaatcatactggcactatgaacttggaggaattacccgtaatcagcacttattacacctgattaatcatggcctggtagatccgctgtccgcacacttcatatcccccattgacgaagataaatactcaatgctcccggaggggacatggcgataa

SEQ ID NO: 221183 - DNA, 1110 bp, Klebsiella pneumoniae
atggcgataaaagatatatttgagaaactcaattcgatagaaattgatttctctggaatatcccactggctggcaaaatacacattcaggtattccagaataagtttatatgaagatttatctggaatgttaaatgatggcataaatgtaaagcgtgctcttacacacctgattgatgtagaaacagactacggaaagaaaacggggtcttctgcaacctactatatttgttgtgagtgccttaatgcactgaataacacaggggcaatatcttcagcattaaaaaaatatataaaggaggatgaatatcaattaatatccagcggtgaaattcgcggcgaccttgccgggggattagttcaggccataaaaattgtcagaagtcgttctgaaatgacaatgactcttgttatgtcgatgatttatccatccgttctgttttttggttgtctggtaaacatgtatatggtccacgataccataacacctgttttcctttctctcgcaccgaaagaacgctggacaacttctatgcgattactgacagatacgtctggtttcctgatagaaaacgggacgtatattctctgcttctgcatcgtactgtttttcctgatcagatattcgcttgcgcgttatacaggaccaggccgtcagtatcttgattacattcccccctggtcactttataaaacatttaatggtgtaagttttctcttcaacatggcctccatgttaagtattgatattcccgttgcaaaagcactggaaaggctggagaaaaacagcactcaaaacagatggctactcgaacgaataaaagaaataaggagatatgttttacttggacagtcacttgcaatggcaatgaaaagttgcggttatgacttcccatcgaaattatgcattaacaaactattacttcattctgaaaatgctgacaatgcattgatgatgtctaactatgctgataaatggctggaggaagcaaaaggaaaagtcaaatcaacaggagtctggataactgtagtatccgcattaattgttttcgcatttattgtaatgatgattactgctctctacgatgtcagtaacgtcctgcaacactaa

SEQ ID NO: 221184 - DNA, 558 bp, Klebsiella pneumoniae
atgtcttctattaatgttttaaatatgcgttctgttttttcttctctttctgcacgccgtaaaaaagaacaggacaaaggggcaacactgatggaagtgttattggttgttggtgctattgttgtacttgcagcaggtgcatataaactctattcaatggtgcaatccaacattcaatcatccaatgaacaaaacaatgtcctgacagtgattgccaacatgaaatcactgaaattccaggggcgttatactgacagtaactatatttccactctgtataaacaaggattgttaccatccgatatgatcgcagattccactggcgcaagcgcgaaaaatccgtggggcggctccgtcaaaataacagtatcaacggataagtattcctttaatgttgtagaggaaaaagtcccacagaaaaactgcatggcaatggtaaacgccctgcgttcttccagcgcaatctccaaaattaacagcacttccacatcaaccgtcagtgcagcaactgtttgcgcaactgacagcaatacgctgaccttcagcactgattcctga

SEQ ID NO: 221185 - DNA, 483 bp, Klebsiella pneumoniae; identical to SEQ ID NO: 22676

SEQ ID NO: 221186 - DNA, 636 bp, Klebsiella pneumoniae
atgctaaacagcatatttaatacggcgatactttgctgtgcaaatatcgtctgtcaatgctacgcctacaatgaagttaaattccgcttaaataaacttaatgtatcttataaaaccggaacagagaaatattactgtctgatactgacaacgcttgccgttctgtatctttcattaaatcagctatccctgattcaatccataatagtgattgttttctatgccttccttacattaatggcctgtatagaccttctttcatttctactaccacgcctttataccgtgacatttatcttctccggcctgttatatcagacatggaataacaatatattgtctggtttgttttgtgcaatgctgatgttcttcattatgctgtttgtaagactttactttgcatataaaaacggaacggaaagtttcggcatgggagatgtgctacttattgcaggaactggcgtatggtttccaacgcctgagattgcctgttcaattgtatttattgccgttatcggcggaattattttcttcactcttggcggattaaacaagcaaaaaaaatatattccatttggtccgttcctttgtggcggaatgtttgtttactcactcgtaccgggaatattattctga

SEQ ID NO: 221187 - DNA, 1245 bp, Klebsiella pneumoniae
atgaaaaagacagataaaggtgtatctctccttgaggtattacttgtcatcggcataatggtgatggttatccctaaagtttatgaaaacattgaaaaccatctgaataatgttcgctggcagaatgcagcagaacacgcaaatacctataacaccgctgttcgtaattatgttgctgacaatgcatcaacactacttgctggctctttacccaaaacaatcacgccagcaacactcattcagaaaggctatctgaaatctggtttttctgaatccaattttggacaaagctacattaccggtattgcaaagaacagcaaaacatcccgtctggaagccctgacctgtagtaatggcggtcagtccctgtcagaagccggaatgcgctcggtagcaagcatgattgaagggcttggcggctacatcaacagcagcaagcaggcgattggcgcgggtggcggctggtctgacacgccttcaaactatgggctgaactgcgcgaccgggcatattgcaatggcacttgttggcgctgatttgcaggaaagcgaccgtttgtatcgttactccataactaatcgtcccgaccttaacaggatgcatacggcgattgatatgaacagcaacaatctgaacaacgtcggcactttaaacggcaacgccgccgcgctctccggcgatatcagcgcacgtaacggtacgttttctggcgcaatttcaggaaatacagccacaaccaacggtgatatcacttcgaataatggctggctggtcacaaaaaacagcaaaggctggatgaacagcacctatggtggcggctggtatatgtccgattcatcctggttgcgcagcgtgaataataaagggatttacactggcggccaggtaaaaggtggaactgtacgcgctgatggacgcctctatacaggcgagtatttacagcttgaaaaaacagcaacggctggcgcttcctgctcccctaacgggcttgtaggccgcgacagtacaggggcgatactttcgtgccaatccggtgtgtggagggcattaggtggaaagctcaagattactcaactttccagcactggttacttggggcaatttgacttttgtgccattgccagaatgggaaatgctgaggattctcattactgccaggtagtcgagagtccatctggttcacgaaaatggtacaaatacgagcacaagacaggttgtattgcgtcctgtgtaactctcaattaa

SEQ ID NO: 221188 - DNA, 687 bp, Klebsiella pneumoniae
ttgttcgcaccttccttaaatctcaccgcatcctgtgtattactcctcagcagtattgcccacgccggtattgtcattgaatccacccgctatctttataaagaaggtgcacgggaaattaccgcgcaaatcgaaaataaagatgatattccctatctgattaaatcttgggttgaaaccccggcagggaaagcgccttcttttatggctaccccgccgctgttccgccttgagggaaaacagcagaatacggtgcgtctgttttcaactggaaacgttaatgccccgactgaccgcgaatctttgtactattttaacgtgatggcaattcctccggctgatgatgaaaaagccagcaccaataccattcaactggcggtccgccaccgcatgcgcctggtctatcgtcccaagacgcttttcgatctatcccctaatacggaagcgaaaaagctcgaatggcgtaaagctggcactaaattaacgatcaaaaatccgacaccgtttttttactatttccatagcattcagatcggtggcaaagaagtgaaaccagaagtcaactcggtcgctccaatgaccactaaagaggtgacgctaaaagaaaacatcagcgcctccagcattacctggaagatcgtcaatgattatggcggagcagggtcgctctattcctcatcgctgtaa

SEQ ID NO: 221189 - DNA, 327 bp, Klebsiella pneumoniae
atgaactattttgagtcggatttatcaggtgaaaaacagctggaaccgctgccggacttcaatagtatgagccgaaaagagctacgggagctaaatgcgaggctgcgacaggtaagaccgaagcggcggaagggttacaaacaggaaattaacgatcggctgcgcctgcagcttgaacatgagttgaagtccagagggtttgacggcagcgagaatgagatcgatctactgctgcgtggtggcagcattccatcgggggccgggctgcggcttttttaccgcaatcagcggctgcaggaagatgacaaatggcggcagtggtactga

SEQ ID NO: 221190 - DNA, 294 bp, Klebsiella pneumoniae; identical to SEQ ID NO: 214838

SEQ ID NO: 221191 - DNA, 306 bp, Klebsiella pneumoniae; identical to SEQ ID NO: 104005

SEQ ID NO: 221192 - DNA, 726 bp, Klebsiella pneumoniae
gtgatcatggccgatatctttgaggagaattaccgctgttacgactatcggcgccttcacgcgatgcttcgcggtaacaacagggttatttctgaaaaggttgtccgcagactgatggcagaagagcagctcgttgttaagcgcaccaggcgacgacgatacaactcttactgtggcgaaatcggcccggcaccggaaaatttactcgcccgggattttagttcctgcaggccaaatgagaagtggctgaccgatattacggagttccagcttccggctggaaaagtctatctgtcgccggttatcgactgctttgatggcctggttgtaagctggtcgataggaacacgcccggacgcgacgctggtgaatacgatgctcgatgacgcactcgatacgctcaacgaacatgataaaccagtgatacacagcgatcgtggtggccattaccggtggccgggctggctcgagcgtatcaacacctccggacttataaggtccatgtcgcgcaaaggatgctcgtcggataatgctgcgtgtgaaggcttcttcgggcgtatcaaaaacgaaatgttctatggcagagactgggcgggtatcacgctggaaaaatttatctgcttcctggacaggtacatacgctggtataacgagaaacgtatcaagctatcattaggtgcaatgagtcctgtgaagtaccggcagcatcttgggatcacaacataa

SEQ ID NO: 221193 - DNA, 138 bp, Klebsiella pneumoniae; identical to SEQ ID NO: 136041

SEQ ID NO: 221194 - DNA, 351 bp, Klebsiella pneumoniae; identical to SEQ ID NO: 15282

SEQ ID NO: 221195 - DNA, 744 bp, Klebsiella pneumoniae; identical to SEQ ID NO: 15283

SEQ ID NO: 221196 - DNA, 258 bp, Klebsiella pneumoniae; identical to SEQ ID NO: 15284

SEQ ID NO: 221197 - DNA, 270 bp, Klebsiella pneumoniae; identical to SEQ ID NO: 15286

SEQ ID NO: 221198 - DNA, 1686 bp, Klebsiella pneumoniae; identical to SEQ ID NO: 14371

SEQ ID NO: 221199 - DNA, 1434 bp, Klebsiella pneumoniae; identical to SEQ ID NO: 209762

SEQ ID NO: 221200 - DNA, 1134 bp, Klebsiella pneumoniae; identical to SEQ ID NO: 209763

SEQ ID NO: 221201 - DNA, 1428 bp, Klebsiella pneumoniae; identical to SEQ ID NO: 209765

SEQ ID NO: 221202 - DNA, 906 bp, Klebsiella pneumoniae; identical to SEQ ID NO: 6034

SEQ ID NO: 221203 - DNA, 1239 bp, Klebsiella pneumoniae; identical to SEQ ID NO: 6033

SEQ ID NO: 221204 - DNA, 585 bp, Klebsiella pneumoniae; identical to SEQ ID NO: 6032

SEQ ID NO: 221205 - DNA, 765 bp, Klebsiella pneumoniae; identical to SEQ ID NO: 6031

SEQ ID NO: 221206 - DNA, 306 bp, Klebsiella pneumoniae; identical to SEQ ID NO: 6030

SEQ ID NO: 221207 - DNA, 1206 bp, Klebsiella pneumoniae
atgacgaataaccctaccgatgacagcagaccatggtcggtctttcttatttttctgcggcttggattgacatcttttggcggccccattgcgcacttgggctacttccgcgccgaatttgtcacacggcggcgctggctctccgaacggagctatgctgacttggtcgcgctttgtcagttcttgccagggcctgcaagcagccaggtcggcatagcggtaggactgtctcgggctggatacagcggggcgctggctgcttgggctggcttcacgctgccgtctgccatagccttgatcctttttgcgctcggcatctccagctatggcgattacgtctcgcagggcgcgttgcatggcttaaaagtggtggctgtggccgtggtcgctcaagcagtatggggcatggcgcgtaacctatgcacggatgggctgcgagtcaccatcatggcaattgctacctgcgtcgttttacttgtgccgtccgcgtggggacaggttggcgtgattgctatcgcaggcatcgcaggccggttattgttcaagccagcgaaagttgttgagcatgaccccctacctatcacggtcagtcaccgggccggcgtgctttggctctcgctgttctttgtcttgctgattggcctgccggtgttggccgaactgatgccaagtcaaaccatggcaatggtggattccttctatcgtgtcggatcactggtgttcggcggtggtcacgttgtgctgccattactgcaagccgaagtggtgccctccggctgggtcaacaatgaatcctttctcgcggggtacggggcagctcaagcggtgcccggccctttgttcacgttcgccgcgtttcttggtgcctcgatgaacaccgccccgtcgggctggatcggcggcattgtgtgtctgctggctatcttcgcgccctcgttcttgctggtcgtcggatcaatgccattttgggagcgtttgcgccgcaatacaggcatccaagctgcgctggccgggatcaatgccgctgtagtcggcttgctgctggccgcgctgtatcagcctgtatggactagcgccatctttcagccgcaagactttggcttggcattagttgcccttgtcgcacttatgttctggaagctcccgccgtggctggttgtcctcggtagcggtgcagctgggtggctgttgagcgtcgctctgtga

SEQ ID NO: 221208 - DNA, 348 bp, Klebsiella pneumoniae; identical to SEQ ID NO: 6026

SEQ ID NO: 221209 - DNA, 243 bp, Klebsiella pneumoniae; identical to SEQ ID NO: 214890

SEQ ID NO: 221210 - DNA, 567 bp, Klebsiella pneumoniae; identical to SEQ ID NO: 214414

SEQ ID NO: 221211 - DNA, 1521 bp, Klebsiella pneumoniae
atggctatttttcatcttgattttaaaattgtgaaacgttcagaaggtaggtcttccgttgcgaaggctgcctatcatgctcgtacacgtataacagatgaaagaacaggtgatacgtatgattatagccgccgtaccgatttatatgggcatttcatattagctccagttaatgcaccggaacatatcataaaagactctacagcattgtggaatgaagttgaacgggtcgagcgtcagcaaaatggtcaaacatcacgttatttcgatgttgctattcccaccgagttaaacaatgacgacaagaaaaaacttgtccttgagtattgtcagaaaaatttcgttgataaaggcatgattgccgatatcgcttttcatgatcttgatagcgataacccacacgctcacgttatgttgacattaaaaaccataggccctgaaggttttggtaaaaaagaaagaagctggaacgacagaaaaatgtctgtgttgtggcgtgaatcatgggcatctatggctaacagctaccttgctgctgctggttcgtcagaacgtattgatcatcgttcccttcaggcccagcatgaagaggcattagaaaaagcggcggttgctctggataatgaagaaaaagcactatggcttgctaaagccgcagaaacaaaccgccctgcaatgaaacgtatccacagtgccaaatggcgtagtaaggctgctcaggagcaaagggccgcagaacaggctgttcgtgatgctgccaagcaggaagcagttgaagtctacaaaacattcagcgaacttgatcttgaaatcgtcgttgatgtcagaagctttacgattacacatcttgctgaaccagaagagattgtattacctaaaacacgctccggttcttctgccagtgaaccgcaaaaacctgttctggttgccccggcacctcatactcgtatgcgtggcgttaaatcttaccgtgataaatccaaagttagtaaggtcgttgcaggtaagaaaccattggtcaatatttctgattctggaacaaatactattctgaaaacatcctcctctcaacccctaaacagggcatccagaagcgccactgaacgtgttaagagaaaacaggctattccacgtcaggataatatttttaaacgcttcacaactcttgtaattgattttttcaagcagaagtttgtatgggctaaagcaaacaaatcccaaattgatcttatcagtgaagaacatgataagcgtattgctgaaaactatgtctttgatgaggtattaggccgtcatgtttcacgtaatgaatatgaacaacgtgctaaattcaataatgatgaaaaacaaaaacaaactgagatctgcgccacgaaaccagcggcaggtgaaatttatcgtttcccaagtcgtgtgaaaaaatctgaacaacccagtaacacaccagactacatacctacactctcatctggtaagcgcaatgggacaaaattaagaccgccggggttccccccaaaataa

SEQ ID NO: 221212 - DNA, 1389 bp, Klebsiella pneumoniae; identical to SEQ ID NO: 214915

SEQ ID NO: 221213 - DNA, 1851 bp, Klebsiella pneumoniae
atgaacaaaatttcgcctgaaatgcccgaactacaatcaatggatatcactgctgataacatcaccaaacttaaatcattgtttcctgaagcatttagcgaaggaagcatcgattttgatgtattgaagcaacttttgggcgcaaatgtagacgagaaagaagaacgttatggactgaactggcatggtaaacgtcaggcgcgtcagcttgctctcacgccttctcgtggcaccttacgcccatgtaaagatgaaagcgttgattggcataacaccaaaaacctcatgatcgaaggtgataaccttgaagtgttaaagcttcttcaaaaaagttatgccggaaaaattaagcttatttatattgatcctccttacaacactgggcaagactttatttattctgatgattatagagataatttaagtaaatatttaaattttaccggtcaagtaattaacggtaataaaatcagtactaatactgaaactagtggaagatttcatacgtcatggctgaacatgatgtatccaagactcaagctagcgaaaaacctattgcactctgatgggtttatttttgtttcaattgattcgcatgaagtatcaaacttaaaaataataatggatgatatttttggagaggaatgttatagaaatacaattgccgtacgcagaggcattaaaaatgtccaagcccagtttgaagatgtgagtgcattatctcagggacatgaatatatacttttatattcaaaaaacagcttatctcggcttcccaaactaagccaatctcaccttgaacaaaaaccggggaaatgggacaccttttggcgaggaacagataggccaacaatgcgttatgaattatttggtataactcccgaaaaaggccaatggcgatgggaaaaaaacagaacagctgaagccatagaaaactatcgctttttcttagaaaaaaagtctcaacagatgagtcttgacgattggttttttgataatcttacatcaacaaataaaaaattaaatttcgttcgtaagaacgatgaggatgttgttcagtattatgttccaccaagtgatggaaaaatactaagcgataactggatggatatttctttaagcggaaatgaaactattttcgacaccgaaaaaaatactgatttgttagaacgaatcatcaactggatttgtagaagttctaacgatatagttttagactttttcgctggttcaggaacaactggccatgcagtgttgaaaagcaattcaaaaaataatagtaacattcattacatgctcatccaattacccgagccaagcaataaatctgagtttatgactatctcagaattaacaaaatatcgtcttatcgaatcaggtaagaaagtaaaagatggaaaccccgactggaatggtgatgtcggttttcgtgtgtttaaactcgatacatctaacatccgtccgtgggaagcgactgctgaaagtttgtcagaacagattgatgcctatgtaagcccaatccttgaaggccgtagtgaagaagatttactcacagagttaatgctaaaacgtggcatcgacctgagtgtaaacattgaaacccgtcagtttgatggattaaccgtttcttgcgttgacggtggcaaattgtttacctgctttgccaaacaaatccctgcatcttcagtagaagaactgaccaaggggatcatcgactggcataagagtttaaaagttgggaaagatacggtctgctatttccttgatgatgcgtttgaaaataacgttgctaaaacaaatctttgcgccattctggaacagcatggcctgactaacctgcacagcctgtaa

SEQ ID NO: 221214 - DNA, 471 bp, Klebsiella pneumoniae
ttgctgggaattcagtcgaagttctttatcaatatgttcacgaattgtacgcctaatcatatgacgctggatgagcatcgggtcaatatcacccacgacatcaccaacttgcatatagtaggtattagaaggcgtttccagtgtcagatagccttctttgcccgtgcggatctcgcttatcctgtatccctgataaatatcacgccccgtttcgtcatcaagtgccgtaccgtcatacacggtaatctcagaacgattcacgcccccttttttatcggctatatcaacaataacagtcgcgctaatgctattcttcttactgttaatactgaccagttttacataggggctattgcttgcattctggacttcaagcccggcaacttcaatttgtttgaccagtttctgattgtaagcatcaatggcatcgaggcgatacaccatatgatgtttatgcacatgtgtcgctga

SEQ ID NO: 221215 - DNA, 2967 bp, Klebsiella pneumoniae; identical to SEQ ID NO: 185427

SEQ ID NO: 221216 - DNA, 1005 bp, Klebsiella pneumoniae; identical to SEQ ID NO: 92421

SEQ ID NO: 221217 - DNA, 243 bp, Klebsiella pneumoniae
atgagttacggctggctcttcgaaagtccggatgatgacatttcgggtgataatcatatcaatctggaacacctccctcctgagctaaaacaggttgctatccagataggggtcgcctcagaaaacggaatctatggtcactcccgtttttgcaacaccgattttgacgacaagttggcttgcttgacgtataggaaattgaaaaaccagtcgataccattgtccacgccttatgccacgtga

SEQ ID NO: 221218 - DNA, 636 bp, Klebsiella pneumoniae; identical to SEQ ID NO: 104002

SEQ ID NO: 221219 - DNA, 696 bp, Klebsiella pneumoniae; identical to SEQ ID NO: 15277

SEQ ID NO: 221220 - DNA, 753 bp, Klebsiella pneumoniae
gtgccattgcggccggaggaatggctggcagaccggcaagctcgcctcgacatgcggttgcgcgagcttggccgtgccgctcgcgcaggcacgatcccgggcggcttcaccgatcacgtctttgccgcatgtgccattctcggctaccggttcgctccgcgcatccgcgacctgccatccaaacggctctacgcgttcaatccgtcggccgccccggcgcacctgcgagcgttgatcggcggaaaggtcaaccaagccatgatcgagcgcaattggcccgacatcctgcgcatcgccgccaccattgctgccgggaccgtcgcgccaagccagattctgcggaaactcgcctcctatccgcggcagaacgagctcgcgacagccctgcgggaagtcggtcgcgtcgagcgcaccctgttcatgatcgactggattctggatgccgaactccaacggcgtgcccagatcgggctcaacaaaggcgaagctcatcatgcgctgaagcgggcaatcagcttccaccgccgcggtgaaatccgcgaccgttccgccgaaggccagcattaccgcatcgccggcatgaatctgctcgccgccatcatcatcttctggaacaccatgaagctcggcgaggtcgttgcaaaccagaaacgcgatggaaagctgctatcgcccgatctcttggcccatgtttcgccgctcggatgggaacacatcaatctcaccggagaatatcgctggccaaagccttag

SEQ ID NO: 221221 - DNA, 753 bp, Klebsiella pneumoniae; identical to SEQ ID NO: 31906

SEQ ID NO: 221222 - DNA, 1026 bp, Klebsiella pneumoniae; identical to SEQ ID NO: 31905

SEQ ID NO: 221223 - DNA, 777 bp, Klebsiella pneumoniae; identical to SEQ ID NO: 31903

SEQ ID NO: 221224 - DNA, 561 bp, Klebsiella pneumoniae; identical to SEQ ID NO: 5006

SEQ ID NO: 221225 - DNA, 2967 bp, Klebsiella pneumoniae; identical to SEQ ID NO: 5007

SEQ ID NO: 221226 - DNA, 924 bp, Klebsiella pneumoniae; identical to SEQ ID NO: 15297

SEQ ID NO: 221227 - DNA, 333 bp, Klebsiella pneumoniae; identical to SEQ ID NO: 38928

SEQ ID NO: 221228 - DNA, 576 bp, Klebsiella pneumoniae; identical to SEQ ID NO: 38929

SEQ ID NO: 221229 - DNA, 792 bp, Klebsiella pneumoniae; identical to SEQ ID NO: 38930

SEQ ID NO: 221230 - DNA, 246 bp, Klebsiella pneumoniae; identical to SEQ ID NO: 38932

SEQ ID NO: 221231 - DNA, 864 bp, Klebsiella pneumoniae; identical to SEQ ID NO: 38933

SEQ ID NO: 221232 - DNA, 561 bp, Klebsiella pneumoniae; identical to SEQ ID NO: 15275

SEQ ID NO: 221233 - DNA, 2967 bp, Klebsiella pneumoniae; identical to SEQ ID NO: 59353

SEQ ID NO: 221234 - DNA, 408 bp, Klebsiella pneumoniae
gtggtcaccaatgattttgagataacccagctgctgatcgatgccagccagtgcggcgtgatccacaccggcggcactctgtgccgggagaaccgctcctgcgtgggcgaatcggcggcgcgtacgttacgccacctggctatcgatacggcctttatctccgccagcggctgggacagtcgcgggatattcacccctgatgagaacaaggttaccgtcaaggagaccgtcagccaggtcagcgcgagaagcatcctgctgtgcgacagttcgaaatacaatcaggtggccacgtttatggcgttacctttgacccggttcaccaccatcattaccgaccggcatctttccgatgccgccgccagtcatatcgcccggcacgcctgcgaggtgctgcgggccggataa

SEQ ID NO: 221235 - DNA, 321 bp, Klebsiella pneumoniae
atgaaaacgcctctgccgcccgtattgcgtgccgccttgtatcgccgtgccgtggcctgtgcctggctgaccctgtgcgaacgtcagcaccgctatcctcacctcaccctcgacgcgctggaaagcgccatcgctgccgagctggagggcttctacctgcgccagcacggcgaggaaaaaggtcgtttgattgcctgtgcgctgctggaagatttgatgcaggccgggccgctgaaagccgccccgtcgctgtccttcctcgggctcgccgtgatggatgagctctgtgcccgccatatcacatcgcctgtactgcactga

SEQ ID NO: 221236 - DNA, 228 bp, Klebsiella pneumoniae; identical to SEQ ID NO: 215001

SEQ ID NO: 221237 - DNA, 843 bp, Klebsiella pneumoniae; identical to SEQ ID NO: 38926

SEQ ID NO: 221238 - DNA, 609 bp, Klebsiella pneumoniae; identical to SEQ ID NO: 38927

SEQ ID NO: 221239 - DNA, 351 bp, Klebsiella pneumoniae
atggaggtggtagccgagggtgtggaaacacccgactgccttgcgtggttgcggcaggcgggttgcgacacggtgcagggtttcctgttcgccaggccgatgccggcggcggccttcgtcggcttcgtcaaccaatggaggaacaccaccatgaacgccaatgaaccgagcaccagttgctgcgtgtgctgcaaggaaatcccgctcgatgccgccttcacgccggaaggggccgagtacgtggagcatttctgcgggctggagtgctatcagcgcttccaggcgcgggccagcacagcgaccgaaaccagcgtcaaaccggacgcttgtgattcgccgccgtcaggttga

SEQ ID NO: 221240 - DNA, 1014 bp, Klebsiella pneumoniae; identical to SEQ ID NO: 80749

SEQ ID NO: 221241 - DNA, 1200 bp, Klebsiella pneumoniae
atgttgtccggttttactccccgccctctgaaacgtctgttcacagccaaccagtgctggacgtccttcctggatgcgggcggtctgcgcgatatcgaggttgaagccgtcaccaaaatgctggcctgcggcacacggatactgggtgtaaaagagttcgggtgtgataacccggactgtcagcacgtaaagtacctgaccaactcatgcggcagccgtgcctgcccgtcctgcggaaagaaggccacagacctgtggacagcaacacagctgaatcgtcttcctgactgcgactgggtacatctggtcttcaccctgccggacacgctgtggccggtgttcgaaagcaaccgctggctgctgaatgacgtgtgccgtctggcggtggagaatctgctgtatgccgcccgaaaacgggggctggaacccggtatcttctgcgccatccacacgtatggccgtcgtctcaactggcatccgcatgtacatgtgtctgtaacctgtggaggtctgaataagcatggtcagtggaaaaagctgagcttcctgaaagacgcgatgcgttcacggtggatgtggaatatgcggcagctgcttctgaaagcgtggtcagaggggatggcaatgccggagtcgttgtcacatatcacgacggaatcacagtggagaagcctggtgctgaaatccggcggaaaatactggcatgtgtacatgtcgaagaagacagccggagggcggaatacggcacgctacctaggtcgttatctgaagaagccaccaatagcggcttcccgactggctcattacaacggaggggcaagcctgagcttccgttacctggaccacaaaacgggagaaacggcgacggaaacgctgacacagcgtgagctggtcgcgaggctgaaacagcacatcccggagaagttttttaagatggtgaggtacttcgggttccttgccaaccgtgtgtgtggagagaagctgccgcaggtgtaccgtgcactggggatggataaaccggaaccagtggcgaaagtgtgctatgcacaaatggtgaaacagttcctgagtcgtgacccgttcgaatgcgtgctgtgtggctgccggatggtataccgccgggccattgcggggctgaatgtatcagggctgaagaaaaacgcgcgggatatcagtctactgaggtatatgccggcctga

SEQ ID NO: 221242 - DNA, 1260 bp, Klebsiella pneumoniae; identical to SEQ ID NO: 80752

SEQ ID NO: 221243 - DNA, 753 bp, Klebsiella pneumoniae
atgcagcctgtagcaaaagcaatggtcagtttcagcaaagcaacaatcaaacaaagtcaatctggacttgatgtcaaagctcagtctaatgggacaacaagcgctgttatagatgttgcagagcagccactgccagatattcttggtgttctacaggaaaaaaccggactgacaagacgcagtttaagcaccatcctgaaagagagtggaagactcgctgattttgctaaaaatccacagcagtttatcagtgaagctataggccgaatcaactactgcaaacgcctgtcaattgttgatggtattaaatattatccactaaaaggagaggtgtatgcgcaaagtctctttatggataaagagctaacaggatatgcccgtaatctttttgaaacctcgtctaagtcagtttacgaatacgttcctaaagattctgaagtcgaaagccgtttcgctcaggaactcgaagaacaggatgaagttaagctttatgtgaagcttcccggttggtttaaaattccgactccactgggaacttacaatcctgactgggccttagttattgaagacaatggtgaagaacatatttactttgttgtagaaacaaaaagtaaacacattggtcttggtaatgaagaagatgcgaaaattacttgtggaacagctcatttcagtgctttaaaagaagaaaacactaatgcagcaaaatatatcagagcgacaaatcttacagaagtaataagcagcatttga

SEQ ID NO: 221244 - DNA, 276 bp, Klebsiella pneumoniae; identical to SEQ ID NO: 120695

SEQ ID NO: 221245 - DNA, 378 bp, Klebsiella pneumoniae
atggacgaacagtggggctacgtcggggctaaatcacgtcagcgctggttattttacgcctatggcaggatgtgcaggacggtggtggcacgcgtctttggtgagcgtactctggccacgctggagcgtcttccgggcctgctgtcggcctttgaggtcgtggtatggatgacggatggctggccgctttatgaatcacgcctgaagggagaactgcacgttatcagcaagcgatatacgcagcgcattgagcggcataacctgaatctgaggcagcatctggcaaggctgggcaggaagtcactgtcgttctcaaaatcggtggagctgcatgacaaagtcatcgggcattatctgaacataaaacactatcagtaa

SEQ ID NO: 221246 - DNA, 879 bp, Klebsiella pneumoniae; identical to SEQ ID NO: 52347

SEQ ID NO: 221247 - DNA, 318 bp, Klebsiella pneumoniae; identical to SEQ ID NO: 52346

SEQ ID NO: 221248 - DNA, 276 bp, Klebsiella pneumoniae; identical to SEQ ID NO: 120695

SEQ ID NO: 221249 - DNA, 378 bp, Klebsiella pneumoniae; identical to SEQ ID NO: 221245

SEQ ID NO: 221250 - DNA, 981 bp, Klebsiella pneumoniae; identical to SEQ ID NO: 95379

SEQ ID NO: 221251 - DNA, 816 bp, Klebsiella pneumoniae; identical to SEQ ID NO: 195523

SEQ ID NO: 221252 - DNA, 684 bp, Klebsiella pneumoniae; identical to SEQ ID NO: 216766

SEQ ID NO: 221253 - DNA, 498 bp, Klebsiella pneumoniae; identical to SEQ ID NO: 15298

SEQ ID NO: 221254 - DNA, 603 bp, Klebsiella pneumoniae; identical to SEQ ID NO: 138615

SEQ ID NO: 221255 - DNA, 780 bp, Klebsiella pneumoniae; identical to SEQ ID NO: 15299

SEQ ID NO: 221256 - DNA, 606 bp, Klebsiella pneumoniae; identical to SEQ ID NO: 125641

SEQ ID NO: 221257 - DNA, 606 bp, Klebsiella pneumoniae; identical to SEQ ID NO: 170890

SEQ ID NO: 221258 - DNA, 519 bp, Klebsiella pneumoniae
gtgcacgacgacatcattccgtggcgttatccagctaagcgcgaactgcaatttggagaatggcagcgcaatgacattcttgcaggtatcttcgagccagccacgatcgacattgatctggctatcttgctgacaaaagcaagagaacatagcgttgccttggtaggtccagcggcggaggaactctttgatccggttcctgaacaggatctatttgaggcgctaaatgaaaccttaacgctatggaactcgccgcccgactgggctggcgatgagcgaaatgtagtgcttacgttgtcccgcatttggtacagcgcagtaaccggcaaaatcgcgccgaaggatgtcgctgccgactgggcaatggagcgcctgccggcccagtatcagcccgtcatacttgaagctaggcaggcttatcttggacaagaagaagatcgcttggcctcgcgcgcagatcagttggaagaatttgttcactacgtgaaaggcgagatcaccaaggtagtcggcaaataa

SEQ ID NO: 221259 - DNA, 315 bp, Klebsiella pneumoniae
atgcagatcaaataccggatttatatggctcacgcgttccatgccttcaggcaacaatgcatggactgccagttgcgacacgaccgaagatcaaaatggttcaattacagtttacgccatttgccagtgacgatacttatcactggcaaaccacgatgtaactacatttccccgataggtcagttcggtgagtaccgccataaaagttgtattcgtcatagaagccgcatttcacaattcgattggcatcataggttgcaactgaccccgcaaaataattcggcttccacccgtgcggattttctgcattactga

SEQ ID NO: 221260 - DNA, 477 bp, Klebsiella pneumoniae; identical to SEQ ID NO: 215033

SEQ ID NO: 221261 - DNA, 222 bp, Klebsiella pneumoniae; identical to SEQ ID NO: 216949

SEQ ID NO: 221262 - DNA, 318 bp, Klebsiella pneumoniae
atggccctgctgcttacgatagtgtttacgacgacgaaacttaacgattttaactttctcgccacgaccgtgagcaacaacttcagctttgattacgccgccctcaacgaaaggaacgccgatcttgatttcttcaccgtttgcgatcatcagcacttcagcgaattcaacagcttcgccagttgcgatgtccagcttttccaggcgaacggtctgaccttcgcttactcggtgttgtttaccaccactttggaaaaccgcgtacatataaaactccgcttccgcgcacctctttatgtgattcagagtgcgctataa

SEQ ID NO: 221263 - DNA, 846 bp, Klebsiella pneumoniae
atgagattgacggttctggttgataataatacattaattgacaggtaccttatcggtgaacctggtgtgtcttatctgattgagtatgatggtcaaaaaatccttttcgataccggatattcggatgttttcctgaagaatgcgcagacgctgaaaattgatttaaccagtatcgatagcatcgttttttctcatgggcataacgatcatacctgggggctaaatcatttagttcaatattatgaccggataaatttcattcctgaaagaaagataaacttaatctgtcacccagatgcattaaccccaaaatactttgatgcaaaagccatcgggataaactacagattcgatcaaaatgatcccttttttgacaaaatttgcagcaaaaaaccttatccactcactgaaaacattatcttcctcggtcaaataccaagggacaataaatttgagatgctgacaccggtaggccaaacggtggatgataaaagcgaaattacagatgattacgttatggatgattctgcgctggcaataaaaacagaagatggactggtggtagtcacaggctgttctcacgcgggaatagctaacattattgaatatgcaaaacaggttaccggagaaaaacacattgtttcggtcattggcgggttccatttgcaaaatgctgatgaagatcgcctcacgcagacaggggattaccttaaagtattgtccccagactccgtctatccgtgccattgtaccgatcttgcggcgaaggttagcctggcgcgttttatcaaaattaacgaggtcggcgttggattaacgctgaatttttctgccaccgggaaataa

SEQ ID NO: 221264 - DNA, 234 bp, Klebsiella pneumoniae
atgtttatgaagaatggaattattctatcaatcgcagatcgtatcaaagacgcgtttcccataccaacagacgaattcagaaaaaggcttgaagaggactgttatgtaatatggaagttgccgcaattttatacctggcaaatcaccctatcctccatcattcccgcctgtactgattatattgaagcaataaatgcagaggtacatggcgcttatggttctgcccgccattaa

SEQ ID NO: 221265 - DNA, 573 bp, Klebsiella pneumoniae
atggcaatggtcaatgaaaatatcgtcattcgtctggcgcaagacgtagacatccctgaggtgaaacaactgctggagcgctatcacgcaaaaaatcttgcaggcgagcaacgggcgaatggatttgtcaccaccgatatgacggagcagcaattaagcgaactaagttcagccgaaagtggtgtggtgatcgccgttgatcgttcatgtgacaaggtcattggtctgctgctcggcggatcgtgggaatttctcagcccgtggcccatgtttaaatacatggcaagtattctcaacgaatatcgctaccagggggaaaaactggatgcagtaagctcatatcagtatggccctatctgcgtcgcagaagagtatcgtggccggggcgtgggcgagatgctgcttgagtatcagcgcaaggtgtttgcaccgcgttatcccgtcatcgttacctttgtcaatgtgctgaacccgcgctcgtatgcgtttcatacccgcaaccagttcgaagacgtcggtttctttaacttcaatggcaataagtaccacatgatggcattaccgacctcctga

SEQ ID NO: 221266 - DNA, 501 bp, Klebsiella pneumoniae
atgcgaatcagattactatctcgaatgaatatagtcggttcaattaccgcaattatcctatttatcacttttgtttcgttggcaatcgacaactggactgaatggaaggcacaacactcagatacaatgacttgtgatgctatcattaatgttcataaagagcatcaactactgtccattcgtttgaaatactctttccttggtcatgaaggagtagcaaatttatctggcgtgctgaataacggtaataaaggtatttttagtataagcagaactgttcttttcaaatataagcgtattaatgagggagtttatcttgaaaatacaaccactactatatcattacaagatactgcaggcccagatggtctaaaaaagttgcttccagaattctatactgaacatggggcccgcaccagttttcaagtatacgcacaaaaacccggtgggtacatttttgttaaagaatttactcctgctttttactgcacagaacaataa

SEQ ID NO: 221267 - DNA, 846 bp, Klebsiella pneumoniae
atgcttgaagaggagtcggtgtgtcattcagaaccgactttatacacaattgaaggtaacattcatttttgtcctaatgaaaatactcttcgtaatgtaattgatgggcgaactgtaaccctcctgagtacagcatcagaatgttttaagatcctgatagagaatcaaggtagagtgatctcaagagatgaaatgaaagagctagtgtggggtaagcgtggagtgattgttagcagtaatactttttatcaaaacatgctgaacctcagaagaggcctggaaaaagtaggtgccggtaaacgcctaatttcaactcattatgggaaaggtgtaactatagacaatgggttagatataaccccaatagtaacttcagtgagtaattgcctggaacctataaatggcaccaagaacatacctttcagcacatctgaagctattaacactgctgatgagcactttctaaataactttaagcagttagaagaaaaaggtatcatcaaaaaaaaccggtacaagcacggtatgatactgataactaatctgctacttttgtttttctgcatcctgatgttctatactgctcacaatttaaagagggaaaattactttagtcattatacaaaaacaaagcttaaagttaaaaattgcgacatatatacagatccagccctgctgaatgaacatgaattaaatgaattgctaaaacagaaccctcctgactgtgaagaaggagaaactttatacttatcttcagtctatccgatacaaaggatgtcagtaatacgctgtatcgggactttcctgccgggggaagaatgcgaatcagattactatctcgaatga

SEQ ID NO: 221268 - DNA, 648 bp, Klebsiella pneumoniae
atgaagatagtcgttattagtgacaactttttttttcggaacgcgttcgctacgactattaaatctagtaagacggtaatgtctgaggatgcctttattgtgagctcaaagagttatgatggagctattgtgatcatcagtatcgcaaataaagatgtcatgcttaaaattctgggtgaagtaatgaaaatgaatgtgctcaaaatatttttagaaccgttgcattggccatctagaatgaatgtatttaaaatgcacaatgtatatatagttccctacagaatgaaactaaatcagtttatagagactatagaaagttgtatgttggcattggcaagcgtgataagcatcaatccagaaaagataagaggttcggaatggagcacgatgctatatttaatgagcggtatttcaaaccgtcaacttgcttatatgcttaagacttcagaaaaaaccctaagcgggagagtaaacaacttagctatcaaactcggtttggttggttttaataaagctttgcaattgagagcaatgaatttgttttacctgatttataccttaaataagccagctgaaaaaagaaactattttatgaaacagcaaaaggccattttagaatctgtcaaaaaatggtttgcaattgtgtag

SEQ ID NO: 221269 - DNA, 549 bp, Klebsiella pneumoniae
atgaatgcaaaaatttttgtaattgcagcgatgtctgctctatctttaagctccgccgcggctttggctaataccaccaccgttaatggcggtacagtgcattttaaaggcgaagtcgttaacgcagcttgtgcagtagatgctggttccatcgatcaaactgttcagcttggccaagttcgttcggcgaaactggctacggcaggtagcactagctccgctgttggcttcaatattcagttagacgattgcgatacttccgttgctaccaaagcgtctgttgctttctccggtacctcagttgatacaactaacaccagcgttctggcgcttcagaattctgctgctggtagcgctaccaatgtaggcgtacaaatccttgataaaaccggtaccccgctggcactagatggagcatccttcagtgcagcgaccacgttgaacgacggcaccaatatcattcctttccaggctcgttattacgccactggcgcggcgacagcgggtactgctaacgctgacgccaccttcaaagtgcaatacgagtaa

SEQ ID NO: 221270 - DNA, 513 bp, Klebsiella pneumoniae
atgtttctgctacccccgctggcgctagctggtgatcactggaacgtcatggtagctgggggaagtttgcaattccatggggtcattattgcagagtcttgccgcgtggaagtaggtgatcagcagatgactgtgaatatggggcaagtcagcagtaatcgctttcattcaacaggggaggatgccagccctgtgccattcgatatacaccttcaagattgtagtacaaaggtcagccagcaagtcggagtatcgtttcgcggcgtagctgatggaaaaaatccagatgtgctctctgtaggggaggggccgggcatcgctactggcataggtatcgcgttttttaataaagaagatcagctgattcccttgaatggtccaccttccctctggcagaggctctataccggtccaaccacactacattttgtagccaagtatcgggcaactggtaagcaggtcactggggggatggcaaacgcacaagtatggttttctctcacctaccagtaa

SEQ ID NO: 221271 - DNA, 705 bp, Klebsiella pneumoniae
gtgaataaaagattgcgaattacaagaagattttgggtggggctctttttactagccacaagcagttattcgaccatggtacaggctggtgtcgcgctcggtgctacccgggttatttatccagctggacaaaaacaagtgcagttgggtgtaacaaataatgatgatagtaatacctatttgatccagtcttggatagaaaattctgaaaatgaaaaagatggtcgtttcgtcattacaccaccacttttcgctatgcaaggaaaaaaagagaatattttacggattattgacgctactaataaccagttgccgcaggatcgggaaagtttattttgggttaatgttaaagccatcccatcaatggacaaatccaaacttagcgataataccttacagttagcgattatcagtcgcattaaactctattatcgtccggcgaaattagcgctagcgcctgatcaagcagcggaaaagctcacttttagccgcagtggatcatcgttgacgcttacgaatcctactccttattacctgacggtgaccgagctcaacgccggaacccggatactggaaaacgcgttggtgccgccgatgggtaaaacttcagttaaattgcctccagatgctggtagccgcatcacttatcgcacaattaatgattacggagcactgactccaacgatgaatggtgtattgcgttaa

SEQ ID NO: 221272 - DNA, 2634 bp, Klebsiella pneumoniae
atgtcacatctcaaatatggactggaccgttttggttcctctagcacaaggtttcttccttgcgctatctctgctatggctaaactctttatggcgttcttttttattctgtcggaggggcatgcgcagacagagatctatttcaacccgcgctttttagctgacgatcctgcttcagtggcggatctgtctgactttgaaaatggacaggaggtaccgcccggcacttaccgcgtcgatatctacctgaacgatggatttattaccacgcgcgatgtcacctttaacctcggcgaaaaaggtcatggattagatccttgcctggcccgcagccagctggctgggatgggcgtgaacatcgaggggataaaaggaatcgatcgccctaccgccgatacctgcgttccgctaaccaaacttataaacggtgcgacgactcattttgatgttggtctgcaacggttatatctcaccgtacctcaggcttttatgggcaatcgtgcgcgtggctatattccgcccgaacaatgggatgccggcattaatgctggattgctcaactataacttcactggtaacaatgtgcataacgataccggcggcggcagcaattatgcttggttaaacttgcaaagtggacttaacctcggtgcctggcggctacgcgataatactacctggaattacactagtgacgacggtacttcacgcaacaaaaataagtggcaacacgttaatacttggctggagcgcgatattacgcccctacgttcacgcctgaccctaggagatagttataccaatggagatatttttgacggcttcaatttccgtggtactcaactcgccagtgatgacaacatgttgccggatagccagagaggctttgcgccagtaatccatggtattgcccgtagcactgctcaggtctctatcaaacaaaatggctatgagatttatcagagtacagtaccgcctggtcccttcgcaattaacgatctttatgctgcgagtagtggtggcgacctacaggtcacaattaaagaaaacgatggtacccgtcaggtctttagcgtgccgtggtcaacggtacccgtgctacagcgtgaagggtatacccgctatgcgttgacagccggagagtatcgtagtggcaacgttcagcaggaagagcctaagttctttcaggggactgttttacatggtttacccaccggatggacaatttatggtggcgctcaacttgctgaacgttaccgagccgtgaacctcggcatgggaaaaaatatgggtgattttggtgccctttcactggacattactcaggcgaacgccacgttgtctgactacagcgatcatcagggacagtcaattcgctttctgtataacaaggcgctgagcgatgtaggtactaatatccagttagtgggttatcgctattctacaaaaggttattacaattttgctgatactgcctatcgccggatgagcggttacgacgtacagactcaggatggcgttattcaggtgaaaccgaaattcactgattactacaaccttacctggaacaagcgcggcaaagtacaggtgaatgttacccaacagttaggacgtactgccacgctttatttgagcggcagcaatcaaacctactggacaacaggtaaggcagaccagcagttgcaagcaggactgagcgccgcggttgaagatatcaactggacgctaagttacagcctgaccaaaaacgcttggcagcaaggacgtgaccagatgctggcggttaacgtcaatattccatttagtcattggcttcgttctgacagccaatccttatggcgccacacctccgctagctacagtatgtcacacgatcttaatggccgaatgaccaatctggccgggatttacggcactcttctggaagataacaacctgagctatagcgtacaaactggctatgccaatggaggagaaaccgatactagcagcactggctatgccgcactgaactaccgtggcggctacggtagtgccaatcttggctacagtcgcaatgatggattcaggcaactctattatggcgtcagtggaggcgtgctggctcacggggacggtgtgaccttaagccaaccgctgaatgatacagtggtactagtgaaagcgccgggtgcggatggggtcaaagtggaaaaccagaccggtgtgaccaccgactggcgtggttatgcggttgtgccttacgccactgagtatcgggaaaaccgagtggctcttgataccaatacacttgcagataatgttgaccttgatgatgcagtagtcagcgtggtgcccacccacggcgcgattgtgcgagcagatttcaaagcccatgttggtgtcaagttgctgataaccctgacccgtaaaggtaaaccggtaccgttcggtgcaatggtgacttcaggcagcagtcagagcggcagtattgtagctgataacggtcaggcctatatgagtggcatgccgcttgctggaagcctacaggttaaatggggtgaaggggtgggagctagctgtgtggcccgttaccgcttgccggaggagagtcagcggcagtcgctgagccagctatcggcagaatgccgttaa

SEQ ID NO: 221273 - DNA, 528 bp, Klebsiella pneumoniae
atggatacaccacttaaccttctgagagctgcactgatcttaatctgtgcgaacgcttttgcggctgacagtaccatatcaatcagcggctatgtgcgcgataacgcttgtgcggtcgccatcgaatcgaaagaatttaccgtcgacctgatgaataatgctgtgaaacagttcagtgccgttggatctgtcactccagcgttaccgtttcgcatcgtgttatcaccttgcggcagctcggctacggcagtgaaagttggctttaccggcactccggatagcaataatgacaaacttttaaaaatcgatagtgatgcttttgccgcatcggggatggcggtacagatcctggacaatcagcaaacgatgctgcccataaatgcggctgcatcatcaatcgcttggacgaatttgacacctgggcagaccaatatcttgggtttttatgcgcggctgatggcaacccgtgtaccagtcaccgctggccatgtttatgcgacagcaacctttacccttgaattccagtaa

SEQ ID NO: 221274 - DNA, 474 bp, Klebsiella pneumoniae
gtggggttactgtccatgagcgtcagcacgtcacagggcgccgatatcaacattacggtgaacggtcgagtggtggccaggccgtgtaatatcgcaactaccaacgctagtatagatctcggcgatctctttaccttcagcctaaagtcagctggttccacttcagcgtggcacgacacggcgcttagtttaaccaactgtccaattggcacctcgcgggtggtcgctacctttagcggtatggtggacaatacaggttattataaaaatcagggaacagcgggcaatattcagctcgaattgcaggacgacagcggtaggagacttaataatggggcagcgaagttagtacaagttgacgatagctctcagtcggcgagttttccgctcaaggtacgggtactatctgtgaaaggtggtgctacccagggaactattcaggcggttattaacgtcacctacagctatgcttga

SEQ ID NO: 221275 - DNA, 927 bp, Klebsiella pneumoniae
atgaataaacttatccctcagtttaccgtcttgctattagcaggctggtctatcaatgtttgggcattttcttgtatggatgcttcaggccaaactcttcacagtatggctggtcctggttctgtgaatgtatacgtcaatcttcagcccactattgcagtagggcagaacttagttgttgatatttcccgttcagtggtgtgtaggaatgatgctcctacacatcgtaatgataatgttatgatgctttttggttcgatgtatggtggggctctatctaactttactggtactcttcgatactatggctcttcctatacttttccattgagaagcgctacatctcctcataattttacatcaggtagttatgtaccctggaatactcagctttacttaactccaatttctgcagcgagtagtgtcgcgattaaaggtggtacgagattcgcacagttagtaatgtatcaggtagggtctgatattacgagcggaggtaatattcagaccgtaaaatttacatggaacttatactcaatgagagatgtagtcgtccctactggtggctgcgatgtttctgccagagatgtcacaatgacgcttcctaattatccgggatcgatggccgtgccggttaccgttcattgcgcacagaatcaaaatcttagttactatctctccggtacgactacagatagtgcaaattcgatatttgctaacactgcttctgcctctccagcacagggcgttggcgtgcaaatgacacgtaatggagcgattgtttctgcaaacaacactatctctttggggacggtaggcccttcaccggtgaatctcggtttaactgcgaattatgcccgtaccataggtcaggttactgcgggaaatgttcagtccctcatcggagtaacatttatctatcagtaa

SEQ ID NO: 221276 - DNA, 858 bp, Klebsiella pneumoniae
atgatggttgagtcttttacgcagcaggtcaactgctttacggatagccgaaaagaatgccaggcagtgcaagctttggccacgcccaccccttttgaaagcgagctagttcatgccattcagaacggtcaggtctatcctgtcttccagcccattgtcgatatccatctgcatattaaaggcattgaagtgctctcgcgttggcgaaaggacggcgtcgttctgctaccaaccgagtttctgccgaacatacagtcagaagccatttggttctcgcttacagctttcgttctgcaagaagcggtgcagggtatcaatcgctatcagggcgaattttattttaccgtcaatataccgacctgcatcgcgcaccatcaccatcttatctgtttgatggaaactgcatggttgcagttgcataatccgctgtgggccgattgtctggtgttagaatttgctgaaactgtcgacctcacacaacaaggaaatacgatagcgaatatgcggaaaattcaagaacgaggctttcgtatctttcttgatgactgtttttcgcaaaacagcgtgatttttccgataaggttggcacgtttttgcggttacaaactggataagagtattattaacgatttccaacgcgacccacatgctatggcattgataaaaagtcttatctattactgccagttaacgcagagcgattgcatcgcagagggggtagacagtttggaaaagttcaataaattgaaggggatggggttggtttttttccaaggctatttgttttcgcagccggttgaacttgaacacatgatgtgcatgataaagaaatctaaagattgttttaatattcaataa

SEQ ID NO: 221277 - DNA, 1992 bp, Klebsiella pneumoniae
atgtcctcacgtaaagagcttgctaacgctattcgtgcgctgagcatggacgctgtacagaaagccaaatccggccacccgggggccccgatgggtatggctgacattgccgaagtgctgtggcgtgatttcctgaaccataacccgaacaatccggcctgggctgaccgtgaccgttttgtgttgtcaaatggccatggttcgatgctgatttacagcctgctgcacctcactggctacgatctgccgattgaagagctgaaaaacttccgccagctgcactccaaaaccccgggtcacccggaagtcggctacaccgcaggtgtggaaaccaccaccggtccgctgggccagggtatcgctaacgcggtcgggatggctatcgccgagaaaaccctggcggcgcagttcaaccgtccgggacacgatatcgtcgaccactacacctacgccttcatgggcgacggctgcatgatggaaggcatttctcacgaagtgtgctccctggccggtaccctgaaactgggtaaactggtggcgttctatgatgacaacggcatctccatcgacggccacgttgaaggctggttcaccgacgacaccgcgaaacgctttgaagcctacggctggcacgtggtgcgcggcgtggacggtcacgacgctgacgccatcaaacgcgcggtagaagaagcgcgggcggtcaccgacaaaccgtccctgctgatgtgcaaaaccatcatcggcttcggttcgccgaacaaagccggcacccacgactcccacggcgcgccgctgggcgacgccgaaatcgccctgacccgcgaagcgctgggctggaaacacgcgccgtttgacatcccgtctgacatctatgcccagtgggatgccaaagaagccggccaggcgaaagaagccgcatggaacgagaagttcgctgcctacgccaaagccttcccgcaggaagcagccgaattcacccgccgtatgaaaggcgaaatgccgtctgacttcgacgcgaaagctaacgagttcatcgcgaagctgcaggccaacccggcgaaaatcgccagccgtaaagcctcgcagaacgccatcgaagccttcggcccgctgctgccggaattcctcggcggctccgcagatctcgcgccgtccaacctgaccctgtggtccggctctaagccgatcaacgaagacgctgccgggaactacatccactacggcgtgcgcgagttcggtatgaccgctatcgccaacggtatcgcgctgcacggcggcttcctgccgtacacctccaccttcctgatgttcgtggaatacgcgcgtaacgcggtacgtatggccgcgctgatgaaacagcgtcaggtgatggtctacacccacgactcgatcggtctgggcgaagacggcccgactcaccagccggtagagcaggtggcttccctgcgcgtgaccccgaacatgtccacctggcgtccgtgtgaccaggttgaatccgcgattgcgtggaaatatggcgtggagcgtcaggacggcccgaccgcgctgatcctctcccgtcagaacctggcgcagcaggagcgtaccgcagagcagctggcgaacgtggcccgcggcggttatgtgctgaaagattgcgccggccagccggagctgatcttcatcgccaccggttcagaagtggagctggcggttgccgcatgggacaaactgactgccgaaggcgtgaaggcgcgcgtggtttccatgccgtccaccgacgcgttcgacaagcaggatgcggcttatcgcgaatccgtactgccgaaagccgtgaccgcgcgcgttgccgtggaagcgggtatcgctgactactggttcaaatacgttggcctgaacggcgctatcgttggcatgaccaccttcggtgagtctgcgccggctgagcagctgttcgaggagttcggcttcaccgttgataacgtggtcgctaaagcgaaagcgctgctgtaa

SEQ ID NO: 221278 - DNA, 762 bp, Klebsiella pneumoniae; identical to SEQ ID NO: 217054

SEQ ID NO: 221279 - DNA, 258 bp, Klebsiella pneumoniae
gtgagtaaaaaacaagaaacgccgaacaccggctatgcaattatcagatgcgacgatggggtgatcgttgcccgtctgacatcctttcctgtgtgtgagcgcgctctgatgtaccggcgcggcgacactgtttcgtttatgcctttgcagccggatgagatagtggggactctctctcttttttcacagatgattgaaaaggctaggtctggagttggttaccaggttccccctggttctgttacaatcccgtcatag

SEQ ID NO: 221280 - DNA, 978 bp, Klebsiella pneumoniae
atgactcttctggtgacggctgaatgtgttgacgatctgttaaacgatgtccatcaggcgatccttactggcggactctggaatactcccactaaaggagcaaatattgaaattctgggagcctacctgattctcaccgatcctcgccgcagaataagtaggacagaatcccgcggtaaaattgtcagctgtctgggggaattgctatggtacctctcagcccagaacgatctcgatttcatccggcacttcatacctcgctacgtaaaatacgctgaatccgacggcagaatacacgggggatacggtccgagattatttagtatgcacgggctgtataatcagttggaaaatgtcatcagtctgctgcaggagaaaagaactactcgacgcgcgctgatacaactgtttgatgcctcagatctggtgacgggtaatccagagcagacagaatatgccgatattccgtgcactatatcgttgcaatttattgtcagacaagatgcattgcatctttttgtctgtatgcgctctaacgatgcctttatgggcttaccccatgatgtgttctccttcacgatgttgcaggaactggtcgcccgcctcaccggatgcaaactggggtattatcatcacttcgtctcaagcctccatatctatgaagaacattttgaacaagtaaaagcgctacaacaagaaggctttatgagtaccttgccggtgatgggtgatatgcccgaaattcaatccttaaaggacattacagtcatccttgaagcagaaaaggctctgcgggaaaacaaggaatttaatatcgatactacgcccttgagtgactactggaaggatcttctgcgcgtgataaaagtccattttttgttacgttcacatacgtcggcacacaacgagctggcccgtcaggagctgactgcgttgaataatcaggaataccgatttatttttgacgggaaaatataa

SEQ ID NO: 221281 - DNA, 945 bp, Klebsiella pneumoniae
atgaacagacacagtcaggcaagccagttggtcgccgctcttcaaaacttcagtcgcgataaacatatcctaaacggactgagttctgcggctcactataatgtattagcctttcagattattgacagtattcgccgcattcgctatatgtcaacgctgacatcacgaaccgattatatgaatccgctaagaaaagagccaaactcagatttatttgatcctcttcgtgctgcgtgtctgcatctgcgtgaaaacaactatgacgaagcctgctggctggtttttctggccacgcattttggccggagtagtaaaacaggctgggttttgtgccgcgatatttacagtggactaggtacccagacgtggacatgggatgccataactgatgactttgatgcatttgaacagtggtttgccagcgtttctgatgagctgaccctacatagcagtctaagacagtatggtaaccaccgcaaatatgaaacgaaaaaatatcattcacgtcgttctatacctgtcgtttttcgttcatatctcggatttattggtgcaacatacagccacgaggcccggtttgcagaagcaaggagcctcgcggcaacacctgctactcttttcgaattgctgtattcaggcctgaatgcggtggtttcattcggacgaaccgcccgatttgattacctgactatgctaagaaaaaccggactcatcgaggcagaaccggggcatgcttttttgaagggagctactggccctcttcaggggagtcggctgctgtttagtaacagccggagcgcaggtgataggctagagactctgaatgataaactggctgaacttgccgaaattatccctgcaccatatctcaggatgcaggtcattgaagacgcgctgtgtaactggcagaagtcacctgatcgctacgtctattttggcggctga

SEQ ID NO: 221282 - DNA, 1083 bp, Klebsiella pneumoniae
atgatggtaacgcaggacttccagcctgactgggtatctccacccggtgatacgattatagatctgatggatgaacacggaatttctgatgaggagttgagtaaaaaaataggcttgtcccttgatcggggtcagcaacttcttgaagggaaactccgactgaatccgtccctggccgacaagcttgaagagctgttcagtgtgtcgacggacttctggatcaggcgcgaagatgcttatcgcaggcaaatagaacatatccagaaagttaacagcgactggctggaatcattgcccgtacgcgatatgatggagtttggctggatcccgaaaaccacaacgcgggaaagtaaattccgacactgtctgtcgttcttcggtatacactccgtgagtgagttttatcacaaaatacattctgatgctccactggtcgcctttcgtaaatcattgaatctgacgactgagcctgtcgctgatctggtatggctgacccgtgcagaacagttgagtgcaaaacaggtctgcgcagaatggaataaaaaggcgctgcaggcgcttttgccggagcttcgtagagcaacaaacgaacctgatatgggaatttttatccctcacattcggcggcttctcgcgactgccggggtttcgctgatcgtgttgccaacgcccaagggatgccgggccagtggtgccacctgctttttcactccagaccgcgccacgctggtcatgagtttccgctatcttaccgatgaccatttctggtttacgctgtttcatgagattgggcatctcattctgcacgaggcagtgcaggttcgtgcggaaggtaaagaaggcctgtcgacagaagaggaaaaagaagccgatacatttgctgtagacgtcctcattcctgaggaatacaggcagcaactcaggcgctatggtgttcggcactggagggacatcgtccgcacggcccgtaaaataggcgtatcaaaagggattgttctcgggtacttacaacatgagggcaacattcctttttctcaccttaaccggcttaaggtgagatacagtaaagaagacattgtataa

SEQ ID NO: 221283 - DNA, 279 bp, Klebsiella pneumoniae
atgcacaatgcgaatgagaaccttggtgagaaactagcatccaagctacgcgcacgcctttccgatatcaccgtggcggacaatattttagcattgcccgtcggttcgccggaggtatgctttgaggaaggggaagagtgtattacaattacccttttgggcgataaaaaaatgggatttgtttgtgggaatacgattcagccaaaaaatcaagacaatacgattgactggtcccaggtcagccggatacggttagtgttcataggtgatgtgaaatga

SEQ ID NO: 221284 - DNA, 1227 bp, Klebsiella pneumoniae
atgtcgtctgctgaaacccccattaactggaaacgaaacctgaccgtgacctggcttggctgctttttaaccggcgccgccttcagcctggtcatgccctttctgccactctacgtcgaacagctcggcgtcaccgggcatagcgccctgaacatgtggtccgggctggtctttagtattacctttcttttctccgccatcgcctcgccgttctggggggggcttgctgatcgcaaggggagaaaaatcatgctgctgcgttccgccctcgggatggccatcgtgatgatgctgatgggaatggcgcagaatatctggcagtttctgctgctgcgcgcactgctcggcctgctgggcggttttattcctaacgccaacgccctgatcgccacccagatcccgcgccataaaagcggctgggcgctggggacactgtctaccggcgcggtaagcggcgccctgctcggcccgctggcaggtggcttcctggccgaccactggggattgcgcaccgtcttctttatgaccgcggcggtactatttatctgtttcttgtttaccctgtttttaatccgcgaaaattttgtgccgatcgccaggaaagagatgctcagtgccagagaggtgttctcttcgctgcagaatcccaaactggtgctcagcctgtttgtgacctcgctgataatccaggtggccaccggttccattgcgccgatcctgacgctttatgtacgcgatctcgcgggcaacgtcagtaacatcgcctttatcagcggaatgatcgcctcggtgccgggcattgccgcgctgatgagcgccccgcggctgggcaaactgggggatcgcatcgggccggaaaaaatcctaatcgtggcgctgattatctcggtgctactcctgatcccgatgtcgttcgttcagaccccgctgcagttaggtatcctgcgattcctgctcggcgccgcggacggcgcgctgctgccggcggtgcaaaccctgctggtgtacaactccaccagccagatctccgtgcgaatcttcagctataaccagtcgttccgcgatattggcaacgttaccggccccctgattggcgcgtcggtttccgctaactatggcttccgcgctgtatttctggtcaccgcaggggtggtattgtttaatgcgatctactccaccctcagcctgcgtcggccagcagcggatacttcgcattcagtaaattaa

SEQ ID NO: 221285 - DNA, 2529 bp, Klebsiella pneumoniae
atgaataagataacaaagtacattgacgcattgccgctgtcggacgccgagaaatcggcgctgccggacaccagcctgcaggccgttcatcaggccctggatgacgaccatcagaccttcgcccgcgaagacgactccccgctggggtcggtcaaggcacggctggcgcacagctggccggattcgctgtctggcgatcagctggtgaaggatgatgaaggccgtactcagctgcatgcgatgcccaaagccaagcgctcctcaatgataccggacccgtggcgtaccaacccggtcggccgcttctgggaccgtctgcgcggacgcgatgtcacgccgcgctatctctcccgtctgacgcaagaagagcgcgagagtgagcaaaaatggcgtaccgtcggcaccattcgtcgctatatcctgctgctgctgacgctgtcgcagaccgtggtagccacctggtatatgaaaaccattctgccttatcagggctgggcgctgatcaacccggccgacatggtggggcagaacctgtggatctcgttcatgcagctgctgccgtacgtgttgcagagcggcattctgatcctcttcgcggtgctgttctgctgggtttccgccggcttctggaccgcgttaatgggcttcctgcagctattgatcggccgcgataagtacagtatttccgcctcgacggtcggtgacgaaccgttgaacccggcgcaccgtacggcgctgataatgccgatctgtaacgaagacgttgaccgcgttttcgccggcctgcgggcgacctgggagtcggtgaaagcgaccggtaacgccgctcatttcgacgtctatatcctcagcgacagctataaccccgatatctgtgtggctgagcaaaaggcgtggatggagctgattgccgaagtgcagggcgaagggcagatcttctaccgccgccgtcgtcgtcgagtgaagcgtaagagcggcaacatcgatgacttctgccgccgctggggcagccagtatagctatatggtggtgctggacgctgactcggtgatgaccggtgagtgtctgagcagcctggtgcgcctgatggaagcgaacccgaatgccgggatcattcagtcttccccgcgcgcctcgggcatggacacgctgtatgcgcgttgccagcagtttgccacccgggtgtacggtccgctgtttacggcgggtctgcacttctggcagttgggggagtcccactactggggccacaacgccattatccgcgtgaagccgttcattgagcactgcgcgctggcgccgctgccgggcgagggcaactttgccgggtcgatcctgtcgcacgacttcgtcgaagccgcgctgatgcgccgtgccggctggggggtgtggattgcctacgatctgccgggctcctatgaggagctgccgccgaacctgctggacgagctgaaacgcgaccgtcgctggtgtcagggcaacctgatgaacttccgcctgttcctagtcagagggatgcacccggttcaccgggcggtgttccttaccggcgtgatgtcctacctgtcggcgccgctgtggtttatgttccttgccctgtcgacggcgttgcaggtggtgcatgccctgaccgaaccgcagtacttcctgcagccgcgtcagctgttcccggtgtggccgcagtggcggcctgagctggccatcgcgctgttcgcctcgaccatggtgctgctgttcctgccgaagctgctgagtattattctggtgtggtgtaaagggccgaaagagtacggcggatttatccgcgtcacgctttcactgctgctggaggtcctgttctcggtcctgctggcgccggtccgtatgctgttccacacggtcttcgtggtcagcgccttcctcggctgggaggtggtatggaattcgccgcagcgtgatgatgactccacgccgtggggggaagcctttatgcgccacggctcacagctgctgctggggctggtgtgggcggtcgggatggcatggctggatctacgcttcctgttctggctggcgccgattgttgtctcgctgatcctctcgccgttcgtgtcggcgatttccagccgggcgacagtgggcctgcgcaccaagcgctggaagctgttcctgatcccggaagagtattcgccgccgcaggtgctcaaggataccgatgcgtacctgacgatgaaccgtcagcgttcgctggacgatggctttatgcacgcggtgtttaacccgtcgtttaacgccctcgccaccgcaatggccactgcgcgccaccgtcaggggcatatcctggagatcgcccgcgagcgccatgtcgagcaggcgctgaatgaaacgccggataagctgaaccgcgatcgtcgactggtgctgttgagcgacccggtaaccatgtcgcgtctgcactatcgcgtatgggccgcgccggagaaatactcttcatgggtgaacgcctatcagcagttggcgcttaacccgctggcgctgaaaacgaaataa

SEQ ID NO: 221286 - DNA, 738 bp, Klebsiella pneumoniae
atgaaacataaaccacagatgatgaaaatgcgttggttaagcgcagccgtaatgttgtccctgtgtacttcatctgcatgggcatttagcattgatgacgttgcaaaagaggccaaaacgttagccgggaaaggctatgaagcgccgaagagtaacctgccctccgctttccgcgacatgaaatacgcggattaccagcaaattcagtttaatcacgataaagcttactggaataaccagaaaaccccattcaagcttgaattttaccatcagggtatgtacttcgacacgccggtcaccatcaatgaagtgacggccaccagcgtgcgcaaaattaaatatagcccggactattttaactttggtaacgttcagcacgataaagacacggtgaaagacctcggtttcgccggcttcaaagtactgtatccgatcaatagcaaagataagaacgatgagatcgtcagcatgctcggtgccagctacttccgcgtgctgggtcagggtcaggtttacggcctgtccgcgcgcggcctggctatcgataccgcgctgccgtccggcgaagagttcccgcgttttcgcgagttctggatcgagcgtcctaaagccaccgacaaacgtctgactatctatgcgctgctggactccccgcgggcaaccggcgcttatcgctttgtcatccatgccgggacgcgacaccgtggtagatgtccagtccaaagtttacctgcgtga

SEQ ID NO: 221287 - DNA, 594 bp, Klebsiella pneumoniae
gtgtcagaaggaaaagtccagcagaaacagcaggcgcgccgcgcggagatcgttgtcgctgcgcaaaaatgtttcgctgaaaaggggctgcacggcgcttccgtcgccgatatcgcccgggaagcgggcctgagcgtcggtcagctatatcgcatttttgccagcaaggaagcgatcatcgaagcgattgttagcgaaatcgtcaacgccagagtcggggagatgatcgatgagaaccacaatctggcgcgtaaagcggcggttttggctggcaggatcccgacgtcggcagccaccaaaagcgataattatctgctgatggagatcaatgccgaggcctcgcgtaacccacgcttgcgtgagatcctgatgcaggccgatcggcggttgaaagaggagggcggtcgcctgtcgcagcgctaccatcccgggctcagcgatgcgcgacgcaatgccgcatcagagctcatcgccgttctgacagagggggcagcttaccgctgtgagctgagcgcctccaccccggtcgataaggcagatttagaagccctgtacaatatgattttcgaccggctttttgacgagcaggcataa

SEQ ID NO: 221288 - DNA, 939 bp, Klebsiella pneumoniae
atggagattattttttaccatccgacctttgatacccaatactggatctgtgagctggaaaagcagttacccggcgcgcgggtgcgcgagtggaaagcgggcgataaccggccggcggactatgccctggtctggcatccgccggtagagatgctgcagggccgggcgctgaaggccgtgttcgccctcggggcagggggggactctattctcagcaagctgcgcgaccatccggatatgctgccgctgtcgattccgctgtttcgtctcgaagataccggtatgggacggcagatgcaggagtatgccgttagccaggtgctccactggttccgccgctttgatgactatcaggcgctgaagctggcgtcccgctggcagccgctgcccgagtaccgcgccgacggattcaccgtcgggattatgggcgccggcgtgctgggggcgaaggttgcggaaagtctgcaaccctgggggttcccgcttcgcgtctggagccgtagccgcaaatcctggccgcaggtgcagagcttcgccggccaggccgagctgggcgaattcctgcagggcactcgcgtgctgatcaacctgctgccgaataccgccgaaaccgccggcattattaaccagacgctgctggcgcagttgcctgatgagagctatgtcctcaaccttgctcgcggcgtgcatgtcgttgaagaggatctgctggcggcgctgaacagcggtaagctcaaaggggcgatgctcgatgtcttcagtcgcgaaccgctgccgcaggagagcccgctatgggcgcatccgcgggtggccatgaccccccatgtggcggcagtgacccgtccaatggaagctatcacctacattgcggagaccattagccggcttgagcgaggggagccggtaagcggtcaggtcgaccgccagcgcggttattaa

SEQ ID NO: 221289 - DNA, 921 bp, Klebsiella pneumoniae
atgcctgaactccatactcctgcgaatcgctccggcccggccgctgtggcccgggtgacgctcctgcctgcgctgctgattatcgttgctgttgctgtcggctgcgccctggtgtcgcctccggtcggtacacgacacgagatcctgaataaccccggcctctatatcgatctgctggcgttgttgtttctggtgtttatgctgtggagctcggcgaaggtgcggatgagccacattgccgtcaactgcgtacgctatgggctgctgttgtggattgccggcggcacctttgacgtgatggatgagatcgtggttcagccgcgctggatgggctactactgcgaagatctgctgcgcctctccgggatgctgcttaccgtggtgggggtctacaaaattattgagcgaatcaatttgctgtacgtcgatgcgcgctcgcaatccctgaaggatgaactgacccagttacccaaccggcgttttttcattgataccattcgcgagaagtccgggcatgcgctgggactcatgattctggatatcgatttttttaagaaaatcaatgatagctggggccacctggtgggggatgaagtgttattttcactggggaaacagctggcgaaactaaccagcgagcaggtccagccggcgcggatcggtggggaagagtttgccattatcgtcgatggcctgtcggagcccgagctgcacgctctggcgcaggcgatccttgctaacgcccgcaccatcctgatcaatcatcagacgccgctgtcgatcagcattggcgtcggaacctggcggccaggcgaagcgcaggagacgtttatccgtaaagtcgacgaggcgctgtacaaggccaagcataacggccgcggccgcgtggagtgggcgccatctgccggtgcggcaggttag

SEQ ID NO: 221290 - DNA, 180 bp, Klebsiella pneumoniae
atgaaaaagcgacggttcggtaaaatggcgggaactggactgaccccgcggaattgttccaacgtactaccactccatggcgacgaggtcagtggcgcggatactatcggcttcatcctccgcctgattagctttctgtgcggcgccgtcgatagccggcgccgcctgctcagggattag

SEQ ID NO: 221291 - DNA, 2427 bp, Klebsiella pneumoniae
atgcctgacattaacccgcaaaatatcaaagaattacgggcgttggttgaacagcaattacagtacacattgtgtgttagcttaaataaagctacgcatggcgatatttttaacgcggtggcgctggccattcgtcattttcaacaggaccattttttgttgagccagaagcggcaacgtgaagaacgtaaaaagcgcgtttactatctgtcgatggagtttttactgggacagtcgctgcgtaataaccttttgaatatgaatttactggcggagatgcaccaggtggtgaatgacctggggtttgatcttgaccaccttcttgacgaagagcccgacgccgcgctgggtaacggagggttagggcgcttagccgcctgttttatcgattcgatggccacccttgatattgccgcatccgggcatggcatcaaatacgaatatggtctttttcgccaatcctttcaaaatgaccagcagatcgagcatccggatgactggcattccatgcactccccgtggctggtcgaacatcacgctcagcaaatcctgatcccgctgggaggctatattgaacacagcgaagatgttgatggcaattacaatccaatgtggctgggctggaaaacgattatcggtataccccatgactatttcgtttccggttaccgggatacgacgaccaacaagctgcggctttatagcgcggtggcctctgactcctttaatatccatattttcaatcgcggtgattatatcaaggcggtgagtgataaaatcgcgtcggagaatatttcaaaaatactctatccatccgatgaggtgctgaccggaaaagagctgcggctgacgcaagagtattttctggtggcctgtacgctgcgggatatatttcgcgactatgccgaggttaatgacgatattactttcctgccgcagcatgtggcgattcagctgaatgacacccatccggcattagcggtggtggagctgatgcgtatcctcgtcgatgaataccggctgccctgggagcaggcgtgggagataacgcaaaacacctgtgcctacacgaatcatacgttgatgccggaagcgctggagacctggccggtgacgctgtttgaaaaactgctgccgcgtcatttgcaaattatatttgagatcaaccatcgtttccttgaagaggtggcccggcgctggccggataaaaatcatctgttatcttcgctgtctttaatcgacgaacatcacgataagcaaatccgtatggccaatctggcgattgtcggtagccatcgcgtgaacggggtagcatggctgcattcggaactggtcaagaaacaactggtgcccgacttctattttatgaccccggagaaattcattaatcagaccaacggcgtcacgccgcgacgctgggtgcagcaggctaaccccggcctggccgcttttttgcaccaacagctgggggaagggtggccaaccgatttacccttgctgtccagtctggaaagcctggccgatgatactgctgttattgataatatccgggccattaaatttgccaacaaaaccgcgctcagccagctggtcgctcaacgctatggcatcgtcctcgatccgctggcgatgtttgattgtcaggtcaaacgtattcatgaatataagcgtcagttgctcaatattcttcatgtgatcgcgctttacctggatatcaaagagacagggaaaactatcgcgcctaaggcgcatttgtttgcgggtaaagcggcgccgggctatcggatggcgaagctgattattcagttgattaataccgtcgcccggaaaattaaccgcgacctgcaggtcgccggacagcttaaagtggtttttctcgaagattacaaagtctcgctggcggaaaaaatcattccggccacagacctctccgagcaaatttccaccgccgggaccgaggcgtccggcaccagcaatatgaagtttgccatgaacggcgcgttaaccatcggcacctatgatggggcgaatatcgaaattcgcgaggccgtgggggcggacaatttttatctgtttggtgccgtggcggaagagattgaagagagccggcgcatcgggtatcaccatactttctatcatcagaatccggctattgcgcgtgttgtcgataccctggtgtctgggttgtttaccgccgatcgtgagctatttgcgccgcttcaccaaatgttggtggggggcgatcattactgtcatttgctggatttcgacagctattgccaggcgcagcagcaggcgatgatcgattttgaacagccggaacaatggcaccgtcgggccttactcaatatttgccggatgggcgaattttccagcgacagaaccatacgtggctacgcccgggatatttggggtatcaccagctaa

SEQ ID NO: 221292 - DNA, 1239 bp, Klebsiella pneumoniae
atgccaaagaaagccaaagaactcaccggactggctgttgccaagctaaaaactgaaggctcttatgcggttggtggggttgatggtttgtatctccgggttcggggtcagtcccgttcatggatactctgtatcgctatgggagtcagagtaaacagattgggcagaacagtccccagacgtttgaacatgggacttggtgcctaccctgaagtctccttagctgatgcccgtgataaggcccgtgagctgcgtaagcaagtccgtaatggtgttaatccacttgaagaaaaacacgctgccagagcacaacaagaaaagctggctcataagaaccggacgtttaccgagtgcgctgaagacgttatcgacattaaggccaaggaactcaagaaccagaagcatatcgcgcagtggcgttcaacgcttgaagcctatgcttacccggtcgtaggtgaaaagcccatcagtgcaatcacgaaagttgacgtactggcaatacttgagcctatctggctaacgaaaaatgagaccgccagtcgcctgcgtggtcgtattgaagccattattgattacgccaaggcgaaagaatactttgagggcgataaccctgcctcgtggaaaggtatgcttaagccgctcttgccaatgcccagtaaagttcagaagcaaaaacaccatgccgccctcccctatcttgagattcaggcctttatatccgatctgcaaaaacgagctggcatttcagcacgggcacttgagttttcaatcctaaccgttgcccgttctggtgaagtccgtggtgctgaatggtcagagatcgatttgaaagggaaaacttggaccattcccggcaacaggatgaaagccgggaaagaacatcgtgtaccgctgtctgacgctgcagtagccctgttaaaggctttaccacgtttcaaggacaataatcttgtattccctgcccctcgtggtggacagctatctgatatgtctttgctggcagtactgaaacgaatgggccatagtggtttaacacagcacggtttccgatcaacatttcgtgactgggctggtgaaactacagatcatcaacgtgaagttattgaacacgcactggcccatcaactggctgataaagcagaggccgcttatcagcgcggaacgttatggcctaagcgtgtggcgttgatggatgattgggcggggtattgtgtagctaacagacgtccagaaatttaa

SEQ ID NO: 221293 - DNA, 1434 bp, Klebsiella pneumoniae
atggcaaaaataacgaaagagatgatagcgcggatcctcgcccacgtgggcggcgccgcaaacgtcgcgcaggcgggcaactgcatgacgcgcctgcgcttgaccctgcgcgatgaaagtctggccgacagcgccgccatccgccagattgacggcgtgatgggggtgatcgtcagcgacgagcagttccaggtggtgctcggccccggcaaggcgcaaaccgccgccgaaatgatgaacggcctgctggaggcggcgcccgccgccgcgccgacgctggccgacgtcgcggcggagaaaaagcaggcgctgaagggcaagcagaccagcgtggtgcagaaatttctcgccaaattcgccaccatctttacgccgctgatccccggctttatcgccgtcgggctgctgctgggcttcgccaccctggcggaacaggttttcgtgctggagaacgcccatccgaacgccagcctggtggcgctgattggctatatgaaggtcttcagcaaagggatgttcacctttctgagtatcctgattggctataacgcgcagaaggcgttcggcggctccggcgtgaacggcgcgattatcgcctcgctgttcgtgctgggctacaacccggaggcaaccagcggcttctacgccggcatttccaccttcttcggccatggcatcgatccgcgcggcaatatcatcggcgtactgatcgccgctatccttggcgcgtgggttgaacgccaggtgcggcgggtgatgccggccaacctcgatatgatcctcacttcggcggtgacgctgctgatcatgggcgcggtgacctttacggtgatcatgccgattggcggctggttatttaccggcatgtcatggctgttcctgcatcttaacggcaacccgtttggctcggcggtgctggccggcctgttcctgctggcggtgatgtttggcgtccatcaggggtttgtcccggtctattttgcgctggtggacgcccagggctttaactcgctgttcccgatcctggcgatggccggggccgggcaggtgggggcggcgctggcgctgttctggcgggcgaagcgcgattcgctgctgcgaacccagattaaaggggcaattattccgggcttcctcgggattggcgagccgctgatctacggcgtcaccctgccgcggatgaagccgtttgtcaccgcctgcctcggcggcgcctgcggcgggttcttcgtcggactgatcgcctggctggggctgccggtcggcctgaacacggtgttcggtccgtccggtctggtggcgctgccgctgatgacctccggcagcggaatttacgccgggatggcggtctacgccggcgggctggcggtctcctacctgtgcggctttgtcctcacctggctgttcggcagtaaaaatgtcgatttaagctag

SEQ ID NO: 221294 - DNA, 903 bp, Klebsiella pneumoniae
atgagtatcgacctgagcaaactgctgaccgagcgacgtaacgccaacagcgccaacattgacaccctctccaccctcgagatgctgacggtgataaaccaggaagaccagcaggtagcccaggcgataacgccctatctgccgcagattgccgaggtggtggataaggtcgcggcggcgctgcaggccggtggccgcttgatttacattggcgcgggtacctcagggcgtctggggatcctcgatgccagtgaatgcccgccaaccttcggcacccgcccggagcaggtggtggggatcatcgccggcggacataaagcgattctcagcgccgtggaaaacgtggaagacaacaaagcgcagggggcgatggatctgcagaacctgaacttcagcaaccgcgatgtgctggtggggctggcggccagcggacgcacgccgtacgtcattggcgccatggaatacgcccatagtcagaatgcctttgtcgccatcgtcagctgtaatccgcatggcgaaatggcccagctggcggacgtggcgatcaccccggtggtcggcccggaagtggtcactggctctacccgcctgaaagccggcaccgcgcagaagctggtgctgaacatgatctccaccggggcgatgatccgcgtcggcaaggtgtacagcaacctgatggtcgacgttgaagcgaccaacgccaagctgattgagcgccaggtctctatcgtgatggaggccaccgactgcgatcgcgccaccgcccagaaggcgctggaggcctgcggccgccactgtaaaacggcgatcgtgatggtgctggcggacttaagcgccgcagaggcgcagtcgctgctggcgaaaaacaacggctatatccgcaaggcgctcagcaacacctga

SEQ ID NO: 221295 - DNA, 1056 bp, Klebsiella pneumoniae
atgcaaaatttaaacacggttctgcgggcgatccccgcgccggacgccgacgccatggcgcgggcacagcaacacatcgacggcttactcaagccccccggcagcctcgggcgtctggaggcgctggcggtgcagctggcgggaatgcccggcctgggcggccagccgcaggtggcgaaaaaggccttgctggtgatgtgcgccgaccatggagtgtgggacgaaggggtggcgatttcgccgaaggcggtcaccgccatccaggcggcaaatatgacccgcggcaccaccggcgtctgcgtgctcgccgcccaggccggggcgaaagtgcatgtaattgatgtcggtatcgatagcgaaccgctccccggcgtggtgaatatgcgggtggcgcggggctgcggcaatattgcccgcggtccggcgatgagccgtgagcaggggcaggagctgttgctggaggtgatgcgctacacccgcgcgctggcccaggagggcgttaccctgtttggcgtcggcgaactggggatggccaataccacgccggcggcagcgatcgtcagcgttttgaccggcagcgatgcgcaggaggtggtcgggattggcgccaatctgccgctggcgaaggttggcaacaaggtggaggtggtgcggcgggctatcgccgtcaatcagcccgacccgaatgatggcctcgacgtactgagcaaagtcggtggtttcgatctgctggggatgaccggtgtcatgctgggggcggcgtcctgtgggctgccggtggtgctggatggctttctctcctacgcggcggcgctggcggcgtgtcagatagcgccggaggtgaaaccgtatctgatcccgtcccactattcggcggagaagggggcgcgtatcgcgttggcgcacctgggtctcgaaccgtatctcaatatgggcatgcgtctgggagaaggcagcggcgcggcgctggcgatgccgatcgtcgaggcggcctgcgcgatgtaccatcgcatgggcatgctggcggcaagcaatattgtgttaccgaaggggtaa

SEQ ID NO: 221296 - DNA, 546 bp, Klebsiella pneumoniae
atgctgactctggttaccggcggcgcgcgcagcggcaaaagtcgccatgccgaggcgctgattgccgatgcgccgcaggtgttatatatcgccacctcgcaaatctttgacgacgagatggccgcaaggatccagcatcatcgcgacggcaggcccgcccactggcgcaccgccgagcgctggcagcagcttgatgaactgatcaccccggctatcgccccagcggaggcgattttgctggaatgcatcaccaccatggtcaccaacctgctgttcgcgctcggcggcgacagcgaccccgacggctgggattacgccgccatggaacgggctattgatgacgaaattggcgtgctgattgccgcctgtcagcgctgtccggcgcacgtcgtgctggtgaccaacgaggtggggatgggcattgtgccggagaaccgcctggcgcggcattttcgcgatattgccgggcgggtcaatcagcgcctggcggccgcggcggatgcggtctggctggtggtttccggcatcggcgtcaaaatcaaataa

SEQ ID NO: 221297 - DNA, 1524 bp, Klebsiella pneumoniae
atgacgctggcagtgatgttgcagggcacggcttccgacgttgggaaaagcgtgctggtggcgggattgtgccgcatttttcatcaggatgggctgcgtaccgcgccgtttaaatcacagaatatggcgctgaactccggcattacgccggatggcaaagagatgggccgggcgcagattttccaggccgaagcggccgggattgcgccggatgtccgcatgaatccgattttgctcaagcccaccagcgaccgtcaggcgcaggtggtgctgatggggcaggtggcgaccagcatggatgcggtgagctatcaccagtacaagccgcgcctgcgcgagcagatcctcgcggtctaccagagcctggccggggagtatgaggcgctggtgctggaaggggccggcagtccggcggagattaacctgcgcgaccgcgatatcgtcaatatgggcatggccgagatggcgcaatgcccggtgatcctagtggccgatatcgaccgcggcggggtgtttgccgcgatttacggcacgctggcgctgctgcagcctcaggagcgggcgcgggtgaaaggggtgatcatcaataaattccgcggcgatgtggcgctcctgcgctccgggatagagcaaatcgaggcgttgaccggggtgccggtgctgggcgttatgccatggcttgacgtggatctcgaggatgaggacggcgtcgcgctgcaggccgggaaataccatcgcaccgaccggcgcgatatcgacatcgccgtggttcacctgccgcatatcgccaattttaccgactttaacgccctggcggcgcagccagacgtccgggtgcgctatgtccgcgatccgcaggcgctggccgacgccgacctggtcattctcccgggcagtaaaaataccctcggcgatctgtgctggctgcgcgagagcggcatggcgcacgcggtcgagcaggcccggcagcgcaaggtgccgctgctggggatctgcggcggctatcagatgctgggcgaaaccattatcgatgaggtggagtctggccttggcgcccagcccgggctgggggtgctgaagaccgtgacccacttcgcccagcacaaaaccaccacccaggtgcaggcgaccctggggtctgcgctcccggattggttagccgacgcggcggggctgcgcgtcagtggctatgaaattcatatgggcgagacgcgccgcgaggcaggctgcccgccgctgctgcagctgcataaagcggggcaggcagtggacgacggggcgataagcgacgacggcctggcgttcggcacctatctccatggcctgttcgacagcgatgcctttacccgggcgctgctcaacggcctgcgccagcgcaaagggctggcgccgctggacagcgccctggagtatgcccgctataaaacccggcagtttgatcggctggccgaggccatgcgcgaacatatcgccatcgataaaatttacgccatcatgcgccaacatcaggagcccctatgctga

SEQ ID NO: 221298 - DNA, 825 bp, Klebsiella pneumoniae
atgcttgccacaaccgatctctggtttcgctatcaggatgagccggtacttaaagggctgacgctggatttttcccgccatgcggtgaccggcctggtgggggccaacggctgcggaaagtcgacgctgtttatgaacctgagcggcctgctgcgcccgcagcagggggcggtgctgtggcagggagaggcgctgaattacagcaagcgcggtctgctggcgctgcgccagcaggtggcgacggtgtttcaggatccggaccagcaaatattctataccgatatcgacagcgatatcgcttttagtctgcgtaacctcggggtggcggaagaggagatcgcccgccgggtggatgaggcgttgaccctcgtcgatgcccaggggtttcgccagcagccgatccagtgcctcagccatgggcagaaaaaacgggtggcaatcgccggggcgctggtgctgcaggcgcgctacctgctgcttgacgagcccaccgcgggcctcgatccacgcgggcgggcgcagatgatcgccatcatccgccgcattgtcgggcaggggcggcgggtggtgatctccagccacgatatcgatctgatctatgaggtgagcgacgccgtttacgttctgcgtcacggcgaaatactggccgcgggggaccccggcgaggtatttgcctgcgcggagacgatggacagggcgggattgacgcagccgtggctggtgaaacttcatagcgaactggggctgccgctgtgtaaaaccgaggcggagttttttcagcggatgcacaacaacgcgataggcgcgataaaggaggcgtcatga

SEQ ID NO: 221299 - DNA, 678 bp, Klebsiella pneumoniae
atgaccgggtttgaccgactcagctaccagagccgctggttgcaggtggcgccagagcgtaagtttctgctctggctactgctgatggtgctggcctttacgctgccggcgtggggccaggcgctgacgctggcgctgaccgccgcgctgacctgctggctgctgcgggtctcattctggcgctggtgccgctggatggcgctaccctttggctttttgctggtcggcgtgctgaccattgtgttcagcgtcagccgcgacccgcagatgctgttagccagcatccgactgggcgctttctcgatagggatttccgcaccggggctggccgtggccggggagaccttctggcgcagcctggcggcgatggcggcgacgctctggctggtgcttaatctgcctttcccacagctgattatcttgctcaagcgcggtcgcgtaccgcggctgttgacggagcagatcctgctgacctggcgcttcatttttattctgttagacgaggcgatggcgattcaccgcgcgcaaaccctgcgttttggctatggtagcgtgccgcagggctatcgctcgctggcgatgctggtgggactgctgttcacccgcgtcctcctgcgctatcaacagatgagcacagcgctggatatcaaattgtaccagggtgattttcacctctaa

SEQ ID NO: 221300 - DNA, 282 bp, Klebsiella pneumoniae
atgaaaaagaccctgatcctgttggcgatggtggccgccctgatgatcctgccattttttattaaccacggcggcgagtttggcggctcggacggcgaagcggagagccagatccaggtggtggcgccggattatcaaccctggttccagccgctatatgaaccggcgagcggcgagattgagagcctgctgtttaccctgcagggctcgctgggcgcggcggtgattttttacattctcggatatgcgaggggcagacagcgccgtgatgaccgggtttga

SEQ ID NO: 221301 - DNA, 738 bp, Klebsiella pneumoniae
atgaatcaggtgaaatcgctgaagcagctttcgtatggggggctggcggccgctgttctgctgatcatcgtcccgcaggaggcgttcgccatgcatatcatggagggctttttgccgccgatgtgggcgctggcgtggtggctgttgtttttaccctgcctgtggtacggcctggtgcgcctgcggcgtatcgtccgggaagagagcaatcagaaggtgctgctggccctctgcggggcgtttatttttgttctttcggcgctgaagatcccgtcggtgaccggcagctgctcgcatccgaccggcgtcggtctggcggtgatcctcttcgggccgggcgtggtggcggtgctgggggcgatcgttctgctgttccaggcgctgctgctggcgcatggcggcctgaccacccttggcgccaacgggatgtcgatggcggtgatcggcccgatggtcggctatctggtgtggaagctggcctgtcgggcggggatccgtcgcgatgtcggggtctttctctgcgccatgctggcggatctaatgacctactttgtcacctccgtccagctcggggtggcctttcccgatccggccaccggggcaggtggatcgatcgccaagtttatgggcatcttctgcctgacgcagatcccgatcgccatcgcggaaggcttgctcaccgtgatgatctacgatcagctaaccaaacggcggctgatcgccgcggagggacattaa

SEQ ID NO: 221302 - DNA, 711 bp, Klebsiella pneumoniae
atgagcggcaaactatacgccctgagcagcgggccgggggcggccgatctgatcaccgtgcgtgcggcgcggatcctcggccagctggatgtgctgtatgcgccagccggccgcaaaggcggcgacagcctggcgctctccatcgtacgcgagtacctgggcgcacacacggaggtccgctgctgccattttccgatgagcgccgacagcgcggaaaaagaggcggtgtggaacgacgttgccgcggcgctggcccaggaggtggcggcgggcaggcaggtcgggtttatcaccctcggcgacgccatgttgttcagcacctgggtctttctgctgcagcggattggctgcccggactggctggagattgtccctggcgttacctccttcgccgccattgccgcgcgggcgaaaaccccgctggccatggagcagcagtcgctggcggtgatctcctgcaccgcgccggaagcggacattgccgcggcgctgcgccagcatgacagtctggtgctgatgaaagtctacggccgcttcgcccgcattaaggcgctgctggcgcaggcggggctgctggatgcggcgctgatgatgtcagaggccaccctgccgggcgagcagtgctggcgccgtctgcgcgaggtcagcgatgaccagccgctgccctatttctcgaccatcctggttaacaaacagtgggaggaggcgtaa

SEQ ID NO: 221303 - DNA, 795 bp, Klebsiella pneumoniae
atgaaaaaagcacttctggtggtgagctttggcaccagctatcacgacacccgcgagaagaacatcgccgcctgcgagcgcgatctggccgccagctgcccggatcgcacgctgttccgcgccttcacctcggggatgattattcgcaaactgcagcagcgcgatggtattcatatcgatactccgctgcaggctctgcaaaagctggccgagcagggataccaggatgtggctatccagtccctgcacattatcaacggcgacgagtacgagaagatcgttcgcgaagtgcagagcatgcgcccgcgctttcagcgtctgacgctgggcgcgccgctgttgagcggtcatggcgattatgtgcagctgatgcaggccctgcgccagcagatgccgccgctggcggcgacggagcgagtggtgtttatggggcacggcgccagccaccacgccttcgcggcctacgcctgtctggatcatatgatggcggtgcagggttttccggcgcgggtgggggcggtggaaagctatcccgaagtggacatcgtcattaacgaactctcccgccagggcgtgaccggcgtgcatctgatgccgctgatgctggtggccggcgatcatgccattaatgatatggcctctgacgaagacgattcgtggaaaacccgcttcaatgccgccggtatccccgccacgccgtggcttaacgggttaggggagaatccggcggtgcgggcgatgtttgtcgcccatctgcagcaggcgctgaacgacacgatggagaaagcagcatga

SEQ ID NO: 221304 - DNA, 786 bp, Klebsiella pneumoniae
gtgaatcacggcgacgtgctggttatcgggggcaccagcgatgcgcgggcgatctgccagcagctggacgccgccgacgtgcgctacaccctgtcggtggcgacccctaccggcgagcggttggccggcgatatccgcgggcagatacgctgcgggcgtatggagtggcagcagatggcggagtggctcagagcgcagcgcacccgctgggtgatcgatgcctctcacccctacgccgaggtggtcagccagaatattgtgcgcgcctgcgccagcgtcggggttctgctcagccgctatcaaaggccggagcagctgagcgatctgcgccatccgctacttcacgtggtcggcgatctgaacgaggcctgcgcggtggctcgtcgcctcggcgagcggatcctgctgaccaccggcagcaaagatctggcggcctggcgggcgggactggcggagaaaacgctgctcgcccgggtgctgccggtgccggaggtggttcagcactgtagcgatctggggtttggcgtcggggagatcttcgccctctgcgggccgttcagcgccgaatttaacgccgccttttatcgccagtgccgggccgatgttgtggtgacgaaagcctcgggggcggaaggaggctatcaggaaaaagtacaaccctgtcttgatgcggggatcccctgcatcgtcattacccgtccggcgccgctggtgacgggcgatgaactactgcaaagccaggccgatttcactgcgcggctgacgcgctggctgtcggcgacttga

SEQ ID NO: 221305 - DNA, 726 bp, Klebsiella pneumoniae
atgttaagcgtaatcggaattggccctggctcgcaggcgatgatgaccatggaagccgtggaggccctgcaggcggcagagatcgtagtgggctacaagacctacacccacctggtaaaagcctttaccggcgacaagcaggtgatcaaaaccggcatgtgcaaagagattgagcgctgccaggcggccatcgagctggcgcaggccgggcacaacgttgcgctgatcagcagcggcgacgccggcatctacggcatggcggggctggtgctggagctggttaataagcagcagctggacattgaggtccgtctgatcccagggatgacggccagtatcgccgccgcctcgctgctcggcgcgccgctgatgcatgatttctgccatatcagccttagcgatctgctgacgccctggccggtgattgaaaaacgcatagtcgccgccggggaagcggacttcgttatctgtttctacaaccctcgcagccgcggccgcgaaggacatctggcgcgcgcctttgcgctgctggcggccagtaaaagcgcagatacgccggtcggcgtagtcaaatccgccggacgcaaaaagcaggagaaatggctgaccaccctcggggagatggattttgccccagtggatatgaccagtctggtgatcgttggcaacaaagcgacttacatcgacaacggcctgatgatcaccccgcgaggctacgcgctgtga

SEQ ID NO: 221306 - DNA, 1056 bp, Klebsiella pneumoniae
atgaataccgtaaagcctgaatccattgccctgttttgcctgacgcccggcggcgtgcggctggcaaaacggctggcggccatgctgccgcttacctgttacaccagcgaagcgctgcaggaagaggggtttatccccttcaacggcggctttgccagcgctgcccgcgaggcgttcagcagcttctcggcgctgatttttatcggcgccaccgggattgccgtgcgggtgctggccccgctggtgaatgacaagctcagcgacccggcggtggtggtgattgatgagcgcgcccggcacgtcatcagcttgctctccggccatgccgggggggccaatgcgctaacccgctatctcgccgggatgctcgacgccgacccggtgatcaccaccgccaccgacgtcaacgagctggccgccctcgacacgctggccttccagctgaacgcccggatgaccgattttcgcgcggcggtgaaaaccgttaaccagatgctggtgagcggtaagcgggtggggctgtggtgcgacggcgaattcaccggggcgctaagccgctgcgaccggcgcgggtttatcccggtaagcaacctggcgagcttgccggcgctcgacgccctgatctgcgtcaccctgcgccggtcgctgccgccgctgccggtacctcactggaagctggtgccccagcgggtggtggcggggatcggctgtcggcgcgacaccccctgcgcgctgctcagtacgttgctggatcgccagcttgccgctcagcgtcttgacccgctggcgctgaaagcgatcggcagcgtgagcctgaaggcaaacgagccggggttgcgccagctggctcaccgctgccgggtgccgttcgaaaccttcagcgccgaggcgctgcgcgagcacgagcaccgctttccggcctcgtcttttgtccgggagacggtcggcgtcggcagcgtctccggcccggtggcctggctgctgagtcagggaaacctgtccggcgaaaccctgcgtgagcagggcgtgaccattactttgggagtaacacactga

SEQ ID NO: 221307 - DNA, 774 bp, Klebsiella pneumoniae; identical to SEQ ID NO: 139156

SEQ ID NO: 221308 - DNA, 570 bp, Klebsiella pneumoniae; identical to SEQ ID NO: 139157

SEQ ID NO: 221309 - DNA, 606 bp, Klebsiella pneumoniae
atgttgacggtcgtgggaatgggcccggcggggctgcagtggctgatcccggccgcgcgcgaggcaatcgccgccgctgaggcgctggtgggcggcagccgtcatctccagcagtttcccgacttcgccggcgagcgcttcgcgctgggggccgatatgccggcgctgctggcgtggattgaggcccgtaccgggcgccgcgtcgtggtgctggcctctggcgacccgttgttctatggcattggcacccggctgattgcccattttggccgggaacgagtgcaggtgatccccggcatcagcgcggtgcagtacctctgcgcccgggcgggcatcgacatgaacgatatgtggctgaccagcagccatggccgggcggtgagcttcgatgcgctggccgcccaccggaaagtcgccatggtgaccgacggccgctgcggaccgcgggagatagccgcccagctgatggcccgcggcaaaggccatcgctggatggtgataggcgagaacctggcgatggaaaacgagcggatccactggctgccggtcagcgccgtggaggacgaatatgagatgaatgcggtggtgatcctcgatgaaagatga

SEQ ID NO: 221310 - DNA, 1140 bp, Klebsiella pneumoniae
atgagcgatcagacctttgacgccccggtgtggcatcacggcaaagcgctgcgcaagggctacaccaccggctcctgcgccacagcggcggcaaaagtggcggcgctgatggtgatgcgccagcatctgattcatcaggtctcgatcgtcaccccctccggcgtcaccctgtgcctgaacgttgagtccccgcacgtcgaagggcagcaggcggtcgccgcgatccgtaaagacggcggcgatgatgtcgacgccacccacggcatgctgatttttgcccgggtgatcctcaatgacagcggagagattagcctgcagggcggggagggcatcggcacggtgacccgcaaagggatcggcctgccgacaggcagcccggcgataaaccgcactccgcggcacatcatcgagaccgccgtgcgcgaagcgataggtcctacccgcggcgcgcaggtggagatttttgccccggaaggcgcgcttcgcgcgcaaaaaacctataacgcccggctggggatcctcggcggcatctcgattatcggcaccacggggatcgttaccccgatgtcggaagagagctggaagcgctcgctctccctcgagctggagataaaacgcgccgccgggctggagcgcgtggtgctggtgccgggcaaccacggtgagcgctttgtccgcgagcagatgggcatcgacccgcagatggtggtcaccatgagcaacttcgtcggctacatgattgaagaggcggttcggctcggtttccgccagattgtgctcattggccatcccggcaaactgatcaaaatcgccgccgggatctttcatacccacagccatatcgccgatgcgcggatggaaactctcgtcgctcatctggcgctgcttggcgcgccgctgccgctgctgacgctggtcagcgagtgcgacactaccgaagcggcaatggagcatatcgacgcctggggataccagcgcctctataaccatctggctgagcgaatctgccagcgtgttcttgagatgctgcgcttcactcagcaaccgcccacctgcgacgcggttctgttttcttttgataaccaggtactgggcagcagccgtccgctggaggcgattgcccgggagctgacatgttga

SEQ ID NO: 221311 - DNA, 636 bp, Klebsiella pneumoniae
atgcagtacatccaacaaccgcaggcgatcgaggcgaaaagcttcgacatcatcagcgagatcatcgccgaaacgcgaccggactaccgtttcgccagcccgctgcacgaggcgattatcaagcgggtgatccacaccaccgctgacttcgactggctggatattctgtggttttctccggatgccctgatcgcgctgagtgaggccttgagccggccctgcacgctgtataccgataccaccatggcgctgtccgggatcaacaaaaccctgctggcccgctttggcggcgaatgccgctgctatatcagcgacccgcgggtggtgcgcgaggcgcaaagccgggggatgacccgctcgatggtggcggtggatattgcggtgcaggagcccggggagaaagtgttcgtcttcggcaatgcgccaaccgcgctgtttcgcctgctggaacatcgcgagaccgccatcggcggcgtggtgggggtgccggtcgggttcgtcggcgcggcggagtcgaaagcggcgctcagcgagagcggcctgccggccatcgccgcgctcggccgcaaagggggaagcaacgtggcggcagcgattgtgaacgctctgctttaccacctacgggaggcgcaatga

SEQ ID NO: 221312 - DNA, 960 bp, Klebsiella pneumoniae
atgacccttctcgcctggtgtgtagcctggatacttgatgtcgtcattggcgatccgccgcactggccgcatccggtgcgctggataggtcgcctgatcgccgtcagccagcgtgtagtgcgacgcgtctgccatagcgaccgggcgctgcgcatcggcggcggggtgatgtggctggtggttatcggcctgacatggggcgtggcctggggcgtactggcgctggcgcacgggatccacccctggcttggatggctggtggaagtgtggatgatcttcaccgcgctggcgggacgctgtctggcacagtcggcgatggcggtggcccggccgctgcaggccggagatctcgccgaaagccggcataagctctcctggattgtcgggcgcgatacctctcagctccagccagcgcagatcaaccgtgcggtggtggagaccgtggcggagaacacggtggatggcattatcgcgccgctctttttcctgctcctcggcggcgcgccgctggccatggcctataaagcggtcaacaccctcgattccatggtcggctataaacacgaaaaataccaggcgatcggcatggtcagcgctcgtcttgatgatgtagccaacttccttcccgcccggctgagctggctgctgctcagccttgccgcggtgctatgccgggaagatggcgcccgggcgctgcgtacgggctggcgcgatcgctatcagcacagcagtcctaactgcgcctggccggaagcgaccgtcgccggcgcgctggggatccgccttggcggcccgaacgattacttcggccagcgcgttgaaaagccctggataggcgacgccgtccgcgacatcgcggtggacgatatttcccgaaccattcgattaatgtgggtggcgtcaagcctggcgctggcgctgtttatcggcgtgcgctactggctggtcggcgcggcctga

SEQ ID NO: 221313 - DNA, 1377 bp, Klebsiella pneumoniae
atggcaaccaggcgtgcgttcattcttgcgggtaccggcagcggttgtggcaaaaccaccgttacgctcggcctgctcagcttgctccaacagcgcggtatgcgggtgcaaccctgtaaagtcgggcctgactaccttgacaccgcctggcacaccgccatcagcggcatcgcttcccgcaatctcgacagctttatgcttcccgccccgatactcaacgcgctgtttaccgaacagctacagcaggccgacatcgcggttatcgaaggggtgatgggcctgtatgacggctacggcatcgaccctaactactgcagcagcgcggcaatggctaagcagcttggctgcccggtgattttgctggtggatggcaaagcggtgtcgacctccatcgccgccacggtgatgggttttcaacattttgatccggctctcgacatcgctggcgttatcgtcaatcgggtcaacagcgacgcgcacttccagctgctgaaaagcgccattgagcgctactgtcgggtgccagtgctcggctatgtgccgcgcgtggaaggcgtggcgctgcccgaacgacatctgggactggtgaccgcccgcgagtcggtggtcaatcagcaggcatggcgggattttgccagcctgctggggcgcaccctcgatatagaccggctgctggccctcagcgaactggccgccatgccgatcggcgagtggggagaacagcttgccgccgatgccggcgaaggactgacgctggccctcgccgacgatgaggccttcaatttttattaccccgataacctggcgctgctggcgcgctgcggcgtgaagatggtgcgctttagcccactgcgcgatcgccagctgccggcctgccagatgatctggctcggcggcggctatccggagctgcatgcggccgggctatccgctaaccacgagatgctgacacagcttcgcgcggcgcaccggcgcggggtggcgatctacgccgagtgcggcggcctgatgtatctgggcacgaccctggaagtcaccagcggcgagcgctacacgatggcggatattattcccggacacagccgaatggggacgcgtctgacccggttcggctactgcgaagcgcaggcgcggcagccgacgctgctggcagcccctggcgagtggctgcgcggccatgaatttcattactccgatttttctcccgccacccccgccgtactggcctgccgtaaacagcgagacggtaagacgctccagcagtggcagggaggatggcagtccggcagcgcctttgccagctatctccatgtccattttgcccagcgtcccaccatgctcaaccactggctgcgggcagcaaggagggcgctatga

SEQ ID NO: 221314 - DNA, 912 bp, Klebsiella pneumoniae
atgatttctgcgagtaccctaaactcagaactcatcaataaaatcgcacaggattttgcgcaagccaccagtctggcggttgtggtcgtcaatattcacggtgatgagatttctgaattgtttaatttcacgccgttttgccagctgatgcgtcagcacccggagcacagcggacgctgtcgcatgagcgaccgctgcggcgggctggaagcctcgaaaaaagaccagctgtgtatctaccgctgtcatgcggggttaaccgatttttccatcccgctggtgatcgccggccacctggtcggcttcgtgctgtgcgggcaggtgcgtctgagcaatgatgttgaactggttgatatcttgaacgtcgatgaccgctggcaggacgatccggcgctggtccaggcgtttcgcgatgtgccggagatggactattcgcgggttatcgcttcggcggatctgctgaagctgatcgtcgagaattgcctgaaaaaacagctcaactttgtggttatcaaagataacccgtcgcagaacgacccggcgcaggtcagccgggcgccctcgccgcacgatggcaaaatgaagaaggcgctgcgctatatcgacgcgcatctctccgatgagctgcgtctggaggatgtggcggcgcatgtctatctcagcccgtactacttcagcaaactgtttaaaaagtatcaggggatcggttttaacgcctgggtcaatcagcagcggatggcgagcgcaaaagagctgctatgccacagcgactggagcatcgccagcatcgcgcggaatttaggtttttcgcaaaccagctatttttgcaaagtgtttcgccagacctatcaggtaacgccgcaggcatttcgtcagcaaattaatgccggatcacaaactgagtctttttaa

SEQ ID NO: 221315 - DNA, 810 bp, Klebsiella pneumoniae
atgaatggttctttacgcgcgcaatgtatcgccgagtttttaggcaccgggctgtttctgttttttggtatctgctgcctgagcgccctgaaactgaccggcgccagcctggggctgtgggagatctgtattatctggggactgggtatttctctggcggtgtacctgacggccggcatttcggggggacatctgaaccccgcggtcaccgtcgccctgtggctgtttgcctgcttcccgggcagaaaagtggtgccctatatcgtggctcaggtcgccggcgcgtttggcggcgccgtgctggcctggatactttacagcaccctgtttacgcaatttgaaacggtgcatcatatggtgcgcggcagcctggaaagcctgcagctggccagtatattcagcacctacccggcgcctgagctcagcatctggcatgcggcactggtggaggtggtgatcacctcgatgctgatggggatgatcatggcgctcaccgatgatggcaacggcgtacccaagggcccactggcgccgctgttgattggcattctggtggcggtgatcggcgcctcgaccgggccgcttaccggcttcgcgatgaatccagcacgcgattttggcccgaaattgttcacctggttcgccgggtggggcaatatcgccatgaccgggggaagagatatcccctattttatcgtgcccattatcgcaccgttgttaggggcctgcctcggcgccgcaatttatcgttttcttatcgccaataatctgccctgtcatacctgcgtggaggaagaaaatacgcgttag

SEQ ID NO: 221316 - DNA, 285 bp, Klebsiella pneumoniae; identical to SEQ ID NO: 213592

SEQ ID NO: 221317 - DNA, 813 bp, Klebsiella pneumoniae
atgagcagcaatgagctggttgaacagatcatggcgcaagtcatagcccgtgtagcgacgccagagcagcaggcgcttcccgataccccccatcccacaggagagacggctatggcagagaaaagctgcagcttaacggaatttgtcgggaccgccattggcgacaccctcgggctggtcatcgccaacgtggatgccgcgttgctggaggcgatgaagctcgaaaaacactaccgctctatcggcatcctcggcgcccgcaccggcgccgggccgcacatcatggccgccgatgaagcggtcaaagccaccaacaccgaagtggtcagcattgagcttcctcgcgacaccaaaggcggcgccggccatggctcgctgattgtgctgggcgggaatgatgtttccgacgtcaaacgcgggattgaggtcgcgctgaaagagctggaccgtaccttcggcgatgtctacggcaacgaagcgggtcatattgagctgcagtataccgcgcgcgccagttatgccctggaaaaagcgttcggcgccccactgggccgcgcctgcggcattatcgtcggcgccccggcgtccgttggcgtgctgatggccgataccgcgctgaaatcagccaacgtcgaggtggtggcttacagctcaccggcccacggcaccagtttcagcaacgaagccattctggtgatttccggcgactctggcgcggtgcgccaggcggtgatctccgcccgggaaatcggcaaaaccgtactggcgacgctgggcgccgaaccgaaaaacgatcgcccctcctacatttaa

SEQ ID NO: 221318 - DNA, 1665 bp, Klebsiella pneumoniae
atgagatcgaaaagatttgaagcactggcgaaacgccctgtgaatcaggatggtttcgttaaggagtggattgaagagggctttatcgcgatggaaagtcctaacgatcccaaaccttctatccgcatcgtcaacggcgcggtgaccgaactcgacggtaagccggttgagcagttcgacctgattgaccactttatcgcgcgctacggcattaatctcgcccgggccgaagaagtgatggccatggattcggttaagctcgccaacatgctctgcgacccgaacgttaaacgcagcgacatcgtgccgctcactaccgcgatgaccccggcgaaaatcgtggaagtggtgtcgcatatgaacgtggtcgagatgatgatggcgatgcaaaaaatgcgcgcccgccgcacgccgtcccagcaggcgcatgtcactaatatcaaagacaatccggtacagattgccgccgacgccgctgaaggcgcatggcgcggctttgacgagcaggagaccaccgtcgccgtggcgcgctacgcgccgttcaacgccatcgccctgctggtcggttcacaggttggccgtcccggcgtcctcacccagtgttcgctggaagaagccaccgagctgaaactgggtatgctgggccacacctgctatgccgaaaccatttcggtgtacggtacggaaccggtgtttaccgatggcgatgacaccccgtggtcgaaaggcttcctcgcctcctcctacgcctcgcgcggcctgaaaatgcgctttacctccggttccggttctgaagtacagatgggctatgccgaaggcaaatcgatgctttatctcgaagcgcgctgcatctacatcaccaaagccgccggggtgcaaggcctgcagaatggctccgtcagctgtatcggcgtaccgtccgccgtgccgtccgggatccgcgccgtactggcggaaaacctgatctgctcagcgctggatctggagtgcgcctccagcaacgatcaaacctttacccactcggatatgcggcgtaccgcgcgtctgctgatgcagttcctgccaggcaccgacttcatctcctccggttactcggcggtgccgaactacgacaacatgttcgccggttccaacgaagatgccgaagacttcgatgactacaacgtgatccagcgcgacctgaaggtcgatggcggcctgcggccggtgcgtgaagaggacgtgatcgccattcgcaacaaagccgcccgcgcgctgcaggcggtatttgccggcatgggtttgccgcctattacggatgaagaagtagaagccgccacctacgcccacggttcaaaagatatgcctgagcgcaatatcgtcgaggacatcaagtttgctcaggagatcatcaacaagaaccgcaacggcctggaggtggtgaaagccctggcgaaaggcggcttccccgatgtcgcccaggacatgctcaatattcagaaagccaagctcaccggcgactacctgcatacctccgccatcattgttggcgagggccaggtgctctcggccgtgaatgacgtgaacgattatgccggtccggcaacaggctaccgcctgcaaggcgagcgctgggaagagattaaaaatatcccgggcgcgctcgatcccaatgaacttggctaa

SEQ ID NO: 221319 - DNA, 690 bp, Klebsiella pneumoniae
atggaaattaacgaaacgctgctgcgccagattatcgaagaggtgctggtggagatgaaatcaggcgcagataagccggtctcctttagcgcgcctgcggcttctgtcgcctctgccgcgccggtcgccgttgcgcctgtgtccggcgacagcttcctgacggaaatcggcgaagccaaacccggcacgcagcaggatgaagtcattattgccgtcgggccagcgtttggtctggcgcaaaccgccaatatcgtcggcattccgcataaaaatattctgcgcgaagtgatcgccggcattgaggaagaaggcatcaaagcccgggtgatccgctgctttaagtcttctgacgtcgccttcgtggcagtggaaggcaaccgcctgagcggctccggcatctcgatcggtattcagtcgaaaggcaccaccgtcatccaccagcgcggcctgccgccgctttccaatctggaactcttcccgcaggcgccgctgctgacgctggaaacctaccgtcagattggcaaaaacgccgcgcgctacgccaaacgcgagtcgccgcagccggtgccgacgcttaacgatcagatggctcgtcccaaataccaggcgaagtcggccattttgcacattaaagagaccaaatacgtggtgacgggcaaaaacccgcaggaactgcgcgtggcgctttaa

SEQ ID NO: 221320 - DNA, 525 bp, Klebsiella pneumoniae
atgaataccgacgcaattgaatccatggtacgcgacgtgctgagccggatgaacagcctacaggacgggataacgcccgcgccagccgcgccgacaaacgacaccgttcgccagccaaaagttagcgactacccgttagcgacccgccatccggagtgggtcaaaaccgctaccaataaaacgctcgatgacctgacgctggagaacgtattaagcgatcgcgttacggcgcaggacatgcgcatcactccggaaacgctgcgtatgcaggcggcgatcgcccaggatgccggacgcgatcggctggcgatgaactttgagcgggccgcagagctcaccgcggttcccgacgaccggatccttgagatctacaacgccctgcgcccataccgttccacccaggcggagctactggcgatcgctgatgacctcgagcatcgctaccaggcacgactctgtgccgcctttgttcgggaagcggccgggctgtacatcgagcgtaagaaactcaaaggcgacgattaa

SEQ ID NO: 221321 - DNA, 1833 bp, Klebsiella pneumoniae
atgcgctatatcgctggcattgatattggcaactcctcgacagaagtcgccctggcgacggtcgatgacgcaggtgtgctgaacattcgccacagcgcgttggctgaaaccacgggtataaaaggcacattacgaaatgtgttcggtatccaggaggcgctaacgcaggcggcaaaagcggccggcattcagctcagcgatatttcgcttattcgcattaacgaagccacgccggtcattggcgatgtggcgatggaaaccatcacggaaaccatcatcaccgagtccaccatgatcggccataacccgaagacacccggcggcgtcggactgggggtcggcatcaccatcacaccagaggcgctgctgtcctgctccgcgggcactccctatattctggtggtctcctcggcctttgactttgccgatgtcgccgcgatggtcaatgcggcaacggcagcgggctatcagataaccggcattattttgcagcaggatgacggcgtgctggtcaataaccggctacagcaaccgctaccggtgatcgacgaagttcagcatatcgaccggattccacttggcatgctggcggccgtcgaggtcgctttacccggtaagatcatcgaaacgctctccaacccctacggtattgcgaccgttttcgatctcaacgccgaggagaccaaaaatatcgtgccaatggcgcgggcgctgattggcaaccgctcggccgtggtggtgaaaaccccctccggcgacgtcaaggcccgcgctattccggcaggtaatctgctgctcatcgctcaggggcgcagcgtacaggttgatgtggccgccggggcggaagccatcatgaaagcggttgacggctgcggcaaactggacaacgtcgcgggagaagcgggcaccaatatcggcggcatgcttgagcacgtgcgccagaccatggcggagcttaccaataagccagctcaggagatccgcattcaggatctgctggccgttgatacggcggtgccagtcagcgtgaccggcggtcttgcgggggagttctcgctggagcaggcggtgggtatcgcctcgatggtcaagtcggatcgcctgcagatggccctcatcgcccgtgaaattgagcacaaactgcagattgcggttcaggtgggcggcgccgaagcggaggcggccattcttggggcgctcaccactcccggcaccacgcgcccgctggcgatcctcgatctgggcgccgggtcgaccgacgcctccattatcaatgcgcagggagagatcagcgccactcacctggccggcgccggcgatatggtcacgatgatcatcgcccgcgagctggggcttgaggaccgctacctggcggaagaaatcaaaaaatatccgctggcaaaagtcgaaagcctgtttcatctgcgtcatgaagacggcagcgtccagttttttccgtcggccttaccaccgacggtatttgcccgcgtctgcgtggtgaaaccggatgaactggttcccctgcccggcgatctgccgctggagaaagtgcgcgccattcgccgtagcgccaaatcacgcgtctttgtcaccaacgccctgcgagcgttacgccaggtgagccctaccggcaacattcgcgacatcccgttcgtggtgctggtgggcggctcgtccctcgatttcgagatcccccagctggtcaccgacgcgctggcgcactaccggctggttgccgggcgcggcaatatccgcggctgtgaaggcccacgcaatgcggtcgccagcggattactcctttcctggcaaaaaggaggcacacatggagagtag

SEQ ID NO: 221322 - DNA, 351 bp, Klebsiella pneumoniae; identical to SEQ ID NO: 135527

SEQ ID NO: 221323 - DNA, 276 bp, Klebsiella pneumoniae; identical to SEQ ID NO: 213585

SEQ ID NO: 221324 - DNA, 447 bp, Klebsiella pneumoniae
gtgaagcaatcactgggattacttgaggtcagcggtctggccctggccatcacctgcgccgacgctatggcgaaagcggccgccatcacgctgctcgccctggaaaagaccaacggttccggctggatggtggtgaagatcgccggtgatgtggcctctgtccaggcggcggtgatgaccggggccgaactcgccgaacggcagcaggggctggtagcgcagaaggttatcgccaggcccggggaaggcctgctgccggcccgcgtccaggcgccttcaccagcgcctgacgtcgccgtgacggaggagaacacggccctcacagacgccccttcccactctacggagcgggtaacctgcaacctgtgcctggacccacactgcccacgacaaaaaggcgatccccgctcgcagtgcctgcacgccggtaaacgaggtgacgcgtaa

SEQ ID NO: 221325 - DNA, 633 bp, Klebsiella pneumoniae
atggataaacaacagctggcttcgacagtcaacaaagtgctggatgagatgcgccagcgtcccattccaatcggtatctccagtcgccatatccatttagcggcggctgactatgccaggctttttcccgcgcagcccatccagccgaaaaaagcgctgctgcagccgggacaatatgctgcagagcagacggtgaccctggttggccccaaagggcgattaaacaacgtgcgcctgctcggccctttgcgccagaccagccaggtggaaatctcacgcaccgacgcccggatcctcggtatcgccgcgccgctgcgcatgtccggcaatctgcagggcacgccggggatccgcctgataagcccctttgccgaactgcagctgagcggcgggacgattgttgcccagcgacatattcatatgtcgccacttgatgcgttgatcctgcgcgtctcccatggcgatagcgtcgcggtggcgatcgaaggcagcgacaggcggcttatcttcgacaacgtggcggtccgcgttgccccggatatgcgtcttgagatgcacatcgatactgacgaggccaatgcggcaggcgctgacgctgcgcaagcctgggcaacgctggtgacgaagccatga

SEQ ID NO: 221326 - DNA, 492 bp, Klebsiella pneumoniae
atgaaccacgcgatgctgcagcgtatcgtcgaagaggtcgccgcccgtctgcgccgtcgcgccctcagcacggccacgctcagcgtggcccagctcggcgaagcggatatccgcagcctgctgtgccagcacgcttcgctgcgcatcgtgcaggtggatttaccgctgctggagcagcttgccggccagcgtgcgctggcggcagccggttgcgcactgcatgaggcgatggcctggggcgttcgggtacagctaacgctgcttcccgccctgctccccgcgctggcggtaaaaaaactcgcccgcttgccgctgacgttcagcgatccgcttggccagcccgtcaggcttcacgccgcgtcggtgctcacctatgccgacgtagcccgtttcagtggcggctatctggtgctgcgccgccgtcccattatcaccgccctcgcccgcgaagcggccgtcgcgcggcatgttcaattgattaagcaggagtga

SEQ ID NO: 221327 - DNA, 276 bp, Klebsiella pneumoniae; identical to SEQ ID NO: 135532

SEQ ID NO: 221328 - DNA, 1017 bp, Klebsiella pneumoniae
gtggctatctatacccgaaccggcgatgccggcagtacatcactctttaccggccagcgggtcagcaagacgcatccgcgcgtcgaagcctacggcaccctggatgaactgaacgctatgctgagcctgtgcgtctgcgccgtcgctgaagaggaacagcgcaccctgctcgaagccctgcagcagcacattttttggttcagcgcggagctcgccagcgacagcgaacagccatcaccgggtaagcgctatatcagcagcgaagagattgccctgctggagcagaccatcgatcgcgagatggcccgcgtgccggcgctgcaccagtttgtattgcccggacgctgtgaagccgccagccgtctgcacctggcccgcaccgttgccagacgggcggagcgccggctggtcgagctggcggcagaggttactatccgtcagatactgctgcgttatctgaaccgcttatctgactgcctgtatgccctggcgcgcagcgaggatcatgccgctcaccagcgccgccttgtgacggagatcgcggcccgctatctggccgccagcgggtcgcctgcgcccgacgcgcccaaagcccaggccgggtcgctctcctttcacgagctgcatcagctcatccgtcaggccattgaacacgcccgccagctgcaggcgccggtggtggtcagcatcgttgacgcacacggcaccgaaaccgtgacctggcgaatgcccgatgcgctgctggtcagcagcgagctggcgccgaaaaaagcctggaccgccgtcgccatgaaaaccgccacccacgagctcgcgacgaccgtacagccaggcgctgcgctgtacggtctggagagccatctgcagggcaaagtcgtcacctttggcggcggatatccgctgtggcgcgatggccagctaatagccggcatcggcattagcggcggcagcgtcgagcaggatatggctattgcacaggctgccatggcggccattaacgtgagaactcatcaatga

SEQ ID NO: 221329 - DNA, 1389 bp, Klebsiella pneumoniae
atgaatacagcagaactggaaacccttatccgcaccatcctcagtgaaaagctcgcgccgacgccccctgcccctcagcaagagcagggcattttctgcgatgtcggcagcgccatcgacgccgctcatcaggcttttctccgctatcagcagtgtccgctaaaaacccgcagcgccattatcagcgccctgcgggagacgctggcccccgagctggcgacgctggcggaagagagcgccacggaaaccggcatgggcaacaaagaagataaatatctgaaaaataaagccgctcttgaaaacacgccgggcatagaggatctcactaccagcgccctcaccggcgatggcgggatggtgctgtttgagtactcgccgttcggggttattggcgccgtggcgcccagcaccaacccaacggaaaccattatcaacaacagtatcagcatgctggcggcgggtaacagcgtctatttcagcccccatcccggcgcgaaaaaggtctcgttgaagcttatcgccaggatcgaagagatcgcctaccgctgcagcgggatccgtaacctggtggtgaccgttgccgagccgacctttgaagccacccagcaaatgatgtcccacccgctgattgccgttctggctatcaccggcggccctggcattgtggcgatgggcatgaaaagcggtaaaaaagtgatcggcgctggcgccggcaatccgccgtgcatcgttgatgaaaccgccgatctcgtcaaagccgccgaagatatcatcagcggcgccgccttcgattacaacctgccctgtatcgccgaaaaaagcctgatcgtcgtcgcctccgtcgctgaccgcctgatccagcagatgcaggattttgacgcgctgctgttgagccgacaggaggccgataccctgcgtgccgtctgcctgcccgacggcgcggcgaataaaaaactggtcggtaaaagcccggctgcgctgctggcggcggcgggtctcgccgttccgcctcgcccccctcgcctgctgattgccgaggtggaggcgaacgacccctgggtgacctgcgagcagctgatgccggtgctgccgatcgtcagggtcgccgactttgacagcgccctggcgctggccctgcgcgttgaggagggtctgcaccacaccgccattatgcactcgcagaatgtctcgcggctcaatctggcggcacgcaccctgcagacctccatttttgtcaaaaatggcccgtcttacgcgggaatcggcgtcggcggcgaagggtttaccaccttcaccatcgccacgccaaccggagaaggcaccacctccgcgcggacgttcgcccgcctgcggcgctgcgtgttgaccaacggtttttccattcgctaa

SEQ ID NO: 221330 - DNA, 1113 bp, Klebsiella pneumoniae
atgcataccttttctctgcaaacgcgcctctacagcggcccgggcagccttgccgcgctgcagcgctttagccatcagcacatctggatcgtctgcgacggcttcctggcgcgctcgccgctgcttgaccgactgcgcgccgcgctgcccgccagcaaccgcgtcagcgtgttcagcgatattacaccggatccgaccattcacaccgtggcgaaagggatagcgcagatgcaggccctgcgtccgcaggtggtgatcggcttcggcggcggctcggcgatggatgccgccaaggctatcgtctggttcagccagcagggcggtctgcctgtcgacacctgcgtggcgatccccaccaccagcggtaccggttcggaagtgaccagcgcctgcgtcatcagcgacccggaaaaagggatcaagtacccgctgttccatgaggcgctctgtcccgacatggcgatcatcgacccgacgctggtggttagcgtaccgcccacaatcacagcccataccgggctggacgcgctgacccacgccctggaggcatgggtctcgccgcaggccaccgattttaccgatgcgctggcggaaaaggccgccaggctggtgtttcgcgccctgcccgttgcgattcgtcagggcgactgcattgcgacccgcagcaaaatgcacaatgcatcaaccctcgccggtatggcctttagccaggctggccttgggctcaatcatgcgatcgcccatcagcttggcggccagtttcacctcccccatggcctggccaatgcgctgctgctgaccgcggtgatccgcttcaatgccggcgagccgcgagcggctaagcgctatgcgcgcctggccagggcctgccgcttctgcccgcccgcagctggcgaacaggaggctttccaggcgctgcttaccgcggtggaaacgctgaaacagcagtgcgccattcccaccctcaagggcgcgctgcaggaaaagtatccccttttcttatcgcgaattcccgccatggtgccggccgcgctgaccgatgccaccctgcgcaccaacccgcgtccggtcgatggcgcggccatcgcgcaactgctggagaacctgcaatga

SEQ ID NO: 221331 - DNA, 1353 bp, Klebsiella pneumoniae
atgagtgaagcgatagggccactatcaagcattgatgcggcggagatccgcgaacgcgttcgggccgctggcgtcgtaggagccggtggcgcaggctttccgacccacatcaaactgcaggcccgggtggacaccgtgctggtgaacgccgccgaatgcgaaccgatgctgaaggttgaccaacagctgatggctcagcaggctgaccgactgattcgcggcctgggttacgcgatgaccgccaccggcgcccgggaagggatcattgccctgaaggcgaaatatgctccggcgattgcggcactaaccccacgactcccggaatgggcccggctgcatattctgcctgacgtctatccggccggggatgaggtgctcactatctggctggcgacgggacgccgcgtaccacctgccgcgctgccggtcagcgtcggcgtggtggtcaataacgtgcagacggtgctcaatatcgccagagccgtggaacagggctatccggtgactcgccggacgttgaccgtcaatggcgccgtcgcccgtccgctgacgctggccgtaccactgggtatatcgctgcgcgaggtgctggatctggccggcggcgcgacggttgacgatccggggtttatcaacggcggtccgatgatgggctcgcttattacctccctcgagacaccggtcaccaaaactaccggcggcctgctggtgctcccgggcaaccatccattgatccagcgacggcggcaggatgaacgaacgctgctcgccatcgcccgcaccgtctgtgaacagtgccgtttatgcacagatttatgcccccggcacctgatcggccatgagctttcccctcatctgctggtgcgggcggtgaactatcgccaggcggccactccgtcgctgctgctcagcgccctgacctgttcggagtgcaacgtttgcgagagcgtcgcctgcccggtgggtatttcccccatgcgcatcaaccgtctgctgaaacgtgagctgagggcgaaaaacctgcgctacgacggaccgctgcgtccggcggacgagatggcgaagcaccgcctggtgccggtcaagcggctcatcagcaaactgggacttgatccctggtatcaggaagcgccgctgacggcggtggaaccggaggtggcctgcgtcaccctgcccctgcgccagcatatcggcatcagcgccgtgccctgcgtcgcgccgggagagcgggtaacgcgcggccaggtgctggcggatatccccgccgacgccctcggcgcgccggtgcacgccagtattgacggcctggtctccgccatcacggagcaggccattacgcttgtaagaggttaa

SEQ ID NO: 221332 - DNA, 351 bp, Klebsiella pneumoniae
atggaaccgcaaacccctaccgaacgcatgatccaggagtatgtcccgggcaaacaggtcactctggcgcatctcattgccaatcctggcaaagatctgttcaaaaagctgggtctgccggacgcggtctccgccatcggcattcttaccattacccccagtgaagcatcgattatcgcctgcgacatcgccaccaagtccggcgcggtggagatcggttttctcgatcgcttcaccggcgcggtggtgttgaccggcgatgtctccgccgtggagtacgcgctcaggcaggtcacccgcaccctcggtgagctgatgcgcttcaccgcctgcccaattacccggacctga

SEQ ID NO: 221333 - DNA, 441 bp, Klebsiella pneumoniae
atgcaacgcctgatgcttatcggacccagccagtgcggcaaaacctcgttgacccaggtattgcgtggcgaaaccctgcgctatcagaaaacccaggccatcgtctggacgccggccgccatcgatacccccggggaatatctggaaaaccgctgcctgtacagtgcactgctcaccagcgcctgcgaggccgatgtcatcgcgctggtactaaatgccgatgcgccctggtcacctttttctccggggtttaccgccccgatgaaccgcccggtcatcggggtgatcactaaagccgatttggccgccccgccccgtctgcaacaggtccggacatggctcgagacggcgggcgccggacatatctttatcaccagcgcgttaaccggcgacgggcttgatgacctgttcgcctgcctgaatgcagaggaatatcaatga

SEQ ID NO: 221334 - DNA, 1215 bp, Klebsiella pneumoniae
atgacctataaaatcatggcgattaacgccggcagctcctccctgaagtttcagctgcttaacatgccgcagggggcgttgctctgtcaggggttgatcgaacgtatcggcctgcccgaggcccgcttcacgctgaaaacgtcggcacagaaatggcaggagacgctgcccatcgccgatcaccatgaggcagtgaccctcctgctggaggcgctgaccggccgcgggatcctgagcagcctgcaggagatcgacggcgttggccaccgcgtcgcccacggcggcgaacgcttcaaagacgccgcgctggtctgcgacgataccctgcgggagatcgagcgcctggcggagctggcgccgttgcataacccggtcaatgcgctgggcatacgtctctttcgccagctgttacccgcggtaccggcggtggcggtttttgataccgcctttcaccagaccctggcgccggaggcctggctctatcccctcccctggcgctattacgccgagctgggcattcgccgctacggttttcacggtaccagccatcactatgtcagcagcgcgctggcggaaaagctgggcgtaccgctgagcgccctgcgggtagtaagctgccatctgggcaatggctgtagcgtctgcgccatcaaaggcgggcagtcggtgaatacctcaatgggctttaccccgcagtccggggtgatgatgggcacccgcagtggcgatatcgacccgtcgattcttccctggctggtggagaaagaagggaaatccgcccagcagctcaaccagctgctgaataatgaatccgggctgctgggcgtctccggcgtgtcatctgattaccgcgacgtcgaacaggcagctgacgccggcaacgaacgggcggctctggcgctgtcgctgtttgccgaacgcattcgcgcgactatcggcagctatatcatgcagatgggaggtctggacgcgctgatctttaccggcggcataggcgagaattccgcccgtgcgcgggcggcgatctgccgcaatttgcattttctcggcctcgcgctggacgacgagaaaaaccagcggagcgcgacctttattcagacggataatgcgctggtcaaagtggcggtgatcaataccaatgaagagctaatgattgcccgcgacgtcatgcgtcttgcattgccgcaggcgcgcgagctggcggtgtcggcataa

SEQ ID NO: 221335 - DNA, 903 bp, Klebsiella pneumoniae
atgcgccctggcgaaggtaagcggaaaggtgaaaacgtggctgttgcacaatgtcccgcctcgtgcggagaacttatccagggctggatcctcggcagcgaaaagctggtctcctgtccggtggactggtacagcaccgtcgaggtcgagaccggggtaccgcgaaaagacgagcggccgctgtcgcgggcgatggtcgaccagctgctggcccactggggctaccccccagcgctgagccagcagatccgcatcaccctgcactcaacgatcccggtggccaaagggatggccagcagcaccgccgatatcgctgccaccgccgtcgccaccgcccatcatctgggccatctactggatgagccgacgctggcgcgcctgtgcgtcgcgctggagcctaccgacagcaccctgtttcgccagctgacgctgttcgaccataataccgccgccacgcaaatcgcctgtccccctccgccggcgctcgacctgttagtgctggagagcccgctgacgctgcgcaccaccgactatcaccagctgccgcgcgagccgggcctgttggcaaacgcctcccggctgcaactggcgtgggagaaagttcaacaggcctgccactgcggcaacccgcagctgctgggcgaagcagcaaccatcagcgccattgccagccagcagctgttgcctaagccggggtttgacgcgctgctggacctggtggaaagcgcagggctctatggtctcaacgtggcgcacagcggcagcgtcgtcggcctgctgctggaccgccgtcggcatgacgtcgaatttctgcaatggcggctgacagacagcgacatcgccgcccactggccgcagcagcatctgttggcgatggtgcccgggggcgtcatcctgcagtag

SEQ ID NO: 221336 - DNA, 1077 bp, Klebsiella pneumoniae
atggccttactgaaaagcgcccatggcggcaatatccgcgaggccgccgccctgctgggcatagcccccggcgagctgctggattttagcgccaacatcaatccgctggggatgcctgcctcgctcaggcaggcgatcgttgacaacccaggctgcgccgaacgctaccctgacgtcgagtatcaacagctgcatcaggcgctggctgcccaccatcagttgccggcggcgcatatcctcgccggcaacggcgaaactgaatcgatcttcaccctcgtccacggccttaagccgcggcgggcgatgatcgtcattcccggtttcgcggagtaccggcgggcgctgcagacggtggactgcgaggtggtggagtatgccctgcgggagcgcgatggctggcagctgaccgacgcgatcctcgatgccctgactccggcgctggactgcctgtttctctgcaccccgaacaaccccaccggcctgctgccggagcggggcctgctggaagccattgcgcagcgctgccgggcgctgaacatcagcctgatcctcgatgaggccttcctcgactttatccccgaccagccggggtttattcctctgctggcgcagcatccgcacgtctgggttttgcgatcgctgaccaaattttatgccattccggggctgcgtctcggctacctgctgaacgctgatgcccaggcggtggcccgactgcgcgcgcgacaaatgccgtggtccatcaacgcctatgccgccctggccggggaaattattctccaggatcgggcgtatcagcgggccacctggcagtggctgcaggaggagggagcgcgtttctatgcgcagctgcaggagatggccgggctgaccgtatggcccgggcgtgctaactacctgttcttgcgctgcgacagagccgattttgacctgcaatatgccctgctgcgccagcatgtgctgatccgcagctgcgccaactacccggggctggatagccgctatttccgggtggcgatccgcagcgccgaggaaaacgaccagctgctggcggcgttgcgccgggtgctggcctga

SEQ ID NO: 221337 - DNA, 1254 bp, Klebsiella pneumoniae
atgtcgggaaacaactcaggattaagccgtcgccgtctgttgcagggcgcgggcgccatgtggttaatgagcgtgagccctgtcgggttggccgccgccgcgcgggtggtcgccgttcgcgtctggccagcatcgacctacacgcgtgtcacggtagaatcgaatcatgtgctgaaataccggcagtttgccctcagtaatccggaacgggtagtggtcgatctggaaggggttaacctgaactctgtgctgaaaggcatgggcggccagatccgcgatgacgatccctttattaagtccgcccgcgtgggccagtttgatccacaaaccgtgcgcatggtctttgagctcaagcagaacgttaagccgcagctgtttgccctcgcgccggtggctggctttaaagagcgtctggtgatggacctctaccccgccaacgccaccgatgttcaggatccgctgctggcgctgctcgaggattacaacaaaggcgacctggagcgtcaggtgccgccggcgcaaagcgggccgcagccgggcaaagccgggcgcgaccggccgattgtcatcatgctcgatcccgggcacggcggcgaagactccggcgccgtgggaaagtatcgcacccgcgaaaaagacgtggtgctacagatcgcccgtcgcctgcgggcgctgatcgacaaagaaggcaatatgaaggcctatatgacccgcaacgaagacgtgtttatcccgttgaaagtgcgtgtcgccaaggcgcagaagcagcgcgccgacctgttcgtgtcgattcacgccgacgcctttaccagccgccagcccagcggctcttcggtgtttgccctctccaccaagggggccaccagtaccgcggcaaaatatctcgcccagacgcagaacgcctcggatctgatcggtggggtcagcaagagcggcgaccgctatgtcgaccacaccatgttcgatatggtgcagtccctcaccatcgccgacagcctcaaattcggaaaggcggtgctggagaaaatgggcaatatcaataatttgcacaagaatcgggtagagcaggcgggctttgcggtactgaaggcgcctgatatcccctccattctggtggagacggcgtttatcagtaacgtggaagaagagcggaaactgaaaacggccaaattccagcaggaggtggccgagtcgatcctcgccgggattaaagcctacttcgccgacggcgcgacgctggcccgccgcggataa

SEQ ID NO: 221338 - DNA, 1332 bp, Klebsiella pneumoniae
atggtgaaggaacgtcgcactgaactggtagaaggattccgccattctgttccctatattaatgcccatcggggaaaaacgtttgtcatcatgctgggcggcgaagccattgagcatgaaaatttctcaaatattgtcaatgacataggattattgcatagcctgggcattcgcctggtggtggtctatggcgcccgcccgcagattgacgctaacctcgccgagcaccatcacgagccggtctatcacaagcagacgcgagtgactgacgccaaaacgctggagctggttaagcaggcggcggggatgctgcagctggagatcaccgcccgtctgtcgatgagcctcaacaacaccccgctgcagggggcccatatcaacgttgtcagcggcaactttatcattgcccagccgctgggcgtcgatgacggcgtcgattattgccacagcggacgcattcgccgcattgacgaagaggcgattcatcgtcagctcgacagcggcgccattgtcttgatggggccggtcgcggtgtcggtcaccggcgagagctttaacctgacttcggaagagatcgctacccagctggccatcaagctgaaggcggagaaaatgatcggcttctgttcgtcgcaaggggtttacaaccaggccggggaaattgtctccgaactgttccctaatgaggcgcaggcccgcgtcgaagagctggaagcagacgaagactataactccggcaccgtgcgcttcctgcgcggggcggtgaaggcctgccgcagcggcgtacggcgctgccacctgatcagctatcaggaaaatggcgcgctgctgcaggagctgttttcacgcgacggcatcggcacccagatcgtcatggagagcgcggagcagatccgtcgggcgaccatcaatgatatcggcggtattcttgagctgataagcccgctcgagcagcagggcattctggtacgccgttcccgcgaacagctggagatggagatcgacaaattcaccattattcagcgcgataacaccaccatcgcctgcgccgccctctatcctttcccggaagagaagatcggcgaaatggcctgcgtggcggtgcatccggattaccggagctcgtcgcggggagaggtgctgctggagcgtattgccgctcaggccaggcagatgggactgagcaaactgttcgtgttaaccacccgcagcatccactggttccaggagcgcggcttcacgccggtggatatcgacctgctgccggagagtaaaaagcagatgtataactatcagcgccggtcgaaggtgctgatggccgacctcgcttaa

SEQ ID NO: 221339 - DNA, 321 bp, Klebsiella pneumoniae
atggaaaccaaaccgaactggctggtcagacatattaatctcatcaccaccgcggtcgccctctatccgtggttgctgatgatactgctcctctgggataaccagcgccatcatcagcatggctatgccgcgctcggcgccgccatcgcgatattatttctgctggccctgacgtccggcatgaatcttctcatctcctcgctggtgattttttgtgcccgctgttccaccccaccgctgaccggcggcggcgcagtccgctttttcaccatgaactcgatctcggcgctctggcttatccctctgttcttcagttactga

SEQ ID NO: 221340 - DNA, 1845 bp, Klebsiella pneumoniae
atgactttcgaacaactactgctggcggcggtggagcagcgtctgctgcggccgctggacgtccagtttgccctgatggtggcgcaaaacgacccgccggcggtcaagctggcggcggccttgctgagccgggatgccggcgaggggcacgtctgtctgccgctctcgcggttgagcggcgacgaggcgctgagcggtaaagcgggggagatccgcgatcggctgctggccgaagccggcgcgccggaggactggcccgcgctgctgctcgcgtcgtcggcggtaagctgcggcgatgccccggcgccgatgattttgtgcggcgaccggctctacctgaaccggatgtggcgcaacgagctgaccgtcgcccgcttcttcaatgacgccaaccgggtgctggagatggatgaggcgcggctggcggccaccctgaatgcgctgtttcccgccaccggcgaaaccgactggcaaaaagtggccgcggcggtggcgctgacccgccgcatctcggtgatctccggcggtcccgggaccgggaagaccaccaccgtggcgaagcttctggcggcgctgatccagattgacgacagtccacgctgtcgtattcgcctggcggcaccgacggggaaagcggcggcgcgtctgaccgaatcgctgggcgcggcgctgagaaaattgccgctgaccgacgcgcagaaagcgttgattcccaccgaggccagcacgctgcatcgtctgctgggcgcccagccaggcagccagcggatgcgctatcacgccggcaacccgctgcatctggacgtgctggtggtggatgaagcctcgatgatcgacctgccgatgatgtcgcggcttatcgacgcgctgccggcccacgggcgggtgattttcctcggcgatcgcgaccagctggcctccgtagaagcgggggcggtgctgggggatatctgcgcctgggcgagttcgggctataccgccgcgcgggcgcaggagctgacccggctgaccggttcgccggtgccggcgggcgagggggctatcgcgggcgtgctgagagacagtttgtgcctgctgcaaaagagctatcgcttcggtagtcactccggcatcgggagcctggcgcgggcggtgaacgctggcgcgcgcgcggaggtgaaggccacgctgcgccagccgtttgacgatatcgcgcttcatcccctcagcacgaccgaagagtacgaagccatgctcggcgcggctcagcagggctatgagcgctacctgcagctgcgccgcgagcgggccgaaccgcaggccatgctggccgctttcagcgaattccagctgctgtgcgcgctgcgcgaggggccgtacggcgtgagcggcgtcaatgagcggctggagcagcggctcaaccgccagcgggtgatcgccctgccgcgccactctcgctggtatgatggccgaccgatcatgatatcgcgcaacgacagcgcgctggggctgtttaacggcgatatcggcatcgccctggagcgcaacggcgagctgcgggtgtggttcctgatgcccgacggcgccatcaagtcggtgcagccgagccgtctgccggagcatgacaccgcctgggcgatgaccgtgcataaatcgcagggctcggagttcgaacacgcggcgctgatcctgccggcgcgcagcgtcccgctggtgacccgcgaactggtctacacggcgatcacccgcgcgaaacggcggttgtcgctctatgccgacgagcaggtgctctcccaggccattgtgacgcgcaccgaacggcgcagcggcctggcggagattttcgccgggcgcgaagccccctga

SEQ ID NO: 221341 - DNA, 3537 bp, Klebsiella pneumoniae
atgaccgacaccgctgagtctttggatcccctgcgcttgcccctgatcggcgagcgcctgatagaagcctctgcgggcaccggaaaaacctttaccatcgccgcgctgtatctgcggctgctgttggggctgggcggtgaggccgcctatccccgcgccatcagcgttgaagaactgctggtggtgacctttaccgaggcggcgaccgaagagctgcgcggccgtatccgcagcaacatccacgaactgcgcatcgcctgcctgcgcggcgaatccgacaatccgctctacagcgcgttgttggcggagatcgccgataaagatgacgctgcgaagacgctgctgctggctgaacggcagatggacgaggcggcggtattcaccatccacggcttttgccaacggatgctgagccttaacgccttcgagtcgggcatgctgttcgagcaacagctgatcgaggatgaatcccgcctgcgctatcaggcctgcgccgatttctggcgccgccactgctatcccctgacccgcgatatcgcggcggtgatccacgacgtctggaaagggccgcgcgatctgctgaagtcccttgaccgctggctgcagggcgaagcgccgcagcttaagtcgccgccagcccctaacgagacgctggccgaacgccatcagcagatcatcgcccgcattgactcgctcaagcagcagtggcgcgagcaggtgggcgagatcgaaggcgtgctggaaaattccggccttgaccggcggaagtttaatcgcggcaaccagggcaagtggatggagaaagtgaacgcctgggcgcaggaagagacgttaagctaccagctgcccgacgcgctggagaaatttgcccagtcgtttctgctcgagcgcaccaaagccggtggcgaaccgccggtgcatcccctgtttagcgccgtagagtcgttgctggcctcctcgctgacgctcaccgatctggtgctggcgagagcgatggtcgagatccgcgatgcggtcgcccgcgaaaagcgccgccgcggcgagctggggtttgacgatatgctcagccggcttgacgaggcgctgcgcggcgacagcggcgagacgctggccagcgccattcgccagcgttttccggtggcgatgatcgatgaatttcaggacaccgaccctcaacagtaccggatttttcgccgcatctggcgccggcagccggagacggctctgctgctgatcggcgatccgaagcaggccatctacgcctttcgcggcgccgatatctttacctatatgaaagcgcgcggcgacgttgccgcgcactacaccctcgataccaactggcgctcctcgccgggcatggtgggcagcgtcaatcggctgttcagcctcagcgataaccccttcatgttccacgagatcccgttcctgccggtgaaggcggcggcgaagaacaaggggctgcgctttaccgttgacgcggcggacgtaccggcgatgaacgtctggctgatgcccggcgacaccgtcgggtctggcgattatcagacctttatggcgcagctctgcgccacgcagatccgcgactggctgagcgccggtcagcaggggcgcgcgctgctgtggcgcggggaaacctcgcgcccggtacaggcttcggatattaccgtgctggtgcgcaaccggctggaggcagcgcaggtacgtgaagcgctgcagacgctgggcattccctcagtctacctctccaaccgcgacagcgtttttgagacgctggaggcccaggagctgctctggctgctgcaggcggtgctggccccggagcgggaaaataccctgcgcagcgcgctggcgacgtcgatgtttggcctgaccgcgctggatattgaaaacctgaaccaggacgagcaggcgtgggacgcgctggtggaagagttcagcgaataccgccagatttggcggcagcgcggggtgatgccgatgctgcgggcgttgatgacagcccggcatatcgccgagaacctgctggcgacccgcggcggcgagcggcgtttaaccgacattctgcacatcagcgaactgctgcaggaggcggccagccagctggaaagcgagcatgccctggtgcgctggctggcgcagcatattgccgagccggacagcaacgccgccagccagcagatgcgtctcgaaagcgataagcacctggtgcaaattgtcaccattcacaagtcaaaagggctggaataccccctggtctggctgccgtttatcgcccggtttcgtaaacaggaccaggcgttttaccacgatcgcgagacgttcgcggcggtgctggatctgggccaggatgaggccagcctcgagctggcggaggcggaacgactggcggaagatctgcgcctgctgtacgtggccctgacccgcgcggtctggcactgcagcctcggcgtggcgccgctcagcagccggaaatccggcaacagcgatttccacctcagcgcgctgggacggctgctgcaggcgggcgaagccatggacgccgccgggctggctgcgcggctggcggacttctgtcatggcgatattgcattacagagaccgggcgaactggatctcaccccgtggcaggcgcccgcggcgaccatcccgcgattgtcggcgcgcgagctgcagcgccgcatcgccgacgactggcgggtgaccagttactccggactgcagcagcatggtttcagcggcgggcaggatttgctgccgcatctggatgttgatgccgccggcgtcggcgaagtcgtggaagagccgcagctgactccgcaccagttcccgcgcggcgccgcgccggggaccttcctgcacagcctgtttgaggagctggacttcacccagccggtgccggaagggtggatggcggagaagctgcagctgagcgggtttgacgcgcagtgggcgccggtgctgaccgactggctggggggcgtgctgaagacccgcctgccggggccggatatcgcgctcaatcagcttgcggcgcgggataaacaggtggagatggcattttacctgcccatcgcccagctgctgacggcggagcgccttgacgcgcttatccgccagtacgatcccctctctgccgacacgccgccgctggatttccgccaggtgcgcggcatgctgaagggctttatcgatctggtcttccgtcacgaaggccgttattacctgctggattacaaatccaactggctgggggaagatcgcgaggcctacacccggccggcgatggagcaggcgatgcgtgcccaccgctacgatctacagtatcagctgtatagcctggcgctgcaccgctatctgcgccaccggctggccgattatgactatgaccgccacttcggcggcgtgatttatcttttcctgcgcggcatggacgggcaggagggggggcaggggatcttcaccacccggccggtgcgaccgctgattgacggtctggatcagctttttgccggagaaactcaggaggaggcctcatga

SEQ ID NO: 221342 - DNA, 2886 bp, Klebsiella pneumoniae
atgccccgcagtttatggttcaaggtttttgttgtgctggccgccctctgggcgccgtttagtcaggccgacaccggatggcagccgattcaggagacgatccgcaaaagcgaaaaagatacgcgtcagtatcaggcgatccgccttgataacgacatggtcgtgctgctggtttccgatccgcaggcggtgaaatcgctgtcggcgctggtggtgccggtgggatccctgcaggatccggccgatcatcaggggctggcgcattttctggaacatatgacgctgatggggtcgcaaaaatatccccagcctgacagccttgcagagtttcttaagctgcacggcggcagccataacgccagtaccgcgccctaccgcaccgcgttttatcttgaagtggaaaatgatgcgctggacggggccgtagatcgcctggccgacgccatcgccgcgccgctgctggataaaaaatatgccgaccgcgaacgtaacgcggtcaacgccgagctgacgatggcccggacgcgagacgggatgcgcatggcccaggtcagcgcggagaccatcaacccggctcacccggcggcccacttctcgggtggcaacctcgagacgctcagcgataagcccggcagcccggtgcttgatgcgctgcacaccttccgcgatagctggtactccgccaatctgatgaaagcggtgatctacagcaacaagccgttgccggcgctggcgcgcatggctgcggacacctttggccgcgtgccgaatcgtcagatcagcaggccggaaattaccgtcccggtggtcacggatgcgcaaaaaggcatcattattcactatgtgccggcgatgccgcgtaaagtgctgcgcgtcgagtttcgcatcgacaacaacagcgatcgcttccgcagcaaaaccgatgagctggtcacctatcttatcggcaaccgcagcccgggcacgctctctgactggttgcaaaaacaaggtctggcggaaggtatccgcgccgattccgatccggtggtaaacggcaacagcggcgtactggcgatctcagccaccctcaccgacaaaggcctggcgcaccgcgatgaagtgacggcggccattttcagctacctcggcctcctgcgtactcagggcatcgataaacggtacttcgacgaactggcgcatgtactggcgctggatttccgctatccgtcgatcaaccgcgacatggactacgtggaatggctggcggataccatgatccgagtgccggtcgagcatgcgctggacgtggtgaatattgccgaccagtacgacccgcaggcgatcaaagaccggctggcgatgatgaccccgcagaacgcccgtatctggtatatcagcccccaggagccgcataacaagacggcctactttgtcgatgcgccgtatcaggtggataagattagcgagcagacgttcgctgactggcagcacaaatcgcaggccatccagctgcagctgccggcgctcaacccctatattccggatgacttcacccttatcaaaagcgataaagcctggccgcatccgcagctgatccttgatgaaccgacgctgcgggtggtgtatgccccgagccagtattttgccagcgagccgaaggcggacatctccctggtgctgcgtaatccccaggcgatggacagcgctcgccggcaggtgatgtttgccctcaacgattatctcgccggcatcgccctcgaccagctcagtaaccaggcggcggtcggcggcatttcgttctctaccggcgctaataatggattaatggtcaatgccaacggctatacccagcatcttccggcgctgttcagcgatctgctgcagggatacttcagctatacgccgaccgaggagcagctggagcaggccaaatcctggtatgcgcagatgatggattccgccgagaaaggcaaagcctacgatcaggcgataatgccgatccagatggtctcgcaggtgccgtacttccagcgcgaagtgcgccgggcgctgctgccctccatcactcttaaagaggtgctcgactaccgcgccaacctgaaaaccagggggcgtcctgaactgatggtgatcggcaatatgaccgccgatgccgccacgaccctggcccgccagatccagcagcagctgggcgctgacggcaacgaatggtgccgcaataaagacgtggtggtgaaccggcagcagctggcgatcttcaacaaagcgggcaacagcaccgactccgcgctggccgcggtgttcgcgccgcccaatgttgatgagttcagcagcaccgccgccagcaccctgctgggacagattattcagccgtggttctacaaccagctgcgtaccgaagagcagctcggctacgcggtctttgccttcccgatgaacgtggggcgccagtggggcatgggcttcctgctgcagagtagcgataagcaaccggccttcctctggcagcggttccaggccttcttccccaccgcggaggcgaagctgcgggcgatgaagccggaagagtttgctcagctccagcaggcggtgataagccagatgctgcaggcgccgcagacgctgggcgatgaagcctcgaaactgagcaaagatttcgatcgcggtaatatgcgttttgattcacgtgataaagtagtggctcagattaaactgctgacgccgcaaaaacttgccgacttcttccatcagacggtggtggatccgcagggcatgacgatcttgtcccagatttccggtagccagaatggcaaagcggactatgcccagccgaaaggcggcaaagtgtgggaaaacgtcagcgcattgcagcaatccttacccctgatgcgagagaatgaatga

SEQ ID NO: 221343 - DNA, 3378 bp, Klebsiella pneumoniae
atgttaagggtataccactcaaaccggctggatgttctcgaggcgttgatggagtttatcgtcgagcgccagcggctggatgacccttttcaggccgaaatggtgctggtgcagagtaccggcatggcgcagtggctgcagatgaccctggccgcgcgcttcgggattgccgccaatatcgagttcccgctgccggcgagctttatctgggatatgttcgtgcgcgtcctgaaagatattcctggcgaaagcgccttcagcaagcagagcatgagctggaagctgatgaccctcctgccgcagcacctggaggaagacgattttatcctgctgcgccagtatctgagtgatgacggcgacaagcgcaagctgtttcagctggccgcccgggtggcggacctctatgaccagtacctcgtctatcgcccggagtggctgatgcgctgggaggccggccagcgggtggaaggtcttggcgatgcccagcagtggcaggcgccgctgtggcaggctctggtgagctacaccgccgagctggggcagccgcagtggcaccgcgccaatctctaccagcgctttatcagtaccctggaaaaagcggacgaaccgcccgccgggctgccgtcgcgcgtcttcatctgcgggatttccgcgctgccgccggtctatcttcaggcgctgcaggcgctgggtaagcatgtcgatgtctatgtcttgtttaccaacccctgccgctactactggggagacattaaggatccggcgttcctggcgaagctgctgtcgcgccagcggcgccatcaccgcgaggcgcgcgcgctacccctgtttcgcgacaccgagcaggcgccggggttgtttaatgacgccggggaacaggatgtcggcaacccgttgctcgcctcctggggcaaactggggcgcgactatatctacctgctggcggggctggagcgctatgaggagctggacgcttttgtcgacatcgcccccgataacctgttgcataacctgcagtcggatatccttgaactacgcaacgcggcggtggctgggcagagcgcagaggcattcgcccacagtcgcgacaaacgtccgctggcgctggatgaccgcagtctgagcattcacgtctgccacagtccgcagcgcgaagtggaggttctgcacgataggctactggcgatgctggaggcggatccgacgctcacgccgcgggatatcatcgtcatggtggcggatatcgacagctacagcccctatatacaggcggtgtttggcgccgccagcggcgatcgctggctgccgtgggcgatctccgaccgtcgcgcccgagagtcgcacccggtgctgcaggcgtttattacgctgctctcactgccggacagccgctttgccagtgaagatgtgctggcgctgctggacgtcccggtgctggcggcgcgctttaatatcacggaagaagggctgcgctacctgcgccagtgggtgaacgagtccggcgtccgctggggaatggatgacgacaacgtccgtgagctggacctgccggcgaccgggcagcatacctggcggttcggcctcacccgcatgctgttgggctacgcgatggacagccgcgagggagagtggcaatcggtgctgccgtatgacgaatccagcggtttgatcgccgagctggtgggcaacctcgcgtcgctgctgatgcagcttaatctgtggcgacgcggcctggcccagcagcggccgctggcggagtggctgccggtctgtcgcgatctgctgaatgactttttcctgccggacagtgagaccgaagcggcgctggcgctgattgagcagcagtggctggcggttattgatagcggtctggaggcgcagtatggcgagcaggtgccgctgacgctgctgcgcgatgagctggcccagcgcctcgatcagcagcggatcagccagcgctttcttgccggcccggtcaatatctgtaccctgatgccgatgcgttcgatcccctttaaggtggtgtgcctgctggggatgaatgacggggtttatccgcgcacgctaccgccgctgggctttgatttaatgagccagaagccgcagcgcggcgaccgcagccggcgcgatgatgaccgctatctgttcctcgaagcgctgatgtccgccgagcagacgctgtatatcagctatatcggccgttcgatccaggacaacagcgagcgttttccttcggtgctggtgcaggagctggtggattatatcggccagagtcactgtctcgccggtgacgaagagcttgactgcgacgccagcgaagcgcgggttaaagcccacatcacccatctgcatacgcgcatgccgttcgacgttgccaatttccaggaagacgagaacaagagctacgctcgtgaatggctggcggccgccggccagcagggagaggcgcatagcgattttatacagccgctcaccgcaccgccgattgacagcctgccgttcgatcagctcctgcgcttctggcagcacccggtacgcgcgttctttcagcagcgtttgcgggtcaatttccgcgccgaagaggacgatattccagacgacgagccgttcactcttgaagggctgagccgttatcaactgaatcagcaactgctcaatacgcttattgaggagcaggacgtctcggctatgttccgccgctttcgcgccgccggcgagctgccgtatggcgcctttggcgagctggtctgggagacgcagcgcctggagatgcaggcgctggccgagcgggtgatggccgagcgccagcaggcgcagagcatggagatcgatctgcagtgcggcggcgtgaacctgaccggctggctgcagcaggtgcagccggacggtctgctgcgctggcggccttcgctgctgagcgtctcccaggggatgcaactttggctggaacaccttgtctactgcgccagcggcggcaccggcgagagccggctgtttgtgcggaaagagggagagtggcgctttccggcgctggcgcccgccgaggcgcaggcgtaccttaacgagctggtggatggctatttgctggggatgtcgcagccgctgctgctgctgccggaaagcggtggcgcctggctgaaagcctgttacgacgccgaaaaggatgtcatcttaatggacgaagagacgcagcagaaagcgcggagcaaattcctgcagacctacgaagggaacatggtggtcagtggggagggcgccgatatctggtatcaacgcctgtggcgttcgctggagccggcgcattacgaagaaatcattgcccagacgcagcgttatctgttaccgctatatcgttaccatcggtccacacaaatttaa

SEQ ID NO: 221344 - DNA, 324 bp, Klebsiella pneumoniae; identical to SEQ ID NO: 135551

SEQ ID NO: 221345 - DNA, 408 bp, Klebsiella pneumoniae; identical to SEQ ID NO: 135552

SEQ ID NO: 221346 - DNA, 558 bp, Klebsiella pneumoniae
gtgagccgccgcggattttccctggcggaggcgcttatcgccatggccatcggctcgctgctgctgatgggggcctgccgctttctgcctgccctgcagcgtcatattctgcgccagggcgaacagctggccctggagaacgagctatggcagcgcgtgcatgccgtgggaaaacatctgcagcgcgccgggtactgccggggagcgtgcggcggagccgggctggagctagccgctggcggcgagtgtctgattatgcgctgggatgcgaacagcaacgggagatgggaaacctcccccgcggcagcggcggagagcaccggctttcgcctgcgcgacggcgcgctggagaccctgcgcggggccagcgactgccgcggcggcggatgggagaaaatcaccaacccggccgccatcgtggtgacgcgcttctcggtacaacgtcaggtcaccccgggcttcgcgccggagctgagcgtgacgctggcggcgcgctccgcgcaacagacgggcctgacgagcgaggttgagcagcgggtgacggggtataacctgtga

SEQ ID NO: 221347 - DNA, 552 bp, Klebsiella pneumoniae
atgcaaagcttttttgcgtatctggccgggaaagctattttccgtcgtcgcgccagggctaatcgccgcggcatactcgacgccatgaacagagaacatggctacaccctgatggaaaccctggtaacgctgacactgatgatgatcctcagcgtcggcggcctgtacggctggcagcgctggcagcagcagcaacgactgtggcaaaccgccgtccaggtgcgggattttctgctctttctgcgcgatgacgccaacgcctacaaccgggaccgcgtgcttcgcgtcggccaggacgaagtgggctggtgcctgagcgcggatggggaggggcctgactgcgcctcggggacatccttcacgctgcgcccgcgctggccggggatcacgctggctggcgttacgcctggtctggggttttatggtctgcgcagcaccgcctgggcggggaatctgcggctgcagagcgcggccggcagctggagcattgtgatctcacactgggggcggattcgtttatgccgcagcgacagcgcaggagggtgtcagtga

SEQ ID NO: 221348 - DNA, 795 bp, Klebsiella pneumoniae
atgaaacagtatcttgatttgatgcagaaagtgctcaccgagggcacgccaaaaaatgaccgcaccggcactggcacgatctccatattcggccatcagatgcgttttaacctgcaggaaggcttcccgctggtgaccaccaagcgctgtcatttacgctccatcatccatgaacttctgtggttcctgcagggcgacaccaacatcgcctatctgcatgagaacaacgtcaccatctgggacgagtgggcggatgagaatggcgacctggggccggtctacggcaaacagtggcgttcctggcctgcgccggatggccgccatatcgaccagatcagcacggtgatgaaccagctgaaaaacgacccggactcccgccggatcatcgtctcggcatggaacgtcggcgagctggataaaatggcgctggcgccgtgccacgccttcttccagttctacgtcgccgacggcaagctctcctgccagctgtatcagcgttcctgcgatgtgttcctcggcctgccgttcaatatcgccagctatgcgctgctggtgcatatggtggcgcagcagtgcgatctgcaggtcggtgatttcgtctggaccggcggagacacccatctgtacagcaaccatcttgagcagaccaacctgcagctaagccgcgaaccgcgtccgctgccgaagctggtcatcaaacgcaagccggcgtcgatcttcgactaccgctttgaagacttcgagattgaaggttacgatccgcacccgggcattaaagcgccggtggcgatttaa

SEQ ID NO: 221349 - DNA, 876 bp, Klebsiella pneumoniae
atgaatagtggctacctgcattttccggagttcgatccggtcattttttctctaggtccggtctccctccactggtacggtttgatgtacctggtgggctttgtctttgcgatgtggctggccacccgtcgggcgaatcgtccgggcagcggctggacgaaaaatgaagtggaaaacctgctctacgcgggcttcctcggcgtcttcctgggcggccgtatcggctacgtgctgttttacaacctgccggtatttcttgccgatccgctgtatctgttccgcgtctgggacggcggcatgtcgttccacggcggcctgatcggcgtgatcctggtgatgattatcttcgccagacgcaccaaacgcaccttcttccaggtctccgattttatcgcgccgctgatcccgtttggccttggcgccgggcgtctgggtaacttcatcaacggtgagctgtggggccgcgtggacccgagcttccactacacgatgattttcccgggctcccgtgccgaagacctggcgctgctgccgacgcatccggaatggcaatcgctgttcgatacctacggcgcgctgccgcgtcacgcgtcgcagctgtacgagctggcgctggaaggcgtggtactgttcctgatcctcaacctgtttatccgtaaaccgcgcccgaccggctccgtttccggtctgttcctgattggctacggcctgttccgcatcatcgtggaattcttccgccagcccgacgcccagttcaccggcggctgggtgcagtacatcagtatggggcagattctttcgatcccgatggtgcttgcgggtatcattatgatggtttgggcttaccgccaccgtccgcagcaacagaattcttga

SEQ ID NO: 221350 - DNA, 2247 bp, Klebsiella pneumoniae
atgctcactcggttgcgagaaatagtcgagaaggtcgcgagcgcgccgcgtttaaacgaggcgctggatattctggtgacggatgtctgccaggcgatggagacggaagtctgctcggtttacctggctgacaatgaccgacgctgctattacctgatggccacccgcgggttaaaaaaacctcgcgggcgcaccgttgcgctggcgttcgatgaaggcctggtggggctggttggccgcctggcggaacccatcaacctcgccgatgcgcaaaaacaccccagcttcaaatatatccccgccgtcaaagaggaccgcttccgcgccttccttggcgtgccgatcattcagcgccgccagctgctgggcgtgctggtggtccagcagcgcgagctgcgtcagtttgatgaaagcgaagagtctttcctcgtcaccctcgccacccagatggcggcgatcctctcccagtcccagctgaacgccctgttcggccagtatcgtcaaacgcgcattcgcgctctgccggcctcttccggggtggcgatcgccgagggctggatggacgtcagcctgccgctgatggagcaggtgtatgaagcctcgacgctggacaccgcctcggaacgcgaacgcctgaccggtgcgctggaagaggcggccaacgagtttcgtcgctacagcaaacgctatgccgccggggcgcaaaaagagacggcggcgatcttcgatctctactcgcacctgctctccgacgcccgcctgcgtcgcgagctgtttgccgaagttgacaaaggcgccgtcgccgagtgggccgtcaaaaagatcattgagaagttcgccgaacagtttgccgcgctgagcgacggctatttgaaagagcgggccggcgatctgcgtaccctgggccagcgtctgctgttccatctcgacgacagtattcaggggcccaacacctggccggcgcgcattatcctcgtggcggacgagctgtcggccaccaccctcgccgaagtgccgcaggatcgcctggccggcgtggtggtgcgcgatggcgccgccaactcccatgccgctattatggtgcgggccctcggcatcccaacggtgatgggcgccgatattcagccctcgctgctgcatggccatacgctgattgtcgatggctatcgcggtgaactgctggtggatcctgaacctgtcctgttgcaggagtatcagcgccttatcagcgaagagaacgaactcagccgcctggcggaggacgatctccagcgcgcgtcggagctgaaaagcggcgagcgggtgaaagtcatgctcaacgccggcttaagcccggagcacgaagagaagctcggcagctttgttgacggcattggcctctaccgcaccgaaattccctttatgctgcagagcggcttcccctcagaagaggagcaggtcgcccagtatcagggcatgctgcagatgtttaacagcaaaccggtgaccctgcgtaccctggacatcggcgcggataaacagctgccgtatatgccgatcagcgaagagaacccgtgcctcggctggcgcgggatccgcatcaccctcgatcagccggagatctttttgatccaggtgcgggcgatgctgcgcgccaacgccgccaccggcaacctcagcattttgctgccgatggtgaccagtctggaggaggtggatgaggcccgtcggctgatcgatcgcgccagccgggaagtggaagagatgatcggctacgccatcccacgtccgcgcctgggggtgatgctggaggtcccgtcgatggtctttatgctgccgcagctggccagccggatcgattttatctcggtagggacgaacgacctgacccagtacctgctggccgtcgaccgcaacaatacccgggtcgccagcatgtatgacagcctgcatcctgcggtattgcgtgcgctggcgatgatcgcccatgacgcggagcgctttggcatcgatctgcgcctgtgcggcgagatggcgggcgacccgatgtgcgtgacgatccttatcggcctcggttaccgccatctgtcgatgaacggccgctcggtggcgagggtgaagtatctgctgcgccgcattgatatcgaagaggcgcaggagctgtcgcgtcgcagcctcgatgcgcagatgaccgccgaggtgcgccatcaggtggcggcctttatggagcgtcgcggtctcggcggcctgatccgcggcgggcggtag

SEQ ID NO: 221351 - DNA, 531 bp, Klebsiella pneumoniae
gtgattgatgacgatggctaccgcccaaatgtcggtattgtaatctgtaatcgtcagggccaggtgatgtgggcccggcgctatggtcagcactcgtggcagttcccgcaagggggcattaatccaggagaatccgcagagcaggcgatgtatcgggaattgtttgaagaggtcgggttaagccgtaaagatgtgcggatcctggcatcaacccgtaactggctgcgttacaagttgcctaaacgtttggtgcgttgggacacaaagccggtttgtatcggccagaaacaaaagtggtttcttttgcagttgatcggcaacgatgcggacatcaatatgcaaaccagcagtacacctgaatttgatggttggcgctgggtgagttactggtacccggttcgccaggtggtgtcgtttaagcgcgacgtctaccgccgggtgatgaaagagttcgccagcgtgaccatgtcgctggcggagagcgcacctaagccgcaaaacgcgcctgcttatcgacgtaaaagaggttaa

SEQ ID NO: 221352 - DNA, 696 bp, Klebsiella pneumoniae
atgcccgctatcgctccgctcgcctcaccgccgcaaagtcaggaacagctgctggcccaggcccgccagctggccggctattcgctgggcgagctggcggcgctggcggggatccccattccgcgcgatctgaagcgcgataaaggctggacgggcattctgctggagctgtggctgggcgccagcgcaggcagtaaacccgagcaggatttcgccgcgctgggggtcgagctcaaaacgatccccatcgacagccggggacgcccgctggagaccactttcgtctgcgtcgccccgttaaccggcaatagcggcgtcacctgggagagcagccatgtgcggcataagctgcagcgcgttctgtggatcccggtggagggtgaacgcaccatcccgctggcggcgcggcgcgtcggcgcaccgctgctgtggagcccggacgaagacgaggagcgccaactgcgcatggactgggaagagctgatggatctcattgttctcggtgaggtagagcgcattaccgcccgccacggcgaggtgctgcagttaagaccgaaagccgccaacagtaaggcgctgaccgaagccatcggcgcccgcggggagacaatcctcacgctgccgcgcggtttctatctgaaaaagaattttaccgccgccctgcttgcccgccatttcttgttacaacacgattaa

SEQ ID NO: 221353 - DNA, 714 bp, Klebsiella pneumoniae
atgttatttgcatggataaccgatcctaacgcctggctggcgctgggcacattgacgctgctggagatcgtgctcgggatcgacaatattattttcctctctctggtcgtggctaagctccccaccgcccagcgcgcccatgcgcgccggatcggtttgatgggcgcgatggtcatgcgtctggcgctgctagcctcaatcgcctgggtcgttaagcttaccaacccgctctttaccgttttcggtcaggagatctcgtttcgcgatctgatcttgctgctcggcgggctattccttatctggaaagccagtaaagagatccatgagtctatcgaaggtgaagaggaggggctgaagaccaacgtccactccttcctcggcgctatcgtgcagatcatgctgctggatatcatctttagcctcgattcagtgatcaccgccgtcggcctgtcggatcatctgttcatcatgatggcggcggtggtgatcgcggtgggggtgatgatgttcgccgcgcgacccatcggcgattttgttgaccgtcatccttcggtgaaaatgctggcgctgtcgtttctgatcctcgtcggctttaccctgatgctggaaagcttcgacgtccatgtgccgaagggatacatctatttcgccatgttcttctctatcgcggtggagagccttaacctgctgcgtaataagaaaaacccgctgtaa

SEQ ID NO: 221354 - DNA, 219 bp, Klebsiella pneumoniae; identical to SEQ ID NO: 134704

SEQ ID NO: 221355 - DNA, 1041 bp, Klebsiella pneumoniae
atgcagtatcaccgtatcccacacagttctcttgaaatcagcaccctcgggctgggaaccatgacttttggcgaacagaatagcgaggccgatgcccaccagcagctcgattacgcggttgccaacggcatcaacctgatcgatgtcgctgaaatgtacccggtcccgccgcgcccggaaacccaggggctgactgaaacctacgtcggcaactggctggcgaaacgcggcaatcgcgaaaagctggtgctcgcctcgaaagtcagcgggcccgcgcgcaataacgacagcagcattcggcccaatcacgtcctggaccgcaaaaatatccgcgaggcgctgcacgccagcctgaagcggctgcagaccgattatctcgatttatatcaggttcactggccgcagcggccaaccaactgctttggcaagctgggctatacctgggccgacgccgcgcccgccgtgacgctgctggataccctcgaagcgctgaccgagttccagcgcgccgggaagatccgctacatcggcgtgtcgaacgaaaccgccttcggcgtgatgcgttatctgcacctggcggataagcacgacctcccgcggatcgtgactattcagaatccttacagcctgctgaaccgcagctttgaagtcggcctcgcggaagtgagtcagttcgaaggcgtggagctgctggcctactcttgcctggctttcggcacactgaccggcaagtatctcaacggtgcgaagccggcgggggcgcgcaatacgctgttcagccgctttacgcgctacagcagcgagcagtcgcagaaagcggtagcggcctatgtggatatcgccaaacgccacggcctcgatccggcgcaaatggcgctggcctttgtgcgtcggcagccgtttgtcgccagcaccctgctgggggcgacgaccatgacgcagctgcaggccaacgtggaaagtttgcagcttgagctgagcgaagaggtattagcggagattgaggcggtgcatcaggtttatacctacccggcgccgtaa

SEQ ID NO: 221356 - DNA, 1194 bp, Klebsiella pneumoniae
atgagtgagtcagtacatactaacccttcgctgtactcgaaagggatggtggcggtgatctgcgcccagttcctgtcggccttcggcgacaatgcgcttctcttcgccaccctggcgctgatgaagcagctctattatccggagtggagccagccggtcttgcagatgttgtttgtgggcgcttacatcctctttgccccctttgtcggccagttcgccgatagctttgccaaaggccgggtgatgatggtggccaacggcctgaaactgctcggcgccggctgcatctgcttcggcgtcaatccgtttatcggctatacgctggtggggattggcgccgccgcctattcgccggccaagtatggcattctcggcgaactcaccaccggcgataagttagtgaaggctaacggactgatggagtcctcgaccatcgcggcgatcctgctgggctccatggccggcgggatcctcgccgactggcacgtgctggcggcgctgatcgtctgcgcgctggtctacggcggggcggtagtggctaacctgtggatacccaggctgccggcggcgcgtccggggcagtcgtggcgttttaagccaatgacgcacagcttcttcagcgcctgccggacgctgtggcgcaacggcgaaacccgcttttcgctgatgggcaccagcctgttctggggcgctggcgtgaccctgcgtttcctgctggtgatctgggtgccggtggcgctgggcattaccagcaacgccatgcccacctatcttaatgcgatggtggcggtggggattgtgctgggtgccggggcggcggctaagctggtgaccctggagacggtgtcgcgctgtatgccggccgggattttgatcggtatcgcggtgatagcctttgcggtgcagcagtcgctgctgccggcgttcggtctgctgctgctgctcggggtgttcggcgggttctttatcgtaccgctgaacgcgctgctgcaggagcgtgggaaacattcggtcggggcaggtaacgccattgcggtacagaacctcggtgagaacgtggcgatgctgctgatgctggggctctattccctggcggtgagcgtgggcgttccaccggtcgccgtggggataggctttggcgcggtattcgccgtggccattgccgcgctgtgggtctgggggcggcgtaaataa

SEQ ID NO: 221357 - DNA, 2160 bp, Klebsiella pneumoniae
atgcttttgggatttttcagactgctgttcaaggggttataccgggtcagactgaccggcgacacgcaggctttataccagcaaaaggtcttaatcaccccgaaccacgtctctttcctcgacggcattctgctggcgctgtttttgccggtccgaccggtttttgcggtctatacctcaatcagccagcgctggtttatgcgcgcgctgacgccgattatcgattttgtgccgctggacccgaccaagccgatgtcgatcaaacatctggtgcgcctgattgagcaggggcggccggtggttattttcccggaagggcgaatttcggtcagcggctcgctgatgaaaatttatgacggcgccgcctttgtcgccgccaaatcgcaggcgaccattgtgccgctgcgtattgaaggcgccgaactgacgcccttcagccggctgaaggggctggtgaaacgtcgcctgttcccgcgtattcagctgcatctcctgccgcccacccatctgccgatgcccgaggcgccgcgcgcccgcgaccggcgcaaaatcgccggggagatgctgcatcagatcatgatggaagcccggatggcggtgcgcccgcgggaaaccctgtatgagtcgctgctggcggcgcaggaccgcttcggcgcgcgcaaaccctgcgtggaggatatcaacttccagccggatacctatcgcaagctgctaaccaaaaccctgtttgtcgcccgcattctggaaaaatacagccagccgggcgagaagatcggcctgatgctgcctaacgccggcatcagcgcggcggtgattttcggcgctatcgcccgcgggcgtattccggcgatgatgaactataccgccggggtgaaagggctcagcagcgcgatagccgccgcggagctcaacaccattttcacctcgcgcaccttcctcgataaaggcaaactctggcacctgccggagcagctgacccaggtgcgctgggtattcctggaagatcttaaaggcgatatcaccctcgctgacaaactgtggatttttgctcatctgctggcgccgcgtctggcgcaggttaagcagcagccggaagacgcggcgatgatcctcttcacctccggttccgagggcaatccgaaaggggtggtgcacagccataagagtctgctgtccaacgtcgagcagatcaaaactatcgccgactttaccgccaatgaccgctttatgtcggcgctgccgctgttccactcttttggcctcaccgtcggcctgctgacgccgctgcttaccggggcggaagtgtttctctatcccagcccgctgcactatcgcgtggtgccggagctggtctacgatcgcaactgtacggtgctgttcggcacttcgaccttcctcgccaactatgcccgtttcgccaatccgtacgatttctaccgcctgcgctacgtggtcgccggggcggagaagctgcaggagagcaccaaacagctgtggcaggataaattcggcctgcgcattctcgaaggctatggcgtgaccgagtgcgcgccggtggtctcgattaacgtgccgatggcggcgaaggtcggcaccgtgggccgcatcctgccggggatggacgcccgcctgctggcgatgccaggcattgagcaaggggggcggctgcagctgaaagggccgaacatcatgaaaggctacctgcgggtggaaaaccccggcatgctggaagcgcctgcggcggaaaaccagcacggcgagatggaagcgggctggtatgacaccggggatatcgttaccttcgacgagcagggctatgtccgcattcagggccgcgcgaagcgcttcgccaaaatcgccggcgagatgatctccctcgagatggtggagcaggtggccctcggcgcgtcgccggacaaaatgcacgccacggcgattaaacaggacgccagcaaaggcgaggcgctggtgctgtttaccaccgataatgaactgactcgtgaagccctgctgcgctacgctcgccagcacggcgtaccggagctggcggtgccgcgagatatacgctggctgaaacagctaccggtgctcggcagcggcaagccagactatgtcaccctgaaaaatatggtcgacgaggcggaaacaacccatgagtga

SEQ ID NO: 221358 - DNA, 1017 bp, Klebsiella pneumoniae
atggcgactattaaggatgtagcccgactcgcaggagtctccgtcgctaccgtctcccgcgtcatcaacaactctcccaaagccagcgaagcctcgcgtcagtccgtgggcgcggcgatggaaaccctgaactatcaccccaacgcgaacgcccgggcgctggcccagcagtcaacggaaaccgtcggcctggtggtgggcgatgtctccgaccccttcttcggcgcgatggtcaaagccgtcgaacaggtggcctaccgcaccggcaattttttgctgattggcaatggctaccacaacgtgcagaaggagcgccaggcgatagagcagctgatccgccatcgctgcgcggcgctggtggtgcacgccaaaatgatccccgatgaggaactggcggggttaatgaaacagatccccggcatggtgctgatcaaccgcatcctgcccggatatgaaacccgctgcgtggcgctggacgaccgctacggcgcctggctggcgacccgccatttgatccagcaggggcacacgcgtatcggctatctgtgctcaaaccacgatatctccgatgcggaagatcggctgcaggggtactacgcggcgctggaggagagcggcctgccgtgcaacgaccggctggtcacgtttgccgagccggatgaaagcggcggcgaacaggcgatgaccgaactgcttggccgcggccgccactttagcgccgtcgcctgctataacgactcgatggccgccggcgcgatgggggtgctgaatgacaacggcatcgacgttccgcgggagatttcgctgattggcttcgacgatgtcctgatttcgcgctatgtccgcccgcggttgactaccgtccgctatccgatcgtcacgatggcgacccaggcggccgagctggctttagccctggcggagcagcggccggcgccggagatcacccatctgttcagcccgacgctggtccgtcgtcactcggtggtcgccccgcaggaaggcgataagtcatag

SEQ ID NO: 221359 - DNA, 480 bp, Klebsiella pneumoniae
atgacgatcctgccgctgtacgctgcgccgcagttcgccccgcaggtgaccgactggttgtggcaggcctttggcggcgagacgctgccgcggcaattcttcgccagcatcgtgcagcatagccagtcggcggaggcgctgccgttgacctttattgccgtggaaggcgagcagttgctcggcacgattggcctctggcgctgcgatttgatcagccgccaggatctgtttccctggctggcggcgctgtacgtcgcgcccgccgcccgcggtcaggggctggccggaaaactgcagcggcatgtgatcgattatgcccgccgcgcgggctttcgggagctctatctctactccgcctgccgggatttctatgaacgcttcggctggcgctacatcggcgaggggctggattacccggccaccgccgtgcacctctatcgctatgacttatcgccttcctgcggggcgaccaccgagtga

SEQ ID NO: 221360 - DNA, 774 bp, Klebsiella pneumoniae
gtggaaaaagcgatagttccgccggaaaagaagccctatcaggagattggtgatgacctgcgcgcccagatcgcgcaggggcgctacccggtcgggtcgcgtttgccgccggaacgccatattgccgaaacctatggcgtcagccggaccatcgtgcgcgaagcgctgctgatgctggagctgcaggggacggtggatattcgtcagggatccggggtgtatgtcatgcgcattcctcacgagaacgacagcgaagaggagcagctgctcagcagcgacgtcggcccgtttgaaattctccaggcgcgccagctgctggagagcaacatcgccgcctttgccgcgaaaatggccacccgcgccgatatcgacaatctgaagcggattattgaacaggagcagcgggcaatcgctctcaacgacaccgcgcaggataacgctcgtctgttccatctggtgctcgccggggcgacgcagaaccagatgctgttggcgacggtagagcggatctggctgcagatggacagcagcccgctgtggcagcagttcaatgtgcatattgccagccgcgcctggcggctgaaatggctcggcgaccggcagaccctgctcgccgcgctgcggcgtcgcgatgtgatgggcgcctggcaggcgatgtggcagcatctggaaaacgtcaaaaacagcctgctggagctgtccgatgaggacgcccccgactttgacggctatctgttcgactcagtgccgatttttcaggggaagctggtatga

SEQ ID NO: 221361 - DNA, 1428 bp, Klebsiella pneumoniae
atgactaccgtacggatgaccattcccgatgattttatccttggcgcggcggcttccgcctggcagaccgaaggctggagcgggaaaaaaccagggcaggactcctggcccgatctctggtacaaaaacgatcgccacgtctggcataacggctatggcccggcggtggccaccgattttatcaaccgctttcaggaagatgtgcagctgatgaagctggccgggctgacccactaccgcacctcaatcaactggtcgcgctttctgaccgactatgaaaacgtcacggtggatgaggagtatgcggcctattacgaccagctgttcgatgcgctactggccaacggcatcacgccgatgatctgccttgagcattatgaattgcccggctatctgctggaaaagtatggcggctgggggtcgaaaacggtggttgagctgtttgtacgctacgcggagaaggtgtttgcccgctaccacccgaaggtaacgcgctggtttacctttaatgagccaattgtggtgcagacccgggtctatctggatgctctgcgctggccctatgagcagaacaccagcacctggatgcagtggaactatcataaggtgctggcgaccgccagcgtcgtgaagcggtttcgcgagctcggctatcccgggaccgtcggctgcatcctcaatccggaggtgacctacccacgctcacgcgccccccatgacctgcgcgcggcggagatctacgatctgttctacaaccgcatgttcctcgacccgctggtgcacggcgtctggccgccggagcttctcgcgctgcttgagcagcatcaggtgacgtgggataccagcgaggaggatctggcggttatccgcgagcacaccgtcgatgagctggggattaatctttactacccgcaccgggtcaaagccccgtcgcgggcctggcatccgcacaccccgttccatccggcctggtattatgagccgtttgagctgcccggccggcggatgaacgcctcccgcggctgggaaatctacccgcaaatcatctttgatatggcgatgcggataaaaaatgactatcgcaacatcccgtggttcgtggcggagagcgggatgggggtggaaaacgaaggccagttccgtaaccgcgaaggcgtcatcgatgacagctaccgcattcgttttatcagcgaacatctgtggcacaccctgcgcgcccgcgaggcaggggccaactgccagggctatatgctgtgggcgtttaccgacaacgtatcgccgatgaacgcctttaaaaaccgctacgggcttatcgaaatcgatctgcaaaaccatcgcgcccggcgacccaaagcctcggcgcactggtttcgtcaactgggcgaacggcgtgaactggtgctggatatcgatgatgaataccgctag

SEQ ID NO: 221362 - DNA, 1338 bp, Klebsiella pneumoniae
atggcattacaggacaaactgatcgacgcgctggggcgtttcgcgacgacattcaacagctatcgctacattatggcgatcaaatcggcgtttattaccctgatgccggtgatcatcgtcggggccttttcggtgctgatctccaatatggtgctggatccgaagaatgggctcgccagcttttcctcgctctcctttcttgcggcgctgaagccgatcaccagcgcgcttaactacgctacgctcaacttcctcaatatcggcgccgtgtttctgatcggtattgagctggggcggatcaacggcatcaaaagcctgtttcccggcctgttggcggtgatctgctttatctgcgtcacgccgaccacggtggagatgatggtcgatggccagatgcacgtggtgaaagatgtcctgctgcgccagttttccgatacccgcagtctgttccttgggatgttcatcgccattctgtcagtggagatttactgctggctggaagggcgcaagggactgaagatcaaaatgccggataccgtgccgccgaacgtctctgcctctttttccgcgctgatcccggcgatcatcaccaccaccgcgatcgccacctttggttttctctttcaccagctgacgggaatgtatctctacgatgcggtctaccaggtggtgcagcagccgctggagcgggtggtgcagagcctgccggggatcctgctgctgatgttcgtcgcccagctgttctgggtgatcggcattcacggcaaccagatgatcaagccgatccgcgagccgctgctgctgggagcgatcaccgtcaatatgagcgcttttgagcaggggaaagaggtaccgaacatcatcacgatgcccttctgggatgtctacatgagcatcggcggctcggggctgaccatcggcctgctgattgcggtgatgatcgccaccaggcgcaaagagatgaaagagatcgccaagctgtcgataggcccggggctgttcaatattaacgagccggtgatcttcgggatgccgatcatgctcaacccgatcctcgccatcccgtttatcatcaccccgctggtgaccggcagcatcggctatttcgccaccctgaccggcttcgccggcaaggcggtggtgatggtcccctggaccacaccgccgctgatcaacgcctggctctccaccgccggctcgatgggggcggtggtgacccagcttatctgcatcgtcgtcgcggtgcttatctatctgcctttcgtcaaaatcgcctcccgccgtgccgatgccgcgcagcgtcaggtagacaatcaacaaaccgccaaccctgtctga

SEQ ID NO: 221363 - DNA, 1011 bp, Klebsiella pneumoniae
atggctacaatgctggatgtctcaattcgcgcaggcgtctcgaaagcgacggtttcccgcgtgttgaacggcacaggtcaggtgaaagagagcacccgccaacaggtctttaaagcgatggaagagctgggctaccggcccaatttccttgcccgttcgctggccaatcagaccagcaatagtatcgggctggtcgtctccacctttgacggcttctactttggccgtctgctgcagcaggcgtcacgccagaccgaagcctggggaaagcagcttatcgtcaccgacggccatgatacgccggagcgcgaagaggaagcggtgcagatgctcgccgaccggcagtgcgatgcgatcatcctctatacccggcacatgagcgagaaggcgatcatgtcgctgattaactcgatcgccatgccgctggtggtgattaaccgcgatgtggcgcaggcccgcgaacgctgcgtgttcttcgaacagcaggaagccgccttccaggccgtggagtatctgattacccagggccaccgcgatatcgcctgcatcaccgtcccgatgcatacccctaccggccaggctcgcctgcagggctaccgcaacgcgctgataaaacatggtattgagtgggatccgagccgggtgaagtatggggactcgacgatgacccgcggctacgaactgtgccgggaactgctggacgagaaagcccgcttcagcgcgctgttttcctgtaacgatgatatggcgctgggggcgtcaaaggcgctgcatcaggcggggctgcgtattccacaggatgtgtcgctgtttggcttcgacgatgcgccaagcgcgaaatggctggagccggggctgtcgacggtttatctgcccatcgacaacatgatcactacggctatcgaccaggcgatcaagcttgccaatcagcagccgatagaaacgatcccgccgtttaccggcacgctggtgcttcgcgagtcggtgacgacgggacctttttttaaataa

SEQ ID NO: 221364 - DNA, 1122 bp, Klebsiella pneumoniae
atgccacactcgctttacgccaccgatactgacctgaccgcagacaacctgctgcgcctgcccgcggaatttggctgtccggtctgggtctatgatgcgcagattattcgccgccagattgcccagctcagccagttcgacgtggtgcgttttgcgcaaaaagcctgctctaacattcatattctgcgtctgatgcgtgagcagggggtgaaggtggactcggtgtcgctgggggagatcgagcgggcgctggcggcaggctacgatccgcagcagaatccagaggatatcgtctttaccgccgatctgatcgacgacgccaccctcgatcgggtgaaggcgttacagatcccggtgaacgccggctcgatcgacatgctgagccagctgggcgaggtgtcgccgggccatcgcgtctggctgcgcgtcaacccgggatttggtcacggccacagccagaaaaccaataccggcggtgagaatagcaagcatggcatctggtacagccacctgccggcggcgctggaagtgatgcgtcgctatcagctgcagctggtcgggatccatatgcatatcggctctggcgttgactatggtcacctggagcaggtgtgcggcgcgatggtgcgccaggtcgtcgactttggccaggatctgcaggccatctccgccggcggcggtctgtcgattccttaccgcgaaggtgaagaggccatcgacaccgcccactattatggcctgtggaaccgcgcccgggagcagatcgcggcccatctggggcacccggtgaaactggagattgagccaggacgcttcctggtggccgagtccggcgtgctggtgtcgcaggtgcgcagcgtgaaagagatgggcagccgtcacttcgtgctgattgacgccggctttaacgacctgatgcgcccggcaatgtacggtagctatcaccatatcaccgctctggcggcggatggccgggatctcagcgccgcgccgcaggtcgaaaccgtggtggccgggccgctgtgcgaatccggggatgtctttacccagcaggagggggggcaaagtcgagacccgcctgctgccggcggtggcgcctggggattatctggtgctccatga

SEQ ID NO: 221365 - DNA, 927 bp, Klebsiella pneumoniae
atgccagccgtcaatttgcgtcatatcgaaatctttcacgcggtgatgaccaccggcaacctgaccgaagcggcgcggatgctgcacacctcgcaacccacggtcagccgcgagctggcgcgctttgagaaggtgctcggcctgcagctgtttgagcggacccgcggtcgcctgcagccgacggtgcagggcctgcgtttgtttgaggaggttcagcgctcctggtatggcctggaccgtatcgtcagcgccgccgagagcctgcgcgagttccgccagggcgagctgtcgatcgcctgtctgccggtgttttcccagtcctttctgccgctgctgttgccgccgtttctcgctcgctacccggaggtcagcctgcagatcgtcccccaggagtcgccgctgctggaggagtggctctccgcccagcgccatgaccttggcctgacggagaccctgcatacccccgcgggcaccgaacgcaccccgctgctgacgctgaatgaagtctgcgtgctgcccgccggccatccgctggcggcgcaggcgacgctgacccccgccgattttcagggcgaaaactacatcagcctgtcgcgcaccgacagctatcgccagctgctcgacgccctgttccttgagcatcaggttaaacggcggatggtggtcgaaacccacagcgcggcctcgatctgcgccatggtgcgcgccggcgccgggatctcggtggtgaatccgttaaccgccctggactatgccgatagcggcgtggtggtgcgccgcttcagcgtcgaggtgccgtttaccgtcagcctgatccgccccctccaccgcccgcgctcggcgctggtcgacgcctttgttgcccacctgcagcagagtctgccgcagatcctcacgccgctggcgtcggtcctgcagagagcataa

SEQ ID NO: 221366 - DNA, 714 bp, Klebsiella pneumoniae; identical to SEQ ID NO: 134716

SEQ ID NO: 221367 - DNA, 327 bp, Klebsiella pneumoniae
atgtttatttttcataaagacaccacccttgaagacctcggcaatggcgtaacccgccgcattctggcccacgacggcaaaatgatggccgtggaggtgaattttgccgccggtgccgtcggcccgatgcataaccatcctcacgaacagctcacctatgtgctttccggcgagttcgagttcaccatcggcgaggagacgcgcgtcgtcagcgccggcgatacgttgtataagcggccggggattatgcacggctgcgtctgcctgcagcccggcacgctgctcgatacctttactcccattcgcgaagattttcttgaaggctaa

SEQ ID NO: 221368 - DNA, 891 bp, Klebsiella pneumoniae; identical to SEQ ID NO: 213539

SEQ ID NO: 221369 - DNA, 903 bp, Klebsiella pneumoniae; identical to SEQ ID NO: 213538

SEQ ID NO: 221370 - DNA, 1128 bp, Klebsiella pneumoniae
atggctgaagtgattttcaacaaactggaaaaagtctactccaacgggtttaaagcggtgcatggtatcgacctgaagattgccgatggcgaatttatggtgatcgtcggcccctccggctgcgccaaatcgaccaccctgcgcatgctggcgggtctggagaccatcagcggcggcgaggtgcggattggggacaaaatcgtcaacaacctggcgcctaaatcccgtggcatcgcgatggtgttccagaactacgccctctatccgcatatgacggtgcgcgaaaacctcgcctttggcctcaagctaagcaagctgccgaaggcgcaaatcgacagacaggtggaagaagcggcgaaaattctcgaactggaagaactgctcgatcgcctgccgcgccagctctccggcggccaggcgcagcgcgtggcggtgggccgggcgatcgtcaaaaaaccggacgttttcctgttcgacgaaccgctctccaaccttgacgccaagctgcgcgcctcgatgcggatccgcatttccgatctgcataagcagttgaaaaaatctggcaaaccggcgaccaccgtctacgtcacccacgatcagacggaagcgatgaccatgggcgaccgcatctgcgtgatgaagctcggccacattatgcaggttgataccccggacaatctctaccaccagccgaaaaatatgtttgtcgctgggtttatcggcgcgccggagatgaatattcgtcccagccagttggttgagcacggtggtcgcctgcatttgacgctgggcgatcagcggctgccgctcaacgatcggctgcaaagcaaagttgaaacccataagaatcagcaggtgttctttggcgtgcgcccggagtttgtctctctctccgatgaaccgtttgccgaaggttcctgcgcgggtgaaatggtacgcgtagaaaacatgggacatgaattctttgtttatctcagggttgctgattatgagctgaccgcccgcgtgccgtcggacgatgcgaagccgatgattgccaagggactgaatcgcaaagtctatttcacctttgatctcaacaagtgtcacatctttgacgccaaaaccgaacagaacctctctctgtga

SEQ ID NO: 221371 - DNA, 1287 bp, Klebsiella pneumoniae
atgaaaaacgtgctgataagcgccaccctctccgccaccctgggccttagcgccttctcttcgctagcgcaggatgtcgacctgcgtatgtcctggtgggggggcaacggccgccatcaggtcaccctcaaggcgctggaggaattccacaaacaaaacccagacatcaacgtcaaagcagaatacaccggctgggacggccatctttcacgcctgaccacccagattgccggcggtaccgagcctgacgtgatgcagaccaactggaactggctgccgatcttttcgaaaaatggcgatggcttttacgatctgaataccctgaaagacgagatcgacctcagccagttcgacgccaaagaactgcagtccaccacggtcaacggcaagcttaacggtattccaatttccgtcaccgcccgcgtcttctactttaacgacgaagcatggaaaaaggcgggcatccccttcccgaaaacctgggatgaactcatggcggcgggaaaaactttcgaaagcaagctcgggaaacagtactacccggtggtgctcgaacaccaggacgtgctggccctgctcaactcttatatggtgcaaaaatacaatcagccggccatcgatgagaaagggcgaaaattctcctacagcaaagcgcagtgggcggatttcttcggtatgtataagaagcttatcgacagccatgtgatgccggacacccgctactatgcctccttcggcaagagcaacatgtacgaaatgaagccgtggatccagggcgaatggggcgggacctacatgtggaactccaccatcaacaaatattccgataacctgaagccgccggcgaagctggtgctgggggaatacccgatgctgccgggcgccaccgatgccggactgttcttcaagcccgcgcaaatgttgtcgattggcaaatcgacgaaaaacccgcaggcggcggcgaaagtgattaacttcctgctgaacagcaaagaaggggtggatattcttggactggagcgcggcgtgccgctgagtaaagcggcggtcacctacctgaccgaggatggggtaatcaaagccgacgatccggcggtgtccggcctgaagctggcgcaatccctgcccaccgctctgccggtctccccgtacttcgacgatccgcagatcgtcgcccagttcggcaccaccctgcagtacatcgactacggtaaaaagtcggtggaagaagcggccgaggacttccagcgccagaccgaccgcattctgcgccgcgcgatgcgctaa

SEQ ID NO: 221372 - DNA, 1344 bp, Klebsiella pneumoniae
atgaataaaatctgggtcgggtgttttctgacgtctctgtatctgccatccgttatggcgcaggcgccgttatcgctggaggagcgactggcgcaaatggagcagcggctaaaggcgacggaggcgcgcgccgccagcgcagaggcggaaattaagacgctgaaaggccagcagcaggccgcgacggtcgcccgcgcggcgcctgcttcgccgcgtttgcagctaaatgacaatggcgaattaaaattttatggcgacgtcgaatttaacctcgatggcgccagtcgcaccggcagcctgacgtcggtcaaaaccagcgcgaataaaagctgggcgcccggcgataaagagcgctgggatattaacggtcgtattctgctgggtttcgatggcagacggaatggcgccgacgggcaatatgccggattcagcgtgcagcctctggcggatatggatggcaaaatgaatcttgatgatgcggtatttttcttcggccagcaggatgactggaaaataaaaataggccgctttgaagcctgggatatgttcccgctgaatcaggatacctttattgaatattcaggtaataccgccaacgatctctattccgatggctatggctatatttacatgatgaaagaggggcgcgggcgcagcagcagcggcggtaaccttctgtttagcaaaacggtggataactggtatttcgaagttaacaccctggtggaggacggcagttcgctgtttgtcgatcagaactatcatggtaacgcgctggaaaaccgcaaaaatgtggtgtacgtgcggccggtggcggcgtggcagtccggcgcctggtcggcggccgcggcgatagagagcaatctcgtcaacaatgcttacggctatcagagccagagcggacgctgggtcgaccagtcaaaccgcaccggctacgggctgaccatgagctggaacaccctgaaaagcgatccgcaggatggggcggtggtcaatctgagtaccgccctgctggacgcggcggacgaaaccgacttcagcgccgggatcaacgccctttggcatcgcgtggagctgggctatatctatgcgcacaataaaatcgaccagttcaatatggccggggtgaccagcgaatgcgatggcgattgcgctatcctggcgccggggcgctatgacatccataccctgcacacctcctggcagttgccgaatatcatggcgatgccgaacttcaatatttaccttggcgcctatgcctcgtggctcgattccacggcagcgaagagcgggaatcccgatgaacgctacggcgcccgggtgcgctttaaatatttcttctga

SEQ ID NO: 221373 - DNA, 1437 bp, Klebsiella pneumoniae
atgatgacttacacaatctcccgggctgaacaggtactccagacacaacgccaggcgctcaatctgcgctggtatccgcactatcacctggcggcccgcgccgggtggatcaacgacccaaacggtctggtgtggttcgacggctggtaccatgccttttatcaacatcacccgtactccacccagtggggaccgatgcactgggggcacgcgcgcagtaaggatctggtgcactgggagcatttgccggtagccctggcgccggagggcccggaggataaagacggctgcttttccggctcggcggtggtcgatggcgataccctggcgctgatttacaccgggcataagttccacggcgatcgtggcgacgaagccaatctgtatcaggtgcagtgtctggccaccagccgcgacgggatccactttgagcgtcaggggatggtggtcgacaccccgccgggtatgcaccacttccgtgacccgaaggtctggcgtgagggagatagctggtacatgatcgtcggcgcgcgcgaaggcgataccggccaggtgcggctgtaccgttcagccgatctgcgccagtggcaggacgcgggggtgctggatgaagcggaaagcaccatgggctatatgtgggagtgcccggacttctttaccctcaacggcaaacgcgttctgatgttttccccacaggggatgcaggccgcggggttcagcaaccgcaatctgttccagagcggctatctgatcggcgagtggcagccaggccagcgttttattcgccatggcgaattccgggagatggataacggccacgatttctatgccccgcaaagcttcgccacccccgatggccggcggatcgtgattggctggctggatatgtgggaatcgccgctgccggagcagcaggacggctgggcgggcatgctctccctgccgcgcgagctgagcctgagcgcggatgaccgcctgcagatgcgcccggcgaaagaagtggagagcctgcgcggcgcctggttcccgtggccggtcagcaccctgaacaaccagcagacgacgatggtcgacaactgcgaggcgatggaggtgaatctgcgctgggactgcgcccgcagcagcgccgagcagtatggtctgcgctttggagatggcctgcgcatctacgtggatgcccaacagcagcgtctggtgctggagcggcattatccgcagtatggcctgtgcgggacgcgcagcgtgccgttgaccgccggggcggatctcaacctgcgaatatttttcgatagctcttcggtggaggtttttgtcaatgacggcgaagcctgcctgagcagccgtatctatccgcaggctccccaccgtgaattagcgttatttgcctggagcggctcggcggcattaaccgaagccggcgcctggcagctcgaataa

SEQ ID NO: 221374 - DNA, 1242 bp, Klebsiella pneumoniae
atgatgaaagcgcctcactcacacagctacccgttgctcagtgccttactatttttctttttcgtgacctggtcgtcatccggctccttgctctctatctggcttcaccaggaggttgggctgaaggcaggcgataccggtattatctatgccgtactgtcggtttccgcgctgtttgcgcaagtttgctatggatttatccaggacaagctggggctgcgcaaacatctgctctggtatatcaccgcgctgctgatcctctctggtccggcgtatctgctgttcggccacctgctgaaaatcaacgtcctgttgggcagcatctttggcgggatctatatcggtttgacctttaacggcggcatcggcgtgctggaatcttacaccgagagggtggcgcgtcagagccagtttgaattcggcagggcgcggatgtggggctcgctgggctgggcggtggccaccttcttcgccggcctgctgtttaacatcaatccgcagctaaacttcctcgtcgccagctgttccgggctggtgttctttatcctgctggcgcgtctgcgggtctcctcggcgccgcatgcgatgcaggaggcggtatcgggcggtaaggtgacgctggaagatgcactgcgcctgctgacgctgccgcggttctgggcgctggtctttttcgtcatcggcacctgcatctacggcgtctatgaccagcagttcccggtctatttctcatcgcagttcgcgaccctgcaggaaggcaatgagatgtatggctacctcaactccttccaggtgttcctcgaggcggccggcatgttctgcgcgccgtggctggtgaaccgtatcggcgccaaaaacggtctgattttcgccggcatggtgatggcgatgcgcatggtggcctccggtctggtggaggggccgctgctgatctccatcaccaaactgctgcacgcggtggagttgccgatactgctggtggctatctttaagtacaacagcctcaacttcgataaacgtctctcctccaccctctatctggtgggcttcgcctgcaccagctcgattatcgccagcgtattgtcgccgctggcgggctacagctatgaaaaatatggcttcgcccagtcctacctgatcatgggcctgctggtgttctgcaccacctttatttccatcttcttgttgcgctccggcaaatcctccgccgatccgctggtgtcgcaacctaccgctatctga

SEQ ID NO: 221375 - DNA, 996 bp, Klebsiella pneumoniae
atggcgtccctgaaagatgtagcaaaactggcgaatgtatctctaatgaccgtctcacgggcgctgaacaccccggagcggctgaagcctgagacactggcccgcgtgcaggccgccatcgccgagaccaactacgtccccgacttgtcggcgaagaagatccgcggggcgcgcgccacccccagcaccatcggcgtgctggcgctggataccgtcaccacgcccttttcggtggagatcaccctctcgatcgaagagacggcccgcgcccacggctggaacagctttgtggtcaatatgttttctgacgatcgtccggaagcggtggtcgacccgctcctctcccaccgtccggacggcattatctttaccaccatgggcctgcgccaggtaccgctgccggagaaactgctgactctgccctgcgtgctggccaactgcgaaagcctcagccagccggtggccagctatatcccggacgatgaacaggggcagtacgacgcggtgaaagccctgcttgccgctggctatcgtcgtccgctgtgcctgcacttacccgccagccagccggcgacgatccgccgccgccgggggctggagcgcgcctgccgggaggccggtatcgaaccggaccatctgagccattcgtatatgggccagggcgatgagcattaccacgatatcccggcggtggtgctggcgcatatccgcgagggtaaacctggctttgactcagtgatctgcggcaacgatcgcatcgcgtttatggtctatcagacgctgctgggccaggggttacgcattccacaggacgtggcggtagtgggatacgacaacatggtgggcattggcgatctgtttctaccgccgctctccacagtgcaactgccgcattatgacatcgggcgcctgagcgccctgcatatcattcacggcgacaaccatcgggagacgcgcaaagtcgccagcccgtggttgccgcgcgcctcacattaa

SEQ ID NO: 221376 - DNA, 1422 bp, Klebsiella pneumoniae
atgacttcaatcagtaacgactctacattatcgccgcggacgcaacgtgatacccggcggatgaactggtttgtttccatcgccgcggcggtggcgggcttgctctttggcctggatatcggcgtgatatccggagcgttgccctttataaccgaccatttcaccttatccagccagcttcaggagtgggtggttagcagcatgatgttgggggcggcgataggcgcgctgtttaacggctggctgtcgttccgccttggtcgtaaatacagcctgatggcgggggccgtactctttgtggccggctctatcggatccgcttttgccgccagcgtggaggtgctgctggtggcccgcgtggtgttgggcgtggcagtcgggattgcctcttataccgcgccgctgtacctctccgagatggccagcgagaacgtgcgcgggaaaatgatcagtatgtatcagctgatggtcacccttggcattgtgctggcgtttctttccgataccgcctttagctacagcggtaactggcgcgccatgctgggcgtgctggcgctgccggcggtgatcctgatcattctggtcgtctttttgccgaacagcccgcgctggctggcggagaagggacgccatatcgaagcggaagaagtgctgcggatgctgcgcgatacctcggaaaaggcgcgcgacgagcttaacgagatccgtgagagcctcaagctgaagcagggcggttgggcgttgtttaaggtcaatcgtaacgtgcgccgggcggtgttcctgggcatgctgctgcaggcgatgcagcaattcaccggcatgaacatcatcatgtactatgcgccgcgtatctttaaaatggcgggctttaccactactgaacagcagatgatcgccaccctggtggtgggcctgacctttatgtttgccacctttattgcggtgttcacagtggataaagcgggccgcaagccagcgctgaaaatcggctttagcgtgatggcgctgggcactctggtgctgggctactgcctgatgcagttcgacaatggcaccgcatccagcggcctctcctggctctccgtcggcatgaccatgatgtgtattgccgggtatgcgatgagcgcggcgccggtggtgtggatcctctgctccgagatccagccgctaaaatgccgcgacttcggcatcacctgctcgaccaccaccaactgggtgtcgaacatgatcatcggcgccactttcctgacgctgcttgacgcaattggcgccgccggcaccttctggctctacacggcgctcaacgtggcctttatcggcatcaccttctggctgatcccggaaaccaagaatgtcaccctcgagcacattgagcgcaacctgatggcgggcgagaagctgcgcaacatcggtaatcgttaa

SEQ ID NO: 221377 - DNA, 762 bp, Klebsiella pneumoniae
atgattcttgatgcattctccctgcagggaaaagtggccgtcgtgagcggatgcgataccggtttaggtcaggggatggccctcgggctggcggaagcgggctgcgatattgtcggtatcaatatcgtcgaaccggtggagactatcgagcgggtaaccgcgctgggacgccgttttctcagcctgaccgccgacctgcgccagatcgacggtattcctcagcttctggagcgggcggtggcggagttcggccatattgatattctggtcaataatgccggcctgattcgccgcgaggacgcgctggcgttcagcgaaaaagactgggacgacgtgatgaacctcaacatcaagagcgtattttttatgtcccaggcggcggcgaaacactttatcgcccagggcagcggcgggaagatcattaacatcgcctccatgctgtcgttccagggggggatccgcgtgccgtcgtataccgcatccaaaagcgcggtgatgggcgtcacccgcctgctggccaacgagtgggccaaacacaacatcaacgtcaacgccatcgccccggggtatatggcgaccaacaacacccagcagctgcgcgccgacgagcagcgtagcagcgaaatcctcgatcgcattcccgccgggcgctgggggctaccggccgatctgatggggccagtcgtgttccttgcctcctcagcctccgattacatcaatggctacacggtggcggtggacggcggctggctggcgcgctaa

SEQ ID NO: 221378 - DNA, 1176 bp, Klebsiella pneumoniae
atggctaaaggcatgcgggtcaaactgaattatcacgtcagccacgatccggataccggggcggaagtcacccgcttaacccccccggaggtcacctgtcatcgcaactacttctatcagaagtgcttttttaacgatggcagccatttactgttcgccggcgagtttgacggccactggaactactatctgctgaatatcgccagcgccgaggccgtccagctaaccgaaggcgccggggataacaccttcggcggcttcctctccccggacgataagtcgctttattacgtgaaaaatgaccgtatcctgctggaagtcaacctgaccaccctcgccgagcgcgaagtttatcgcgttagcgatgactgggtagggtatggcacctgggtggcaaacagcgattgcagcaaactggtgggcattgagattgccaaaagcgactggacgccactcaacgactggcagattttccatgatttcttccataaaggaccgcactgccgcctgctgcgcgtcgacctgcgcagcggtgagagccaggtgatccatgaggaaaaaatctggctgggacacccgatctatcgtcccttcgacgaccataccgtcgccttctgccatgaagggccgcacgatctggtggacgcccgcatgtggctggtcaacgaggatggcagccatgttcgcaaagtcaaagcgcatgctccaggcgaaagctgtactcatgaattttgggtgccggacggttcggcgctgatctacgtctcctatctgaaaggccagcaggggcggacgatctatcgctttgatcccgaaagcggcgtcaacgaggccctgatgacgatgccggcctgctcgcatctgatgagcaatttcgatggcacgctgctggtaggcgatggctcaggtacaccggtggatgtcaaggataccggcggctactccattgataacgatccctggctgtatgtctttaacgtggcggaaaagcgctacttccgcgtcgcgcgccatgatacctcgtgggcgacggtggccaacagccgccaggtaacgcacccgcacccctcatttaccccggacgatagcgccattctgttcagctccgataaagacggtaaaccggccatctatatcgcgaaattacctgcgcacccgtcaatgctgagcgcctga

SEQ ID NO: 221379 - DNA, 696 bp, Klebsiella pneumoniae
atgttaaaacgatctctggttctcgccgccctctgcggtatgtcttttgcggcaaccgcggtaacgatagatttacgtcatgaatttattgatggcggaaagagtgataaaagtaatgctgaccgcgtctccgtttctcaccgctttgccaacggcttaggctttaccgtcgaggccaaatggcgttcgggtggcgacaacggttcgcaaccctattcggacgtggtgggcaatggtcatgaagacaccatcagctggcgctggaaagcgacgtcgaacttgttcctcacccccgggtttaccattgagagcaacgacagccgctccatctacaagccgcacctgcacgcgcagtacagtttcgacaacggcttctatgtcgccgctcgctatcgctatgaatacacccgctatccgaacaacgccggcaaagatgatgacaaagttaaccgcggcgacgcgtgggccggatttgtcctcggcgactggcgtacagagctgaactatgtctatgcccgcagctcggaaggggtcagccgcaacgacaataaaccctactcgcaggaatataacgtgaaggtggcctataagctggataataactggtcgccgtatggcgaaattggcaacgtcggggtcaatgaccgcagcgatcgccagacccgcttccgcgttggggtggcttactcgttctga

SEQ ID NO: 221380 - DNA, 1179 bp, Klebsiella pneumoniae
atgaaggatgtcgtgatcgtcggcgcgctgcgaacgccgattggctgctttcagggcgcattatcgcgccattcagccgtcgagctggggagcgtggtggtgaaggcgctggtggagaagacgggaatcgatccgcacagcgtggatgaggtgatcctcggccaggtactgaccgcggggaccggacaaaatccggcgcgtcagtccgctattcgcggtgggctgcctaacaccgtatcggctatcaccattaacgatgtctgcggttccggcctgaaggctctgcacctcgctacccaggcgatccagtgcggggaagcggacgtggtgatcgctggcggccaggagaatatgagccgcgctccgcatgtgcttaccgacagccgcaccggcgcccagctgggcaacagccagctgattgacagtctggtgcatgatgggctgtgggatgctttcaacgattatcatatgggcgtcacggcggaaaacctggcccgggaatttggcatcagtcgcgagctgcaggacgcctgggcgctcagctcacagcataaggcgcgcaaggcgattgattccggtcgctttcgcgatgagatcgtcccggttgtcaccgagcataacggcgcggcgcgcaccgtggataccgatgaacaaccgcgggtggatgccagcgcggaagggctggccagcctgcagcccaccttcgatcgccttggatcggtaaccgccggcaacgcctcaagcatcaatgacggcgcggcggcggtaatgatgatgagcgaggctaaagcgctggagctggggctgccgatccttgcgcggatccgcgccttcgccagcgtcggcgtcgatccggcgctgatgggcattgccccggtgcatgccacccgtcgctgtctggagcgggccggctggcggctggacgacgtcgatctgatcgaagccaatgaggcctttgccgctcaggcgatctcggttggccgggtactggagtgggatgagcgccgggtcaacgtcaacggcggcgcgatcgccctcggccaccccatcggcgcctccggctgccggattctggtgtcgctggtgcatgaaatgatcaagcgcgatgcccgcaaaggtctggcgacgctgtgcattggcggcggtcagggcgtggcgctggcggtagaacgcgcatag

SEQ ID NO: 221381 - DNA, 870 bp, Klebsiella pneumoniae; identical to SEQ ID NO: 213526

SEQ ID NO: 221382 - DNA, 462 bp, Klebsiella pneumoniae; identical to SEQ ID NO: 213525

SEQ ID NO: 221383 - DNA, 1230 bp, Klebsiella pneumoniae
atgtctaaaatttggtctaaagaagaaactctatggagttttgccttatatggcactgcagtaggcgctgggacgctatttctaccgatccagctgggttcggctggcgccattgtgctgttcatcaccgcgctggtcgcctggccgctcacttactggccccacaaagcgctgagccagtttattctctcggccaatatcgcgccgggaaccgggatcaccggcgcagttaatcactactatggtaagaaaattggcaacctgatcaccggcctctatttccttgccttctttgtggtggtgctcatctacgccgtggccatcaccaactcgctggccgaacaggtggcgcatcgcacgccgatgaccccagggctgcgtgcgctgctgagtctgggggtcgtgctggtcctcaacctgatctttctcatgggacggcaggtcaccatcaaggtgatgggctttctggtcttcccgcttatcgcctgtttcctgtttctctccctctatttaatccgcgactggcatccggagcatctcaccagccagatgcagttcagcccgcagacgctccaccaggtctggatctctattcccgtgatggttttcgcttttagccatacgccgatcatctcgacttttgctatcgatcagcaggagaaacacggcgacctggccatgggtaaatgcaaaaaaatcatgaaggtggcctacaccatcatctgcgccagcgtgctgttttttgtcttcagttgtctgctggcgatcccggcaacctatatagagaccgcccgcgatcagggggtgactatcctctccgccctgtcgatggtgccaggcgcgccgggatggctggcggtgaccggcatcatcgtcgccgtcgtcgctatgtcgaagtcgtttctcggaacctacttcggagtgattgagggcgccagcgaaatcgtcaaaagctcgctgggcctgctgggcgtgcgtaagagccgcgctttcaaccgcgcgatgtcgatcctgctggtctccgccttcacttttgcggtgtgctttatcaacccgaatgcgatctcaatgatctacgctatcagcggaccgcttatcgccatgatcctgtttattatgcccacgctgtcgacatggctcattccggcgctgaagccgtaccgctcggtgggtaacgcaattacgctggtggtaggcctgctctgcgtgtcggtgatgttcttcggctaa

SEQ ID NO: 221384 - DNA, 879 bp, Klebsiella pneumoniae
atgtccagtgtcaccttatccggtcgcggcacgctcggcgatcgccaggtctatcgcttaggttacggcgcgatgcagctggccggccccggtgttttcggcccgcccaaagatcctgaagaagcggtgcgcgtactacaggccgccgtcgaggccgggataaaccatatcgatacctctgatttctacggtccacatgtcaccaatcagttgatccgcaaagcgctccacccctaccctgacgatctgtgcattgtcaccaaggtcagcgcccgccgtgacgagaaaggcaactggctaccggccatgtcgcccgccgaactgacccaggccgttgaagacaatttgcgtcacctggggcttgaggtactggaagtggttaatctgcgcagtatgctgagcccgcacggcccggtggagggttcgctggaggcgccactcgccaccctgctggaactgaaagagcgaggattaatccgccatatcggcctcagcaacgtgacggcaaagcaggtcgcggatgcgcagaaaatgacgcccatcgtctgcgtgcaaaatctttataacgttgcccatcgcgccgacgacgcgctggtggatgcgctggccgcccagcacatcgcctgggtgccctttttcccgctgggcggttttacgccgttgcaggcgcaggagttgaacgaggtcgcggcttcgcttgaggcgacgccgatgcaggtcgccctcgcctggctgctccagcgagcgccaaatattctgctgatccccggcacctcctcccgcacgcacctcgcggaaaatattgccgctgccgagctggtcctgcctgcggaagcgctgcgcaccctcgataatatcgccaccgccgcgcgccgctga

SEQ ID NO: 221385 - DNA, 705 bp, Klebsiella pneumoniae
atgacagagggaacgataaagaccagtaagtatgaaattattgctattttcagagaggagttgcgcaaacgtactgaaattgaaatattttttaacaacaccagtatcataacccaactgacgcgcgtggactttgccgagtttcatattcagacccatcgcaaaatcccgtccgggcataaaattcgctttctcctgcatagcgattcagggaaaatagagtttaatgcggccctgacaaaacatgacaatagcggtgtcgataaaggtatccgctacgctttttcattgcctgaatgcctgcaggtagtgcagcgtcgccgcgatccccgctttcgtttacgccatgagcatgacttttattgccgcggccgccataaaaacggcgaaaactatcttttcgatatcaaagacatttcagatggcggttgcgcattgatgaccaaaacgccgaatcttaaatttctcagccacaacgccttactgaaaaacgccgtacttatgcttgcagaatatggcgagatcaccatcgacctggtggtcaaaaatgtcattgttatcaccctggataacgctaatgaagagagtgagagctactatcagatatcctgccagtttaagttccgccatctcgatgaccagcgcagaatagagaagatactgctggacctgatcttagaagccaagcgcaaaaagagaatctga

SEQ ID NO: 221386 - DNA, 573 bp, Klebsiella pneumoniae
ttgctgtacaccaatgacaatctcattggtcactcaatctatcactaccttattgatagccatgaaaatgccacccgtctgagttatgccgatgtcatccatgagaaacatctgccactggcccagacgattattttcaatttaattaataaggatatttctgccatcagaatcgtcgatctgctgaatgcgctccgcctttccctgctgcgctgccagcagccggtgctaatggtgaaaagcgacattgtcgggctgtgcagagagttgataaactttgacaacgctatgattattagtgagaaatctccgctaactcttttttcatctatcgtccaacgcgccaaaggcgtcagcgaactgccgccgcgaggattgcgcaaacagctttcaccacgggagtgtcagatcctcgaactgctcattgccaacaataataataagcgtattgccgccctgctcggcattgctcataaaacggttcatagccaccgcatccatatcatgcaaaaactgggtattgataattcccgcactatgaatcagcgtattgccgctctccatcaatgctaa

SEQ ID NO: 221387 - DNA, 717 bp, Klebsiella pneumoniae
atgaacactaaaatattcgaagacaacattttatctcgtaatgatatcgctgtacgctacgtctttcagaaaatgttttccccacaaggtactctggtcgcggtggaatgcttaagccgctttgataatctttctatttcccccgaagattttttccgccatgctaccgccgccgttcgtgaacgtatttttctcgaacaactggcactgattgaaaagcataaagcctggtttttacgtaaccatatttccgcaacaattaacgttgatgaccatatccttaacctgttgcgccagaaggacataaaagccaaaatcgccgccctgacctgcgtccatttcgaggtaaccgaaaacgccgagaatctgctgcataattctcttgccgcctggcagagcccacaggatacctcactgtggctcgacgacttcggctccggctacgcgggaattaacgctattcgcggttatcactttgactatgtgaaaattgataaggattttttctggcacctgatgcgcaaagagtccggccgccagctgatggatgcgctggtgacctttttatcgcgcaaccatcataatgtgattattgaaggtgtggaaagtgaagcccataaagaatggctgcagggaatggagtggtttgctatccagggacattactggcgggaagtcagtattgaacaactggtcgccgatgatattgccatgtaa

SEQ ID NO: 221388 - DNA, 636 bp, Klebsiella pneumoniae
atgaagggattgccgaaaaacactatcgcgtggctgctattttgcggcagcctcgccgccccctcggcgtggggttttgagaccaattacgatcgcggacgggtcgattttgccgggcgggtgacggatatttcctgtagcgtcgcgctaaacggcggccagcatgccggcagcggtaatgtctggctggcgccggtcagcctggcggaagtccacgatcgcggggccggggcgtttatgaaaccgcagccgtttaccctggcactgtcaaactgccagctgcgccatgatggtggggcagcctcgcaggatgaggtgcgtcgggtcagcgtgcgctgggtcgatggttttttactgacggcggtcggtaacgaaaacgccgggtatctggccaataccttgccggatggagcgcagaatatttatctggcgctatcgactaacgataataatactctggataagagtaataaaattgtcccggcggacccgcagcaaaatcaggtgcgtttgcaggaaagcgcggtcagcggcggcctgttcacctattacgttggctatgtttcgccaacgccgaaaagcgccaccagcgggccgattaccagctgggcaacgtgggaattagtttataattaa

SEQ ID NO: 221389 - DNA, 996 bp, Klebsiella pneumoniae
atgtcgctgaggaaattactaacgctttttatcgtcttaatggcgctgggaaccacctcgtcctgggcctcctgtacgcgtctctcatcgccaacggtgatgctggacatggtggtgggcagggtggtggtgcccccggatctgccggtgggctcggtgatccttacccgcgactggacgatgagcgctcccggcggggcaagctatcgctgtacttccggcaccaaccgctttgcggcgaagatcgtatcgccaggggccacggaccttggaaataaaatctactccaccaacgtgccgggaatcggcatgcgtttcagccgcggcggcgcaacggtaaatatcgtctatcccgacgtcttttcgtcccgggtatataacaccaccaactattccctcgaagggtcgcgctttacgctggagattatcaaaaccgcggcaaccaccggcagcggcaccctggcggcgggtaagtacacctcctacgactgggagagcggcggtaacccgatcctcgaaacctatctgagcgccaacgccatcaccgtggtctcgccctcctgttcagtgctgagcgggaaaaatatgaatgtcgatgtgggttccatccggcgcaccgacctgaaaggggtcggcaccaccgccggcgggaaggattttaatatcgacctgcagtgcagcggcggcctgagtgaaacgggatatgccaacattagcacctcgttctccggtaccctggccaccagcactaccgctaccatgggcgccttgctgaatgaaaaagccggcagcgggatggcgaaaggcattggcatccaggtgctgaaggatggctccccgctgcagtttaataagaaatacaccgtcggccgcttgaataatcaggagacccgctacatcaccataccgctgcacgcgcgtttttatcagtatggcccgacgaccagcaccggcgaggtggagtcgcatatgatctttaacctgacgtacgattaa

SEQ ID NO: 221390 - DNA, 2487 bp, Klebsiella pneumoniae
atgaagcagaggtcattctgcccgggaagattaagcaccgcgatcgccatcgcgctgtgctgctttccgccattttccagcggacaggaaaacccgggaacggtatatcagtttaacgacggctttattgtcggcagtcgcgaaaaggtcgatctgtcgcgcttttcgaccagcgcgattaccgaaggcacttactcccttgacgtctacaccaacgacgagtggaaagggcgctacgatttacgcatcgcgcgcgataaagatggtcggctgggcgtctgctacaccaaagcgatgctggcccaatatggcatcgcggcggaaaagctcaatccgcagctgagcgagcaggagggctactgcggtagcctcaaatcctggcgcaacgaagaaaacgtcaaagacaacctggtccagtcctccctgcggttgaacatttcggtaccgcagatctatgaagatcaacgcctgaaaaactatgtcagcccggagttctgggacaaaggtattaccgcgctcaatcttggctggatggcgaacgcctggaacagccatacctcttcggtaggcgggtcggataacagcagcgcctatctgggcgtcaacgccggactgtcgtgggacggctggctgctgaagcacatcggcaacctgaactggcagcagcagcagggtaaagcgcactggaacagcaaccagacctatctccagcgccctatcccacagctcaactccatcgtcagcggcgggcagattttcaccaatggtgaatttttcgacaccatcggtctgcgcggggttaatctttccaccgatgacaatatgttcccggacggcatgcgctcgtatgctccggaaattcgcggcgtggcgcagagcaacgccctcgtcaccgtgcgtcagggcagcaatattatctatcagaccaccgttccgcccggaccgtttaccctgcaggatgtctatccttccggctatggcagcgatcttgaggtctcggtgaaagaagcggatggctcggtagaagtgtttagcgtgccttacgcctccgtcgcccagctgctgcgcccgggcatgacccgctacgcgctctccgccggtaaagtggacgacagcgcgctgcgcaacaagccgatgctctatcaggcgacctggcagcacgggatcaacaacctgttgaccggctacaccggggtcaccggttttgacgactatcaggccttcctggtggggaccgggatgaacaccggcatcggcgcgctctcttttgacgtcacccattcgcggttgaagagcgatgcccatgatgactcgggtcagagctatcgcgcgacctttaaccgcatgtttaccgatacccagaccagcatcgtgttggcggcgtatcgctactcgacgaaaggttattacaacctcaacgacgcgctgtacgccgtcgatcaggaaaaaaatagtcgcagcaactacaccctgtggcggcaaaaaaacggcatgaccttcacggtgaaccagaacctgccggacggctggggcgggttttatctcagcggccgtatctccgattactggaaccgctccgggaccgagaagcagtatcaggtcagctacaacaattcatttggtcgtctctcctggtcagcgagcgcgcagcgcgtctatacgccagacagctccggtcatcgtcgcgacgatcgtatttcactcaacttcagctacccgctgtggtttggcgataaccgcaccgccaacctgacgtcgaacacctcgttcaataactcgcgctttgccagctcgcagattggtatcaacggttcgctggacagtgaaaacaaccttaactacggcgtgtcgaccaccactgccaccggcggtcagcatgatgtggcgctcaacggtagctaccgtacaccatggaccaccctcaacggcagctacagccagggcgaaggctatcgtcagagcggcattggcgccagcgggacgatgatcgcccacagcggcggcgtggtgctctcaccggaaagcggctcgacgatggccctgattgaagccaaagacgcggccggggcgatgcttccgggatcgccgggcacccgtgtggacagcaatggttacgccatcctgccgtatctgcgcccgtaccggattaacgccgtggaaatcgacccgaaaggcagccatgacgacgtggccttcgatcgcaccgtggcgcaggttgtgccgtgggaaggcagcgtggttaaggtcgcgttcggcactaaggtgcagaacaacctcaccctgcaggcgcgtcaggcgaaccacgagccgttgccgtttgcggcaagtattttctcccccgacggcaaggagatcggcgttgtcggccagggcagcatgatgtttatcagcgatgcgaacgccaaacgcgcgattgtgaagtggagcggcgggcagtgttcggtggatctgggacagcaaacaacaaaggatagcgtatgtcgctga

SEQ ID NO: 221391 - DNA, 702 bp, Klebsiella pneumoniae
atgaagcgtattgccctttttttctgtttcatttttagttttgcggcccatgccaacaatattattgttaacggtacccgctttatttatccaggaaatgaaaaagaaataacggtacagctttcaaataacgccgaccgtccggcgctggcgcaggcctggctggataacggcgatgccgatgccacaccggataccattaccaccccgtttattatcaccccgccgatttcgcgcgttgacgccaagagcggccagacgctgcgtattaagctcggtagcagcgccggtctggcgaaagataaagagacgctgtggtggctgaatctgctggaaattccgccggtggtggccaatcagaaaaatgaaggccagaacgtgctgcagctggcgatccgttcgcgctttaaatttatttatcgtcctgccggactgggcaaccgcgatgcggcggccgagaagctgaccctgaccgccagcggcagtagtctcgccatcaacaacccgacgccgttctacattaccgtcagccgtatttcccgcgacggcggtaaagccctgaacagcaaaaccgtgatgctggcgccgcagtctagccagacggtggcgctctcctccgccgtcaaccgcggcgaaaccctgaccgttaacaacattaatgactatggcgccgatgtcgcagtgaaagtggccgttaaataa

SEQ ID NO: 221392 - DNA, 609 bp, Klebsiella pneumoniae
atgaaaaaggttcttctctctgcagcaatggcaaccgcgttttttggcatgactgctgcccatgcagctgataccactgttggcggcggccaggttaatttcttcggtaaagttaccgatgtatcctgtactgtttccgttaacggccagggcagcgatgcgaacgtttacctgtctccggtaaccctgactgaagttaaagcggcagcagcggatacttacctgaaaccgaaatctttcaccattgacgtctctaactgccaggctgctgatggcactaaacaggatgacgtaagcaaactgggcgtgaactggaccggcggtaacctgctggctggcgcaaccagcaaacaacagggctacctggcgaacactgaagcttccggtgctcagaacatccagctggtgctgtctactgacaacgctaccgcgctgaccaacaaaatcatcccgggtgacagcactcagccgaaagcgaaaggcgacgcttccgctgtagctgatggcgcgcgtttcacctactacgtaggctacgccaccagcgcgccgaccacggtaaccaccggtgtggttaacagctacgcgacttacgaaattacttaccagtaa

SEQ ID NO: 221393 - DNA, 210 bp, Klebsiella pneumoniae; identical to SEQ ID NO: 139211

SEQ ID NO: 221394 - DNA, 507 bp, Klebsiella pneumoniae
atggacaaatcaccgccgatcgacgccgtggatcgcatcctcgcccagtggcagcgggaacggccagacctcgactgcagccccatggggccgataggtcgcctgaaacgatgcgctatgctgctggagccgcaggtggaagtggcctttacgcgccacgatctggtgcgctgggagtttgacatgctggcgacgctgcggcgcgccggggcgcctttcgtactttcgcccacccagctcttctccacgctgatgattacctccggcaccatgacccatcgtctgaaggcgctggagaaacgcgggtttattacccgcctgcccaatccggaggatgcccgcagtatgctggtcgccctgacttccgccggacgcgaacggatcgatgccgcagtggaaacccacgtcgacaacgaacggcaactgctggcaggactcagtgacggtgaacgccagcagttggatcaggcgctgcgggtgttgatgcgactgctggaaacgggctaa

SEQ ID NO: 221395 - DNA, 957 bp, Klebsiella pneumoniae
atgacgactccgattgcgctccgcgactggcgcctgctggcggccgggtgcggcggccttctactgctggccgccgctatcaccttgcacagccactggggtgactttctccagtggtgtctcgccacccaaattaccctgcatcgctatctggtgatgtaccttctgttgctgaataaccatcagtacagcggcggtatctggctgctggtgggggcctttctctatggcgtgctgcacgccgtcggaccgggacacggtaaatttatcgtgacgacctacctgagcaccaatcaggagagcctgacggcggcgcgggtggtgccctttctcggcagcctgttacagggcgtcactgcgatactcttcgtctttattcttgcggtggggctgaatctggccgccggcgatcttagcgccagccgctggtacgtcgagaagatcagcgccctgaccatcggcgtctttggggcttatgttatctttcgcgctctgcaaagcctgtggccgacaaaacaggtgattcgccgtctgacgccagcgcatcagcatgacgcctcgtgcggctgcggccatcacggcgtggggcaggatctgcagggcgctgactggaagacgcgccttggcgtggtgctggctatcggcgttcggccctgtagcggggcgatcatgattttattattcgccaatgcgttggggattgttagctggggcatcgccgcggtgatgagcatggcgctgggcaccgcgctctcgatcctcggtctgtcgctactggttcactatgcgcgccatcggacggtcaaacgattggccacgaatcaccgcccgcggccctggctggttccgctgatgaagatcctcggcggtctggcgctgatcctctttgccgtgggattgtttttcagcgtggtgccgatcagcgccaacggcgactttatcgccgctggctgttag

SEQ ID NO: 221396 - DNA, 366 bp, Klebsiella pneumoniae
ttgctggataaagagatctacgccctaaagcgctggctggccattcgcagcagctggccgcaggccgccagcgaatggctgtttctctcccgcaaaggtaatcccctttcccgccaacagttttatcagattatcgcgtcctcagggggactggcggggctgccactggagatccacccgcacatgctgcggcactcctgtggctttgcgttggcgaatatggggatcgatacccgcttgattcaggattatctcgggcatcgcaatatccgccacaccgtctggtataccgccagcaatgcgggacgcttctatggcatctgggacaatccccgtgacaaacagcgatcgtcgccgatccaatag

SEQ ID NO: 221397 - DNA, 609 bp, Klebsiella pneumoniae
gtgaaccgacgtcgttttctaaccgccaaagaagttcaggccatgatgcaggctgctcgtcagggccctaccggcgaacgggactactgcctcattctgctggcctttcgccatggcatgcgcattagcgaactgctggatctgcattatcacgatctggatctccatgaagggcgggttaatgtgcggcgattaaagaatggtttttcgacgattcatccactgcgttttgatgagcgcgaggcgattgagcgctggagcctggtccgtgccggctggaaagcggcggacaaaacggacgcactgtttatctcccgccgcggcaccgcgctctcccgccagcaggcgtatcgtattattcgctccgccggggaaaatgcgggtaccgtcacgcacactcacccccatatgctgcgtcacgcctgcggctatgaactggctgaaagagggacagatacgcgtttgatacaggattatctaggacatcgtaatattcgtcacacagtacgttacaccgccagtaatgcggcacgtttcgctggcatctgggaaagaaataatcttttagaggaaaaagaccagaagacgaaaaatgaaataatagattga

SEQ ID NO: 221398 - DNA, 549 bp, Klebsiella pneumoniae; identical to SEQ ID NO: 137019

SEQ ID NO: 221399 - DNA, 537 bp, Klebsiella pneumoniae
atgcagggaatgaaatctggtctgctgctgctactgcctccgctggcgctggccggtaatcattggaacgtcacgctgccggggggcagcatgcgttttcagggcctgataatggcgagctcctgccgcgtcgaagccggcgatcggcagatgacggtcaatctggggcagatcagcagtaatcgatttcatgctgtcggcgaagacagcaacccaatccctttcgcgattcatttacaggattgcagtacggcggtcagccagcatgtgggtgtgacctttcacggcgtggctgatggaaaaaaccccgacgtgctgtcggtgggtgaaggtccggggatcgccagtgggatcggtattgcgctattcgacagccagggccagcagctcccgctcaatcgtccagcggatcgctggatatcactctaccgcggaccgacgacgctaaatttcgtcgccaaatatcgggcgaccggacgccaggtcaccggcggtgcagccaatgcccaggcctggttctcattgacctatcagtaa

SEQ ID NO: 221400 - DNA, 705 bp, Klebsiella pneumoniae
gtgagaaaaacggcaacgatggcgcatggcttactggcaggatgtgtgcttttcgccgccagtatctttagcgccagcgcgcaggcgggcgttgcgcttggcgcgacccgggttatctacccggcgggacagaagcaggtccagctcgcggtgaccaataatgatgaaaacagtacctggcttattcagtcatgggtggaaaatgccgatggtcagcgagacggccggtttgtcatcactcctccgctgtttgccatgcagggtaaaaaagagaacaccctgcgcattatcgacgccaccaataaccagctgccgcaggatcgggaaagtctgttctggatgaacgtgaaggcgatcccttcgatggataaatcaaagctcagcgacaataccctgcagctggcgattatcagccgcatcaagctctactaccgtccgggaaaactggccctgcctccggatcaagcggcggaaaagctgacctttagccgtagcggatcgtcgctgacgctgacgaaccccaccccctattacctgacggtgaccgaactgaacgccgggacacgcattctggagaacgccctcgtaccgccgatgggcaaaaccagcgtcaagctacccgcggatgccgggaacaccatcacctatcgcacgattaatgattacggcgcgctgacgccgaaaatgaatggcgtgctgcgctaa

SEQ ID NO: 221401 - DNA, 2613 bp, Klebsiella pneumoniae
atgtcacatcggaaatatggactggatcatttaggttgccgaactgcccggcgcttggtatctccggcgctggcgctgtggctctgctcacagccgtttgccgcgcgggcggacctctattttaacccccgctttttagctgacgatccggcggcggtggctgacctgtcgggatttgaaaaaggccaggaggttccgccaggcacctatcgcgtcgatatttatctcaacaatggttttatgaccacccgggacgtcaccttccaggccgatgcccagggtcacggtctgtccccctgcctgacacgcggccagctggcgagcatgggtgtggataccggtcgggtgccgggcatggcgacgctggacagcacggcctgcgtgccgctgaccacgcttatcagcgaagctaccacgcgcttcgacgtcggacagcagcgcctgtacctcaccgtcccccaggcatttatgggtaaccaagcgcgcggctatattccgccggagctgtgggataacggtatcaccgccgggctgataaactataacttcacgggcaataacgcccataacaccacaggtggcagcagccgttacgcctatctgaatctacagagcggcctgaacattggcgcctggcgtctgcgcgataacagcacctggagctacagcagcggcggtagcacctcatccaacgagaatcgctggcagcacgttaacagctggcttgagcgggacattacgcctctgcgttcgcgactcaccctaggggacagctacaccaacggcgatgtcttcgacgggatcaacttccgcggcgcccagctggcctccgacgacaatatgctaccggacagccagaaaggctttgcgccggtgatccacgggatcgcccgcggcacggcgcaggtgtcaatcaggcaaaacggctacgaaatctaccagagcacagtgccgccgggaccatttaccatcgacgatctctacgccgcgggcaatggcggcgatctgcaggtcacgatcaaagaagcggatggctcccgccaggtcttcagcgtgccctggtcaacggtgccggttctccagcgtgaaggccatacccgcttcgccctcaccgccggggagtaccgcagcggcaacagtcagcaggaaacgcccgattttttccagggcacggccatgcatggcctgccggcaggctggacgctctacggcggcacccagctggcagaccgctatcgcgcctttaaccttggggtggggaaaaacatgggctatttcggcgccctgtcgctggatatcactcaggccaacgccaccctggctgacgacagcgaacatcaggggcagtcggtgcgttttctctataacaaatccctggatgagaccggcaccaacctgcagctggtgggctaccgctactctacccgcggctattataactttgccgataccacttaccgccggatgagcggctacagtgtggaaacccaggacggcgttatccaggtaaaaccgaaatttaccgactactacaatctggcttacagcaagcgcggcaaggtgcagctgagcgtgactcagcagttggggcgcaccgccaccctctatctcagcggtagccaccagacctattggggcaccgacgatgccgatgagcagctgcaggccggcctcaacgccgccgtggacgatatcaactggtcgctaagctacagcctgacaaaaaacgcctggcagcaggggcgcgatcaaatgctggcgatcaatatcaatatccccttcagccactggctgcgttccgacagccgctcggtctggcggcacgccagcgccagctacagcctgtcgcacgatctcaatggccgcatgaccaatctggcgggcctgtacggcaccctgctggaagacaacaacctcagctatagcgtgcagaccggctatgccgccggcggcaacggcgacaacgggagcacaggctacaccgccctcaactaccgcggcggctacggcaacgccaacgtcggctacagccgcagcgatggctttaaacagctctactacggggtcagcggcggcgtgctggcgcacgccaacggcatcaccctgagccaaccgttaaacgataccgtggtgctggtgaaagcccccggcgccggcggcgtgaaagtggaaaaccagaccggggtacgcaccgactggcgcgggtatgccgtcctgccttatgccactgagtatcgcgaaaaccggatcgcgctggataccaacaccctggcggacaatgtcgaccttgacgatgcggtggtcagcgtggtgcccacccatggggcgattgtccgcgccaactttaacgcccaggtggggatgaagatcctgatgacgctgacccatcgcggcaaaccggtgccgtttggcgccctcgccaccggcgacagcaaccagagcggcagcatcgtcgcggacaacggccaggtctacctgagcgggatggcgctggcgggcaaagtgcgggtgaaatggggcgatggcccggacgctcagtgcgtggccgattaccgtctgccgccggagagccagcagcaggcgctcagtcagctttcggtcgcgtgccgctaa

SEQ ID NO: 221402 - DNA, 528 bp, Klebsiella pneumoniae
atgagaacactgcagtatctgctgggcgccctgttcaccctgggcgcaccggctgcgcttgccgccgatagcacgatcgccatcagcggctatgtccgcgataacgcctgcgcggtagccggcgaatcgaaggattttactgtcgatttacaggataacgccgcgaagcagttttatgccgttggggcgacgacgccgccggtgccgttccgcatcgtgctgtcgccctgcggcacttccgtcaccgcggtgaaggtcggttttaccggcgtggcggacagcgtcaacaccagcctgttaaaactcgatgccggggcctcggcggcggcaggaatgggggtggaaattctcgatcagcagcagtcccggctgccggtcaatgcgccgtcatccaccatgacctggaccacgctgaccccgggccagaccaatattctcaacttttacgcccggctgatggccactcaggtgcccgtcaccgccgggcatgtcaatgcgacagcgatattcaccctggaatttcagtaa

SEQ ID NO: 221403 - DNA, 501 bp, Klebsiella pneumoniae; identical to SEQ ID NO: 137025

SEQ ID NO: 221404 - DNA, 909 bp, Klebsiella pneumoniae
atgatgaaaaaaataatccccctgttcaccaccctgctgctgctgggctggtcgatgaacgcctggtcctttgcctgcaaaacggccaccggggcgacgattcccatcggcggcgggtcagccaacgtctacgttaacctgaccccggcggtgaacgttgggcaaaacctggtggtcgacctctccacgcagattttttgccataacgactatccggaaacgatcaccgactacgtgaccctgcagcgcggatccgcctatggcggtgtgctgtcgagtttttcaggcaccgtgaaatataacggcacctcttacccgttcccgaccaccacggaaaccgcgcgggtgatttatgattcacggaccgataaaccctggccggccgtcctgtatctgacgccggtgagcactgccggtggagtggccatcaccgcaggatcgttaatcgcggtgctgatcctgcatcagaccaacaactacaatagcgactccttccagttcatctggaacatttacgccaacaacgacgtggtggtccccaccggcggctgcgatgtctccgcccgcgatgtcaccgtcaccctccccgactacccgggatcgatggccgtgccgctcaccgtccactgcgcgcaaagccagcagctggggtattacctctccggcaccaccgcggacagcgccaacgcgatcttcaccaataccgcctccgcctcgccggcgcaggggataggcgttcagctgacgcgcaacggcagcgccgtcccggcgaacagcacggtctcgctgggcaccgtcggcacctcgccggtcaacctcggcctgacggccacctatgcccggaccacaggccaggttaccgccggcaacgtgcagtcgatcatcggcatcacctttgtctatcaatga

SEQ ID NO: 221405 - DNA, 1413 bp, Klebsiella pneumoniae
atgatgaccgattatatcctctcgccctgctcgctggccgcccgcgggttgagccagctgatgctgaacgccgcgaagcggcccgttgagctgccggtcgagggcgtgtccctgcgcgagctggctgccgtgaagcggatcgtggtgtatctccctgacgatcccctgtggatgctcaccacgctgcgccaggcggcaaggctactcgacgaggccttgccgccgttaccgatgttgattctgagccgcagcccggccatctggctgtggcaaacgctgctctatcaggtgagtcatccggatcgtctgcgcaacgtccatactgcccccgccgatctgtcctgcgcggagctggcccatcggctggagaatgcgccgcggcttgagcggcttgccagcgaagccgccctgatccacggaaaacgggtcgtcgggttgacccacgccgagctcaaggtgatcctcgccctgctgcaagggcagacgataggcgagcaggcccaacgtctcggattgagccagaaaacgctctacacccagcggctggctggggtgaaaaagctggtggaatgtcatccgcatctggccccccgctttccgcgcacgctgctgccgcgctcacccgcaaacgcactgacggcgtttgaacaggaatgggtacaagcgattcacgatcgccaggtcttcccggtttttcaacctatcgtcgatagtcgctcacagctacagggggtggagatcctgatccgctggcgccaccgcggccaggtacttcacccccagacctttctaccgcacttccgcgccgactacacctggctgctgcttacggcctttgttctgcaggaggccgtgcagaatattaatgagtatccaggcaccttctatttttcggtcaacataccctcctcactcgccgacagtgacagcctgctgcggatggtggaagccgctcgccagcagcttcggcagccagagggcgtggcaaggctggtgctggaatatgctgaaactatcgattttcgccatcagagccgctccgccgcccacgtggcgcagctgcaacgtgctggcgtgcgcgtgatgctggacgactgcttttctcaggggagcgttatctttccggcgcgtcgactgcacttcaatgcgtataaactggatatgagcatcgtcaacgacgcccagcacgatccaaaggcgcttgcgctaataaaaagcctggcctactactgccagttaagcgacagtcgctgtgtggcggaaggggtggattcactggcgaaatttacgcagttaaaatcgctggggattgatcgcttccagggctatctgttttcaccaccgatgcggcgcgaacatctcccggatctgatccgccgcttttcccaccagcgcgatccggcggatcgttga

SEQ ID NO: 221406 - DNA, 273 bp, Klebsiella pneumoniae; identical to SEQ ID NO: 137028

SEQ ID NO: 221407 - DNA, 231 bp, Klebsiella pneumoniae; identical to SEQ ID NO: 137029

SEQ ID NO: 221408 - DNA, 273 bp, Klebsiella pneumoniae; identical to SEQ ID NO: 137030

SEQ ID NO: 221409 - DNA, 1026 bp, Klebsiella pneumoniae
atgacaacttcccgcactcccctgttacgcaaaaagtggcctctgctggcgctggtccttgccgccatcctggcgctgatcctcgttatctggcagttgcaaacctcgccggagaccaatgacgcctatgtctatgccgataccatcgatgtagtgcccgaggtcagcggacgcatcgtggagatgcccattcgcgataaccagcgggtgaaaaaaggcgatctgttgttccgcatcgacccccgcccctatcaggcaatgctcgatgacgcgaaagcccggctgacgaccctcgacgcgcagatcatgctgacccagcgcaccatcaaagcgcaggagtataacgcccagtcggtggcggccgccgtcgagcgcgccagagcgctggttaagcagaccacctccacgcgtatccgccttgagccgctggtgccgcaggggttcgcttcccaggaagatctcgatcaggcgcgcaccgctgagaaagcggcgcgggcggagctggaggccacgctgctgcaggccaaacaggcctcggcggccgtgactggcgtggatgccatggtggcgcaacgcgccggggtcctggcgcaaatcgccctcgctgaactgcatctggaatttaccgaagtgcgcgcgccgttcaacggcgtggtggtggcgctgaaaaccaccgtcggccagtacgcctcggcgctgaaaccggtcttcaccctgctggatgacgaccgctggtatgtgatcgcgaacttccgcgaaaccgacctgaacaacgtgcgccccggcgtggcggcgcggatcaccgtgatgaccaaccacaaccggacctttaacggggtggtggattcggtcggctccggggtcctgcccgaaggtgggagcgtcatcgaagggctgccgctgatccagaaaagcattaactgggtccacgtctcgcagcgcttcccggtgaaaatcgccgtcagcgatcccgacccggaactgttccgcatgggcgcctcggccagcgccgtgctgcagccgtag

SEQ ID NO: 221410 - DNA, 1938 bp, Klebsiella pneumoniae
atgtttcctctcgcccattttttacgccaggaactgcgcgacgcgccgggacgcgccagctacacgctgcgcctgacgctaagctgcgcggtgctcatcaccctgtttatgaccctgcagatccctttcctggccgttgcgctgatcgtcgtattctacgtcagccagcctaacgtgttgatgattaagctggtcagcgtggtcttttttgtcaccgtcaccgtggcgctcggcggcgtgctgctgatcatcaagtggacctatgactacccgctgatccgcctggcggcttccgtggcgctctttttctgcgccctctatctgatgcgggtgctgggcaagctgggactggcctttttcgtggtggcgctggcggtgatttacgctcagaccttcccgtcgatgaccagccagagcgagatcctggtgcggctgctgctttggctgtgggtggcgattaacaccgcgatcctcgtcaccctgctggtcaacgcctgctttcagcaggcctttcccggcaaccagtttaaggcgcgtctggccgggatgctgcacgaggtcgcccggcggctggcggccccggacgctgaagcgctaccgaccttcggcgagaccgccgcgcagttcaatcagctgcagtcgctgttcgcccaggccagccgggcgacaccggagatcgccgccgctccccaggcctggcgctcgcggctggccgccactttgcgctgctaccagctggcgaccctgctgcaagcagacgaggcggatagtgacgatcgccagcagctgtcgcaggcggtacttcagctgaagaacgcccttagcgaggggccgtttgacggcgccattcctcccctgacgctcagcggttgcggcgtcaatcgcgctgttctgcaggagatggctaccactctgcagcggttggcgcagggcgagccggttgccctgccgcagggtgaggtggagaaggcgcccctgctggcgccggacgcctggcgcaacccggcatatctccattttgcgctcaagaccctgctggcgaccctaatctgctatgtcttctataccgctgccgactggcagggtctacataccattatgctgagctgcgtgatcgtcgcccagcccgggctgggcgccacgatgcaaaagacatggctgcgcatcgccggggcgctgctcgcctccctgctggcgctgctgttaatcgtctttgtccagccctggaccgattcgctgacgggcctgctggcgatgtccctgccggtgctggcgctggcggcgtggattgccgccggctcggagcgtatcgcctacgccgggatccagattggtttcacctttgcgctggcctttctcagctggtttgctccgctgacgaacctcaccgagctccgggatcgggtgctgggcatcctgctcggggtgctggtctcctccattgttcatttgtatctctggccggacagcgaagcgccgcagctgaaaacccgccttgcggcactctatcgccggctggcggactgcctcgccgccccgaaggaggcggttccgctggctcccctgcttgtcgccttcaccgacagcgaagcgctgatccaccgggttcgcgccgaaccgctgggcacgtatgctcacccctggccccaggcgaaaggctggccgatgcgcgccaccctcgcccaggccgaggagatcgcccgcctcagcgaaggctaccgactcaacgccgcgccgggagacccgaccctgacccgctgcgccgaacagctgcggcgctacgctgaacgtatcgaacaggaggcgacggcgcctggcgaacagctgaccgccgacctgactaacccctttggcccggcgctggccgccgcgctggccgccctgcccgactgggggccgacaccgatagcgactgagcaacaggctaaaacgtcatga

SEQ ID NO: 221411 - DNA, 1449 bp, Klebsiella pneumoniae
atgatgatccttcctttctccgcgcgcctgcgcggcactctttttaccctgacgctgacgctgctcagcggctgcgcgctgatccaggatgagcctgcccaggtcgccatcgtcaatccgcagcaggcccagctggcgcaggtgatccacctggcgaacagcgactggccggccgcccgctggtgggaggcctatgatgatcctcagctcaatatgctgatcaaccgggcgctgcagaactcgccgaccatgcaggccgcccggctgcgcatctcccagtcgcagtccacggtggaactcgcccggtcggcgatgggcctgcaggctaccgccgtcgcggcgcaaaaccgcctgcggatcaccgacaaatcctttagctggccctactcatactccctgccggtggataaaaacggcccctggtatacgctgaataccgttggcgtcggggcgcagctgaatatcgatctctggggggccgatcgcgcacgggtcgccgccgctattggcgagaaaaacgcccggctggcggagaccgccggcattgagctcgacatcgccagcagcgtggcgcagctctatttcgccatgcaggcgacgttccagaaaatcgcgctgctgcaggagctggagggcattgcccgattctcggtggaagcccacgagcaccggacccggcgcggcctggaagacagtgtggatgtggccaacgcccaggccgaacagctcgccgctcgccagcagatcattagcgccgaggggatgctgacccagtatcgtgaaaccctgcgggcgcttatcggcgccgatgcgcagagcatgccggccatccatccggtggcgctgccggcgctccaggagacgctgccgccgtcgctctctttcgagctgctggcccgccgtccggacctgcaggcgctgcgcggctacgtcaccgcctccctgagccaggtcgatgcggcgaaagcggccttctatccccattttgatatcaaagcgttctggggctataacgctctgagcgtcggggatctgtttaagtcctctttccagcagatcaacctgctgcccgggctgtatctgccgatcttcgacggcggtcgtctgaacgctaatctgcagtcggtacgcaccgccagcaacatcctgatcaaacagtacaaccaggcggtgctggatgcggttcgcgatgtcgctatcagctccagccagcttaacgacctgaatcagcagcgcgcgctgcagcagctaaaagtcaccgcggcgcagaccaccaccgatagcgctcgcgcccattatcagcgcggcctcctcagccgctacgccgccgaagaagcccgccgggcggtcctcgcccagcagctgttgctgctggacattgaggcccagcggctaagcaccgacattaccctgatcaaagccctgggcggcggctatcgagggcagtaa

SEQ ID NO: 221412 - DNA, 300 bp, Klebsiella pneumoniae; identical to SEQ ID NO: 137034

SEQ ID NO: 221413 - DNA, 423 bp, Klebsiella pneumoniae
atgagcatcaccatttaccataaccctgactgcggcacctcgcgtaatacgctggcgctgatccgtaacagcggcgccgagcccaccattatctattatctggagacgccgccgtcgggtgatgagctgcgccagctgctcgccgcgatggggatcccggtgcgcgcgctgctgcggaaaaacgtcgaaccctacgacgcgctgggcctggcggaagaccggtttactgacgaccagataatcgactttatgcttcagcatccgatcctgattaaccgtccgatcgtaacgacaccgcagggcacccgactctgccgcccgtcagaggtggtgctggagatcctgacggcgccgcaacaaggcgcattcgtgaaggaggacggtgagccagtcattgatgccgcagggcagcgtgtgaaatag

SEQ ID NO: 221414 - DNA, 1293 bp, Klebsiella pneumoniae
atgttgctggcaggtacgatttttatcctgaccctggtgctggtgatctggcagccgcgggggttagggatcggctggagcgcggcctttggcgcggcgctggcgctggccaccggtggcgtacaggtagccgatatcccggtggtatggcatatcgtctggaatgcgaccgccacctttatcgccgttatcattatcagcctgctgcttgatgagtctggctttttcgaatgggccgcgctgcacgtttcccgctggggaagaggccggggtcgactgctgtttacctggattatcctgctcggcgcggcggtggcggcgctgtttgccaacgacggggcggcgctgatcctcacgccaatcgtgattgccatgctgcgagcgctggggttcagcaagggaacgatgctggcctttgtcatggccgccggatttattgccgataccgccagcctgccgctggtggtgtcgaatctggtgaatatcgtttcggcagatttctttgccatcggctttagggagtacgcttcggtgatggtgccggtcgatctcgcggcgatcctcaccaccctggcgatgctgcacctgttctttcgcaaggatatcccgccggcctgggatatggcgttactgaaagcgccggccacggcaataaaagatccagcgacgttccgcaccggctggggcgtgctgctgctgttgctggctggctttttcgtccttgaaccgctggggatcccggtcagcgccatcgcggcgctcggtgccgggatcctgtttgctgtcgcgaagcacgggcgggtaattaacaccggtaaggtgctgcgcggcgccccgtggcagatagtgatcttctcgctgggaatgtatctggtggtgtatggtctgcgaaacgccgggttaacggactatctgaccacggtgctgaacatgctggcggagcgcggcctctgggccgcgacgctgggcactggtgttctgtcggccttcctctcttcgattatgaataatatgcccagcgtactggtcggcgccctgtcgattgatggcagcgcggcaacagggacgatcaaagaggccatgatttatgccaacgtcatcggctgcgatctggggcccaagatcacgccaattggtagcctggccacgctgctgtggctgcatgtgctggcgcagaagcacatcaccatcggttgggggtattatttccgctgcggcatcaccatgaccctgccggtgctgcttgtgacgctggccgcgctggcgctgcgtctctccttcaaccagccatga

SEQ ID NO: 221415 - DNA, 330 bp, Klebsiella pneumoniae
atgtctttattgcccctgcaactgttcaaaaacctcgccgatgaaactcggctggggatcgtattgctgctcaaggcgcgtggagagttgtgcgtgtgcgatctctgtacggcgctcgtccagtcccagcccaagatctcccgccatctggcgatgctccgtgagagcggattgctgctggatcgtaaacagggtaagtgggtccattaccgcctctctccgcagatgccggcctgggcggcgcaggtgattgagcaggcctggctcagtcagcaggaggatgtgcggctgatgatcagcagactggctggcgggccggggtgccggtaa

SEQ ID NO: 221416 - DNA, 294 bp, Klebsiella pneumoniae; identical to SEQ ID NO: 138650

SEQ ID NO: 221417 - DNA, 573 bp, Klebsiella pneumoniae; identical to SEQ ID NO: 217733

SEQ ID NO: 221418 - DNA, 276 bp, Klebsiella pneumoniae; identical to SEQ ID NO: 138648

SEQ ID NO: 221419 - DNA, 900 bp, Klebsiella pneumoniae
atgaataacgcgctttataatcagatacgcatctttcagagcattgcgcgcgagggcaatatctcggccgccgcgcgcaagctcgaaatcacgccgccgtcggtcagcaatgcgctcaggctgctggaggagcatattggccaccccctttttgtgcgcactacccggcgtatcgagctgacggaaaccgggcaacagctgctggagcagaccgccgcggcggtggagacactggaaaagtcgctggaaatcatccgcgaccagaatcaggagccctccggggcagtgagaataaccctctcgcgctttgcctacctgcttattctcaaaccggcgatggcggcattttgtcagcaatatccggggatccagctggaaatatcggtctatgacggtaccgtcaatattattgaagaacgtttcgaccttgggatccgctttggcgatattctcgaaggcggcgtggtcgcccgcccgttaatgaagccgtttcgtgaagggctatacgcctcctctgcctatcttgccgaatatggcgtgcccgcgatgcctgccgatctccatcatcaccggctgattggctatcgctttattaccaacaaccgcatcctgccgctgatcctcaatgaccacggcgagcagctcaccgtcgagatgcccggacagttaatcagcaatgatattgacgtcatggccgacggtattcgccacggactggggattggccgtttatttgaacctatcctgcaattacagcccgatcgtgagcagtttattcccgtgatggaggactactggaaaacctatccgccggtttatctctattacccaaaaaacgcgggcagaacgaaaagggtgaaagccctgattgatttcctgataatgcatgccgcggaataa

SEQ ID NO: 221420 - DNA, 558 bp, Klebsiella pneumoniae
atggctcatattcttgtcgtttccgggcatccggatcttaaccattccatcgccaacgccaccatcctcgatgagctggcgaccgccctgcctgatgcggaaatccgtcgtctggactggctctatccggacggcaaattcaacatcgccgctgagcaggaaagcctgctgcaggcggatgtgattgtctggcagtttccctttagctggtatgggctgcccgggttaatgaaacagtggctggacgaggtatttgtccacggcttcgcccatggctcaacggcgaaactgggtggtaaaaagctgctcctctccttcaccacgggagcgccacaggcgctctataccgctgacggtttctttggccatgccattgaggagtatctccttcccttcgagaccacggccaggctgtgcaatcttgcgctgctggcgccggtttatacctgcggtattagctacgccgaccgggatgccgacaaaatcgctcagcaaaaaacgcttgcccgggaacacgcggccagactgatcgcgcggcttaatactctggtggaataa

SEQ ID NO: 221421 - DNA, 804 bp, Klebsiella pneumoniae
atgaaaaatgtgattgccgcggcagccttgtcgcttgtgctgtctgattttgcttatgcccacgaacaaagagatgaagctatgatgaaaattaccccttccacccttgcggacgctgatattcaagcggtctccccggcgctggcacgcttcggccgcgaggccatcagcaacgacctctggcaacgtgacgccctgtccgcccgcgaccgtagcatcgtgaccgtagcgatgctgattgcccgcaaccagccaggcgagctgaagcactatattgccgttgcgctcgatagcggcgtgacgccagcggaagtgtcagagatcattactcacctcgccttctacgctggctggcccaatgcgatgtcagccgtcagcgtcgctaaagccatctttgaagccaggggcgtgatggcagaggccctgcccgccgcctcgccaacgctgctgccactcaatgaacaggtagagaaacagcgtgcagacaccgtggaaaaaaatgtcggccccatttcgcctggcctggttaaatttaccgccgacccgctgtttctcgacctctggcaacggcccgcgcttacgccccgcgacagaagtctggtgacggtcagcgcgttaatcgccgccggacagagcgcgcagattggctaccacctaaacagagctatggataatgggctttcggctgaagaggccggagaagtggtcgcccaggcggcgttctacgcgggatggccaaatgcgtttaccgccgccccggtggtcggtgaggtattacgatcgcgcgagagcaaaactgaataa

SEQ ID NO: 221422 - DNA, 930 bp, Klebsiella pneumoniae; identical to SEQ ID NO: 211767

SEQ ID NO: 221423 - DNA, 1389 bp, Klebsiella pneumoniae
atgacgctcttttccagtcaacccggcgacgaaggactgcctggcccggcgcgcgcacgggtgatggccgcaataatgaccaccaccttaatgggcgtgtttgatggcaccatgatcaacattgccctgccctccatggctcaggagatgcaggtacctgccagtattgccgtctggttcgccaacgggtatctgctggcggctgcgatgacgctggcgatattcgcggcgcttgcggcccgtctgggttatcgccccgtatttctggcgggcctgacgacctttaccctgacatcactgggttgtgcgctggcgaataagcccgaagtgcttatcggtatgcgcgtgcttcaggggatcggcggcgcggcgacgctgagtattgcccccgcaatactcaggtccgtatttcccggacgcttacttggccgcattctggggttccatgccctgctcattgcctcgagctccgctatcggcccggtattgggcggtacgatccttcacactcttagctggcaatggctgtttgcgataaacattcttcccggcaccctcgccttactgctggcggtcagagcgctgccgcgggatgcgatccgtatgcaggcgcccttcgacaccgtgggcgccatattgtcggcgctgctgttgggttcgacgatcatggcggcgaacagcctacagaacgctacttctcaattcggcagcctttgctggatggctctcgctgcgctgagcggcatggcttttatctggcaaatccgccgcacgggtcatcccttactgccgccgagcatgtttaaaaatgaacgttttaccctcgcggccttcacgtcgatggttgcttttgtcagccaggggatcacctttattgcgctacccttcctgtttcagagcgaatacggctacagtccggtagtgtctgccctgctgtttacgccgtggccattagggatcgtgctgattgcgccgcatgcaggccgttgggcggacacgatatcagccccggcgatatccaccctggggctggtgatatttgtcgtcggtttgatcctgctggcgacgttacccgccagaccttcaatgtgggatatctgcctgcgaagtctggtatgcggaatagggtttggctgctttcagagtcccaataaccgggaaatgctctcaaacgttattcgtgagcacgcgagttatgcgtccggtgttttatccattatgcgcactttcgggcagtgcctgggagccgccgccgtagccgttctgctggcagcagatgaaaggtcaattcatgttgcgctgtggagcgccgccgcggcctctgcggtatcggtcgtcgtcagcgcgagccggttgcgtaaaatcactcatcctgcggaaacaggataa

SEQ ID NO: 221424 - DNA, 714 bp, Klebsiella pneumoniae; identical to SEQ ID NO: 211769

SEQ ID NO: 221425 - DNA, 900 bp, Klebsiella pneumoniae
atggatcttaaacgcttacgctatttttgccgggtagtggaacacggttcggtgagtcaggcggcgaagtcgctcaatatggcgcaaccaccgctcagcaagcggattcaggagcttgaagaagagctgcaggtttcacttttcgagcgccgcggcaaccgcattgaaccgacggaagcggggtatttcttatatcgaaaaggctgtgaaattttacgccaggtggaggataccgctcgggagacggccgatattgcgcaaaagacccgcgtggaagtacgtattggcttaactcatctgtaccagaattattttcagcctttattaatggagctctatcggcgcaatcctgaaaccgcgataaatatctcggtgactgactcaagtcatctggaaacattattaaatgaaggcgctatcgatctggcattaatacagcgaccctaccgcggagaaggcttcgattatatctccttcgaccccattaaactggtagcggtcattaataaaaaatgcctgtcgcaaccgccttccaacccctatgactacaatgctctggcggagatgccgctggtgctgctgcaccgggcgaaagattccggcacctatgaaatgttaatggacctgttccgtaaatccggcgttagcgcgaaggtgattatgcatattacccagcccggagtgatcctcgactggctggaggacgggctggaagcggcgacattgctgccatcttcggaagtgaatgccgaaaaacttcctcattgctatgtggttgatgtcttcccctcaccgcaaatattttatccggctctggtgaaattgccgtcgatgccgtatctgccggcgctgatggatattatcgccgggggttatccttttaccgcgccgagggagtag

SEQ ID NO: 221426 - DNA, 1494 bp, Klebsiella pneumoniae
atggcaaattcagataaaaaaacgccttcaccggtgcatgatttacgttcggctctggcactgttaaaaacgctgccgggcgaatatgttgagaccgataccgaagtcgatcctcacgccgagctctcaggcgtttaccgctacgtgggcgccggcggcacctgccagcgcccaacgcgcaagaacggcccggtcatggtctttaacaaaattaaggggttcgacgatatcagcgtggccatcggtctgaacggctcgcgccagcgcgttagccagttcctgcagtgtgaaccggcaaaactgggtcatttgctgaaagattccgttgaaaatgctattagcccaaccatagtacaggacacggcggtatgccaggaagtggttcacctcgccagcgatgctgattttgatctgcgtaaactgctgcctgcgccaactaacaccgaagaagatgccggtccgtatatcactatgggcctgtgctacgcctccgacccgcaaacccacgaatccgatatcactattcatcgcctgtgtgtccagagccgcgatgagctatcaatgtggctgacgccgggtcgtcatatcgatgccttccgcatgaaggcggaagcggcgggccagccgctgcctatttcgatcagtatcggcgtcgatccggctatcgaaatcgccgcctgctttgagccaccgaccaccccgctgggtttcaacgagctaagcatcgccggcgcgctgcgtggccgcgcggtggagatggtgcaatgtaagactattaatgaaaaagccattgcccacgccgaaatcgttatcgaaggcgaactgctgccgaacgtgcgcgtacgcgaagatcagaacacccataccggccgcgcaatgccggagttcccgggctataccggtgaagcgaaagaggcgattccggttattaaagtcaaagccgtcacccatcgtactcagcctatctggcgcaccaccgtcggaccaggcgaagaacatgtcaacatggccgggatcccgaccgaagcgagtattctcgatatggtggagcgcgccatgccgggcaaattactcaacgtcttcgcccactcggcaggcggcggcaaactactggcggtactgcaatttaagaaatcttcccctgccgatgaaggccgccagcgccaggcggcgctcctggcgttctccgctttcccggagctgaagcacgtcattttggtggatgaggatgttgatattttcgatagcgacgatgtgctgtgggcgatgcaaacccgctaccagggtgatgtcgataccgtaatgatcccgggtgtgcgctgtcatccgctcgacccgtcgcagttgccagagtacagcccgagcgtgctgcagcagggaatgtcgtgcaaaaccattttcgactgcaccgtaccgttccatctgaaacacaactttgagcgctctaagttcaaagcggttgatgtaaaacgtttcctgccggacttcgaataa

SEQ ID NO: 221427 - DNA, 579 bp, Klebsiella pneumoniae
atgacaccacgcatcatcattgggattagcggcgcttccgggttccagtacggcgtgaaagcgctggaacttttgcggccactggcgatagaggttcatctggtggtctccaaaggtgcggaaaaaacctgcgagctggaaacggattaccgcttagatgaagtgatggcgctggctgacgtggtacatcccatcaaccatctgggcgcgtccatctccagcggctcgtttaaaacgctggggatgttggttgccccctgctcgatgcgatcattgggcgctatcgcccactgtctcaccgataatctgcttacccgcgcggcggacgtagtgctaaaggaacgtcgtcggctggtactgctggcgcgcgagacgccgcttaatctcggccatatacgtaatatggcggcagttaccgagatgggcggcatcatctttccgccggtgcctgcactctatcagcgtccgcaaagcgcagatgacattattacccatagcgtaaaccgcgcgcttgacctgtttgacctggaggtcaataacatcccgcgctggggtgagggcgagctgctttacacgtaa

SEQ ID NO: 221428 - DNA, 717 bp, Klebsiella pneumoniae
atgttaattggtccgtatgtaaatggttccgccgtgattatcggcggattgatcggcgcaatggccggaggaaaacttccggaacgcgtcaaaacagccctgccgatgacctttggtctctgctccgtcggcctgggtatcaccctggtactgaaggtgaaatatatgccggcggtagtgctggcgatggtactcggcgccttcctcggcgaactgctgcatctggaaaaacgcatcggcagcgcggcgggatcaacgcgcgggttgattaataaagttcttccacccgttcagggattaggtcatgaagagttcaccgaaaaattcgtggctattttggtcctgttttgcgccagcggtaccggtatttttggtgccatgaccgaaggtatgagcggcgatccatcaatcctgtacattaaaaccatcctcgatctttttaccgccgggatcttcgcgacgctgctgggctacgcggtgatgaccatcgctatcccgcagatcgtgattcaggtggcgctggcgatgctagcggtgtttattctgccgatgatcacgccgtcaatgatggcggatttctcctgcgccggtggattgctgatggtggccactggattacgcatctgcaacattaagcttttcccggtcgccaacatgctgccagggcttgttttggtaatgcctttctcccatttatgggctaccctagtggcctga

SEQ ID NO: 221429 - DNA, 555 bp, Klebsiella pneumoniae; identical to SEQ ID NO: 211770

SEQ ID NO: 221430 - DNA, 1518 bp, Klebsiella pneumoniae
atgtctgaacaacaagcacagggcgctgacgcggcaattgaccttaataatgaactgaaaacccgtcgcgagaagctggctgcgctgcgtgagcagggcgtcgcattcccgaacgatttccgtcgtgaccatacctctgaccaactgcacgctgacttcgatggcaaagaaaacgaagagctggaagcgctgaacgttgaagtggccgttgctggccgcatgatgacccgtcgtatcatgggtaaagcgtccttcgtgaccctgcaggacgtaggcggccgcatccagctgtacgtggcgcgtgatgacctggcggaaggcgtttataacgaccagttcaaaaagtgggacctcggcgacatcatcgccgcccgcggtaagttgttcaagaccaaaaccggtgagctctctatccactgcaccgagctgcgtctgttgactaaagctctgcgcccgctgccggacaaattccacggcctgcaggatcaggaagcgcgttatcgccagcgttacctggacctgatctccaacgatgaatcccgcaagaccttcaaagtgcgttcgcagatcctggcaggcatccgtcagttcatggttggccgcggctttatggaagtagaaaccccgatgatgcaggtgatcccgggcggcgcttccgcgcgtccgttcatcacccatcataacgcgctggatctggacatgtacctgcgtatcgcgccggaactgtacctcaagcgtctggtggttggcggcttcgaacgcgtcttcgagatcaaccgtaacttccgtaacgaagggatctccgttcgtcataacccagagttcaccatgatggaactctacatggcttatgcggattataaagatctgatcgagctgaccgaatctctgttccgcaccctggcgcaggacatcctcggcaataccgaagtgccttacggcgaccaggtgttcgacttcggcaagccgtttgaaaaactgaccatgcgcgaagcgatcaagaaataccgtccggaaaccgagatggcggatctggataactttgattccgcgaaagcgatcgctgaatctatcggcatcaaagtggagaagagctggggtctgggccgtatcgtgaccgagatcttcgaagaagtggcggaagcgcacctgatccagccgaccttcatcaccgaatacccggcggaagtttctccgctggcgcgccgtaacgacgtcaacccggaaatcaccgaccgctttgaattcttcattggcggccgtgagatcggtaacggctttagcgagctgaacgacgccgaagaccaggcgcagcgcttccaggatcaggttgatgcgaaagccgcaggcgacgacgaagcaatgttctatgacgaagactatgtcaccgcgctggaacacggcctgccgccgaccgctggtctgggtatcggtatcgaccgtatggtcatgctgttcaccaacagccacaccatccgcgacgttattctgttcccggcgatgcgtccgcagaaataa

SEQ ID NO: 221431 - DNA, 963 bp, Klebsiella pneumoniae
gtgtggaacgaacccgaacgcgcccaggcgctgggtaaagagcgttcttccctggaagccatcgtagataccctggatcagatgtcccaggggctggaagacgttgccggcctgctggatctggccgtggaagcggacgacgaagagacctttaacgaagccgtcgccgagctggataccctggaagagaagctggcgcagcttgagttccgccgcatgttctccggcgaatacgacagcgccgattgctaccttgacattcaggccggttccggcggcaccgaagcccaggactgggccagcatgctgatgcgcatgtacctgcgctgggcggaggcgcgcggctttaagaccgaaatcatcgaagaatccgaaggtgaagtcgcggggattaaatccgtaaccattaagatcattggcgattacgcctacggctggctgcgtacggaaaccggcgttcatcgtctggtgcgtaagagcccgttcgattccggcggccgccgtcatacctccttcagctccgcgttcgtttacccggaagtggaagacgatatcgatatcgaaattaacccggccgacctgcgcattgacgtataccgcgcctccggcgccggtggtcagcacgttaaccgtacggaatccgcggtgcgtattacccatatcccgaccgggttggtgacgcagtgccagaacgaccgttcgcagcacaagaacaaagaccaggccatgaagcagatgaaagcaaagctttatgaactggagatgcagaagaaaaatgccgagaagcaggcgatggaagacaacaagtccgatatcggctggggcagccagatccgctcttacgtgctggatgactcgcgtattaaagatctgcgtaccggggtggaaacccgcaacactcaggcggtgctcgatggcagcctggaccaatttatcgaagcaagtttgaaagcagggttatga

SEQ ID NO: 221432 - DNA, 1734 bp, Klebsiella pneumoniae
gtgaaacaacagatacaactacgccgccgcgaggcggttgacggcgtcgaactccccgccgacctgccgccgctgctgcagcggctatatgccagccgcggggtgcgcagcgcgcaggagctggagcgcagcgtcaaaggcatgctcccctggacgcagctcaccggcgttgaaaaagcggtcgagatgctgcatgacgcgttccagaaagggttgcacatcgtggtggtcggtgattttgacgccgacggcgccaccagcaccgcgctcagcgtgttggccctgcgcgcgctgggttacggcaacgtctcctatctggtgccgaaccgctttgaagacggctacggtttaagcccggaagtggtcgatcaggcccatgctcgcggcgcgcagatgatcatgaccgtcgacaacgggatctcgtcccatgccggcgtcgatcatgcccatgcgctggggatcccggtgctggtgaccgatcaccatctgccgggcgagacgctgccggcggcggaagctatcgttaatcccaacctgcgcgattgcgacttcccgtcaaaatcactggccggggtgggggtggcgttttatctgatgctggcgctgcgcacttttctgcgcgataaaggctggttcgacgctcgcggcatccccgcgccgaaccttgccgagctgctggatctggtggcgcttggcaccgtcgcggacgtcgtgccgctggatgctaacaaccgtatcctcacctggcaggggttaagccgcattcgcgccggcaaatgtcggcccggtattaaggcgctgctggaaattgccaaccgcgatccgcaaaagctggcggccagcgacctcggtttcgccctcgggccgcgcctgaacgcggcgggacggctggacgacatgtcggtcggcgtcgcgctgctgctgtgcgacaacatcggcgaagcgcgggtgctggccaacgagctcgatgcgcttaatcagacgcgcaaagagattgagcaggggatgcaggcggaagcgctaacgctctgtcagcagctggagcgcagcgccgataccctgcccggcgggctggcgatgtaccatccgcaatggcatcaaggggtagtcggcattctcgcctcgcggattaaggagcgcttccatcgcccggttatcgcttttgcgcctaccggcgacggcacgctgaaaggctccggtcgttccattcaggggttgcatatgcgcgatgcgctggagcgccttgatacgctttatcccgggctaatcctgaagttcggcggccacgcgatggcggcgggcttatcgctggaggaggcgcgttttgaagagtttcaacagcgcttcggcgagctggtgaccgaatggctggatcctgcgctgttgcagggcgaggtggtttccgatggcccgctggcggcggcggagatgagcatggaagtggcgcagatgctgcgcgacgccgggccgtgggggcagatgttcccggaaccgctgtttgacggtcgttttcgcctgctgcagcagcggctggtgggcgagcgtcacctgaaggtgatggtcgaaccggttgacggcgggccgctgctggacggtatcgccttcaacgttgatacttccatctggccggataacggcgtgcgtgaagtccagttagcctacaagctcgacatcaacgagttccgcggcaaccgtagcctgcagctgatcatcgatcacctctggccaaattga

SEQ ID NO: 221433 - DNA, 714 bp, Klebsiella pneumoniae
atgaaaaaaggtttattgatgttcaccctgctggcggcctccctttcaggaacggcgcacgccgatagcgcggcaattaaacagtcgctggcgaagctgggtgtgcagagcaccgatattcaaccatcgccggtttccgggatgagcacggtgctgaccgacagcggcgtgctgtacgtgaccgacgacggcaagcatatcatccaggggccgatgtacgacgtgagcggcgcgcagccggtcaacgtcaccaaccagctgctgctgggtaagctgaacgcgctgagcaatgagatgattgtctacaaagcgccgaaggagcagcacgtcatcaccgtcttcaccgatattacctgcggctactgtcataaactgcacgagcagatgagcgactacaacgcgctggggatcaccgtgcgctatctggctttcccgcgccagggtctgcaaagccaggcggagcaggacatgaaggccatctggtgcgcgaaagatcgcaacaaagcgctggatgacgccatgaatggtaaaggcgtgcagccggcgagctgcagcgtagatatcgccaaacattacaccctcggcgtgcagatgggcgtcaacggtacgccggcgatggtcctcagtaacggcatggtgctgccgggctatcaggggccgaaagagctgaaggcgttcctcgatgagcacaaaaaacagacaagcggtaactga

SEQ ID NO: 221434 - DNA, 897 bp, Klebsiella pneumoniae
gtgaaacaggatctggcactaatcgaacagtttctcgatgccctttggctggagcgcaacctggcggagaatacgctcagcgcctaccgtcgcgatttgacgatgttagttgagtggctgcaccatcgcggcctgtcgctggcaagcgttggcagcgacgatctgcaggcgctgctggctgagcggcagtccggcggctacaaagccaccagcaccgcgcgcctgctgagcgccgtgcgccgttttttccagcatctgtaccgggaaaaaattcgcccggacgatcccagcgcgctgctggcctcgccgaagctaccgcagcggctgccaaaagatctcagtgaggcgcaggttgagcgcctgctgcaggcgccgctggtggagcagccgctggaattgcgcgataaagcgatgctggaggtgctgtatgccaccggcctgcgcgtctcggagctggtggggctgacgatgagcgacatcagcctgcggcagggcgtgctgcgggtggtgggaaaaggcaacaaagagcggctggtgccgctgggggaagaggcggtactgtgggtggaaaattacctcgagtatggtcgcccctggctgctgaacggcgtggcgtcggatgtcttatttcccagccagcgcgcccagcagatgacgcgccagaccttctggcaccggattaaacactatgccgtactggcggggatcgacagcgaaaagctttccccgcacgtgttacgccatgcgttcgccacgcatttgctcaatcatggcgccgatctgcgcgtggtgcagatgctgttaggacacagcgatctctccaccacgcagatatacacccacgtggcgaccgagcgtctgcgacaacttcatcaacagcaccacccgcgggcgtga

SEQ ID NO: 221435 - DNA, 522 bp, Klebsiella pneumoniae
atgaatataggtctgttttacggctccagtacctgctacaccgaaatggccgcggagaaaatccgcgatatcatcggccccgaactggtgacgctgcacaatctgaaagatgactcccccgcgctgatgagccagtacgacgtactgatccttggcatcccgacctgggatttcggcgaaattcaggaagactgggaagcggtctgggatcagctggacaccctgaacctcgagggaaagatcgtcgcgctatacggcatgggcgatcagctgggctacggcgaatggttccttgacgcgctcggcatgctgcatgacaagctggcgaccaagggcgtgaagtttgtcggctactggccaaccgaaggctatgagttcaccagcccgaaaccggtgatcgccgatggccaactgttcgttggcctggcgctggatgaaaccaaccagtacgacctgagcgacgagcgcatccagagctggtgcgagcagatcctcggcgaaatggccgaacacttttcctga

SEQ ID NO: 221436 - DNA, 411 bp, Klebsiella pneumoniae
gtggtcctgtggcaatctgatctccgtatctcctggcgcgcgcagtggttttccctgctgcttcacggcgtggtggcggccctggtgctgttggttccctggccgctgagctataccccgatctggctgctgctgctgtcgctggtggtcttcgactgcgtgcgcagccagcggcggatccatgcccgtcgcggggagataaaactgctcaccgattcccgtcttcgctggcaaaacgccgaatgggagatcctcgggacgccgtgggttatcaatagcggtatgctgctgcgtttgcgccatgtcgatacccggcgcggacagcatctttggctggcggcggacagcatggacgccggagagtggcgcgatctgcgccggctggtgctgcaaaaaccggcgcaggagtaa

SEQ ID NO: 221437 - DNA, 267 bp, Klebsiella pneumoniae; identical to SEQ ID NO: 137771

SEQ ID NO: 221438 - DNA, 984 bp, Klebsiella pneumoniae; identical to SEQ ID NO: 211779

SEQ ID NO: 221439 - DNA, 660 bp, Klebsiella pneumoniae
atggttcgcaaaccattaatcactcagggatattctctggcagaggaagttgccaacagcatcagccacgggatcgggctggtgttcggtatcgtcggccttgtgttgctgctggtgcaggcggcggatacaaacgccagcgcgacggcgatcgccagctacagcctgtacggcggcagcatgattatgctgttcctcgcttccacgctctatcacgcgatcccgcatcagcgggcgaaacagtggctgaagaaattcgaccactgcgctatctacctgttgattgccgggacctacacgccgtttttgctggtgggattgaattcaccgctggcgaaggggctgatgatcgtcatctggagcctggcgctgctggggatcctgtttaagctaaccatcgcgcaccgctttaaaattttgtcgctggtgacctatctgaccatgggctggctgtcgcttatcgtggtctatcagctggcagtgaagctggcggtgggcggggtaacgctgctggcggttggcggggtggtgtactcgctgggggtcatcttctacgtctgcaaacgtattccttataaccacgctatctggcacggcttcgtgctcggcggcagcgtgtgtcacttcctggcgatttatctttacatcggccagtcctga

SEQ ID NO: 221440 - DNA, 312 bp, Klebsiella pneumoniae
atgcaggccaatgacattaccttttttcagcgttttcaggacgacatcctcgccgggcgcaaaaccatcaccattcgcgatgcagcggagtcgcactttaagcccggcgatgtgctgcgcgttgggcgctatgaagatgacggctatttttgcaccatcgccgtgaccgcgacctcgacggtgacgctcgatacgctgaccgaacagcatgcgcaacaggagaatatgactctcgggcagctgcggcaggtcatcagcgacatctatcctggcgagagccagttttatgtcattgaattcaaaacgctttaa

SEQ ID NO: 221441 - DNA, 729 bp, Klebsiella pneumoniae
atgttctcccacgccgctgtcgccagtctcaataatcttgagatgatggtctaccactacgtcattaaaaatcgtgacaaagtgatgtacatgaccatccgcgaactggccgaggccgccggggtctccacgaccaccgtgttacgcttctgccgcaaactgcagtgcgagggctactctgaatttcgcgtgcgctttaaattatatctcgagcagaatgagcctcaacaggcaaatatcggcgccagcgaaataatgagcttttttaaaagcgtcaataatgacgagttcgatgaattactcgagcaggccgtcgatattattctcgcctccgaacgtattatttttgtcggcgccggcacctccggcgcgctggcgaaatatggcgcacgcttcttctccaacgtcggtaaattcagcaaccatattgacgatccctattttccggtaaccaacgatatggcccgcaacgcgctggcgatcgtgctttccgtctctggcgagacggaagagatcctgcgtttcgccagccagttcagcctacatcattgcaaggtgatgtcgattaccagccatgagcattcgcggctggccaaactggctgatttcaatctctcctggcacgtgccgcagacgcgcattggcggcgtctacgatattacaacgcaaattccagtgatctatattctcgaatccctcggacgtaaattagcgcgcaaaatcagctaa

SEQ ID NO: 221442 - DNA, 1434 bp, Klebsiella pneumoniae
atgaaaaaattaacccttccgaaagattttttatggggcggcgcggtcgccgcgcatcaggttgaaggcggctgggatcagggcggcaaaggccccagcatctgcgatgtgttgaccggcggggcgcacggcgtgccgcgcgaaatcacccaccaggtcgaagcgggaaaatactacccgaaccacgaagccgtcgacttctacggtcgctacaaagaagacatcaaactgttcgccgagatgggcttcaaatgcttccgcacctctatcgcctggacccgcatcttcccgcagggtgacgaaacccagccgaatgaagaggggctgaagttctacgacgacatgttcgacgagctactgaagcacaacatcgaaccggtgatcaccctctcccacttcgagatgcccctgcacctggtgcagcagtacggcggctggaccaaccgcaaagtggtcgatttctttgtacgcttcgccgaagtggtcttcgagcgctataagcacaaagtgaaatactggatgacctttaacgagatcaacaaccagcgcaactggcgcgcgccgctgttcggctactgctgctccggggtggtctataccgagcatgacaatccggaagagaccatgtaccaggtgctgcaccaccagttcgtggccagcgcgctggcggtgaaagcggcgcggcgcatcaacccggacatgcaggtcggctgcatgctggcgatggtcgccctctacccttactcctgcaaaccggaagatgtcatgttcgcccaggagtcgatgcgcgagcgctacgtctttaccgacgtccagctgcgcggttactacccgagctatgtgttgaatgaatgggaacgccgcggcttcaacatcaggatggaagacggcgacgcgcagatcctgcgcgaaggtacctgcgcctatctcggcttcagctactacatgaccaacgcggtgaaagccgagggcggcactggcgacgccatttccggtttcgaaggcagcgtgccgaacccgcacgtcaaagcctccgactggggctggcagattgacccggtcggcctgcgctattctctgtgtgaactgtatgagcgttatcagaagccgctgtttatcgtggaaaacggctttggcgcctacgacaaagtagaagccgacggcagcatcaacgatgactaccgcatcgactacctgcgcgcccacatcgaagagatgatcaaagcggtcacttatgacggcgtcgatctgctgggctataccccatggggctgcatcgactgcgtctccttcaccaccgggcagtacagcaaacgctacggcttcatctacgtcaacaaacacgacgatggcaccggcgacatgtcccgctcgcgcaagaagagctttaactggtacaaagaggtcatcgccagcaacggtgagaacctgtaa

SEQ ID NO: 221443 - DNA, 360 bp, Klebsiella pneumoniae
atgattaagcgacaacgcaaagccattctttttgtcctcctggcctgtctggtggtgctaacctgcaccgctcaacggatggccgggatgcacgcgctggtcatgaacctcaccgccgacagcccgtcgctacagcaaaaccaggatcaggccgaggcgccggtcacgccgtgcgagctcagcgccaagtcgctgatggccgttccgccgatgctgtttgaaggggcgctgttggctatcaccctgctgctggcggtgctggcggcgatcccgccgcgtatcgaacgccagtggcctccccgcgttatctcctcaccccgattgcgggtgcatctgcgattatgcatcttccgtgagtga

SEQ ID NO: 221444 - DNA, 2010 bp, Klebsiella pneumoniae
atgtatatggtattcaggcgactactggtctgcctgctttggctatggctgcccgtcagccaggccgccgacagcggctggctgcgcgccgccgacaatcaacacgccagcgtccgcctgcgggcgcaaaccgagagcaatggcgacactcgcctgcttttagacgtagcgctggaaaagggctggaaaacctactggcgctcgccaggggaaggcggcatcgcgccggctatcgcctggcacacgccgctggaggtgagctggcgctggccgacgccgcagcgcttcgacgtcgcgggcatttccactcagggctatcacggcgacgtcagctttccgatgacgctgcgcggcaaaataccgccgacgcttagcggcgtcctgacgctctctacctgcagcaatgtctgtattctcactgactatcccttttcgctggatatgacgactccgtcgggggagcgatttaattatgattttacccgcgcgatgggcacactgccgctgcgcgatggcctgacttcgcaactgaccgccagctacgtcagcggcaaactgacggtgaccgcccgccgcgatgccggctggcagcagccagcgctgtttatcgacagcatggaggatgtcgatttcggtaagccgagctttaccagccgcggcgatacgttgaccgccaccgtaccagtcaccgatagctggggcgaagcggcgccggatctgagcggcaaaacgctgtcgctggtgctggccgatagcggtcaggcgcaggaaagccaaatcgccgtcgccgccggcagcgccgcgccggggctggcgttaggctgggtgctgctgatggcgctggccggcgggcttattctcaacgtcatgccctgcgtgctgccggtgctggcgatgaagctcggctcgctggtgcaaaccgaaggtcgcgaacgcggcgcggtgcggcggcagttcctcgcctcggtgtgcgggatcgtcgtctcgttcctggcgctggcgctgatgatgaccgcgctacgcctggggaatcaggcgctcggctggggcatccagttccagaacccgtggtttatcggcgcgatggcgctggtgatggtgctgttcagcgccagtttattggggctgttcgaaatccgcctctcctccagcgccagcactttcctcgccaccaggggcggcaacggcttaatgggccatttctggcagggcgccttcgccaccctgctggcgacgccctgtaccgcgccgttcctcggtaccgccgtgtcggtggcgctggtggcgcccctgccgctgctgtggggcattttcttcgccatggggatcggcatgagcctgccgtggctgctgatcgttgcctggccgggtctggcgcaacgactgccacgcccgggccgctggatgaatcatctgcgggtggtgctggggctaatgatgcttggttcagcgctatggctggtcagcctgctgacgatccacatcggccgtacgccggtgcttaccctgctggtgattctggccatcgccctgctagtggccaccgcctggcgctaccgctggcggacggcgctgcgcgcgggcgccctggccatcgtggtagcgggcgccgtcgcctttgtcgcccaacaggacggccagggcccgcgccgcgaccgggttaactggcagccgctcagcgagcaggctatcgccagcgccctggcggagcataagcgggtatttattgatgtcaccgccgactggtgcgtgacctgtaaagccaataaatacaacgtgctgctgcgcgacgacgtccagcaggcgctgttagcgccagacgtagtcgccctgcgcggcgactggagccgcccctccgctgtcattagccagtttttaaccgctcgcggcagcgccgcggtgccgtttaaccagatttacggaccggaattgccgcagggacagattctgcctgcgctgttagaccgcgaacaccttctcgccaccctgtccgccgctaaaggaaaataa

SEQ ID NO: 221445 - DNA, 612 bp, Klebsiella pneumoniae
atgagagctatcaccgccttattactgttgtgcgtatcggccttcagtttcgccgccccggcggaagaaccacaatcgaacggtaatgaccagttagcccagctgctgtttaacgatccgaatagcccgcgcaccggcgcgaaagagccaaaactcacgatcgtctcgtttaccgattacaactgcccttactgcaaacagtttgatccgctgctggaaaaaatcgtccacgataatccggacatccagctcatcgttaagctgctgccgtttaaagggcagagttcggtgaatgccgctaaaatcgcgctctccacctggcgtcagcagcccgataaattctgggcgctgcatcagcggctgatggcgaaaaaaggctatcacgatgacgccagtatcgccgccgcgcagaagaaaaccgccaccgatagcgtaaatatcgatgacaagaccatggattcgctgaagatgaacctgattttgtcgcaggtgctgaatattcagggcaccccggcgaccatcatcggcgatcagatggtggctggcgcgatccctgctgatgagctggaggggctggtgaaagaacagctggcgaaagcccgtggccagtaa

SEQ ID NO: 221446 - DNA, 504 bp, Klebsiella pneumoniae
gtggccagtaaaatcaggcgctggctgcgcgagctggcggtgtggctgctgattggcgcggcggtgagcctggcggtggattattttcgccagcccgcgctgccgcaaaacgtcagcgccacatcgctgcagacactcgacggcaggacgctggatctgcatgccataagccagcaaaagccgctgctgctgtacgtctgggcgacctggtgcggagtttgtcgctataccacgccgtcggtggcatcgcttgccgccgacggcggcaatgtgctgacggtagccctgcgttccggcgataacgccgcgctggagaagtggctgagcaggaagaaaatggcgctgccgacggtaaatgatccgagcggccagctggcgcggcagtgggatatccaggtaacgccaacgctggtggtcatttctcaaggcgaggtgaagtcgattaccaccggctggaccagcagttggggaatgcgcctgaggctgtggctggcctcctggtag

SEQ ID NO: 221447 - DNA, 744 bp, Klebsiella pneumoniae
atgggaatagctcttattagcggcgcgagccgcggcataggccgggcgacggcgctgctgctggcgcaggaaggatataccgtggcggtcaattaccatcacaacattaacgccgccaccgaggtggtgaataccattgtggcgtctggcggcaaagccacggcgctgcgggcggacatcagcgatgaagcgcaggtgatggcgatgtttgaggcagttgaccgcatgggcgagccgctgacggcgctggtcaacaacgccgggatcctgtttacccagtgtacggtggagagcctgagcgccgagcgtattaaccgcgtgctggccaccaacgtcaccggttatttcctctgctgtcgcgaggcggtaaagcgcatgtcacatcgacatggcggtaagggcggggcgatagttaacgtgtcgtcggcggcgtcgcgccttggcgcgccgggggagtacgttgactatgccgcgtcgaaaggggcggtagataccctgactaccgggctggcgctggaggtggcggcgcaggggatccgggtcaacggcgtgcgtccggggctgatttataccgagatgcacgcctccggcggtgaaccgggacgcgtggatcgagtgaaaggttcgctaccgatgcagcgcggcggccagccggaagaggtcgctcaggccattgcctggctgctgagcgacaaagcgtcgtatgtgacgggtagcttccttgaactggcgggcgggaaataa

SEQ ID NO: 221448 - DNA, 2874 bp, Klebsiella pneumoniae
atgactcagactttaagtcagcttgaaaaccgcgacgcctttattgaacgtcacattggcccggacgctcagcaacagcaagagatgctgaagaccgtcggcgcggattcgcttaacgccctgatcggccagattgtgccgcaggatatccagctggcgaccccaccgcaggtgggcgacgcgactaccgaattcgccgcgctggcggagctgaaggcgattgccagtcgcaacaagcgcttcaagtcttacatcggcatgggctataccgccgtgcagctgccgccggtcattcagcgcaacatgctggaaaacccgggctggtataccgcctataccccttaccagccggaagtatcccagggccgtctggagtcgctgctcaacttccagcaggtcactctggatctgaccgggttggatatcgcttccgcttcgctgcttgatgaagccaccgccgccgccgaagcgatggcgatggccaaacgcgtcagtaaactgaagagcgccaaccgcttcttcgttgccgccgacgtccatccgcaaaccctggacgtggtgcgcacccgcgcggaaaccttcggtttcgacgtcatcgtcgatgacgccgacaaagtgctcgatcaccaggatgtcttcggcgtgctgctgcagcaggtgggcaccaccggcgaaatccacgattacagcaaactgatcgccgagctgaaagcgcgcaaagtgattgtcagcgtcgctgccgactttatggcgctggtgctgctgacggcgccgggcaagcagggcgcggatatcgtcttcggttccgcccaacgcttcggcgtgccgatgggctacggcggcccgcacgcagccttcttcgcggcgaaagatgaattcaaacgctccatgccgggccggattatcggcgtatcgaaagatgcggcggggaataccgcgctgcgcatggcgatgcagactcgcgagcagcacatccgccgtgagaaagcgaactccaacatttgtacctcgcaggttctgctggccaacatcgccagcctgtacgcggtattccacggcccggcgggtctgaaacgtatcgctggccgcattcatcgtctgaccgacattctggccgacggcctgcagaagaaagggctgaagctgcgccatgcccactacttcgacaccctgtgcgtcgaagtggcggataaagccgcggtgctggcgcgtgccgaagccctgcagattaacctgcgcagcgatattcacggcgcggtgggcattacgctcgatgaagcgaccacccgcgaagatgtgctgaacctgttccgcgccatcgtcggcgacgatcacggtctggatatcgataccctggataaagacgtggcgctggatagccgttcgatcccggcggcgatgctgcgcgacgatgcgatcctcacccatccggtgtttaaccgctaccatagcgaaaccgagatgatgcgctacatgcacgccctggagcgtaaagatctggcgctgaaccaggcgatgatcccgctgggctcctgcaccatgaaactgaacgccgcggcggagatgatcccgatcacctggccggaattcgccgagctgcacccgttctgcccggtcgagcaggcggaagggtatcagcagatgatcgcccagctttccgactggctggtgaaactgaccggctatgacgccgtctgcatgcagccgaactccggcgcgcagggtgaatatgctggtctgctggcgattcgccattatcacgagagccgcaacgaaggccatcgcgatatctgcctgatccctagctccgcgcacggcaccaacccggcttccgcgcagatggcgggtatgcaggtagtggtcgttgcctgtgataaaaacggcaacatcgatctcgccgatctgcgtgaaaaagcagagcaggcgggggccaatctctcctgcatcatggtcacctatccgtcgacccacggcgtgtatgaagagaccattcgcgaagtgtgcgagatcgtgcaccagtttggcggccaggtttatctcgacggcgccaacatgaacgcccaggtcgggatcacctctccgggctttatcggcgccgacgtttcgcacctcaacctgcataaaacgttctgcattccgcacggcggcggcggcccgggcatgggcccaatcggcgtgaaagcgcacctggcgccgttcgtgccgggccacagcgtggtacagattgaaggtatgctgacccgccagggcgcggtttccgccgcgccgttcggcagcgcgtccattttgccgatcagctggatgtatatccgcatgatgggcgcggaagggctgaagcaggcgagccagaacgcgatccttaacgccaactacatcgctacccggctgaaagacgcctacccggtgctctacaccggtcgcgatggtcgcgtagcgcacgaatgcattctcgatattcgtccgctgaaagaagagaccggcattagcgagctggatatcgccaagcgcctgatcgactttggcttccatgcctcgaccatgtctttcccggtagcggggacgctgatggttgagccgacggaatcggaaagcaaggtcgagctggaccgctttatcgacgcgatgctggcgatccgcgcggaaatcgaccgcgtcaaagccggcgaatggccgttggaggataaccctctggtgaacgcgccgcacacccagggcgagctggtgggcgagtggaaccatccgtacagccgcgagctggcggtattcccggcagggttgcacaacaagtactggccgacggtgaaacgtctggatgatgtctacggcgaccgcaacctgttctgctcctgcgtgccgatgagcgaataccagtaa

SEQ ID NO: 221449 - DNA, 390 bp, Klebsiella pneumoniae
atgagcaacgtaccagcagaactgaaatacagcaaagaacacgagtggctgcgtaaagaagcggacggcacctataccgtagggatcaccgagcacgcgcaggagctgcttggcgatatggttttcgttgacctgccggaagtgggcgccaccgttgaagcgggcgccgattgcgcggttgccgaatccgtgaaggcggcctccgatatctacgcgccgattagcggtgaaatcgttgccgtcaacgaagagctgaacgactctccggaactggtcaacagcgacccgtataccgacggctggatcttcaagatcaaagccagcgacgaagcgcaggttgccgcgctgctggatgccgccgcgtatgaagctttactggaagacgaataa

SEQ ID NO: 221450 - DNA, 1095 bp, Klebsiella pneumoniae
atggctcaacagactccgttgtatgaacaacacacgctgtgcggcgcgcgcatggtggatttccatggctggatgatgccgctgcattacgggtcccagattgatgagcaccatgcggtgcgcggcgatgcagggatgttcgatgtgtcgcatatgaccatcgtcgatttccacggcagccggatccgcgagttcttgcgctatttgctggccaacgatgtggcgaagctcaccaccccaggcaaagcgctctacaccggcatgctgaccgcctccgccggcgtcatcgacgacctgattgtctatttcctttctgaagattatttccgcctcgttgttaactccgccacccgcgaaaaagacctcgcctggatctccgaacaagctgaaccttacggccttgaaataaccgttcgcgacgatctgtcgctgatcgcggtgcagggcccccaggcgaaagcgaaggcggcgacgctgtttaccgacgctcagcgtcaggccgtggaaggcatgaagccgttcttcggcgtgcaggccggcgacctgtttatcgccaccaccggctataccggcgaagcgggttatgaaattgcgatgccgaacgagcaggcggctgatttctggcgcggtctgctggacgctggcgttaagccgtgcggtcttggcgcgcgcgacaccctgcgcctggaggccgggatgaacctgtacggccaggagatggacgaaggcgtttccccgctggcggcgaacatgggctggactatcgcctgggagcccgccgatcgtaacttcatcggccgcgaagcgctggagatgcagcgcgaaaaaggcaccgagcagctggttggcctggtgatgaccgagaaaggcgtcctgcgcggtggtctgccggtccgttttaccgatagcgacggtaatcaaaaagaaggcattatcaccagcggcaccttctcgccgacgctgggctacagcatcgcgctggctcgcgtgccggccgggattggcgacaccgcggtggtgcaaatccgtaaccgtgaaatgccggttaaagtgactaaacctggttttgtacgcaatggcaaagccattgtgtga

SEQ ID NO: 221451 - DNA, 1203 bp, Klebsiella pneumoniae
gtgcaaagtgttgatgttgccattgttggcggtggaatggtggggctggcggtagcctgcggtctacagggtagcggcctgcgcgtcgcagtgctggagaaagcagagccgcgaccgctggccgccgatgcgccgccggcgctgcgcgtttcggcaattaatgccgccagcgaaaagctgctgacgaagctggacgtctggcgcgagatcgtcccccagcgggccagctgctatcacggtatggaagtgtgggataaagacagctttggccacattagcttcgatgaccagagcatgggctttagccaccttggctatattatcgaaaatgccgtagtgcatcatgcattgtggcagaaggcgcagcgttgcgctgacgttaccctgctggctccggcggaacttcagcaggtggcgtggggcgagaatgaagcctttctcagcctgcaggacggcagcatgctgaccgcgcggctggtgatcggcgccgatggtgccaattcatggctgcgcaataaagccgatattccgctgaccttctgggattaccatcatcatgcgctggtggcgaccatccgtaccgctgagccgcatcaggcggtggcccgccaggcgttccatggcgacgggatcctcgccttcctgccgctcagcgatccgcacctgtgctcgatcgtctggtcgctatcgccgggggaagcgcagcggatgcagcaggctgatgaaaccaccttcaaccaggcgctgaatatcgcgttcgataatcgccttggcctctgccagctggcaagtgaacgtgaagttttcccgctgaccggccgctatgcccgtcagtttgccgcccaccggctggcgctggtcggcgatgccgcgcataccatccatccgctggccgggcagggggtcaacctcggttttatggatgccgccgagcttattgacgagctgaagcgcctgcacgctcagggcaaagatatcggccagcatctttatctgcgccgctacgagcgcagccgcaagcacagcgcggcgctgatgctggcgggcatgcagggcttccgcgaaatgttctccgggagccatccggcgaagaaatttcttcgcgatgtgggactcaaactggccgatacgctgccgggcgtgaaaccgcagctgattcgccaggcgatgggcctcaacgatctgcctgcctggttacgttaa

SEQ ID NO: 221452 - DNA, 1179 bp, Klebsiella pneumoniae
atgagcgtgctgatcgtcggcggcgggatgaccggcgcgacgctcgcgctggccatctcccgtttgaccggcggcgcgctgccggtccacctcattgaagcgcaggatccgcattcgtcacgccaccctggctttgacgaccgggcgatcgccctggctgcgggcacctgccagcagctggcgcgtatcggtatctggcaacgcctcgccgaacgcgcgacgcccatccagcgagtacacgtcagcgaccgcggtcatgccgggtttgtgaatctggcggccgcggattatggcctgtcggcgctgggccaggtggttgaactccacgatgtcggccagcgcctgtttggtctgctgcgcgaggcggcgggcgtcacgctgcactgtccggcgaaagtggaagcggtcagtcgcagccaggagagcgtcagccttacgcttgagggcggcgaaatcattaacggtaagctgctggtagcggcggacggttcccgttcggcactgggcgcccgctgcggcatcagctggcagcagcagccgtatgagcagatagcgatcattgctaacgtcagcaccgcgttgccccacgaaggtcgcgccttcgagcgctttaccgagcatggcccgctggcgatgctgccgatgtcgcaagggcgctgctcgctggtgtggtgtcatccgcagtcgcgctgcgatgaggtgcagagctggtctgacgaacgcttttgtcaggagctgcagcaggcgttcggctggcggctggggcgtattacccacgccgggaagcgcagcgtttatccgctggccctcaccaccgccagccgcgcggtgtcgcaccgcctggcgctggtcggcaacgcggcgcagacgctgcacccgatcgccgggcagggctttaatctcggcctgcgcgatgtgatgagcctggcggaattactcgctgacgcccatctcagcggcgaagatgtcggtcattatccgctgctgtgccgctatcaggcgcgcagggcagcggataaagccgccaccatcggcgtgaccgatgggctggtgcatctgtttgccaaccgttgggcgccgctggtggcggggcgcaacgtcggtctgatggcgatggaattatttaccccggcgcgcgatgcgctggcgcagcgtaccctcggttgggttccccgttaa

SEQ ID NO: 221453 - DNA, 1317 bp, Klebsiella pneumoniae
atgactcagcaggaatttctatcgcgtcgccagacgctgttggcgcagatgcagccaggcagcgcggcgctgattttcgccgcaccggaagcggtgcgcagtgcagattcggaatatccctaccggcagaacagcgatttctggtacttcaccggctttaacgaaccggaagcgctgctggtgttgattaaaagcgatgaaacccacaaccatagcgtgctgttcaaccgggttcgcgatcttaccgctgagatctggtttggacgccgtctgggccaggaggccgcgccggcgaagcttggcgtcgaccgggcgctggcgttcagcgaaatcaaccagcagctgtatcagctgctcaacggtctggacgcgatctacttcgcccagggtgaatatgcctatgccgatgagattgtgttcaacgccctcgaaaaactgcgcaaaggctcgcgccagaatctgcaggcgccgaactcggttatcgactggcggcccattgtgcatgagatgcgcctgtttaaatccgcggaagagcttgccgtgatgcgccgcgccggggagatcaccgcgctggcccatacccgggcgatggaaaaatgccgccctggcatgttcgaatatcagctggaaggtgaaattctccatgaattcaaccgccacggggcacgtttcccctcctataacaccatcgttggcggcggcgaaaacggctgtattctgcactacaccgaaaacgaatctgaactgcgcgacggcgatttagtcctgattgacgccggctgcgagtatcgcggctatgccggggacattacccgcaccttcccggtaaacggtaaatttacccagccgcagcgcgagatctacgacattgtgctcgaatcgctggagaccgcgctgaaactctatcggccgggcacctcgatctgtcaggtcaaccaggaagtggtgcgcattatgattaccggcctggtgcggctggggatcctgaaaggcgagattgacgagcttatcgccaacaacgcccaccgcccgtactttatgcatggcctgagccactggctgggtctggatgtacacgatgtcggtaattacgacaccgaccgttcgcgcgtcctggagccgggaatggtgctgaccgtcgagccgggactgtatatcgccaccgatgccgacgtgccggcgcagtatcgcggcatcggcatccgtattgaagatgacatcgtgattaccgaagacggtaacgaaaatctcaccgccggcgtggtgaagaaggcggatgagattgaggcgctgatggcggcggcgcgccagtcatga

SEQ ID NO: 221454 - DNA, 585 bp, Klebsiella pneumoniae; identical to SEQ ID NO: 211795

SEQ ID NO: 221455 - DNA, 330 bp, Klebsiella pneumoniae; identical to SEQ ID NO: 138508

SEQ ID NO: 221456 - DNA, 597 bp, Klebsiella pneumoniae; identical to SEQ ID NO: 211797

SEQ ID NO: 221457 - DNA, 1233 bp, Klebsiella pneumoniae
atggctaaggtatcactggaaaaagacaagattaaatttctgctggttgaaggtgtgcatcaaaaggcaatcgatagccttcgcgcagcgggttacaccaacattgaatttcataaaggcgcgctggattcagaacagctgaaagcgtcgatccgtgatgcccatttcatcggcctgcgttcccgtacccatctgactgaagagattttcgccgcagcggaaaaactggttgccgtcggttgcttctgcatcgggaccaaccaggtcgatctgaacgccgctgcgaagcgcggtattccggtgtttaacgcgccgttctctaacacccgctcggtggccgagttggtgatcggcgaactgctgctgatgctgcgcggcgtgccggaagccaacgccaaagcgcaccgcggggtgtggaacaagcaggcggtcggcagcttcgaagcgcgtggtaaaaagctgggcatcatcggttacggccacatcggtacccagcttggcattctggcggaatcgctgggaatgcacgtcttcttctatgatattgaaaacaaactgccgctcggcaacgccactcaggtacagcatctctccgacctgctgaacatgagcgatgtggtcagcctgcacgtgccggaaaacgcctctaccaaaaatatgatgggcgcggaagaactggcgctgatgaagccgggcgcgctgctgatcaacgcctcccgcggtaccgtggtggacattccggcgctatgcgatgcgctggccagtaagcatctggccggggcggctatcgacgtcttcccgactgaacctgcgaccaacagcgaccccttcacttcgccgctgtgcgagtttgataacgtgatcctcacaccgcatatcggtggctccactcaggaagcgcaggagaacatcggtctggaagtagctggcaagctggcgaaatactctgacaacgggtcaaccctgtcggcagttaacttcccggaagtttctctaccgctgcacggcggccgccgtctgctgcatatccatgagaaccggccgggcgtcctgaccgcaatcaaccaaatcttcgccgcgcagagcatcaacattgccgcccagtatctgcaaacgtcgccgcagatgggctacgtggtgattgatattgaagcggaagaagatgttgcccagcaggcgctgcaggcaatgaaagcgatcccggggactatccgcgcccgtctgctgttctaa

SEQ ID NO: 221458 - DNA, 660 bp, Klebsiella pneumoniae
atgacgcaggatgaactgaaaaaagcggtaggttgggcagcactgcaatatgtacagccagggactattgtcggcgtaggcaccggctcgacggcggcccattttattgacgcgctgggcaccatgaaggggcagatcgaaggggcggtttccagctccgacgcctccaccgagaagctgaaaagcctcgggatcaccgtcttcgatcttaacagcgtcgatcgcctggggatctatgttgacggcgcggatgagatcaacggccatatgcagatgatcaaaggcggcggcgcggcgctgacccgtgaaaagatcatcgcctcggtcgcggataagtttatctgcatcgccgacgcctccaagcaggtcgatattctgggcaagttcccgctgccggtggaagtcattccgatggcgcgcagcgccgtggcgcgtcagctggtcaagctgggcggccgtccagagtaccgtcagggcgtggtgaccgataacggcaacgtgatccttgacgtgcacggcctggaaattctcgatgcgatcgcgctggaaaacgcgatcaacggtattcctggcgtcgtcaccgtggggctgttcgccaaccgtggcgccgacgtggcgctgattggcactgccgacggcgtgaagaccatcgtaaaatag

SEQ ID NO: 221459 - DNA, 894 bp, Klebsiella pneumoniae
atgaaacgaccggactacaggacactacaagcgctggatgcggtgattagggaacgaggatttgagcgcgccgcgcagaagctatgtattacccagtccgccgtctcacagcgtattaagcagttggaaaatatgttcggccagccgctgctggtgcgtaccgtgccgccgcgccccaccgagcaaggacagaaactgctggctctgttgcgccaggttgaactgctggaggaagagtggctgggcgatgaacaaaccggctctacgccgctgctgctgtcgctggcggtgaacgccgacagtctggcgacctggctgctgccggcgctggccaacgttctgtcagactcccctattcgtctcaacctgcaggtggaagatgaaacccgcacccaggagcgcctgcgccgtggcgaagtagtgggcgcagtgagtatccagccgcaggcgctgccaagctgcctggtggatcagctgggggcgctcgattacctgtttgtcgcatcaaaagagtttgcgcaacgctatttcccgaatggcgtgacgcgttcggcgctgcttaaggcgccggtcgtcgccttcgaccatctggacgatatgcatcaggcgttcctgcagcaaaacttcgacctgccgccgggcagcgtcccctgccacatcgtcaactcgtcggaagctttcgtgcagctggcgcgccagggcaccacctgctgtatgatcccgcatctgcagatcgaaaaagagctcaacagcggcgaacttatcgatctcaccccgggcctgttccagcgccgcatgctctactggcaccgcttcgccccggaaagccgcatgatgcgccgggtgaccgatgcgctcattgactacggacacaaggtgctgcgtcaggattaa

SEQ ID NO: 221460 - DNA, 768 bp, Klebsiella pneumoniae
gtgaagttaaaagtcttagccctggcggcaacactcggattgaccacgatggcggcacaggccagcgaattgccggatggcccgcacattgtgacttcaggcacagcaagcgttgccgcggttccggacatcgccaccctggcgatcgaagtgaacgtgtcggcaaaagacgccgcgtcggcaaaaaaacaggctgacgatcgcgttgcgcaatatctctctttcctcgaaaagagcggtattgctaaaaaggacatcaactcggcgaatctgcgtacccaacctgattacgactatcagaacgggaaaagtattctgaaaggctatcgcgcggtgcgcacagtggaagtgaccttgcgccagctggataaactcaacggtctgctggatggcgccctgaaagcgggtctcaacgaaattcgctccgtctcgctgggcgttgcgcaaccggacgcctacaaagataaggcgcgtaaagcggcgatcgacgacgccgtgcatcaggcgcaggagctggccgcaggcttccacagcaagctgggtccggtgtacagcgtgcgctaccatgtctccaactatcagccgagcccgatggttcgcatgatgaaggccgctgacgctgcgccggtttctgcccaggaaacctacgagcaggcgactatccagtttgacgaccaggtcgatgtagtctttgagctgcagccggcgcaagccgctgctccagccaccccggcgaaaccggcggaaacgccgaaaccggcccagtaa

SEQ ID NO: 221461 - DNA, 636 bp, Klebsiella pneumoniae
atgtttacttattactttcaggggcttgccctgggggcggctatgatattgccgcttggccctcaaaatgcctttgtgatgaatcaggggatccgtcgtcagtatcatctgatgattgccctgctatgcgcggtcagcgacttgctgttaatctgcgctggcattttcggcggtagcgcactgctgatgcaatccccgtggctgctggcgctagtgacctggggcggcgtggcctttttgctgtggtatggcttcggcgcattgaaaacggcgttcagtcagagtcttgaactcgccaatgcagaggtaatgcagcaggggcgctggaaaatcattatcaccatgctggcggtgacctggcttaatccgcacgtttatctggacacctttgtggtgttaggcagcctgggaggtcagctggcggtggagccgaagcgctggtttgcgctagggaccattagcgcctctttcctgtggttctttggcctggcgctgttagccgcctggctggcgccgcgactacgtaccgccagagcccagcggatcatcaatattgtggtcggcgccgtcatgtggtttattgcgtttcagctggcaagagaaggcgtcagccatatccaggcgttgcttaactaa

SEQ ID NO: 221462 - DNA, 858 bp, Klebsiella pneumoniae
atggaagatttgaacgttgtcgatagcatcaaccacgccgggacgtggctggcacgcaaccaggagctgctgctgagctatgccgtcaacatcgtcgcggctatcgctatcctgatcgtcgggatgatcgtggcgcgcgtcgtctctaataccgtcaaccgcctgatgctggcgcgtaaaattgacgctaccgtggccgattttctctctgcgctggtgcgctatgcggttatcgcctttacgctgattgccgccctggggcgggtaggcgtgcagaccgcctcggtgattgcggtgctgggtgctgccggtttggcggtgggtttagcgctgcagggatcgctgtcgaaccttgccgcaggcgtactgctggtgatgttccgcccgttccgcgctggcgagtatgtcgaccttggcggcgtggcaggtacggtgttgaacgtgcagattttctccaccaccctgcgtaccgcggacggtaaagtagtggtggtcccgaacgggaaaatcatcgccggcaatatcattaacttctcccgggagcctgcgcgtcgcaatgagtttattatcggcgtcgcttacgatgctgatatcgacaaggtaaagcagctgctgacctcgattatcgaatctgacgatcgaattctgcgcgatcgggaaatgaccgttcgtctgaacgaactcggcgcctcgtcggtgaacttcgtggtgcgcgtgtggagcaaaagcagcgatctgcaaaacgtctactgggatatcctcgagcgtatcaagcgtgaatttgacgccaacggcatcagcttcccttacccgcagatggatgttcatgtggtgcgcctgccggaaaaagcagagtaa

SEQ ID NO: 221463 - DNA, 1080 bp, Klebsiella pneumoniae
atgtctaaaatttttgatttcgtaaaaccgggcgtcatcactggcgacgacgttcagaaagtgttccaggtagcgaaagaaaacaactttgcactgccggcggtaaactgcgtaggtactgattccatcaacgccgttctggaagctgcagcgaaagttcgctctccggttatcgttcagttctctaacggcggcgcagcgttcatcgcaggtaaaggcgtgaaaactgacgttcctcagggtgctgctatcctcggcgctatctctggcgcccaccacgtgcaccagatggctgaacactacggcgtgccggttatcctgcacactgaccactgcgcgaagaaactgctgccgtggatcgacggcctgctggacgccggtgaaaaacacttcgccgctactggcaaaccgctgttctcttcccacatgatcgacctgtctgaagagtccctgcacgaaaacatcgagatctgctctaagtacctggctcgcatggccaaaatgggcatgaccctggaaatcgaactgggctgcaccggcggtgaagaagacggcgtggataacagccacatggacgcttccgccctgtacacccagccggaagacgtggattacgcctacaccgagctgagcaaaatcagcccgcgcttcaccatcgccgcttccttcggtaacgtacacggcgtgtacaaaccaggtaacgtagttctgaccccgaccatcctgcgcgactctcaggaatatgtttccaagaaacacaacctgccgcacaacagcctgaacttcgtgttccacggcggttccggttcttccgctcaggaaatcaaagactccgtcagctacggcgtggtgaaaatgaacattgataccgacacccaatgggcaacctgggacggtatcctgcagtattacaaagcgaacgaagcttacctgcagggccagctgggcaacccgaaaggcgaagaccagccgaacaagaaatactacgacccgcgcgtatggctgcgtgctgcccagacttccatggtgactcgtctggagcaggcatttaaagagctgaacgcgatcgacgttctgtaa

SEQ ID NO: 221464 - DNA, 1164 bp, Klebsiella pneumoniae
atgtctgtaattaagatgaccgatctggatctggctggtaaacgcgtttttatccgtgcggatctgaacgtaccagttaaagacgggaaagtaaccagcgacgcacgtatccgtgcatctctgccgaccattgaactggcgctgaagcagggcgcgaaagtcatggttacttctcacctgggtcgtccgaccgaaggcgagtacaacgaagaattctctctgctgccggttgttaattacctgaaagacaaactgtccaacccggtacgcctggttaaagactacctggacggcgtggaagtggctgccggtgaactggtggtgctggaaaacgttcgcttcaacaaaggcgagaaaaaagacgacgaagaactgtctaagaaatacgctgcgctgtgcgacgtgttcgtgatggacgctttcggtactgcgcaccgcgcgcaggcttccacccacggcatcggcaaatttgctgacgtggcgtgcgcaggcccgctgctggccgctgaactggacgcgctgggtaaagcgctgaaagagccagctcgtccgatggtcgctatcgttggtggttctaaagtgtccaccaaactgaccgttctggattccctgtctaaaatcgctgaccagctgatcgtgggcggcggtatcgctaacaccttcgttgccgctcagggccacaacgtcggtaaatccctgtacgaagcagatctggttgatgaagccaagcgcctactgggcacctgcgatatcccggttccgaccgacgttcgcgtagcgaccgagttctccgaaaccgcaacggcaaccctgaagtctgttaacgacatcaaagatgacgagcagattctggaccttggcgacgtttccgcacagaaactggctgaaatcctgaagaacgccaaaaccatcctgtggaacggcccggttggcgtattcgaattccctaacttccgtaaagggactgaaatcgtggctaacgctatcgcggacagcgaaggtttctccatcgccggcggcggtgacaccctggcagcgatcgacctgttcggcatcgctgacaaaatttcctacatctccactggcggcggcgcattccttgaattcgtcgaaggcaaagtcctgccggcagtagcgatgctcgaagagcgcgctaagcagtaa

SEQ ID NO: 221465 - DNA, 1029 bp, Klebsiella pneumoniae
atgaccattcgcatcgcgattaatggcttcggtcgcattggacgcaacgtggttcgtgctctatatgaatccgggcgtcgtgcggaaatcaccgtggtggcaatcaatgagctggcggatgccgcgggcatcgcgcatttattgaaatatgacaccagccatggccgtttcgcctgggatgtccgtcaggagcgcgagcagctgtttgttggcgacgatgccatccgtctgctgcatgagccgaccattgcggcgctgccctggcgcgaactggcggtggacgtcgtgcttgactgtaccggggtatacgggagtcgtgaacacggtgaagcccatcttcaggcgggggcgaaaaaagtgctcttttcccaccccggcggcaacgacctcgacgcgacggtggtgtacggcgtaaatcaggatgaacttcgcgccgggcatcgcatcgtctccaacgcctcctgcaccaccaactgcattattccgatcattaaactgctcgatgacgcctatggcattgagtccggcaccgtcaccaccattcactcggcgatgcatgaccagcaggtgattgacgcttatcatccggatctgcggcgtacccgcgcggccagccagtcgatcattccggtggataccaaactggcggcagggatcacccgtatttttccgcaatttaacgaccgttttgaagcgattgccgtgcgggtgccgacgattaacgtgacggcaattgacctgagcgtgacggtgaaaaaaccggtaaaagcatgtgaagtcaaccagttgctgcaaaaagcagcacaaggtgcatttcatggtatagttgactatacggaattaccgttggtctcgacagattttaaccacgatccgcacagcgccatcgtcgatggtacgcaaacccgggtcagtggcgcgcatctgatcaaaacgctggtctggtgcgataacgaatggggctttgctaaccgaatgctcgacacgacgttagcgatggcggctattggtttcaggttcgacgcgtaa

SEQ ID NO: 221466 - DNA, 1992 bp, Klebsiella pneumoniae; identical to SEQ ID NO: 221277

SEQ ID NO: 221467 - DNA, 759 bp, Klebsiella pneumoniae
atgaaaattcgctcaaccgtacttgctcttgggatcgcagcaaccctcaccggatgtcagaacatggactccaacggtctgctcagctcaggcgccgaagccttccaggcatactctctcagcgacgcgcaggtgaaaaccttaagcgaccaggcctgtaaagagatggacgccaaagcgaaaatcgccccggccaacagtgaatacagccagcggctgaacaaaatcgcggctgcgctgggcgataacatcaatggtcagcccgtgaactacaaggtctatgagaccaaggatgtcaacgccttcgccatggccaacggctgcatccgcgtctacagcgggctgatggatctgatgaacgataatgaagtcgaggcggtgatcggccacgaaatgggccacgtcgcgctgggccacgtgaagaaaggcatgcaggtcgccctgggtaccaacgccgtgcgtgcggcggcggcctccgcgggcggtatcgtcggtagcctgtcgcagtctcagttgggcgatctgggcgaaaaactggtgaactcgcagttctcccagcgtcaggaatcggaagcggatgactactcttacgacctgctgcgtaagcgcggtatcaatccgtcgggactggccaccagcttcgagaaactggccaagctggaagccggccgtcagagctccatgtttgacgatcacccggcctcagaagcgcgtgcccagcatattcgcgatcgcatgaaggccgacgggattaaataa

SEQ ID NO: 221468 - DNA, 921 bp, Klebsiella pneumoniae
atgagcactttaggtcatcaatacgataactccctggtatccaatgcctttggctttctgcgtttgccaatgaactttatgccgtatgaaagcgatgcggactgggtcatcaccggcgtgccgttcgatatggcgacctccgggcgcgcgggcggccgtcatggcccggcggcgatccgtcaggtttctactaaccttgcctgggagcacaaccgtttcccgtggaacttcgatatgcgcgagcgcctgaacgtggtggactgcggggatctggtgtacgccttcggcgacgcgcgcgaaatgagcgagaagctgcaggctcacgccgagaagctgctggcggccggcaaacgtatgctctcctttggcggcgaccacttcgttaccctgccgctgctgcgcgcccatgccaagcactttggtaaaatggcgttggtgcacttcgatgctcacaccgatacctacgccaacggctgcgagttcgaccacggcaccatgttctataccgcgccgaacgaagggcttatcgatccgaaccactccgtacagatcgggatccgcaccgagttcgacaaagacaatggctttacggtactggatgccggccaggttaacgaccgcagcgttgatgacgtgattgcccaggtgaagcagatcgtcggcgacatgccggtgtacctgacctttgatatcgactgtctggatccggcgtttgcgccaggcaccggtaccccggttatcggtgggctgacctccgaccgcgcgatcaagctggtgcgcggcctgaaggacctgaacatcgtcgggatggacgtggtggaagtcgccccggcctacgatcagtccgaaattaccgctctggcggcggcgaccctggcgctggagatgctgtacatccaggcggcgaaaaagggcgaataa

SEQ ID NO: 221469 - DNA, 1977 bp, Klebsiella pneumoniae
atgtctgacgacatgtctatggtttcgccttcgtcagcaggcgaacacggtgtactacgttccatgcaggaggtagcgatgagctcccaggaagccagcaagatgctgcgtacttataatattgcctggtggggcaataactattatgacgtcaacgaactgggccacatcagcgtttgcccggatccggacgtcccggaagcgcgcgttgacctcgcggaattagtcaaagcgcgtgaagcgcaagggcagcgcttgccggcgctgttctgcttcccgcagatcctgcagcaccgcctgcgctcgatcaacgccgccttcaaacgcgcgcgtgaatcgtatggctataacggcgattacttcctcgtctacccgatcaaggttaaccagcaccgtcgcgtgattgaatcgctgatccattccggagagccgctgggcctggaagccggttcgaaagcggaactgatggccgtgctggcgcacgccgggatgacccgcagcgtcatcgtctgtaatggttataaagaccgcgaatatatccgtctggcgctggtgggcgagaagatgggccacaaggtctatctggtcattgagaagatgtccgagatcgctatcgtactggaagaggccgagcgcctgaacgtggtgccgcgccttggcgtacgtgcgcgtctggcctcgcagggctccggtaaatggcagtcctccggcggcgagaagtccaagttcggcctcgcagcgacccaggtgctgcaactggtcgaaattctgcgcgaggcaggccatcttgagagcctgcaactgctgcacttccacctcggttcgcagatggctaacattcgcgatatcgccaccggcgtgcgtgaatcggcgcgtttctacgtcgaactgcataagctgggcgtcaatattcagtgcttcgacgtcggcggcggcctgggcgtggactatgaaggcacccgctcgcagtccgattgctcggtgaactacggtctgaacgaatacgccaacaatatcatctgggcgatcggcgatgcctgcgaagagaatggcctgccgcacccgacggtgatcaccgagtccggccgcgcggtgaccgcgcaccataccgtgctggtttccaacatcatcggcgttgagcgtaacgaatacaccgaggcgaccccgccggcggaagacgctgcgcgtccgctgcagagcatgtgggaaacctggctggagatgcacgagaccggcaaccgccgctcgctgcgcgaatggctgcacgacagccagatggacctgcacgatatccacatcggctactcctcaggcaccttcaacctgcaggagcgcgcgtgggcggaacagctgtatctgaacatgtgccatgaggtgcagaagcagctcgacccgagcaaccgcgcccatcgtcccatcatcgatgagctgcaggagcgaatggcggataaaatctacgtcaacttctcgttgttccaatcgatgccggatgcctgggggatcgatcagctgttcccggtgatgccgctggaagggctgaacaagtcgccggagcgccgcgcggtgctgctggacatcacctgcgattccgatggcgccatcgatcactacgtggacggcgacgggatcgccaccaccatgccgatgccggaatacgacccggagaacccgccgatgctgggcttcttcatggttggcgcctatcaggagatcctcggcaacatgcataacctgttcggcgataccgaggcggtggacgtgttcgtcttccctgacggcagcgttgaggttgagctgtccgacgagggcgataccgtggcggatatgctgcagtatgtgcagctggatccgaacacgctgctgacccagttccgcgatcaggtgaaaaataccggtctggacgacgcgctgcagcagcagttcctcgaggagttcgaggcgggactgtacggctatacttatctggaagacgagtag

SEQ ID NO: 221470 - DNA, 1155 bp, Klebsiella pneumoniae
atggcaaaacacctttttacgtctgagtccgtatcagaagggcatcctgacaaaattgctgaccaaatctccgatgccgtgctggatgcgatcctcgagcaggatccgaaagcgcgtgtcgcatgtgaaacctatgtcaaaaccggcatggtgctggtaggcggcgaaatcaccaccagcgcatgggttgatatcgaagagatcacccgcaacaccgtccgcgaaattggctacgtgcattccgatatgggctttgacgccaactcgtgcgccgtactgagcggcattggcaaacagtctccggacattaaccagggcgttgaccgtgccgatccgctggaacagggcgccggcgaccaggggctgatgtttggctacgccactaacgaaaccgacgtgctgatgccggcgccggtgacttacgctcaccgtctggtgcagcgtcaggctgaagtgcgtaaaaacggcaccctgccgtggctgcgcccggatgcgaaaagccaggtgaccttccagtatgacgacggcaaaatcgtcggcatcgacgcggtcgttctgtcgactcagcacgcggaagatatcgatcagaaatccctgcaggaagcagtgatggaagagatcatcaagccgattctgccgaccgaatggctcaacgcgtccaccaaattcttcatcaacccgaccggccgtttcgttattggcggcccgatgggcgactgcggtctgaccggtcgtaagatcatcgttgatacctacggcggcatggctcgccacggcggcggcgcgttctccggtaaagatccatctaaagttgaccgttccgcagcctacgcggcgcgctatgtggcgaagaacatcgttgccgcaggcctggccgatcgttgcgaaattcaggtttcctacgctatcggcgttgcagaaccgacgtccatcatggtggaaacctttggcaccgagaaagtgccttctgaacagctgaccctgctggtgcgtgagttcttcgacctgcgtccatacggtctgattcagatgctggatctgctgcacccgatctacaaagaaaccgcagcctacggtcactttggtcgcgaacatttcccatgggaaaaaaccgacaaagcggcgctgctgcgggaagcggccggtctgaaataa

SEQ ID NO: 221471 - DNA, 1395 bp, Klebsiella pneumoniae
atgcctgacaacaaaaaacaagggcgttcgaacaagactatgacgttcttcgtctgtttcctcgccgcgctggctggcctgctgttcggccttgatatcggtgttattgcgggtgccttaccctttattgccaatgagttccagatttccgcccacacccaggagtgggtggtcagctccatgatgttcggagctgccgtcggcgcggtcggcagcggctggctctctttcaaactgggccggaaaaagagcctgatgatcggcgccatcctcttcgtcgccggttcgctgttctctgccgccgcgccaaacgtcgagatcctgctggtttcccgtgtgctgctcggcctggcggtgggcgtcgcctcatatacggctccgctgtatctatcggaaatcgcgccagaaaaaattcgcggcagtatgatttccatgtaccagctgatgatcaccatcgggatccttggcgcctatctctctgacaccgctttcagctacagcggcgcatggcgctggatgctcggggttatcatcattccggcggtattgctgctgatcggcgttatcttcctgccggacagcccgcgctggttcgccgccaaacgtcgctttgtcgatgcggaacgcgtgctgctgcgcctgcgcgataccagcgccgaagcgaaacgcgagctcgatgaaatccgtgaaagcctgaaggtaaaacagtccggctggtcgctgtttaaagacaacagcaacttccgccgcgcggtgttcctcggcatcctgctgcaggtgatgcaacagttcaccgggatgaacgtcatcatgtactacgcgccgaagatctttgagctggcgggttatgccaacaccactgagcaaatgtgggggacagtgatcgtcggtctgactaacgtgctggccacctttatcgccatcggtctggtcgaccgctggggccgtaaaccgacgctgatccttggctttatcgtgatggccgcgggtatgggcgtcctgggtaccatgatgcacatcggcattcactcctctaccgcccagtacatcgccgtcctgatgctgctgatgttcatcgtcggtttcgccatgagcgccggcccactgatttgggtactgtgctccgaaatccagccgctgaaaggccgcgacttcggtatcacctgctccacagcgaccaactggattgccaacatgattgtcggcgccaccttcctgaccatgctcaactcgctgggcagcgccaataccttctgggtgtacggaggtctgaacgtgctgtttatcctgctgacgctgtggctgatcccggaaaccaaaaacgtctcgctggaacatattgaacgtaacctgatgcagggtcgtccactgcgcgagatcggtgcccgcgattaa

SEQ ID NO: 221472 - DNA, 459 bp, Klebsiella pneumoniae
atgcgcagcctgcgggaacatctcgccaatgcgaatcgcaagctggaacgccgctatgcggaaccgacgctggtctaccagcagcgtggtacttccgccggcaccgcctggctggagaaaaacgaaattcgtttaaacccggtgctgctgctggaaaatcagcgggagtttatcgatgaagtggtgccgcatgagctggcgcacctgctggtctggcagcatttcggccgcgtcgcgccgcacgggaaagagtggaaatggatgatggagagcgtccttggcgttcccgcgcgtcgcacccaccgctttgaactcgcttcggtccgccagaacaccttcccctatcgctgtcgctgtcagcagcaccagctcaccgtccgtcgccataaccgggtggtacgcggcgaggccacctaccgctgcgttcgctgcggcgatctgctggtggctgaaaaataa

SEQ ID NO: 221473 - DNA, 708 bp, Klebsiella pneumoniae
atgtcccgtatgcatgttttagccgtagcggtattgagcgcggcagtcagtggtccgcttgcggccgctggtattaatagtttttcccaggccaaagccgctggcgtcaaagtgaatgccgacgttccgggcgatttttattgcggctgtaaaatcgactggcaggggaaaaaaggcgttatcgatttggaatcctgcggctataaagtgcgtaaaaatgagaaccgcgccagccgggttgaatgggagcacgtagtgccggcatggcagttcgggcatcagcgtcagtgctggcaggagggtggacgtaaaaactgcgccaaagatccggaataccgcaagatggaaagcgatatgcacaacctgcagccggcggtgggagaagtgaatggcgatcgcggcaactttatgtacagccagtggaacggcggtgaaggccagtacggccagtgcaccatgaaggtcgattttaaagataaaatcgccgagccccctgcccgcgctcgcggcgccatcgcccgcacctacttctatatgcgcgaccgctatcagctgaatctttcccgccagcaaactcagctgtttaccgcctggaataaacagtacccggtcaccgcctgggaatgtgaacgtgatgagcgcatcgcgaaagtgcagggcaaccataatccgtatgtccagcaggcttgccaggcgcaaaagagctaa

SEQ ID NO: 221474 - DNA, 732 bp, Klebsiella pneumoniae
atgcgcattcctcgcatccatcatccagaacgcctcattgtcggcagccagatcgcgctgagcgatgacgcggccaaccacgtcggccgcgtcctgcgcatgaccgccggtcagcacctacagctttttgacggcagtaaccaggtgtttgacgcggtcatcaccgaggccggtaagaaaaacgttacggttgaggtactcagtggcgaacctgacgatcgggaatcgccgctgcatatccatttaggccaggtgatgtcccgcggcgaaaaaatggaattcaccatccagaaatcgatcgaactcggggtaagcctcataacgccactgttttccgagcgctgcggcgttaaactggatgccgaacgtttgcagaaaaagatccagcagtggcagaaaatcgctattgccgcctgcgaacagagcggtcgtaacgtggtaccggaaatatgtccggcgatgcagctggaggcgtggtgcgccgagcaggacagcgggctgaagctcaacctgcacccgcgcgccagcgccagcattaacacgctgccgctgccggttgaacgcgtccgtctgctgattggcccggaaggcgggctgtcggctgaagagatagcgatgaccgcgcaataccagtttactgatatcctgttgggaccgcgcgttctgcgtacagagactactgcgctcaccgccatcaccgccctacaggtgcgttttggcgacttaggttga

SEQ ID NO: 221475 - DNA, 951 bp, Klebsiella pneumoniae
atgatcaagctcggcatcgtgatggatcccatcgcaaccatcaacatcaagaaagacaccagcttcgctatgttgctggaggcgcagcgtcgcggctatgaactccattatatggagatgaacgacctctatttgatcaacggcgaagcccgcgcccggacgcgcacgctgagcgtcgaacagaactacgataaatggtatgacttcaccggcgagcaggatctgccgcttgcggaccttgacgtcatcctgatgcgtaaggatccgccgtttgataccgaatttatttatgccacctacatcctggagcgagcggaagagaaaggcacgcttatcgtcaacaagccgcagagtctgcgcgactgtaacgagaagctgttcaccgcctggttctctgaactgactccggaaacgttggtcacccgcaataaagcccagctgaaagccttctgggaaaagcacggcgatatcatcatgaaaccgctcgacggcatgggcggcgcctctattttccgtgttaaagccggcgatccaaaccttggggtgattgccgagacgctgaccgaactgggcagccgctactgcatggcgcagaactatctgccggccattaaagatggcgacaagcgcgtgttggtagtggatggagagcccgtgccttactgcctggctcgaattccgcagggtggcgagacccgcggcaatctggccgccggcggccgcggcgaagcccgcccgttgaccgaaagcgactgggaaatcgcccgccgcgtcggcccgacgctgaaggccaaaggccttatcttcgtcggcctggatatcatcggcgaccgtctgacggaaattaacgtcaccagccccacctgcgtacgcgaaatcgaagccgccttcccggatatttcgatcaccggtatgctgatggacgctatcgaaagacgtatcgataaataa

SEQ ID NO: 221476 - DNA, 564 bp, Klebsiella pneumoniae
atgaatttacagcatcactttctgattgccatgcccgcgcttcaggaccccattttccgccgctccgtagtctatatctgcgagtacaacgacgagggtgccatgggcattattatcaataagccgctggaaaatctgcaggtggaagggatccttgagaagctcaaaattgtcccggagccgcgcaatccagagatccgtctggataaaccggtgatgctgggaggcccgctggcggaagaccgcggcttcattttgcataccccgccctctgacttttcctcgagcattcgcatctcggataacacggtgattaccacctcgcgggatgttcttgaaaccttaggtaccgatcggcagccgggcaacgtgctggttgcgttgggctactcttcgtgggagaaagggcagctggagcaggagattttagataatgcctggctcaccgccccggcggatcagaatattcttttccgtacgccgatcgccgatcgctggcgcgaggcggctaaactgattggtatcgacattgtgacgatgccaggcgtcgcggggcatgcgtga

SEQ ID NO: 221477 - DNA, 417 bp, Klebsiella pneumoniae
atgagcggaacctttctcggctttgactttggcaccaaaagcatcggcgtggcggtgggacaacgcatcaccgcgaccgcacgaccattaccggcgctgaaggcgcaggacggtaaaccggactggaacgtcatcgaaaaactgcttaaagagtggcagcctgaggcggtaatcgtcggcctgccgctcaatatggacggcaccgagcaaccgctgacggcgcgcgcgcgtaatttcgccaataaaattcatggccgctttggcgtcgcgatccttctccacgatgaacgactgagtacggttgaggcccgcgcgggcctgtttgaacacggcggctaccgggcgctgaataaaggcagcgtcgattcggcctctgccgtagtcatactggaaagctacttcgagcagagcttttaa

SEQ ID NO: 221478 - DNA, 654 bp, Klebsiella pneumoniae
gtgattaatttaaatggaaattcatcatcttctcgtcaggtaacctttattacccacccgtctattcaaagcaaagcctttgctagctatctgagcgaaaccctgatggcaccggtggttttacaaaatattaataaaccgctggcgcagcgtttggcaaaagattctgtaatattatttgatattgcagtgtcaaataagaaattaaacggggtgtggcgggatattattcgcctgcaggcagataatcctcgtttgttgattattaatagcgcacaaaagtatgagctatacgaaatggcgcagtggccggctttatatggcgtgttccgtcatgacgatgatgaatcgcgcttaattgagggcgttaaggccgtgctgaacggcgagcagacggctgaattgagcgtgatgcacccggcgatgtacgctgcggaccatgcatcgactccagtagagaactcgccgctgaccgagcgggaatgcgagatcctcaacgaactacgctgcggcgcgacgaacctggatatcgcccgcgcgctgtttatcagcgagaacacggtgcggacgcacctgtacaatgtgtttcgtaaactgagcgtgaaaaatcgcacccaggcggtgagctgggctaacgaacatctgcgccactaa

SEQ ID NO: 221479 - DNA, 981 bp, Klebsiella pneumoniae
atgaagctggaagaaatcgtagcccttagtgtaaagcataatgtctccgatctacacctgtgcaattccgccgcaccgcgctggcggcggcagggcaggctgcagcccgcgccctttcccgcgccggatattgcaaatttactcaacgactggctcgatgccgcacagttactgcactggcaggaacacggccagattgactttgcgctgaccctggcctgcggtgcgcggctgcgcgccagcgccttcgcccatacgcgtgggatatcgctggtgctgcgcctccttcctgaacagtgcccgcgtctggacacgctcggcgccccgcctgcgctgagcgaactgctggcggaagagagtggtttgctgttggtcaccggagcgacgggcagcggcaagtcgaccaccctggcggcaatggtggggcacctcaatcagcatcttgatggccatattctgacgcttgaagatccggtggaatttattcatcacagcgagcgctgtctgatccagcagcgggaagttggccgtcactgtccttcgttcgccgcggcgctccgcgtggcgctgcgccaggatccggatgtgatcctgctcggggagctacgcgatagcgaaaccattcgcctggcgttaaccgcggcggagaccgggcacctggtaatggcgacattacatacccgcggcgcggcgccggcggtggagagattgatcgatgtctttccggcggaggagaaagatcaggttcgtagccagcttgccggaagcctgtgcgcggtgctggcgcaaaaattgttacctgcacgtcagggcgggagagttgcgctatacgagcttctggtcaacacgccagcggtggcgaatttgatccgtgaaggaaaagtacatcaattgcctggtgtgatgcagaccgggatgcaggccggaatgttgacctttacccagagttttcagcaacgtgtcgctgcaggcgcgctataa

SEQ ID NO: 221480 - DNA, 702 bp, Klebsiella pneumoniae
atgaacgatattgcgcataacctggcacaggtccgggacaaaatctccggtgctgccgcccgatgcgggcgtgcgccagaagaagtgacattgcttgcagtgagtaaaacgaaacctgcgagcgcgatcgaagaagccattgcggcaggccagcgggcatttggtgaaaactacgtccaggagggcgtggagaagattaaccatttccagcaggctggcgtcagcgggctgcagtggcactttattggccccctgcagtccaacaaaagccggttggtggcagagcattttgactggtgccacaccgtcgatcggctgaaaatcgccacccgcctgaacgagcagcgcccggcgcatttgccgccgctgaaggtgctgattcaaattaacatcagcgatgagcagagcaaatccggcatcccgctggaagcgctcgacggcttagcggcggagatcgctgagttacctcatctggaactgcgcggcctgatggccatccccgcgcctgagtcagaatatgtaaggcagtttgccgtcgcccggcaaatggcggtagcatttgcgcgattaaaaacgcggtaccccacggtcgatacgttgtctctgggaatgtcggacgatatggaagccgcaatcgcggcgggaagcacgatggtgcgcatcggtacagccatttttggtgcgcgcgactacagcaaataa

SEQ ID NO: 221481 - DNA, 567 bp, Klebsiella pneumoniae
atgaagacgttgactttcctactttcaacggtcattgagctttacacgatggtcgtgttgttacgcgtctggatgcagtgggcgcgctgcgacttttacaacccgttttcgcagtttgtggtgaaagccacgcagccgattgtcggaccgctgcgccggattatcccggcaatggggccgattgacagcgcctcgctgctggtggcatttattctctgcgtcatcaaagcgatcgtgctgtttatggtgatcaccttccagccgatcatctggatctccgctctgcttattctgctgaaaaccatcggctcgttgatcttctgggtactgctattgatggcgatcatgagctgggtcagccaaggccgtagcccggtggagtatgtgctgatgcagctggcggacccgctgctgcgccctatccgcaacctgctgccgtcgatgggcggtatcgatttctcgccgatggtgctggtattgctgttgtacgtaatcaatatgggcattgccgaagtgctgcaggccaccggtaatgtactgctgccggggctgtggatggcgctatga

SEQ ID NO: 221482 - DNA, 291 bp, Klebsiella pneumoniae
atgagtgccgttgaaacctgcgctgacgggctggtgctgaggctgtacattcagcctaaggccagccgcgatagcatcgtgggcgtacatggcgacgagcttaaagtcgccattaccgccccgcccgttgatggccaggccaatgcccacctggtgaaatttctcgccaaacagttccgcgtcgccaaaagccaggtactgattgaaaaaggcaagctgggccgccataagcaagttaaaatcatcgccccacaacagatcccgactgcggtcgcggcgctaactgaataa

SEQ ID NO: 221483 - DNA, 594 bp, Klebsiella pneumoniae
atgcaaaaagtcgtcctcgctaccggtaacgccggaaaagtgcgcgaactggcctcgctgctggaagattttggtctcgatatcgtcgctcagaccgagctgggcgtggactctgcggaagagaccggcctgaccttcattgaaaacgcgattctgaaagcgcgccacgcggcgcagatcaccggcctgccggccatcgctgacgattccggtctggccgtcgatgctcttggcggcgcgccgggtatttactccgcccgctattccggcgtcgatgccagcgaccagcagaatcttgagaagctgctcgacgcgttaaaggacgtgccggacgaccagcgtcaggcccagttccactgcgtgctggtctatctgcgccatgccgaggatcccacgccgctggtgtgccacggcagctggcctggggtaatcatccgacaagccgccggtcatggcggcttcggttacgacccgatcttcttcgtcccgtcagaagggaaaaccgcggccgaactgagccgtgaagaaaagagcgccatttcccatcgcgggcaggcgctgaaactgttactggaagcattacgtaatggctaa

SEQ ID NO: 221484 - DNA, 1137 bp, Klebsiella pneumoniae
atggctaatttgccgccgctgagtctctatatccatattccctggtgcgtgcagaaatgcccgtactgtgattttaattcgcatgcgctgaaaggcgaggtgccgcatgatgactacgtccagcatctgctgaacgatctgcaggctgatgcgcaatatgcccagggacgggaaataggcactatttttatcggcggcggaacgccgagcctgctgtccggcccggccatgcaaaccctgctggatggcgtccgcgcctgcctgccgctggccgccggggcggaaatcaccatggaagccaacccgggtaccgtggaggccgatcgcttcgttgattatcagcgcgccggggtgaaccgcatctccatcggcgtacaaagctttagcgaaccgaagctccagcgcctggggcggatccacggcccggaggaggccaagcgcgcagcacgtctcgccagcggcctcggcttgcgcagcttcaacctcgacctgatgcacggtctgccggaccagtcgctggaggaggcgctggacgatctgcgtcaggcgattgccctcaacccgccgcacctgtcgtggtaccagctgaccattgagccgaacaccttgttcggctcccggccgccggtgctgccggatgacgacgcgctatgggatattttcgagcaggggcatcagctgctgagcgccgccggctatcagcagtacgagacgtccgcctatgctaagccaggcttccagtgtcagcataatctcaactactggcgctttggcgactacctcggcatcggctgcggcgcgcacggcaagatcaccttccctgacggacgcattctgcgaaccgccaaaacccgccacccgcgcgggtatatggaaggccgttaccttgagcgtcagcatgatgtggaagaagcggataaaccgtttgagttctttatgaaccgttttcgcctgctggaggccgcgccgcgcgctgaatttagccgctataccggacttgaggaagcggcgatccgcccgcagctggacgcggcgatagcccagggctacctgcaggaagacgagcagaactggcagattaccgagcacggtaagctgttcctgaattccctgcttgagttgtttctgaacgagtaa

SEQ ID NO: 221485 - DNA, 717 bp, Klebsiella pneumoniae
atgcgtaaaacgctgctggcggtggcgctctccgtcaccgctttgtctgcccatgcggactaccagtgtagcgtcacgccgcgtgacgatgtgatcctcagcccgcagcaggtgcaggtgaaaggggaaaacggcgatctggtgataaagccggacggcaatctgacctttaacggcaaggcctatgcgctcagcgccgcccagcgcgaacaggcgcaggattatcaggccagcctgcgcagcagcctgccgtggattgacgaaggcgcgcgttcgcgagtcgaaaaaagccgcaaggcgctggataaaatcattaccgaacaggttggcgccaacagcagcatgcacggtcgcctgaccaaactggatgcgcagctgaaagaacagatgaaccgcattatcgaacgtcgcagcgatggcctgactttccactataaagctatcgaccaggtacgcgccgatggccagcagctggtgaatcaggcgatgggcggcattctgcaggacagcattaacgagatgggggcgaaagcggtgctcaaaggcggcggtaatccgctacagggcattctcggcagcctcggcggcctgcaaacggcgattcaggaggaatggaaaaaccaggaggccgatttccagcagtttggtaaggacgtctgcagccgggtggtatcgctggaggacagccgcaaagcgctggttggctcgctgaaataa

SEQ ID NO: 221486 - DNA, 327 bp, Klebsiella pneumoniae; identical to SEQ ID NO: 137733

SEQ ID NO: 221487 - DNA, 720 bp, Klebsiella pneumoniae
atgaaaaacgacgtcatctctccggaattcgatgaaaacggtcgcccgctgcgccgtattcgtagcttcgtccgtcgccagggccgcctgacgaaagggcagcagcatgcgctggataacatttggccggtgatgggcgttgaattcaacgatgcgccgctcgatttcgccgccctgtttggccgtgacgcgccggtcaccttagaaattggcttcgggatgggcgcctcgctggtggcgatggcgaaagccaaaccggaacagaatttcctcggcattgaagtacactccccgggcgttggcgcttgtctggcttctgcggaagaagaaggcgtacaaaacctgcgcgtaatgtgtcacgatgcagtggaagtgctacataccatgatcccggataactcgctgaatatggtgcaactgtttttccctgatccgtggcataaagcgcgtcataataaacgtcgtatcgtgcagccgcctttcgctgagctggtgaaaagcaagctgaagctcggcggcgtcttccatatggcgaccgactgggaagcttatgccgtgcatatgctggaagtcatgtcctcgctggaaggctatcgtaaccagtcggcaagcaacgattacgtaccgcgcccggaatcgcgcccggtaaccaaatttgaacagcgtggccatcgtctcggccacggcgtatgggacttaatgttcgagagggtgaaataa

SEQ ID NO: 221488 - DNA, 1059 bp, Klebsiella pneumoniae
ttgacttttctcgccacgcaattttcagcccaggttctggactggtacgacaaatacgggcgtaaaaccctgccctggcaaatcgccaagacgccctacaaagtatggctctccgaagtgatgttgcaacaaacccaggtgaccacggtaatcccctattttgaacgctttatggcgcgtttccccacggtggtggatctcgccaacgcgccgctggatgaagtgctgcatctgtggaccggtctgggctactacgcgcgggcgcgcaacttacataaagccgcacagcaagtcgccacactgcacggcggggaattcccccggacctttgacgaagtggcggcgctgcccggcgtcgggcgctcaacggcgggggcgattttatccctttcgctcggtcagcattatccgattctcgacggcaacgtgaagcgcgtgctcgcccgctgctatgctgtcagcggctggccggggaaaaaagaggtggaaaaacggctgtgggacatcagcgaagaggtcaccccggcagagggcgtcgagcgcttcaaccaggcgatgatggatctcggggcaatggtttgcacccgctcgaagccgaagtgcgagctgtgtccgctgagcaacggctgcgtggcctacgcgaaccattcatgggcggaatacccgggcaaaaaaccgaagcagaccctcccggaacgcaccggctacttcctgctgatgcagcacggcgacgaggtgtttctttcccagcgtccgccggtgggtctgtggggcgggttgttctgttttccgcagtttgcagacgaagcggagctacgcgagtggctggcgcagcgccagattaaggccgataatctgacgcaattaaccgcttttcgccacactttcagtcatttccacctggatattgtgccgatgtggcttacagtgcactcatctggcgcatgcatggatgaaggcaacgcactctggtataacttagcgcagccgccgtcggtcggtctggcggcccccgtggagcgcttgttgcaacagctaaaagccggagcgccggtataa

SEQ ID NO: 221489 - DNA, 276 bp, Klebsiella pneumoniae; identical to SEQ ID NO: 137730

SEQ ID NO: 221490 - DNA, 1086 bp, Klebsiella pneumoniae
atgatgaaaaaatacttagcgctcgcgctgattgcgccgttgctcgtttcgtgttccagctccaataaaaaaggcgccgaatacaacgaggcctgggtcaaggacacgaacggattcgatattttgatgggccagttcgcccacaacatcgagaacatttgggggtacaacgaagtcctgctcgccgggccaaaggactacgtcaagtacaccgaccagtatcaaacccgcagccacatcaacttcgatgaagggacgatcaccgtcgagaccattgccggcaccgaccctcgcggacgtctgcgccaggcgatcgtcaaaaccctgttgatgggcgatgaccccaactccattgacctctattccgatgtcgatgacatccagatctccaaagagccgttcctctatggccaggtggtggataacaccggggcgtcgattcgctgggagtggcgcgccgcgcgctttgccgactatctgctgcaaacccgtctgaagagccgcaacaacggcctgcgcgtggtctacagcatcaccattaacctggtgccgaaccacctcgacaaacgtgcgcataaatacctcggcatggtgcgtcaggcctcgcgtaagtatggggttgatgagtcgctgatcctcgcgattatgcagaccgaatcctcctttaacccctatgcggtcagccatgccgacgccatggggctgatgcaggtggtccagcacagcgccggcagagacgtcttccgctcccagggtaaatccggcctgccaagccgcagctatctgtttgacccggcgaataatatcgacaccggtaccgcctacctggcgatgctgaacaatgtttacctcgccggcatcgataaccccacctcgcgtcgctacgcggtgatcactgcctataacggcggcgccggcagcgtactgcgggtcttctccagcgataaagtgcaggcggccaatattatcaacagcatggcgccaggggacgtctaccagacgctgaccacccgccatccgtcggcggaatcgcgccgctatctgtacaaagttaatacggcgcagaaaagctaccgccgtaaatag

SEQ ID NO: 221491 - DNA, 1254 bp, Klebsiella pneumoniae
atgaatcttaagctgcagctcaaaatactgtcgttcctgcagttctgcctttgggggagctggctcaccacgcttggctcgtacatgtttgtcacgctgaagtttgacggcgcggcaatcggcgcagtgtatagctcgctcggtatcgccgcggtgttgatgccgacgctgctcggcatcgtcgccgataagtggatcagcgccaaatgggtatacgccatctgccacctggtcggcgcgttaacgctgtacctcgcggcgcaggtcaccacgccgggcgagatgttcctcgtgatcctgcttaactcgctggcctatatgccgacgcttggcttgatcaataccatctcctactaccgcctgcagtcggcggggctggatattgtcaccgatttcccgccaattcgtatctggggcaccatcggctttatcctcgccatgtggggcgtgagcttctccggctttgaactgagccatatgcagctgtacattggcgcgacgctgtcggtcctgctgactctgttcaccctgacgctgccgcatattccggtcgccaacgcccagcgcaatcaaagctggacggagatgctcggcctgaacgcttttgcgctgtttaaaaacaagcgtatggctatcttctttatcttctcgatgatgctcggcgccgagctgcaaatcactaacatgttcggtaacaccttcctgcacagtttcgataaagatccgctgtttgccggcagctttatcgtcgagcacgcgtcagtgctgatgtcgatttcgcagatttccgaaacgctgtttatcctgaccatcccattcttccttagccgctacggcattaagaacgtgatgcttatcagtattgtggcgtggatgctgcgcttcggcctgttcgcctttggcgacccgacgccgttcggcactgtactgctggtgctgtcgatgatcgtctacggctgcgccttcgacttctttaacatctccggttcggtgttcgttgagaaagaggtgcgcccggaaatccgcgccagcgctcaggggatgttcctgatgatgaccaacggcttcggctgtattctcggcgggatggtgagcggcaaagtcgtcgaacactttaccgtcgaggggatcactgactggcagagcgtgtggctgattttcgccggctattcgctggtgctggcctttgccttcgtggcgctgttcaaatacaaacacgtcagacaaccgaccgccgcccagcagagcgtgtga

SEQ ID NO: 221492 - DNA, 2139 bp, Klebsiella pneumoniae
atgaaatccatgcacattgccgccagctgcgagctggtcacccgcttgtccacccaccgtcgcgttgtggcgctggacagtaccgattttaccgatgtggcggcagtcgtcatctccgtggccgacagtcgcagcggcatccttactctcctcaggcgtagcggatttaacctgccggtctacctgctgagtgagacggcggtcgacaagccggagggggtgcaggcggtgatcgccggtaaagatcaggagtggctggagctggaggcggcggcctgtgattatgaagcgcgtctgctgccgccgtttttcaataccctgacccagtacgtcgagatggataacagcacctttgcctgtccggggcatcagcacggggcgtttttcaaaaagcaccctgcaggccgtcagttctatgacttttttggcgaaaatgtctttcgcgccgacatgtgcaacgccgatgtgaaattaggcgatctgctgatccacgaaggatcggccaagcacgcgcagaagttcgctgcgaaggtgttcaacgcggataaaacctacttcgtcctcaacggcacctcggcggccaacaaagtcgtgaccaacgcgctgttgacccgcggcgatctggtgctgttcgatcgcaacaaccacaagtcaaaccatcacggggcgctgatccaggcgggggcgacgcctgtttacctggaagccgcgcgcaatccgttcggctttatcggcggcattgacgagcgctgctttgatgagcattacctgcgggatctcatccgcgaagcggcgcctgagaaagccaatgcctcccgcccgtttcgtctggcggtgatccagctggggacctacgacggcacggtctataacgcccgccaggtggtggataagatcggccacctctgcgattacatcctgttcgactcggcgtgggtgggctatgagcagtttatcccaatgatggccgactgctcgccgctgctgctggagctgacccccgacgatccgggtatttttgtcacccagtccgtgcacaagcagcaggccggcttctcacagacgtcgcagatccataaaaaggataaccatctgcgcggccaggcgcgtttctgtccgcacaagcggctgaataacgcctttatgctgcatgcctccaccagcccgttctatccgctgtttgccgcgctggacgtcaacgccaaaattcatgaaggtgagagcggccgccgcctgtgggccgagtgtgtggcgctgggcattgaggcgcgcaaagcgatcatcgccaactgcaagatgatccagccctttattccgccagtggtggcggggcgtccatggcaggatcacccgaccgaggcgatcgcccgggagcgccgcttcttcagcttcgaacccgacgcgcgctggcatggttttgaaggctacgcggacgaccagtattttgtcgacccgtgcaaactgttgctgaccaccccgggcattgacgctgaaagtggggagtacagtgagtttggcatcccggcaaccattctggcgcattatctgcgtgaaaacggcatcgtgccggagaagtgcgatctcaactcgattctgttcctgctgacgccggcggagagcgccgaaaaaatggcgcagctggtggcgatgctggggcagtttgaacagcatattgaagcggatacgccgctggccgatgtgttgccgaccatctataacaaatatccggtgcgttatcgcgactataccctgcgcgagctgtgccaggagatgcacgatctgtacgttagctttgacgtgaagagcctgcaaaaagagatgttccgtaaacggagcttcccaagggtggtgatgaatccccaggatgccaaccacgagtttattcgcggcaacgttgagctggtgcgtctgagcgaggcggaaggccgcgtcgcggcggagggggcgctgccgtatccgccgggcgtgctgtgcgtggtgcccggcgaggtctggggcggcgccgtgctgcgctatttcctcgcgctggaggagggggtcaatatgctgcctggcttctcgccggagctgcagggggtttacagcgagacggatccggacggcattaagcggctgtatggctacgtgctgaagggataa

SEQ ID NO: 221493 - DNA, 714 bp, Klebsiella pneumoniae; identical to SEQ ID NO: 211850

SEQ ID NO: 221494 - DNA, 1377 bp, Klebsiella pneumoniae
atggttatgtcactgtttcattccgtgagcgacctgatcggtcatactcccctgctccagttgcacaaactggataccgggccctgcagtctgtttttaaaactggaaaatcagaaccccggcgggtcaattaaagatcgggttgcgctgtcgatgattaatgaagccgagcgccagggaaaactggcgcccgggggaacgattatcgaagccaccgccggcaataccggcctcggtctggcgctgattgcggcgcagaaaaattaccgcctgatcctggtggtgccggacaaaatgagccgcgagaaaatctttcaccttcgggcgctgggcgcgacggtgctgctcacccgctccgacgtcaataaaggccacccggcctactaccaggattatgcccgccgccttgccgatgaaacgccgggcgccttttatatcgaccagtttaataacgacgccaatccgctggcccatgccacctccactgcgccggagctttatcagcagctggagggcgacatcgacgccatcgtcgtcggcgtcggctccggcggcacgctgggtgggcttcaggcctggtttgctgagcactcgccgaaaacggaatttattctcgccgatccggcgggttcgatccttgccgatcaggtcgataccggacgctacggcgaaacgggatcctggctggtcgaagggatcggcgaagattttatcccgccgctggccaggctggagggggtacataccgcgtatcgcgtcagcgactgcgaagcattccacaccgcgcgccagctgctgcaggtcgaaggagtgctggccggctcttccaccggcaccctgctcagcgccgcgctgcgctactgccggacgcaaagccgtccgaagcgggtggtgaccttcgcctgcgacagcggcaataaatacctgtccaaaatgttcaacgacgactggatgcgccagcaaggactgatcgcccgccccgaacagggcgatctcagtgattttatcgccctgcgccatgacgaaggcgctaccgtcacggccgcgccggacgacaccctggccgcggtctttacccgcatgcggctgtatgacatctcccaactgccggtactggaggatggccgcgtggtcggcatcgtcgatgagtgggatttgatccgccacgtacagggcgatcgccaacgcttctccctgccggtcagcgaagcgatgagccgccatgttgaaactctcgataagcgtgcgccagagagtgaactgcaggccattctcgatcgcggtctggtggcggtgatcgctgacaacacgcgttttcttggcctggtcacccgcagcgatgtattgaccgcctggcgtaaccgagtcgcacaataa

SEQ ID NO: 221495 - DNA, 1149 bp, Klebsiella pneumoniae
atgtcatctatccacaccctgagtgtacatagcggaaccttcaccgacagccatggcgcagtgatgccgccgatttatgccacctccacttttgctcagccagcgccggggcagcataccggttatgaatattcccgcagcgggaatcccacccgtcacgcgctggagacggcgatcgccgacctggaaaacggcacgcgcggctacgcgttcgcctccgggctggccgccatctccaccgtgctggagctgctggataaggacagtcatctggtggcggtcgatgatgtgtatggcggcacttaccgcctgctggaaaacgttcgccgccgtagcgctggtctgcaggtgagctgggtgaaacccgacgacctggcgggaattgaagcggcgatccgccccgatacgcgcatgatctgggtggaaacgcccaccaacccgctgctgaagctcgcggatctcagcgccatcgccgccatcgcgcgccgccataacctgatcagcgtcgccgataacacctttgcttcgccggcgatccatcgcccgctggagcatgggtttgatattgtggtgcactccgcgaccaagtacctcaacggccattccgatgtcgtcgccggcctggcggtggttggcgataactccgggctcgcggaaaagcttggctatctgcagaatgcggtaggcggcgtgcttgacccgttcagcagcttcctgacgctgcgcggcatccgtaccctggcgctgcggatggagcgccacagcgcgaacgcgctgcagctcgccgaatggctggaacagcagccggaagtggagcgagtctggtttccctggctggcttcgcacccgcatcatcagctggcgcgccagcaaatggccctgcccggcggcatgatttcggtggtggtgaagggcgatgaaggttacgccgagcgcatcatcagcaagctgcgctggtttacgcttgcggagagcctgggcggcgtggagagtctggtgagccagcccttcagcatgacccatgcctcgatcccgctggagaaacgcctggcgaacggtatcacaccgcagctgatccgcctgtcggtggggatcgaagatcccaacgatctgattgccgactggcagcaggcgctgcgggcggagtga

SEQ ID NO: 221496 - DNA, 912 bp, Klebsiella pneumoniae
atggacaaattacgagggatggagacgtttattgccgtggtggagtgcggcagctttaccggggcggcgtcgcgcctggggctgtcggcggtgatggttgggaaatatatcgcccagttggaaagccagctggcgacgcgtctgctggagcgtaacacccgacgccagagcctcaccgacgccgggcgagtctattttgacgaagcgaaacgggtgatggagcaggtctccatcgccgaaagcgcggtcgagcggctgcggctggcgccggccggcaccctgcgggtgagcgctcccacctcgttcggcgccagcgtgatcgcgcccctgaccgccaccttcctgcaggcctggcctgcggtccgggtggaactggatctgactaaccggatggtcgatctggtggatgaggggttcgatctggcgatccgtatcggcgagatccatcaggaggatctggtggctcgctacctggcgccgtatcggatggtgatctgcgccgcgccggcttatctggcgcgttacgggacccccgggacgccagaggatctcgccgatcatctctgcctgtcccatacggtctggaccgcccgcaacgagtggcggctgccgggcgtagagggagaagtgcgctggaaacgcgatgcggttttgcgctgcaacgatggctacgcgctgcgccaggcggcgatcgccggggccgggctgctgatgcagccggaggtactgctggccgatgcgctggccagcggcagcctggttcgggtgctggaggcgtggactccgcagccgcggcctgtgcatctgctctggcgccaggatcgtcggcccctgccgaagctgacgcagtttatcgcccaccttcagcagggaatggccgacgcgctgacaacgacccgcgcgtcggaataa

SEQ ID NO: 221497 - DNA, 603 bp, Klebsiella pneumoniae
atgaaaattatcgttatcggtgccagcggcaccatcggtcgcgcggtcagcgaagaactgagtcagagacatgaggttatccgcgtcggccgcacccggggagattatcaggtggatatcacctcgcaggagagcgtcgaggcgctatttgcccaaacgggtgaagtagatgccatcgtctccaccaccggcaatctgcactttgggccgttaagcaccatgaccgacagccagttcaacctcggtctgcaggacaagctgctggggcaaattcgcctggcgctggtcggccagcattttctgcgcgacggcgggtcgattaccctggtcagcggtatcgtcgcgcaggaacccattgctcagggggtcaatgccacgacggtcaacgccggtctggaaggctttgtccgcgccgccgcctgcgaactaccgcgcgggatccgcatcaatctcatcagccccaccgtgctcagcgagtcgctggcggcctacggcgactttttcccgggcttccccagcgttcccgccgccgccgtggcgcaggcctatcgccgcagcattgaaggcgttcagaccggccgcatctacccggtcggctactag

SEQ ID NO: 221498 - DNA, 345 bp, Klebsiella pneumoniae
atgttgaaaaaattatccttaattatcccgctactggcgcttatcgcgctgctggtctggtggttcaccccgcattacaccgaggaagatgaagcttactaccgggcggtattttgcataatcgatcatgacgacagccgccagttcctccacgatatgcagaatatcgtcgaggggggaaattctgactacgcgctgcataaaacccattaccttccggcgctggggcagcggatgctggatacctggcgccagctcagcccgcaggaacagcaggcgctgcgtcaggacaagcagcgctgcggcgagatattgcgcgaaaaacaacaggggaaatcatcctga

SEQ ID NO: 221499 - DNA, 189 bp, Klebsiella pneumoniae; identical to SEQ ID NO: 137344

SEQ ID NO: 221500 - DNA, 1182 bp, Klebsiella pneumoniae
atgcacgatcggcgtctcgccgcccgcgcgggtgaactcaagccctccgccgtccgcgaacttctcaagcacagtaaactgcccggcgtgatttcgcttggcggcggcattccggccccggaactgtttgataccgaaggcctggagctggcggtgcagaaggtgatgagcgagcgttttaatgacgcattccagtacggtctgacggaaggctacccgccgctgcgccaggcggtgagtgaaatttgccactcccgtggcgtcgcctgttcagccgcccaggtctatatcacctccggctcccagcaatcgctggatatcgttgcccgtacgctgctcgatccgggcgatactatcgtcgttgagcgtcccacttatctggcggcgctgcaggtatttcagctggcgcaggccaatattctcagcgttgacaccgacgatgacgggatgctggtggagcagctggccgacctgctggagaccacccgcgtcaaagctgtttacctggtgccgacgttcggcaatcccggcggcaaaacgctgagcgaggcgcgtcgtcgccggttggttgagctggcgaaaaaatatgatttcgtcattctggaagacgatccctacggcgaaattagctttacagacgccgttagacgcccgctctatcagcatgctgtcgagctgggctgtgaagatcaggtggtttacacctcgactttttcgaaaatcctcgcgccagggatgcgtatcggctggatcgtcatgccggactggctggcgcagcagacggtgattgtgaagcaggcggcggatctgcataccaatatgctgtcgcaggtgatcactgcggaatacctcagtctgaaccggctggataaccagattgcgttgattcgcgaagactaccgcaagaagtgcgtggcgctggccgatgcgctggaaagccgccttggcgagcacctggaattcagccgcccgcagggggggatgttcctgtgggcgcgtttccgctatccgttcgataccatggaatggatgaagaaaacgctggaaaacggcgtggtgtacgtcccgggtgaagcgttctatcacgataagccggatacccgtaccctgcgtctttcttactccacggtgtcagaagccggattgctgacggccgttgagcggctggcggcctccctgtaa

SEQ ID NO: 221501 - DNA, 1866 bp, Klebsiella pneumoniae
atgagcaaaggatcgacaagcagtgacgccccgtttgggacattgttaggctatgcacccggtggcgtagcgatttattcatcgaattacagtagcttaaatccgcaggactacccggatgacgcgacgtttcgcagctacatcggtaatgagtatatggggcataaatggcagtgcgtggagtttgcgcgccgctttctgttcctgacctatggctttgtcttcaccgatgtggggatggcttatgaaatcttctccctgcgtttcctgcgcgaagtggtcaatgacaatattctgccgctgcaggccttcgccaacggctcccgccgtccgcctatcgctggttcgctgctgatctggcagaaggggggcgagtttaagcacaccggccatgtggcggtgatcacccagcttgtcggcaataaggtgcgtatcgccgagcagaacgtgattcactcgccgctgccgcagggccagcagtggacccgcgagctgaccctcgaggtcaacgacggccggtacaccatcaaagatacctttgccgataccgaaattttaggctggatgatccagaccgctgataccgaacacagcctgccgcagccggtgctgccgggcgaggcgatggccatcaaaggcgcgcggctgccaaacaacggccagtttcgcggtaaatggctgaacgagaaagacccgctgcagaaagcctatgtggcagccaacggtcatttcatcaaccaggatccctatcagtatttcaccatcagcgaaagtgccgaacaggagctgatcaaagccaccaacgagctgcacctgatgtatctgcacgccaccgataaggtgatgaaggatgacaacctgctggcgctgttcgatattccgaaaattctctggcctcgtctgcgcctctcgtggcagcgccgccgtcatcatatgatcaccgggcgcatggatttttgcatggacgagcgcgggctgaaggtgtacgagtacaatgccgattccgcttcctgccataccgaaggcgggctgatcctcgaacagtggctgaagcagggctactacggcaccggccacaatccggcggaaggtctgctcgatgagctggcgggggcgtggaaacacagccgggcgcggcccttcgtccacatcatgcaggacaaggatctggaagagaactaccacgcgcagtttattcagcgttcgctgacccaggccggttttgagagcaaaattctctttggccttgatgagctgcgctgggacgctgccggtcagctgatcgacgccgacgggcggctggtcaactgcgtctggaaaacctgggcatgggaaaccgccattgagcaggtgcgcgaagtcagcgccgaggagtacgcggcggtaccgattcgtaccggacatccgcagaatgaggtgcggctgattgacgtcctgctgcgtcctgaagtattggtattcgaacccctgtggacggtgatccccggcaacaaagccattctgccggtgctgtggtcgctgttcccgcatcatcgctatctgctggataccgattttgaggttaacgacgagctggcgaaaaccggctatgcggtgaagcctatttccgggcgctgcggcaacaatatcgacctgatcggccctcaggatgaacttctggataagaccagcggccagtttgtcgatcgcaagaatatctaccagcagctgtggtgcctgccgaaagtggacggtaagtacattcaggtgtgcacatttaccgtcggcggtaactacggcggtacctgcctgcgcggcgattcgtcgctggtggtgaaaaaagagagcgatatcgagccgttaatcgttttgaaagacaaagcatga

SEQ ID NO: 221502 - DNA, 561 bp, Klebsiella pneumoniae
atgagcacaccctcgcatctgaatgcccaaccgctggtctggggacacggcccgcggacgtttgaggtgttccttgagcccacctgcccctactctgtccgcgcgtttaataaactcgacgatctgctcgatgaggtcggcgccgataacgtgaccatcaagatacgcctgcagtcgcagccgtggcatctgttctccggggttatcgtccgctgtatcctcgccgcgtccaccctgccgcacggcagagagcaggcgcataaggtgatgcaggccgtggccgaccatcgggaagagtttgagtttaccgatcactgcagcgggccgaacatgaacgccacgccgcagcaaatcattgagcgcattgaacgctatagtcacgtgctgctgggggccgcctttgcccgcccggagctgcaggacgtgatcaagtggcacagtaaatacgcccgtcagaacggcatccatgtctcgccgacctttatggtcaacggcctggtgcagccggatctgggcagcggcgatgatgtcagcgtgtgggccgcgcggattatggcctga

SEQ ID NO: 221503 - DNA, 867 bp, Klebsiella pneumoniae
atgtcagagcaaaactaccagccaccaaaagtgtgggaatggaagcaaaacagcggcggcgcgttcgccaacatcaaccgtcccgtttccggcgcgactcatgaacgcgtcctgccggtgggaacccatccgctccagctatactcactcggcacgcccaacggccagaaggtgacgatcatgctggaggagctgctggcgctgggcgtcagcggcgcggagtacgatgcctggctgatacgcattggcgaaggggatcagttttccagcggctttgtcgagatcaacccgaactcgaagatcccggccctcagcgaccattccaccacgccgccgacccgggtatttgagtccggcaacattcttctctatctggcggaaaaatttggtttcttcctgccgaaagatcctgccggtcgcaccgaaaccctcaactggctgttctggctgcagggcgcggcgccgttcctcggcggcggcttcggccacttctataactatgcgccagtgaagatcgagtacgcgatcgaccgctttacgatggaagccaaacgccagctcgacgtgctggacaaacagctcgcccgcggtcgctatgtggccggcgaggagtacaccatcgccgatatggctgtctggccgtggtatggcaacgtagtgctgggcaatgtctataacgcggcggagttcctcgacgccgggagctataaaaacgtgctgcgctgggcgcaggatgtcggcaaccgcccggccgtcaagcgcggacgcatcgtcaaccgcaccaacggcccgctcaatgagcagctgcatgagcgccatgacgcccgcgactttgacacccaaacggaagataagcgccaggcgtaa

SEQ ID NO: 221504 - DNA, 288 bp, Klebsiella pneumoniae
atggaaaatcattttggcaaaggcttaatggcggggctacaggcatcctatgctgacaccgccgcgcatgcggcgaatttttgcgccgactataaacgcgggtttgtgctcggctactcgcaccgcatgtttgaaaaaaccggcgaccgccagctcagcgcctgggaagcggggatcctcacccgtcgctatggcctggacagggatatggtgatggatttcttcaaagaaggtgggtcgggtatggcgatgcgctattttctggcgggctatcggctggaaagctaa

SEQ ID NO: 221505 - DNA, 888 bp, Klebsiella pneumoniae
atgacgcgattaacggccaaagatttcccgcagcagttgctcgaatattatgactactatgcccacggcaaaatcagtaaacgcgagtttctccagctggcggggaaatatactgtcggcgggatgaccgcgctggcgctgtttaatctgctgaagcccgactatgccctggcagagcaggtaccgttcaccgacccggatatccgcccggagtatattcattatccctctcctgacggtcacggcgaagtgcgggcttacctggtgacgccgacaaaaatagccgacaaagcgcccgctgtggtggtggtgcatgagaaccgcggcctgaacccctatattgaagatgtagcccggcgggtagcgaaagcggggtacatcgcgctggcgccggatggcctgagcgccgtcggcggctatccggggaatgatgatgaaggccgcgccctacagcagaaagtcgatcccgtgaagctgatgaatgatttttttgcggcggtcgcgtttatggcgaactatccacaggcgacggggaaggtcggtatcaccggtttttgctacggcggcggcgtcagcaacgcggcggcggtggcgatcccggagctggcctgcgcggtgccgttttacggtcgccagccgccgctgaaggaggttgataaaattaaagcgccgctgctgctgcactatgccggcctcgatagcggcattaatgaaggctggcctgcctatgaacaggcgttgaaggaacaccataaagtctacgaggcctatttctatcagggcgtgaatcacggctttcataatgattccacgccgcgctacgatcgggctgcggctgatctggcctggcaacgcacgctggcatggtttgagaagtatttacgctag

SEQ ID NO: 221506 - DNA, 495 bp, Klebsiella pneumoniae; identical to SEQ ID NO: 137337

SEQ ID NO: 221507 - DNA, 1524 bp, Klebsiella pneumoniae
atgaccccttctgaataccagaatcctatcttatgcgccgattattccgacccggatatcgtgcgcgtaggcgatgatttctttatggtctcttccagttttaaccatgtgcccgctttaccgatcctgcattcaacggacctggttaattggactatcatcaaccacgttatggatgaactgccgctacctggttatgaccggtatcagccgggtaagggcgtatgggcgccgtcgattcgctggcacgatggcaagctgtgggtctgcttcagcacgccagatgaaggtatttttatctgccataccgaggatccgtgggggaaatggagcgctccgcactgcctgcgcgaggccagaggttggatagatccctgcccgttctgggacgacaatggtcaggcctggttggtacatgccttcgcccatagccgcagcggcatcaagcataaactgcagttgtttgcgatggcgccggacgccagcgaattgctgggcgaagggcagattatctatgacggctgctgcgatttacctacccttgaggggccaaaggtttatcaacgcgccggttggtactacatctttgctcctgcgggcggggttgaaaatggctggcagacggtactgcgcgcgcgccagatgacggggccctgggaagccaaaaacgtgcttttccagggaaacacctcgataaatggaccacatcagggcggctgggtggagggtgaggagggcgaatgctggtttgttcatttccaggacttacacctctatggccgcgtggttcacctccagccgatgtcctggggtaacgatggctggccgcgtatcggtgagcagattggcaacggcggcgtcggacagccggttttacgttggccgcgtcctaaagggttaacgccttcaccggcattggcgccgcaaaccagcgactattttgcgcaaggccaaccgggaatacagtggcagtggcaggctaaccccagccctgagtggctgctgccggcggaaggcgaacttcgattacgctgcgtcccattatccgaagtcgatggacagagagcgttatactgggcgccgcagctgttgctgcagaaattcccggcgctaacttttagcgcgaaaacaagcgtaacgttatatgccgctcaggacggtgatgccggaggcctgatcgtatacggcgaacgctacgccgctttgctggtggagtttgggcaagggagttaccggctcgtgtggcgacacggttggatgagcgatgcgggcgtggtgcgcgaaactcgtcaggttcttgctgagcttaagtgcggcaagtgtcagctgcaggtggccgtaggcgaaggcggcctgtgtcaattttcctggcgagccgaggaggagtggcggaaggttcctctttgttttgctgccgggaagggaaaatgggtcggcgcgaaatttggcctgctggctgcttcaatggttggcctacaaagcgagggctactccgctttgcaggactttgaggtcatactttaa

SEQ ID NO: 221508 - DNA, 1419 bp, Klebsiella pneumoniae
gtgaatcacgataataaactgtcatttgcggagaagctgggatatggcatgggggatgcagcctgcggtatcgtttactcttcggtaaccatgtttctgacatggttttatacggatatttacgggctttctgctgccgcagtcggagtgatgttcctggtgacgcgggttctggatgcgattaccgatccgctaaccggcattgttgcagaccgtgtaaagacccgctggggccattttcgcccgtggcttatctggtttgccgtaccttatgccgtgctggcggtaatgaccttcacgactccggaatttggcgcatcgggtaaactggtttatgcctacctgacctacaccttactcatgctgtgttacacctttatcaatattccctactgcgcattgggcggagtcattacgcgtgatgagaaggatcgcctttcagcccagtcatatcgttttacgatctcatctctggccggtctgatggtttctgtcgcaaccctgttcctggtggattttttcggtaaagaaaataagcagtttggttttcaggcgacaatgggaatcatgggcgcgatcgctattgtaatgctggctttttgcttcttctctaccaaagaacgcgtggctccagctgttgaacagcaggggagcatacgcgaagacctccgtcagctgctggcgaatgaccagtggcgtattgtggcgataattacttttttctccagtatggccggggttatgcgcagcgccgccacgctctattatgcaacctacctgatgttaggcggtgtggagtcagcggcgggaacggccatgaaatcagcatttgtttccaccagcgtcgttggcacgattatcggcagcatcgccgccggatggctggccaagcgctatcgcgcggtatcgctgtttaaaaatatcaacctcctgctggtcctggttggcgtcgtaatgttctttgtgccgccgacctggctgccggtggtgttccctttatacttcctggtcggcttcttccatcagatgtaccagccgtttaaatggaacatgatggccaacgctgccgattatggcgaatggaagtttggccgtcgcatcacgggattatcctattccggtaatctgtttgctttgaaaatgggcatggcggttgctggcgccgccgtaggtttttcgcttgggctatttggctatcaggcgggcgtaacggcgcagactccgctggcgacaatgggaattgtggggctgttaaccctcggtccatcactatcttacctgctcctgtggtggctggcgcgtttctataagctggatgacaaaatgatgcagacaattcagcgcgagctgtccatgcgtcagcagcaggggcattcagagacgcatttgccgctaaacgccgttccggaaaaggcctga

SEQ ID NO: 221509 - DNA, 426 bp, Klebsiella pneumoniae
atggcgatgcgtcttaatgaaaatctggacgataacggcgaaatgcatgagatcaacgtgacgccgtttatcgacgtcatgctggttctgctgattatctttatggtggccgcgccgctggcgacggtcgacgtgaaggtcaatctgccggcctcctccagccagccgcaaccgcgaccggaaaaacccatctacctgtcggtgaaggcggataagagcatgttcctcggcaacgacccggttaccgaagcgaatatgattaacgccctggatagcctgaccgccggcaaaaaagataccaccgtcttcttccgcgcggataaaaccgtcgattacgagacgatgatgaaagtgatggataccctgcatcaggcgggctatctcaagatcgggctggtgggcgaagagaccgtcaaagcgaagtaa

SEQ ID NO: 221510 - DNA, 732 bp, Klebsiella pneumoniae
gtgggtaataatttgatgcaggcggatctctccgtttggggtatgtatcatcatgccgatattgtcgttaaggtggtgatgattggcctgattctggcgtcggtcgtcacatgggccatcttcttcggtaaaggggcggaaatcctcgccagcaagcgtcgcctcaaacgtgaacagcagcagctggcggaagcccgctctctcgatcaggccagcgatatcgccagcgcctttgaggcgaaaagcctcaccacccagcttatcaatgaagcgcagaacgaactcgaactctctgccggtgccgaagacaatgaaggcatcaaggaacgaaccggttttcgccttgagcgccgcgttgcggcggttggtcgccatatggggcgcggtaacggctatctggcgaccatcggcgccatttccccgtttgtgggcctgtttggtaccgtctggggcatcatgaacagctttatcggcatcgcccagacccagaccaccaatcttgcggtggtagcgccgggcatcgcagaagcgctgctggcgacggccatcggcctgttcgccgccatcccggcggtggtcatctataacatcttcgcccgcatgatcggcagctacaaggcctcgctcggcgacgtcgccgctcaggtactcctgctgcaaagccgcgatctggacctcagcgccagcggcgtgaagccggtgcgcagcgcgcagaaattacgggtaggttga

SEQ ID NO: 221511 - DNA, 1188 bp, Klebsiella pneumoniae
atggctgataaacatcttgataccgcgctggtcaacgccgggcggagcaaaaagtacacccagggctcagtgaacagcgttatccagcgcgcgtcatcgctggttttcgacaccgtcgaggccaaaaagcacgccacccgcaatcgggccaacggcgagctgttctacggtcgtcgcggcaccctgacccatttctcgctgcaggaagcgatgtgcgagctggaaggcggcgccggctgcgccctcttcccctgcggcgccgcggcggtggctaacactatcctggcgtttgtcgagcaaggcgaccatgtgctgatgaccaataccgcctatgagccaagccaggacttttgtaccaaaattctcgccaaactcggcgtcaccaccagctggttcgatcccttaatcggcgccgatatcacccgtctggttcgccctgagacccgcgtggtgttcctcgaatcgcccggctcgatcaccatggaagtgcacgatgtgccggcgatagtcgccgccgtgcgtcaggtcgccccggaagcgattatcatgatcgataacacctgggcggcggggatcctgtttaaagccctggattttggcattgatatttccattcaggcaggcaccaaatacctgatcggccattccgacgccatggtgggcaccgcggtggcgaatgcgcgctgctggccgcagctgcgtgaaaatgcctacctgatggggcaaatgctggacgccgatactgcctatatgaccagccgcggcctgcgcaccctgggcgtgcgcctgcgtcagcatcatgaaagcagcctgcgcatcgccgagtggctggcgcagcacccgcaggtggcgcgggtaaaccaccccgccctgcccggcagtaaaggtcatgagttctggaaacgtgatttcaccggcagcagcgggctattctcgtttgtgctcagcaagcgcctcaatgatgccgaactggcggagtacctcgacaatttcagcctgttcagtatggcctattcgtggggcggctttgagtcgctgattctcgccaaccagccggagcaaatcgcccacattcgaccggatgctgaagtcgacttcagcggcacgctgatccgcctgcacattggtctcgaaaatgttgacgatctgcaggcggatttagcagcgggcttcgcgcgtatcgtgtaa

SEQ ID NO: 221512 - DNA, 660 bp, Klebsiella pneumoniae
atggttgtcattcaagagattgtcgccgcgctgtggcaacatgattttgccgcattggcgaaccctcacgttgtgggcgttgtatatctggttatgttcgcgaccctgtttctggaaaacgggctgttgcccgcctcctttttaccgggagacagcctgctgctgctcgccggcgcgctgattgctaaaggcgtcatggactttgtgcccactatcgccattctgaccgccgccgccagcctcggctgctggctgagctatgtgcaagggcgctggctgggcaatacgcaaacggtgaaaggctggctggcgcatctgccgcataagtaccatcagcgcgccacctgcatgtttgaccgccacggcctgctggcgctgctcgcgggccgttttctggcgtttgtccgcaccctgctgccaaccatggccgggatttctggcctgccgaaccgccgcttccagttcttcaactggctgagcgccctgctgtgggtctgtgtggtgacgggtcttggctatgcgctgagcatgatcccgtttgtgaagcgccatgaagatcaggtgatgacctgtctgatgatcctgccgattgccctgctgctggctggcctgctcggcacgctgttcgtggtcattaaaaagaaatattgcagcgcctga

SEQ ID NO: 221513 - DNA, 900 bp, Klebsiella pneumoniae; identical to SEQ ID NO: 210036

SEQ ID NO: 221514 - DNA, 1164 bp, Klebsiella pneumoniae
atgaataatttcgacctgcataccccaacccgcattctgtttggcaaaggcgcgattgaaaagctgcgtgaacagatcccggcggaagcccgcgtactgatcacctacggcggcggcagcgtcaaaaaaacaggcgtcctggatcaggtcctcaccgctctggatggcctggatgtccttgaatttggcggcatcgagccgaacccgtcttacgaaaccctgatgaatgcggtgaaactcgcccgggaagagaaagtgaccttcctgctggcggtcggcggcggttcggtgctggatggcaccaagtttatcgctgcagcagcccactacgacgcggatatcgatccgtgggaaattctggaaacctatggcagcaaaattgccagcgccattccaatgggctcggtactgactctgccggcgaccggttctgaatccaacaaaggcgcggtcatatcgcggaaaaccaccggcgacaaacgcgcgtttatgtcttcgcacgtccagccgcagttcgcgatcctcgatccggtttatacctataccctgccgccgcgccaggtcgcgaacggcgtggttgacgccttcgtccataccgtcgagcagtacgtgacctacccggtagacggaaaaatccaggaccgtttcgccgaaggcattctcctgaccctgatcgaggatggcccgaaagccctgcaggaaccggagaactataacgtgcgcgccaatattatgtgggcggcgacgcaggcgctgaacggcctgatcggcgcaggcgtgccacaggactgggcgacgcatatgctcggccacgagctgacggcgatgcacggcctggatcacgcccagacgctggctatcgtgctgccggcgctgtggaatgagaaacgcgatgccaagcgcgagaagctgctgcagtatgccgagcgcgtgtggaatattaccgaaggctctgacgaccaacgtatcgatgccgccatcgccgcaacgcgtcagttcttcgagcagatgggcgtgccgacccgcctttccgattacggtctcgacggtagctccatcccggcgctgctggcgaaactggaagagcacggcatgactaaacttggcgaacatcaggatatcaccctggacgtcagccgccgtatttacgaggctgcacgctaa

SEQ ID NO: 221515 - DNA, 828 bp, Klebsiella pneumoniae
atgacacatccaaccgttataaaactgcacgacggcaacctgatgccgcagctgggtctcggcgtgtggaaagctggcaacgaggaagtcgtctccgccattcataaggcgctggaagtcggttatcgctcttttgacaccgccgccgcgtaccaaaatgagaccggcgtcggcaatgcgctgcacagcgctggcgtcaaccgcgatgagctcttcatcaccaccaagctgtggaacgacgatcaaaaacggccgcacgaggcgctgaaagagagcctcagcaaactgaagctggactatgtggatctctatttaatccactggccggtaccggctatcggccattacgtcgaggcctggcaggcgttgatcgagctgcagcagcaggggctgaccaaaagcattggcgtgtgtaatttccaggtaccgcatctgcagaagctgattgatgaaaccggcgtcgccccggtgatcaatcagatagaactccatccacttatgcagcagcgtcagctgcacgcgtggaacgccacccacaagatccagaccgaatcctggagcccgctggcccagggcggcgaaggcgtcttcgatcaaaaagtcatccaccagctcgccgataagtacggcaaaacgccggcgcaaatcgtcatccgctggcatcttgatagcggtctggtggtgatcccgaaatccgtcacgccgtcgcgtatcgcggaaaactttgacgtctgggacttccgtctcgacaaagatgagctgggagcgatcgcgaagctggaccagggtaaacgtctcggtcctgacccggatcagttcggcggataa

SEQ ID NO: 221516 - DNA, 528 bp, Klebsiella pneumoniae; identical to SEQ ID NO: 210033

SEQ ID NO: 221517 - DNA, 2184 bp, Klebsiella pneumoniae
atgagcgcaatatccctgatccaaccggatcgtgaccttttttcctggccgcaatactgggctgcctgttttggccctgcgccctttttaccgatgtcgcgtgaagagatggatcaacttggctgggatagctgcgacattattctggtcaccggcgacgcctatgtcgaccacccgagcttcgggatggctatctgcggccgcatgctggaagcgcagggtttccgggtagggatcatctcccagccggactggaacagcaaagaggactttatgcgtctgggcaaaccgaacctgttcttcggcgtgaccgccggcaacatggactcaatgatcaaccgttacaccgccgaccgtaaactacgtcatgacgatgcctatacggcgggtaacgtggcgggcaaacgtccggaccgcgctaccctcgtctacacccagcgctgtaaagaggcgtggaaagatgtgccggtgatcctcggcggcatcgaagccagcctgcgtcgtaccgctcactatgattactggtccgacaccgtgcgccgctcggtgctggtggactccaaggccgatatgctgatgttcggcaacggcgagcgtccgctggtggaagtggctcatcgcctggcgatgggcgaaaccatcgaccagatccgcgatgtgcgcaataccgccatcatggtgaaagaggcgctgccgggctggagcggcgtggattccacccgtctggatacgcccggtaaaattgaccccatcccgcatccgtacggtgaagatctgccgtgcgccgataacaaaccggtcgcgccgaaaaaacaggaagcgaaaagcattactgtgcagccgccgcggcccaaaccgtgggaaaaaacctatgtgctgctgccctccttcgagaaggtgaaaggcgataaggtcctgtacgctcacgcctcgcgcattttgcaccacgaaaccaaccccggctgcgcccgggcgctgatgcaaaagcacggcgagcgctacatctggatcaacccgccggcaatcccgctctccaccgaagagatggacagcgtcttcgcgctgccgtacaagcgggtgccgcatccttcctatggcgatgcgcgtattccggcgtatgagatgatccgcttctcaatcaacatcatgcgcggctgcttcggcggctgttcgttctgctcgatcaccgagcacgaaggacgcataatccagagtcgttctgaggattcgatcattaatgagatcgaagccattcgcgacaccgtgcccggctttaccggggtgatctccgatctcggcgggccaacggccaacatgtatatgctgcgctgtaaatcgccgcgcgctgagcagacctgccgccgtctctcctgcgtctatccggatatttgcccgcacatggataccaaccatgaaccgacgatcaatctttatcgccgcgctcgcgagctgaagggcatcaagaagatccttatcgcctccggggtacgctatgacatcgcggtcgaagatccgcgctatatcaaagagctggcgacccaccacgtcggcggctatctgaagatcgccccggagcataccgaagagggaccgctgtcgaagatgatgaagccgggaatgggcagctacgaccgctttaaagagctgttcgacacctattcgaagcaggcgggtaaagagcagtatctgatcccgtactttatctccgctcatccgggcacccgtgatgaagatatggtgaacctggcgctgtggctgaagaagcatcgcttccgtctcgaccaggtgcagaacttctatccgtcgccgctggcgaactcgaccaccatgtattacaccggcaagaacccgctgggtaaaattggttataagagcgaagaggtggtggtgccgaagggcgataaacagcgccgtctgcacaaagcgctgctccgctaccacgatccggcaaactggccgctgatccgtcaggcgctggaggcgatgggcaagaagcacctgattggctcccgccgcgactgcctggtgccagcgccaaccctggacgaaatgcgtgaagcgcgtcgccagaaccgccatactcgtccggcgctgaccaagcacacgccgatcgcccatcagcgccagacgcctgccgctgcgggcgcgaaaaaacgcgttaagccgaaggccgtatcacgctaa

SEQ ID NO: 221518 - DNA, 1413 bp, Klebsiella pneumoniae
atgtcactcagtcggcgtcagtttattaaggcttccggcgtagcgctgtgcgctggcgccgcgccgctgaaggcccatgccgccggccagcagcctgcgctgccggttccgccgctgctggaatctcgtcgcggccagccgctgtttctgacgctgcagcgttcccactggtcgtttacccccggcacccgcgcccccgtctgggggatcaatggccgctatatggggccgacgatccgcgtctggaacggagacgacgtcaagcttatctacagcaaccgcctgacggagaacgtggcgatgaccatccgcggtctgcaggtgcctggcccgctgattggcggcgcggcgcgcatgatgtcgccgaacgccgactgggcgccggtgctgcctatccgccagagcgcggcgacgctgtggtatcaggccaacacgccgaaccggatggcgaaacaggtttacaacggtctggcgggcatgtggctggtggaagacgaggtcagcaagaacctgccgatccctaaccactatggcgtcgatgacttcccggtgattattcaggataaacggctggataacttcggcacgccggaatatagcgaaccgggcagcggcggctttgtgggcgacacgctgctggttaacggcgtgcagagcccgtatgttgaagtgtcgcgcggctgggtgcgcctgcgcctgctgaacgcttccaactcccggcgctatcagctgcagatgagcgatggccgactgctgcatgtgatttccggcgatcagggattcctgccggcgccggtttcgctcaagcagctatcgctggccccgggggagcggcgtgaaattctggtcgatatgactaacggcgatgaagtatccattacctgcggcgaagcggcgagcatcgtcgaccgtatccgcggtttttttgaaccgtcaagcatcctggtctccacgctggtgctgacgctgcgtccgaccgggctgctgccgctggtgaccgacagtctgccggtgcgcctgctgccgaccgagctgctctccggtacgccgatccgcagccgggatatcacccttggcgacgatccgggcatcaacggccagctgtgggatccgcagcgtatcgatatcacggcgcagcaggggacctgggagcgctggacggtgcgcgccgaccgcccgcagtcgttccatattgaaggggtgatgttccagatccgtaatgtcaacggctcgtctcctttcccggaagatcgcggctggaaggacaccgtgtgggtcgacgggcaggttgagctgctggtctattacgctcaaccgtcgtggccgcacttcccgttccagtatctgagtcagacgctggagcttgccgatcgcggctcgatcggccagatgttggtgaatcccgcgccgtaa

SEQ ID NO: 221519 - DNA, 738 bp, Klebsiella pneumoniae
atgctattcatttttcgagtaattttcgtggtcatttattgcatcgtagtgtgcgtacttggctgtctgtactgcttgttcagcccacgtaatccaaaacacgttgccactttcggccatctgtttggccgtttatctccggtatttggcctcaaggtagagctacgcaaacccgccgacgcggaaagctatggcaacgcgatctacatcgctaaccaccagaacaactatgatatggtgacggcgtcgaatatcgtgcaggctccgacggtcactgtaggtaaaaagagcctgctgtggatcccgttctttggccaactgtactggctgacgggcaatttgctgattgaccgtaataaccgaaccaaagcgcacggcactattgccgaagtcgtcaacgcttttaaaaagcgtaaaatttcgttctggatgttcccggaagggacccgtagccgcggccgcggcctgctgccgtttaaaaccggggcttttcacgcggctattgccgctggggtgccgattattccggtgtgtgtctcgaatacatcgaataaaataaagctcaatcgctggaacaacggtctggtgattgtggaaatgctgccgccggtagataccactcagtttggtaaagacaacgtgcgcgcgctggcgacgcattgccgcgagctgatggccgccaaaatcgctgatctggacaacgaagtggccgagcgcgaagcggctggaaagcaataa

SEQ ID NO: 221520 - DNA, 2259 bp, Klebsiella pneumoniae
atgagcgatatggcagagcgccttgcgctgcatgaatttacggaaaatgcttacctgaactactccatgtacgtgatcatggacagggcattaccgtttattggcgatggcttaaaaccggtccagcgtcgcatcgtctatgcgatgtccgagctggggctgaacgccagcgcgaaattcaaaaagtccgcccgcaccgtcggcgacgtgttgggtaaatatcacccgcacggcgacatcgcctgctatgaagcgatggtgctgatggcgcagccgttctcttaccgctatccgctggtggatggtcagggaaactggggggcgccggacgatcccaaatctttcgccgccatgcgttacaccgaatcccgcctgtcgaagtatgccgagctgctgctcagcgagctggggcaggggacggtcgactgggtgccaaactttgacggcacgctgcaggagccgaaaatgctgccagcgcgtctgccgaacatcctgctgaacggcaccaccggcatcgcggtaggcatggcgaccgatattcctccgcacaacctgcgggaagtggccaaagcggcgattacgctgattgagcagccgaaaaccaccctcgacgaactgctagatatcgtacaggggccggatttcccgaccgaggcggagatcatcacctcgcgggcggaaattcgcaaaatctaccagaacgggcgcggctcagtgcgcatgcgcgcggtgtggagtaaagaggacggcgcggtggtgatcagcgcgctgccgcatcaggtctccggcgccaaagtgctggagcagattgcggcgcagatgcgcaataaaaagctgccgatggttgacgatctgcgcgacgaatcggaccacgaaaacccgacccgtctggtgattgtcccgcgctccagccgggtggatatggaacaggtgatgaaccacctgttcgccaccaccgatctggagaagagctaccgcatcaacctcaatatgatcggccttgacggccgcccggcggtgaaaaacctgctggagatcctcagcgagtggctggtgttccgtcgcgataccgtgcgtcgccgtctaaaccatcggttagagaaagtgctgaagcgcctgcatatcctcgaaggtttgctggtggcgtttcttaatatcgatgaagtgattgagatcatccgcactgaagatgaaccgaagccggccctgatgtcgcgctttggcatcagcgaaacccaggcggaagcgattctggaattaaaactgcgccacctcgccaaactggaagagatgaagatccgcggcgagcagagcgagctggaaaaagagcgcgaccagctgcaggcgattctggcgtctgaacgtaagatgaacaacctgctgaaaaaagagctgcaggccgatgccgatgccttcggcgacgaccgtcgctcgccgcttcacgagcgtgaagaagcgaaagcgatgagcgaacatgacatgctgccgtctgagccggtgactatcgttctgtcgcagatgggctgggtgcgcagcgccaaaggacacgacattgacgcccagggcttgagctataaggcgggcgacagctggaaagcctcggcgaagggcaagagcaaccagccggtggtgtttatcgataccaccggacgcagctatgccatcgatccgattactctgccttccgcgcgtggccagggtgaaccgcttaccggcaaactgaccctgccgccgggcgcgaccgtggagcatatgctaatggaaagcgacgatcagaaactgctgatggcttccgacgcgggctacggtttcgtctgtaccttcaacgatctggtggcgcgcaaccgtgccgggaaagcgctaatcaccctgcctgacaacgcgcacgtgatgccgccgctggtgattgaggatgagtccgatatgctgctggccatcaccgccgccgggcggatgctgatgttcccggtcagcgatctgccgcagctgtcgaaaggcaagggcaacaaaattatcagcattccggcggcggaagccgcagccggccaggacggtctggcacatctgtttgttctgccgccgcagagtacgctgaccattcacgtcggcaaacggaagatcaaactgcgtccggaagagctgcaaaaagtcaccggcgagcgcggccgccgcggttcgctgatgcgcgggctgcagaaaattgaccgcgtggaaattgactcgccgcgtcgtgccgcggcaggcgatagcgaagagtaa

SEQ ID NO: 221521 - DNA, 870 bp, Klebsiella pneumoniae
atgaacgatattaaggccagcccggcgtatgtcgggcgcttccagcgcgtctgtaggtacattgcgcgccatcttgatgagccgctgtcgctggagacgctgagcgcgatagcgcacagttcgccttaccattttcaccggcaatttagcgcttataccggcattccattgtaccggtatattcagtggttgcgtctgcgacgcgcctgttggcgcctggcgttcaacccccgcgataaagtcatcgatattgcccttgatgccggatttcagaatgcggagtcgttcagtcgtgccttccgtaccgcgtttgaccaaagcccgacccaattccgtcaacaaccggactgggccgagtggcatcgacgcgtaccgaaacatacgctacaggagcaaacgtcgatggacgtcaacattatttcgtgcccctccacccggatagccgtactgcaacatcgcggtagcccggaccttgtcaacgccaccgccgcgcgttttatcgcctggcgtaagacgagcggattatcgcccgtcgccaccagcgatacctgggggatcgcctgggacgatccgcagaccaccccgcaggaggcatttcgttttgatatctgcggtacggtcgatcggccggttggtgaaaacgcctttggcgtgattaacggcgaaatccccggcggacgctgcgccgtcgtgcgccatcacggctcgctggacacgctggcgaacagcgtttggtttctctatcgcgactggttacccgcttcaggcgagacgttacgggattttccggtgtacttccgttacctcaattttgtccatgaggtggctgagcatgaactgcaaaccgatatttatctgccgctggcctga

SEQ ID NO: 221522 - DNA, 396 bp, Klebsiella pneumoniae
atgaaaaaaattgctgcgatgaccgcgattattgctttggtttccatgccggtactggccgccgggcagggaggattcaccggaccgtctactaccactaccacccaggctggcggcttcaccgggccgagcggcgcggtgaccaccgtggcgaacgccaagtcgctgcgtgatgacacctgggtgaccctgcgcggtaaaatcgtcgagcgcatctctgatgacctgtataaattccaggatgcttccggggtgatcaatgtcgatatcgaccacaagcgctggaacggcgtgaccgtcggcccgcaggacacagtagaaattcagggggaagtcgataaggactggaactcggtagaaatcgacgttaaacagatccgtaaaatcgcgccataa

SEQ ID NO: 221523 - DNA, 660 bp, Klebsiella pneumoniae; identical to SEQ ID NO: 210026

SEQ ID NO: 221524 - DNA, 1344 bp, Klebsiella pneumoniae
atgaaacgacttgcccgcctgagcctgcgcctgacgctgctgtttgccgtactgaccaccgccgcctgggggatggccagcgttatcgcctggcagcagaccagcaaaaagctggataagctgttcgatacccagcagctgctgttcgctcgccgcctgagcgtcatgcatttcgatgaactgcgcgccccgtccgccttgctcggggaaaagaaaaaggtacgccacgggcacatcgacgacgacgcgctggcgttcgccatcttcacccgcgacggcaaaatggtgcttaatgacggcgagaacggagaggatattcagtggaattcgcagcgcgagggattcagcgatggctatctgcgtgacgacgatgacgagtggcgcttcctgtggttaaccaccgccgacggccgctaccgcatcgccgtcggccaggagtgggattaccggcgcgaaatggcgatggatatcgtgacctcgcagctcaccccgtggatggttgccctgccgctgatgttcgtgctgctcatcgtgctgttaagccgcgagctggcgccattgaaaaatctggcgcgcacgctgcgcctgcgcgcgccggactcggcggattcgctcagcgtggagaagatccccgccgaagttcgcccgctggtcgaagcgctgaatcagctgttccgacgcactcacgacgccatgctgcgcgagcgtcggtttacctctgatgccgcccatgagttacgcagcccgctggcggcgctgaaggtgcagaccgaagtcgcccaactctccctggacgatcccgaagggcgtgagaaagcgttggatcagctccaccaggggatcgatcgcgccacccgactggtggatcagctgctgacgctgtcgcggctggactcgctcgcccaactggatgatgtgcagcaggtcgctatcgccgatctgctgcagtcggcagtgatggagatgtatcacccggcgcagcagtccgggattgagctgcgcctgcatcttaatgccagccatatcgtccgcaccggccagccgctgctgctcagtctgctggtgcgcaatctgctggataacgccgtacgctatagccctcgcggcagccaggtcgatatcacgctcaacgcccgcgagttccgggtgcgcgataacggcccaggcattagcccgcaggcgctctcgcgcattggcgagcgtttttatcgtccgccggggcaggaggcgccgggcagcggcctgggcttgtcgatcgtccggcgcatcgcctcgctgcacggcatgcaggttgattttgccaacgcgcgcgacggcggcttcgaggcccgcgtgtactggtag

SEQ ID NO: 221525 - DNA, 582 bp, Klebsiella pneumoniae
atgagcaacatcctgattatcaatggggcgaaaaagttcgcgcactctaatggtcaactgaacgacaccctgaccgaggtcgcggagagttatctgcgcgacgccgggcacgatgttaaaagcgttcgcgccgaaagcgagtacgacgtaaaagaagaagtacagaatttcctgtgggccgatgtggtgatctggcagatgccgggctggtggatgggcgctccgtggacggtgaaaaaatatatggatgacgtctttaccgaaggccacggctcgctgtacgccagcgatggccgtacccgctccgacgccagcaaaaaatatggctcaggcggcctggtgcaggggaaaaaatatatgctttctctgacctggaacgcgccgatggaagccttcaccgacaaagaccagttcttccacggcgtcggcgttgacggcgtttacctgccgttccataaagccaatcagttcctcggcatggaggcattgccgacctttatcgccaacgacgtgattaaaatgcctgatgtcccacggtatatcgcagaatatcgcaagcatctggcggaaatttttggttaa

SEQ ID NO: 221526 - DNA, 315 bp, Klebsiella pneumoniae; identical to SEQ ID NO: 136632

SEQ ID NO: 221527 - DNA, 1896 bp, Klebsiella pneumoniae
atgacgcaatcttcatataatgctgatgccattgaggtactcaccgggctagagccggtgcgccgccgtccgggcatgtataccgacaccactcgtcctaaccatcttggtcaggaagttattgataacagtgtggatgaagcgctggcaggccacgccaaacgcgtggaagttatccttcatgccgaccagtccctggaggtcattgacgatggtcgtgggatgccggtcgacatccacccggaagagggcgtgccggcggttgagctgatcctctgccggctgcatgcgggcggtaagttttccaataaaaactatcagttttccggcggcctgcacggggtggggatctcggtggtcaacgccctgtcaaaacgcgtggaggtcaacgtgcgtcgcgacggtcaggtctacagcatcgcctttgaaaatggtgaaaaagtggaagacctgcacgtcaccggcacctgcggcaaacgcaataccgggaccagcgtccatttctggccggacgaaagcttcttcgacagcccgcgcttttccgtttcacgtctgacccacctgttaaaagcgaaagcggtgctgtgcccgggcgtggaaattgttttccgcgaccaggtgaacaacagcgagcagagctggtgctatgccgatggcctgaacgattacctgagcgaagcggtgaacggcctgccgctgctgccggaaaaaccattcgtcggcgccttctccggcgagacggaggcggtggactgggcgctgctgtggctgccggaaggcggcgaactgctgaccgaaagctacgtgaacctgatcccgactatgcagggcgggacgcacgttaacggtctgcgtcaggggctgctcgacgcgatgcgtgagttctgcgagtaccgtaatatcctgccgcgcggcgtgaagctgtcagcggaagatatctgggatcgctgcgcgtacgtgctgtcggtgaagatgcaggatccgcagttcgccgggcaaaccaaagagcgtctgtcgtcgcgccagtgcgcggcgttcgtctccggcgtggtgaaggacgccttcagcctgtggctgaatcagaacgtgcaggccgcggagctgctggcggagatggccatctccagcgcccagcgccgtctgcgcgcggccaaaaaagtggtgcgcaaaaagctgaccagcggtccggcgctgccgggtaagctggcggactgtaccgcccaggatctgaaccgtaccgagctgttccttgtcgaaggggattcggcgggcggctcagccaagcaggcgcgcgatcgcgaatatcaggcgatcatgccgctgaagggcaagatccttaatacctgggaagtctcctccgatgaagtgttagcttcgcaagaagtgcacgacatttcggtggcgattggtattgacccggacagcgatgatttaagccagctgcgctacggtaaaatttgtattctggcggatgcggactccgatggtctgcacattgccaccctgctgtgcgcgctgttcgtaagacatttccgtaccctcgtgaaagaggggcacgtctatgtggcgctaccgccgctgtaccgtatcgacctcggtaaagaggtttactacgcgctaacggaagaagaaaaaaccggcgtgctggagcagctaaagcgcaagaagggcaagccaaacgtccagcgctttaaagggctcggtgagatgaacccgatgcagctgcgcgaaaccacccttgacccgaatacccgccgcctggtgcagctggtgatcagcgatgaggacgagcagcagaccacggcgataatggatatgctgctggccaaaaagcgttcggaagatcgtcgcaactggctgcaggagaagggcgatatggcggatctggaagtgtaa

SEQ ID NO: 221528 - DNA, 576 bp, Klebsiella pneumoniae
atggcgacgctcctttatctgcatggctttaacagctctccgcgctcggcgaaggcgacggcgttaaagacctggctggcgcagcactatccagagatcaccatggtggtgccggagttgccgccttacccggcggaaacggcggagctgttggagtccatcgtgctggagcacggaggcgagccgctgggggtcgtaggatcgtcgctgggcggctactacgcgacctggctttcgcagtgctttatgctgccggcggtggtggttaacccggcggtgcggccgtttgaactactaaacaattttctcggccacaatgagaatccatacaccgggcagcaatatgtgctagagtctcgccatatttacgatctcaaagtcatgcaaatcgacccgctcgaagcgccggatttactctggctgctgcagcagaccggggatgaagtgcttgattaccgccaggccgttcattactacgcctcttgccggcagacggtagaggagggcggtaatcacgcatttgtcggctttgacgatcatttcactcagattatcgaatttctcggcctgcgctaa

SEQ ID NO: 221529 - DNA, 828 bp, Klebsiella pneumoniae
ttggaaagcctgttaaacctacctctggctggtgaggccagagtcaggatattacaaattactgatactcacctgtttgctgaaaagcatgaaacgttgttaggcatcaatacctgggatagctatcaggccgtactgtcggccattcatgcctcacagcgtccatgcgatctgattgtcgcaacaggcgatctggcgcaggaccactcctccgcggcctatcagcattttgctgagggcatcgcgagttttgctgcaccctgcgtctggctaccgggcaaccatgatttccagccggcgatgtacagcaccctgcaggaggcgggcatttcccctgccaagcgcgtgtttctcggcgatcgctggcagatcctgctgctcgacagccaggtgtttggcgttccccatggcgagctgagcgacttccagctggagtggctcgaacataagctggcggaggcgccggagcgctataccttactcctgctgcaccatcatccgctgccggccggctgcagctggctggatcagcatagtctgcgcaacgccggcgcgctggacagcgcgttgagcgcctggccgcgggtgaagcatcttttgtgcggccatattcatcaggaactggatctcgactggaatggccggcgcatgatggcgacgccgtcgacctgcgtccagtttaaaccgcactgtgccaatttcactctggatacggtgtcaccgggctggcgctggctggagcttcaccctgacgggacgctgaccaccgaagtgtgccgcctggaaggcgccgcgtttcatccggatattgcttcagaaggctactga

SEQ ID NO: 221530 - DNA, 423 bp, Klebsiella pneumoniae
atgaagcgttatacacctgacttccctgagatgatgcgcctgtgcgagaccaatttcgcgcagttgcgccgcctgttgccgcgaacggatgcagcgggtgagaaggtaagctatcaggtgggaagcgcgcagtatcggttaacgatagttgaatcgacccgctacactactctggtggcaatagagcagactctgcctgcagtgagctactggagcctgccatcgatgaccgtccgcctctaccatgacgccatggtggccgaagtgtgttcgagtcagcagatctttcgcttcaaagcgcgatatgattatcctaataaaaagttgcatcaacgcgacgaaaagcatcaaattaaccagtttttggccgactggctgcgttactgtttagcacatggagcgatggcgattccggtttgttag

SEQ ID NO: 221531 - DNA, 633 bp, Klebsiella pneumoniae; identical to SEQ ID NO: 210018

SEQ ID NO: 221532 - DNA, 1470 bp, Klebsiella pneumoniae
atgaagaaattgctccccattcttatcggcctgagcctgaccgggttcagcgccatgagccaggcggaaaacctgcttcaggtttaccagcaggcacgcatcagcaaccccgatctgcgtaaatcggcagccgatcgtgacgccgcgttcgaaaagatcaacgaagcgcgcagtccattactgcctcagcttgggctgggagcggattatacctataccaatggctatcgcgacagcaacggcgtcaactctaacgtcaccagcggttcgctgcagttaacgcaggttctgtttgatatgtcgaaatggcgcgccctgacgctgcaggaaaaaacggcagggattcaggatgtcacgtatcagaccgatcagcaaacactgattctgaataccgcgacggcctattttaaagtgctggccgccatcgacacgctttcctataccgaagcgcagaaacaggctatttaccgccagttggatcaaaccacgcagcgctttaacgtaggcctggtggcgatcaccgacgtacagaacgcccgttcacaatacgatgccgtgctggcgaacgaagtcaccgcgcgtaacgatctcgacaacgccgtcgaaggactgcgtcaggtcaccggtaattactatccggagctggcctccctgaacgtgaatggctttaaaaccaacaagccgcaggcggtcaacgccctgctgaaggaagcggagaaccgcaacctgtcgttgctgcaggcgcgtctgagccaggacctggcccgcgagcagattcgtcaggcgcaggacggccatttgccgaccctgaacctttccgcctctaccggggtctcgaatacgcgttacaacggttcgaaaaccaataccccgctcgcctacaacgacagtgataacgggcagaaccaaatcggcctgaacttctctctgccactgtaccagggcggcgcggtgacctcgcaggtcaagcaggcgcaatacaacttcgttggcgccagcgagcagctggaaagcgcccaccgcagcgtcgtgcagactgtgcgttcatcgtttaacaacgtgaacgcctccatcagcagcatcaacgcctacaaacaggcggtggtctctgcgcaaagctccctggatgccatggaagctggctactcggtgggtacgcgtactatcgttgacgtcctcgacgccaccactacgctgtataacgctaagcagcagctctcgaatgcgcgctacaactacctgatcaacgagctgaacattaagtcggcgttaggtaccctgaacgagcaggatctggtcgccctgaacaacacgctgggtaaacccatctccacctccgcagatagcgtcgcgccggaaaatccgcaacaggatgccaccgctgatggctacggcaacactaccgcggcggtgaagccggcgtccgcacggaccacccagagcagcggcagcaatccgttccgtcagtaa

SEQ ID NO: 221533 - DNA, 672 bp, Klebsiella pneumoniae
atgaaacggacaaaaaatattaatcattcgtcgttccgcaaaagctggagcgcacgccatctgacgccggtcgcgctggccgtcaccgcggtctttatgctcgccggttgtgaaaaaagcgacgaaacggtgtcgctgtaccagaacgccgatgactgctccgccgccaacccgggcaaagcagccgaatgcaccacggcctacaccaacgcggtaaaagaggcagagcgcactgcgccgaagtatgccacccgcgaagactgcgtcgccgagtttggcgaaggccagtgccagcagacgccagcccaggcgggcgtcgccccggaaaaccaggcgcaggcgcaaagcagcggcagcttctggatgccgctgatggctggctacatgatgggccgcctgatgggcggcggcatggcgcaacagcagccgctgttcagctcgaaaaatccggccagcccggcctacggtcagtacactgacgccagcggcaagagctatggcgccgcccagccgggccgcaccatgaacgtgccgaaaaccgcgatggcgccgaagccagccaccaccaccaccgtcacccgcggcggctttggcgagtcggtagcgaaacagtcgaccatgcagcgtagcgccgcaggctcaacgtcctcttctcgctcaatgggcggctaa

SEQ ID NO: 221534 - DNA, 1161 bp, Klebsiella pneumoniae
atggaaagagtcagtattaccgagcgcccggactggcgcgagaaagcgaccgagtacggtttcaacttccataccatgtacggcgagccctactggagcgaagaggcgtattacaagctgaccctcgcgcaggtggaaaagctggaagcggtcaccgctgagctacatcagatgtgcctccaggtggtggaaaaagtgatcgccagcgatgagctgatgaccaaattccgcatccctaaacacacctggggttttgtgcgccagtcgtggaaaaccaaccagccgtcgctctactcacgtctcgacctggcctgggatggcgtcggcgaaccgaagctgctggagaacaatgccgacaccccgacctcgctgtatgaagcggccttcttccagtggatctggctggaagatcagctcaacgccggcaagctgccggcgggcagcgaccagttcaacagtttgcaggaaaagctgatcgatcgcttcggcgagctgcgcgagcagtttggctttcagctgctgcatatggcctgctgccgcgataccgttgaagatcgcggtaccgtgcagtatctgcaggactgcgccgctgaagcggggctggcgacggaattcctctacgttgaagatatcggcctgggcgaaaaaggccagtttaccgatctgcaggatcaggtgattggcaatctgttcaagctctatccgtgggagtttatgctgcgggagatgttctccaccaagctggaagacgctggcgtccgctggctggagccggcgtggaaaagcattatctccaacaaggcgctgctgccgatgctgtgggagatgttccccaatcaccctaatctgctggcggcctacttcagcgaagatactcacccggagatggagaagtacgtcattaagccaatcttctcccgcgaaggcgctaacgtgtcgatcgttgaaaatggcaaagtggtggaggcagtagaaggcccgtacggggaagaaggcaccatcgtgcaggcgttttacccgctgccgaagtttggcgatagctatacgctgattggcagctggctcatcaacgaccagcctgcagggatcggtattcgcgaagaccgggcgctgatcacccaggatctgtcgcgcttctatccgcacattttcgtcgaataa

SEQ ID NO: 221535 - DNA, 792 bp, Klebsiella pneumoniae
atgtcccgtacccgaatgcccgcgttgtttctcggccatggcagcccaatgaacgtgctggaagacaaccgttatacccgcgcctgggctcaactgggcgaaaccctgccgcgtccgaaagcgatcgtggtggtctctgcgcactggtttacgcgcggtacgggcgtaacggcgatggaggcgccgaagaccattcatgacttcggcggttttccgcaggcgctgtatgacacgcattatccggcgccgggctctccggcgctggcgcaacggctggtggagctgctctcgccggtgccggtcaccctcgatacagaagcctggggatttgaccatggctcgtggggcgtgctgattaaaatgtatccgcaggcggatatcccgatggttcagttgagcatcgacagcaccaaaccgccggcctggcatctcgaaatggggcggaaactggcctcgctgcgtgatgaaggcattatgctggtggccagcggcaacgtggtgcataacctgcgcaccgcccgctggcatggcgagaacacgccgtacccttgggcagagtccttcaataactacgtgaaggcgaatctgcaatggcaggggctggacgagcagcacccgctggttaactacctggcacacgaagggggctcgctctccaacccgacggcggagcatttcctgccgctgctgtatgtcctggggacgtgggatggcgttgaggcgataacgatcccagtcgatggcatcgagatgggctcgctgagcatgctgtcggtgttggttggcgcctga

SEQ ID NO: 221536 - DNA, 771 bp, Klebsiella pneumoniae
atgtcatcacccttaatattgacgctgttagccggtagcgcaaccttcattggcgccatattcggcgtgattggccagaaaccctctaaccgcctgcttggcttctccctcggctttgccgccgggattatgctattgatttcgttgatggaaatgctgcctgccgcgctggccgccgagggcatgtcgccgctgctcggctacggaatgtttgttgtcggcctgctgggctactttggccttgaccgcctgctgccgcacgcccacccgcaggatctgatgactcccgccatgccgcgcccgcgcaacttacgccgcaccgctattcttctgacgctggggatcagcctgcataactttccggaagggatcgccacctatgtcacggccagcaacaacctcgagcttggcatgggcgtcgcccttgccgtcgccctgcacaatattccggaaggactggcggttgccggaccggtgtatgccgccaccggctcgcgcagcaaagcggtgctctgggccgggctttccggcatggcggaaattttgggcggcgtgctggcgtggttgattctggggagcctggtctcgccgctggtgatgggcgcgatcatggctgccgtcgccgggattatggtggcgctgtcggtcgatgaactgatgccgctggcgaaagagatcgatccgcaaagcaatccaagctacggcgtcctgtgcgggatgtcggtcatggggctgagcctggtggtactccagacgatgggcatcggttaa

SEQ ID NO: 221537 - DNA, 654 bp, Klebsiella pneumoniae
atgaatcagacgctcctttcttcttttggtaccgcttttgaacgtgtggaacacgctttgaacgccctgcgcgaaggccgcggcgtgatggtgcttgatgatgaagaccgtgaaaacgaaggcgatatgatcttcgccgctgaaaccatgaccgttgagcagatggcgctgaccattcgtcacggcagcggcattgtgtgcctgtgcctgaccgaagatcgccgcaaacagctggatctgccgatgatggtagagaacaacaccagcacctacggcactggcttcaccgtgaccatcgaagcggccgaaggtgtgaccaccggcgtctccgctgccgaccgcgtgaccaccgtccgcgcggccatcgccgacggcgcgaaaccttccgatcttaaccgtccaggtcacgtcttcccgctgcgtgcgcagccgggcggcgtactgacccgcggcggccacactgaagccactatcgacctcgtgaccctggctggctttaaaccggcaggcgtgctgtgcgagctgaccaatgacgatggcaccatggcccgcgcgccggagtgcatcaagttcgctcagcagcacaatatggcggtagtcacgattgaagatctggtggcctatcgtcgcgaacatgagcgtaaagccagctaa

SEQ ID NO: 221538 - DNA, 273 bp, Klebsiella pneumoniae; identical to SEQ ID NO: 138696

SEQ ID NO: 221539 - DNA, 198 bp, Klebsiella pneumoniae; identical to SEQ ID NO: 138695

SEQ ID NO: 221540 - DNA, 1434 bp, Klebsiella pneumoniae
atgaaagtaacgctgccggagtttgaacgtgcaggagtgttggtggtgggtgatgtgatgctggaccgctactggtacggccccaccagtcgtatttccccggaagccccggtgccggtggtgaaggtggaaaatatcgaagaacgtcctggcggcgcggcaaacgtagcgatgaacattgcctcgctgggggcaacctcgcgcctggtgggattgaccgggattgatgacgccgcccgcgcgctgagccaggcgctggccaacgtcaatgtgaagtgcgacttcgtctccgtcccgactcacccgactatcaccaagctgcgggtgctgtcgcgcaatcaacagctgatccgcctcgactttgaagagggcttctccggcgtcgatccgcagccgatgcacgagcgcattcagcaggcgctgggctctattggcgcgctggtcctttcggactatgccaaaggggcgctgaccagcgtccagaccatgatccgactcgcacgtgaagcgggcgtgccggtgctgatcgatccgaaaggcaccgatttcgaacgctatcgcggcgcgacgttgctcaccccgaacctctctgagtttgaagcggtggtgggcaagtgccaggatgaagcgcagatcgttgagcgcggcatgaagctcatcgccgaattcgaactgtcggcgctgctggtgacgcgctctgagcaggggatgacgctgctgcagccgggacgtccgccgctgcatatgccgacccaggcccaggaagtgtacgacgtgaccggcgccggtgacacggtgattggcgtgctggcggcgaccctggcgtccggcaacaccctggaagaggcctgctatttcgctaacgccgcggcgggcgtggtggtcggtaagctgggtacatccaccgtttcccctgtcgagctggaaaacgcggtccgcggccgggctgagaccggctttggcgtgatgagcgaagaggagctcaaacaggcggttgcggcggcgcgcaagcgcggcgagaaagtggtgatgaccaacggcgtcttcgacattctgcatgccggtcatgtctcctatctggcgaatgcgcgcaagctgggcgaccgtctgatcgtggcggtcaacagcgatgcctccaccaaacgtctgaaaggcgaaacccgcccggtgaacccgctggaacagcggatgatcgtgctgggggcgctggaggccgtcgactgggtggtatcatttgaagaagatactccgcagcgcctgatcgctggcatcctgccggatctgctggtcaaaggcggcgactacaaaccggagcagatcgccggcagcgaagaggtctgggcgaacggtggcgaagtgctggtgctcaactttgaagatggctgctcaactaccaatattattaagaaaatacaaaaagatagcgacaaataa

SEQ ID NO: 221541 - DNA, 2838 bp, Klebsiella pneumoniae
atgatgccgctttctccgcagttacagcagcactggcagacggtcgctgaccgtctgccagcggattttcccgttgccgaactgagcccacaggccaggtcggtgatggcgttcagcgattttgtcgaacagagtgtgatcgctcagccgggctggctgaatgagcttgcggactccgcgccggcggcggaagagtggcggcattacgaagcctggctgcaggagcgcctgcaggccgtcactgacgaagcggggttgatgcgagagctgcgtctcttccgccgccagatgatggtccgcatcgcctgggcgcaggcgttgtcgctggtgcgcgaagaagagacgctgcagcagctgagcgtcctggcggagaccctgattgtcgccgcccgcgactggctgtacgccgcctgctgtaaggagtggggaacgccatgcaatgccgaaggtcagccgcagccgctgctgatcctcggcatgggaaagctgggcggcggcgaactgaacttctcttccgatatcgatctgatctttgcctggccggagcatggcgccacccgcggcggccgtcgcgagctggataatgcccagttctttacccgcctggggcagcggcttatcaaggcgctggatcagccgacgcaggacggctttgtttatcgggtggatatgcgcctgcggccgtttggcgacagcgggccgctggtgctcagctttgcggcgctggaagattattaccaggagcaggggcgggactgggaacgctacgcgatggtgaaagcgcggatcatgggcgataacgacggcgcctacgccagcgaactgcgcgcgatgcttcgccccttcgtcttccgccgctatatcgacttcagcgtgatccagtcgctgcgtaacatgaaaggcatgatcgcccgtgaagtgcggcgtcgcgggctgaaagacaacatcaagctcggcgccggcggcattcgtgaaattgaatttatcgttcaggtctttcagctgatccgcggcggtcgcgaacctgcgctgcagcagcgcgcgctattgccgacactggcggcgattgatgagctgcatctgctgccggaaggcgacgcgacgctgctgcgcgcggcctatctgttcctgcgccggctggaaaacctgctgcaaagtatcaacgatgaacagacccagaccctgccgcaggatgaactgaaccgcgccagactggcgtgggggatgcataccgatgactgggagacgctgagcgcgcagctggcgaaccatatggccaacgtacggcgggtgtttaatgaactgatcggcgatgacgaggctcagtcgccagatgagcagctggccgagtactggcgcgagctgtggcaggatgcgctggaagaagatgacgccagtccggcgctggcgcatttaaacgacgccgaccgccgcagcgtgctggcgctgattgccgatttccgcaaagagctggatcggcgcaccatcggcccgcgcggccgccaggtgctggatcagctgatgccgcatctgttgagcgaaatctgctcgcgcgccgatgcgccgctgcctctggcgcggatcacgccgctgttgaccgggatcgtcacccgcaccacctatcttgaactgctgagcgaattccccggcgcgctgaaacacctgattacgctctgcgcggcatcgccgatggtcgccagccagctggcgcgccacccgctgctgctggatgagctgctggatcccaacaccctctatcagccgacggcgaccgatgcctatcgcgacgagctgcgtcagtatctgctgcgggtgccggaagaggatgaagagcagcagctggaggcgttgcgccagttcaagcaggcgcagcagctgcatatcgcggcggcggatatcgccggcaccctgccggtgatgaaggtcagcgatcatttaacctggcttgccgaagcgatcctcgacgcggtggtgcagcaggcatgggggcagatggtggctcgctacggcctgccgacccacctgcacgatcgccaggggcgcggcttcgccgtcgtcggctacggcaagctcggcggttgggagctgggctacagctccgatctcgacctggtgttcctccatgactgcccggcggaggtgatgaccgacggcgagcgggagattgacggccgtcagttctacctgcggctggcccagcggatcatgcatctgttcagcacccgcacctcgtccggtattctttacgaagtggacgcccggctgcgcccttccggcgcggcggggatgctggttaccaccgctgacgcgtttgccgactatcagcagaacgaggcctggacgtgggagcatcaggcgctggtgcgcgcccgcgtggtctatggcgacccggcgttgcaggcgcgctttgacgccattcgtcgcgatatcctgaccaccccgcgggagggcgcaaccctgcagaccgaggttcgcgagatgcgcgagaagatgcgcgcccacctcggcaacaagcatcccaatcgttttgatatcaaagccgatgccggcgggatcacggatattgaatttattacccagtatctggtcctacgctatgccagcgacaagccgaagctgacccgctggtctgataatgtgcgtattctcgagctgctggcgcagaacgacatcatggacgaggaggaagcgcgcgccttaacgcacgcgtacaccaccttgcgtgacgcgctccatcacctggccctgcaggagctgccgggacacgtggcgccagaggccttcagccgggagcgcgagcaggtcagctccagctggcagaaatggctgatggcttaa

SEQ ID NO: 221542 - DNA, 1299 bp, Klebsiella pneumoniae
atggctcaagaaatcgaactcaagtttatcatcgctcaggatggggtagagacgctgcgcgagcagctcaatgcgctcgaggcgaaacatacgcccgcgggccagttgctgaacatttattacgaaaccgccgataactggctgcgtcgtcacgatatggggctgcgcatccgcggcgatcaggggcgttatgagatgacgctgaaaatcgccggtcgggtggtcggcggcctgcaccagcgcccggaatataatattccactggataaaccggagctggcgcttgagcgcctgccggcggaggtctggccgcaaggggaacttccggccgcgctggcggagcacgtccagccgctgttcagcaccgattttgcccgtgaacgctgggtgatccaggaaggaaagagtgagattgagattgccctcgatcgcggcgaagtcaaggcgggcgaacatcaggagccgatctgcgaactggagctggagctgctcgccggggagaccgccgatctgctgcgcctcgcgcatcgtttgctggagagcggcgtcctgcgtcaggggagcctgagcaaagccgcgcgcgggtatcatctggcgcaaggtaacaatgagcgtccggtgacccggctggcggtgctgccggtggcagcgaaggccagcgtggagcaggggctggaggcggcgctggagagcgccctggcgcattggctgtatcacgacgagatctggctgcgcggcaacgcaaaagccaaagcggaaattctgctggcgatagcccgcgtgcgccatgccctcgtgctgtttggcggcatcgtgccgcgtaaggcgaccacccacctccgcgcgttgctgaacgacgccgacgccgttctgctggctgcggacaccgccgacgaagcgttattccgcaccgaggtcgttggcgccaaactggccctgaccgaatggctggtccagcgcgggtggcgtccgttcctcaacgaggcgggagagaaaaaaatagccggctcgttcaaacggtttgccgatattcacctctcgcgggtggcggccgagctgcgcagcgccgtgcagcatctggcggtagaagatgccgctgaccagttgccgaagctgtcccgcgacatcgacagcgtccagctgctggcgggcgcctatggcgacgccgtcgcgccctggctggagaactggcaggaacttcagcgtgcgatagagcatgacgaccgcagcgtgtttgaatatttccgtcgccaggcgctggctgccgagccgttctggctgcatagtggaaaacgataa

SEQ ID NO: 221543 - DNA, 621 bp, Klebsiella pneumoniae
atgccaaaattacgcctgattacttttactttgctcgcgcttagcgccgctacggcggttcacgcagaagaaaagcgctacgtttccgatgagctgaacacctgggttcgcagcggcccgggcgataattatcgtctggtcggcaccatcaacgccggggaagaagtgtcggtactgcaaacgaacgacagcaccagttacgcgcaaattcgcgacagcaacggccgtaccgcctggatcccgctgaaagagctgagcaacgagcccagcctgcgcacccgcgtcccggatctggaaaaccaggtcaaaacgctgaccgataagctgaataacatcgatgccacctggaaccagcgcacggcggatatgcagaagaaagtcgccggcagcgacagcgtgattaacgcgctgaaggacgagaaccaaaagttgaaaaacgagctggttgtcgcgcagaagaaggtgaatgcggcaaatctgcagcttgatgataaacagcgcaccattatcatgcagtggtttatgtacggcggcggtgtgctgggcgtcggtctgctgctcggtctggtgctgccgcatctggtgccaagccgcaaacgtaaagaccggtggatgaactaa

SEQ ID NO: 221544 - DNA, 1242 bp, Klebsiella pneumoniae
gtgaagagttatctggtcggtggcgcggtgcgtgacgcgctgttagggctgccggtcaaagaccgagactgggtggtggtgggcgccaccccgcaacagatgctagacgcgggctatcaacaggtaggccgcgattttcccgtgttcctccatccgcaaagccgggaagagtatgccctggcccgcaccgagcgcaaatccggcgcgggctataccggttttacctgctatgccgccccggacgtcaccctcgaagccgatctgctgcgccgcgacctgacggtcaatgccctcgcccaggatgccgacggcgcaattatcgacccctacggcggacagaacgatctccgtcagcgcctgctgcgccatgtctctcccgcgtttagtgaagatccgctgcgcgtgctgcgcgtcgcgcgctttgccgcccgctacgcccacctcggttttcgcattgccgaagagacccaggccctgatggccgcgatggttgaggccggcgagctggcgcatttaatgccggagcgggtgtggaaggagacggaaagcgcattaactactcgcaacccgcaggtctttttccagacgctgcgcgactgtcaggctctcaaggtgctgttcccggagattgacgccctgtacggcgtgccggccccggcgaaatggcatccggaaatcgacaccggcctgcacaccctgatgaccgtcacgatggccgcgatgctgtcgccggatgtcgacgtacgtttcgccaccctgtgccatgacctcggcaaagggctgacgccgaaggcgctctggccgcgtcaccacggccatggtccggcgggagtcaagctggtggagcagctctgcgcgcgtctgcgggtgccgaacgatatccgcgatctcgcgaaactggtggcggagtaccatgacctaatccacaccctgccgattctgcagccgaaaaccctcgtcaaactcttcgacaacattgacgcgtggcgcaaaccgcagcgcgtgcagcagatcgcgctcaccagcgaagccgacgtccgcggacgcaccggtttcgaggccagcgattacccgcaggggcgcctgctgctggaggcctgggaagtggcgcagtcggtctccactaaagaggtcgtggcggcgggctttaaaggggcggaaattcgcgaggagctgacgcggcggagaattgcggcggtagcgcagtggaaggaacagcgttgcccccagccgcaaggctga

SEQ ID NO: 221545 - DNA, 822 bp, Klebsiella pneumoniae; identical to SEQ ID NO: 136872

SEQ ID NO: 221546 - DNA, 384 bp, Klebsiella pneumoniae
atggatattgtatttatagagcaactttcggtaatcaccaccattggtgtttatgactgggaacaaaccattgagcagaagctggtgttcgatatcgaaattgcatgggataaccgcaaggcggccgccagcgatgatgtcagcgattgcctcagctatgctgatatcagcgagcgcgtgatcgcgcatgtggagggggggaaatttgcgttagtggagcgggtggcggaagaggtggccgacctgctgctggaaacattccagtcgccatgggtgcgcataaaagtcagcaaacctggcgccgtggctcgcgcggcaaacgtcggggtgattattgaacgtggccttaatctgaaacaaaacttttcaggtcatacttgttaa

SEQ ID NO: 221547 - DNA, 618 bp, Klebsiella pneumoniae
atgagtgcaatcgcgcctggactggtactcctcgcctacctctgcggctccatttccagcgccattctggtatgtcgccttgctggcctgcccgacccacgcgacagcggctcaggcaaccccggggccactaacgtactacgaattggcggaaaaggggcggccgtagcggtacttatttttgatgtgctgaagggcatgctcccggtgtggggcgcctgggcgctgggccttacgccgttctggctggggttagtggcgattgccgcctgcgtgggccatatctggccagtcttctttcatttccgcggcggtaaaggcgtcgccacggccttcggcgctatcgcccccatcgggctcgatctgaccggggtgatggccgggacctggctgctgaccatcctgctcagcggttactcttccctgggcgctatcgtcagcgcgctgatcgccccgttctacgtctggtggttcaaaccgcagtacacctttccggtgtcgatgctctcctgcctgatcctcctgcgccatcacgacaacattcagcgtctgtggcgccgccaggagagcaaaatctggacccgcgtgaagaagaaaaaaacgccagagcagaagtaa

SEQ ID NO: 221548 - DNA, 825 bp, Klebsiella pneumoniae
ttgcacggcaccgtgttaccaccactcaaaaaaggctggcaggccacgctggatctccgctttcagcaggccggcggcaagaccgttctcgccagcgcccaacacgtcggcccgctgaccgtccagcgcccgttttacccggaagaagagacctgtcacctctatctgcttcacccgcccggcggcatcgtcggcggtgatgagctgacaattagcgcgcaccttgcccccggctgccatacgctgataaccatgcctggcgccagcaagttttaccgcagcagcggcgcgcaagcgctagttcgccagcagttgacccttgccccgcaggcgaccctggagtggctcccgcaggatgccatcttctttcccggggcgaatgcccggctgttcactacctttcatctttgcgcctccagcaggctgctggcctgggatctgctctgccttggccgcccggtgattggcgaaaccttcagccacggcaccctcagcaaccggctggaggtatgggtggacgatgagccgctgctggtcgagcgcctgcagctgcaggagggagagctctccagcgtcgccgaacgtccctgggtcggcactttgctgtgctatccggctaccgatgccctgctcgacggggtgcgcgacgcgctggcgccgctcggtctctacgccggcgccagcctgaccgaccgcctgctgacggtgcgtttcctcagtgacgataatctgatttgccagcgggtgatgcgcgacgtatggcagtttctgcgccctcatcttaccggcaaatctcccgtacttccccgaatctggctgacttaa

SEQ ID NO: 221549 - DNA, 303 bp, Klebsiella pneumoniae
atggaactgaccccccgagaaaaagacaagctgttgctgtttaccgccgcgctggtggcggagcgtcgcctggcccgcggcctgaagctcaactatccggagtccgtggccctgatcagcgcctttattatggaaggcgctcgggacggcaaaagcgtggcctcgctgatggaggaaggccgtcacgtcctgacccgcgagcaggtgatggagggcgtcccggaaatgatcccggatatccaggtcgaagccaccttcccggacggctcgaagctggtcaccgttcacaacccgattatctga

SEQ ID NO: 221550 - DNA, 321 bp, Klebsiella pneumoniae
atgatccccggtgaatatcacgttaagcccggtcagatagccctgaataccggccgggcaacctgtcgcgtggtcgttgagaaccacggcgatcggccgattcaggtcggttcgcactaccatttcgccgaggttaacccggcgctgaagttcgaccgtcagcaggccgccggctatcgcctgaatatcccggcgggcacggcggtacgctttgaacccggccagaaacgcgaggtcgagctggtggccttcgctggtcaccgcgccgtcttcggcttccgcggcgaggttatgggccctctggaggtaaacgatgagtaa

SEQ ID NO: 221551 - DNA, 1704 bp, Klebsiella pneumoniae
atgagtaatatttcacgccaggcctatgccgatatgttcggcccaaccgtcggcgacaaggtgcgcctggcggataccgagctgtggatcgaggtggaggacgatttgaccacctacggggaagaggtcaaattcggcggcggcaaagtgatccgcgacggcatgggccaggggcagatgctggccgccgactgtgtcgacctggtgctcaccaacgcgttgatcgtcgatcactgggggatcgttaaggccgatatcggcgtgaaggacggccggatcttcgccatcggcaaagccggtaaccccgacatccagcccaacgtcaccatccccatcggcgccgcgacggaagtgattgccgccgaaggaaaaattgtcaccgccggcgggatcgatacccatattcactggatctgtccgcagcaggcggaagaggcgctggtctccggcgtgaccaccatggtcggcggcggcaccggcccggccgcgggcacccatgccaccacctgcaccccgggcccgtggtatatctcacgcatgctgcaggcggccgacagcctgccggtcaatatcggcctgctgggcaagggaaacgtttctcagccggatgccctgcgcgagcaggtggcggcgggcgttattggcctgaagatccatgaggactggggcgccaccccggcggcgatcgactgtgcgttaaccgtcgccgatgaaatggacgtccaggtcgccctgcacagcgacaccctgaatgaatccggttttgtggaagacaccctcgccgccatcggcgggcgcaccatccacaccttccataccgaaggggccggcggcggccatgcgccggacatcatcaccgcctgcgcccacccgaacattttgccgtcgtccaccaacccaacgctgccctacaccctcaacaccatcgatgaacatctcgatatgctgatggtctgccaccatctggacccggacatcgccgaggacgtggcctttgccgagtcgcgcattcgccgggaaaccatcgctgcggaagacgtgctgcacgatctcggcgccttctcgctcacctcctccgattcgcaggccatgggccgcgtcggagaagtgattctccgcacctggcaggtggcgcatcgcatgaaggtgcagcgcggagcgctggcggaggagaccggggataacgacaacttccgcgtgaagcgctacatcgccaaatacaccatcaacccggcgctgacccacggcatcgcacacgaagtcggatccattgaggtgggtaagctggctgacctcgtggtctggtcaccagccttcttcggcgtgaaaccggccaccgtgatcaaaggcggcatgatcgccatcgcgccgatgggcgatatcaatgcctctattccgaccccgcagccggtgcactaccgcccgatgtttggcgcgctgggcagcgcccgccatcactgccgcctcaccttcctgtcgcaggcggcggcagccaatggcgttgccgagcggctgaacctgcgcagcgcgatcgccgtggtgaaaggctgccgtacggtgcagaaagccgacatggtgcacaacagcctgcagcctaacatcaccgtcgacgcccagacctatgaggtgcgggtggatggcgaacttatcaccagcgagccggcagacgttctgccgatggcgcaacgatattttctgttttaa

SEQ ID NO: 221552 - DNA, 477 bp, Klebsiella pneumoniae
atgctttatttaactcaacgtctggagatccccgccgccgcgaccgccagcgttacgctgccgattgatgttcgcgtcaaaagccgggttaaggtcaccctcaacgatggccgggaagccggcctgctgctgccccgcggcctgctgctgcgcggcggcgatgtgctcagcaacgaagaaggcaccgagtttgtgcaggtgattgccgctgatgaaggggtgtcggtagtgcgctgcgacgatccctttatgctggcgaaggcctgctaccacctcggcaaccgtcacgtgccgctgcagattatgccgggcgagctgcgctaccatcacgatcacgtgctggacgatatgctgcgccagttcggcctgacggtgacctttggccagctgccgttcgagccggaagccggcgcttacgccagcgagagccacggtcatcatcatgctcatcatgaccaccacgctcacagccactag

SEQ ID NO: 221553 - DNA, 711 bp, Klebsiella pneumoniae
atgctcatcatgaccaccacgctcacagccactagcatgtcgacagcggaacaacgcctgcggctgatgcagctggccagcagcaacctgccggtagggggttacagctggtcccaggggctggagtgggctgtggaagccggctgggtgccggacgtcgcggccttcgagcgctggcagcgacgccagatgacggaaggcttttttaccgttgacctgccgctgttcgcccgcctgtaccgcgcctgcgaacaaggcgatatcgctgcggcccagcgctggaccgcctatctgctggcctgccgggaaactcgtgaactgcgggaggaagagcgcaaccgcggcgcggcgtttgcccgtctgctgagcgactggcagccggactgtccgccgccgtggcgctccctgtgccagcaaagtcagctcgccgggatggcctggctcggcgtgcgctggcgtatcgccctgcccgagatggccctcagcctgggctatagctggattgagagcgccgtgatggccggcgtcaagctggtccccttcggccagcaggccgcccagcagctgattttacgtctttgtgaccactacgcggccgagatgccccgcgcgctggccgcgccggacggcgatatcggatcggccaccccgctcgccgccatcgcctctgcccggcatgaaacccaatactctcgattattccgttcctag

SEQ ID NO: 221554 - DNA, 618 bp, Klebsiella pneumoniae
atgaactcttataaacacccgctgcgcgtcggcgtcggcggcccggtcggttccggtaaaaccgctctgctggaagcactgtgtaaagcgatgcgcgatacctggcagctggcggtggtcactaacgacatctataccaaagaagatcagcgcatcctcaccgaagcgggcgcgctggcgcctgaacgcatcgtcggtgtggaaaccggcggctgcccgcatacggcgatccgcgaagatgcctcaatgaacctcgccgccgtggaagcgctgagtgaaaagttcggtaacctcgaccttatcttcgtggaaagcggcggcgataacctgagcgccaccttcagcccggagctggcggatctgaccatctacgtcatcgatgtggccgaaggggagaagatcccgcgcaaaggcggaccggggatcaccaaatccgatttcctggtgatcaataaaaccgaccttgccccctatgtgggcgcgtcgctggaggtgatggcgagcgatacccagcgtatgcgcggcgatcgcccatggaccttcaccaatctgaagcagggcgacggcctgagcaccattatcgccttcctcgaagacaaaggcatgcttggcaaatag

SEQ ID NO: 221555 - DNA, 1608 bp, Klebsiella pneumoniae
atgtcatcactggatcttaaccctgaattacccgcgacaacgcggacttccggctcccgggaaaccttagaagattacaccttacgttacgccccgctgagctttcgccgctggggtccgggcgtcgtcgcggtcaccgcgctgggcggcatcgcctatctggccgacttttccatcggcgccagcatcggtatggcctggggcaccagcaacgccatctattcgatcctggtggcggcgctggtgatcttcctcaccggcattccgctggcgatcactgccgcgcgctacaacattgaccttgacctgatcacccgcagcgccggcttcggctatttcggctcggtgatcaccagcattatttttgccggcttcacctttatcttcttcgccctcgaaggctcgatcatggcccagggcctgctggtgggcctcgggatcccgctgtggatgggatatctgatcgccaccctgatggtgctcccgctggtggtctatggcatgaaagccctgacccgcctgcaggtgtggaccacgccgctgtggctggtgctgatggtggtgccggtggtgtggctgattgtcaaagatccgcagctggtggacggcttcctgcatttcgccggtaaaaacagcgcgtcgacggtggatattaccgccatcatgctcggcgccggggtatgcctgtcgctgatcatgcagattggcgagcaaattgattacctgcgctttatgccgcctaagaccgcggagaatcgtaaaagctggtggctggcggtcttttccgccggcccgggctgggtggtgttaggggcgatcaaacagatcatcggcgccttcctcggcttctatctgttgacccgtttcccggcggtgcacaataccgaaccggtgcagcagttcgtcagcgtcttcgataacctggtgcccggctggctggccctgacgctggcggtggtgctggtggtgatctcgcagatcaaaattaacgtcaccaatgcctactccggctcgctggcgtggaccagcgcctggacccgcaccaccaaacgctatccgggacggattatttttgtggtggtcaacctggcgattgccctggcgctgatggagggcgatatgttcagcgccctgtcatggatcctcggcttttactccaacttcgccatcgcctgggtcgtggtggtggcgaccgacatcacctttaataaaggcttgctcaagctggcgccggcgcagccggagtatcgtcgcggcatgatctacaacgttaacccggtgggcgtggtctcctttggtctggccgccgggctgtcgatctgcgccttcttcggtctgctgggggcgacgctggcgccgttctcgccgctgattgcgctggtcgtcgcctttgtcatgaccccgctgatggggctccttacccgcgggcgctactatattaagcaggtggatgacggcatcgccgagccgcgctatgacgcggcggggaacgcctccaccaccgtgtatcaatgcgttagctgtgaggaagagtacgagcgcccggacgtgatgcactcgcacaagcatcagggagccatctgctcgctatgtaaaagtatggagtag

SEQ ID NO: 221556 - DNA, 1014 bp, Klebsiella pneumoniae
atgcgtgtactgggcattgaaacatcctgcgatgaaaccggcatcgcgatttatgacgaccagcaaggtctgttagccaaccaattgtatagtcaggtgaaactgcatgcggattacggcggcgtggtgccggagctggcatcgcgcgaccacgtgcgcaaaacggtgccgctgatccaggcggcgctgaaagaagccggtctgacggcgaaagatatcgacgccgtcgcctatacggcgggtccaggcctggtcggcgcgctgctggtcggggcgaccgttggccggtcgctggccttcgcctggaacgtgccggcgatcccggtacaccatatggaagggcatctgctggcgccgatgctggaagataatccgccggcgttcccgttcgtcgcgctgctggtttccggcggccacacccagttgattagcgtcaccggtattggtcagtatgaactgctgggcgagtcgattgacgatgcggcgggcgaagcctttgataagacggcgaaactgctgggactggattatcccggcgggccgatgctgtcgaaaatggcgtcccagggcaccgaaggccgctttgtcttcccgcggccgatgaccgaccgtccggggctggacttcagcttctccggcctgaagaccttcgccgccaacaccattcgcagcaacggcgacgatgagcaaacccgcgccgacatcgcccgggcgtttgaggatgcggtcgtcgatacgctgatgattaaatgtcgccgcgcgctggagcaaaccggctttaagcgtctggtgatggcgggaggcgtgagcgccaaccgtaccctgcgggcgaagctggcggagatgatgcaaaaacgcggcggcgaggtgttctacgcccgccctgagttctgtactgacaacggcgcgatgatcgcctacgccggcatggtgcgtctgcaaaccggcgccaaagccgagctcggcgtgacggttcgcccgcgctggccgctggccgagctgcctgccgcctaa

SEQ ID NO: 221557 - DNA, 216 bp, Klebsiella pneumoniae; identical to SEQ ID NO: 136860

SEQ ID NO: 221558 - DNA, 1746 bp, Klebsiella pneumoniae
atggctggacgaattccacgtgtatttattagcgatctgcttgccagaaccgacatcgtcgatctgatcgatgcgcgggtaaagctgaaaaagcagggcaaaaattttcacgcgtgctgtccgttccataacgaaaaaaccccctctttcaccgtcaacggtgaaaaacagttttaccactgcttcggctgcggggcgcacggcaatgctatcgacttcctgatgaactacgacaagctcgagttcgtggaaacggtcgaagagctggccgccatgcacaacctcgaagtgccttatgaagcaggcaacggacccagccagatagagcgccatcaacggcagaacctctaccagttactggatggtctgaatgcgttttatcaacagtctctgatgcagcccgccgccgatcctgcgcgccagtacctggcgaaacgggggttaagcagcgaggtgattacgcgctttgccatcggctatgctcccccaggttgggataacgttttaaaacggtttggcggcaatcaggaaaaccgccagtcgcttattgatgccggcatgctggtcaccaacgatcagggacgcagttacgaccgcttccgcgaacgggtgatgttccccatccgcgataagcgaggccgggtgattgggtttggcggacgggtgctgggcgatgccctgccgaagtatctgaactccccggaaaccgacatattccataaaggccgccagctgtatggcctgtatgaagcgcagcaggataaccccgaaccaccgcgtttgctggttgtcgaagggtatatggacgtcgtggcgatggcgcagtacgacattaattatgccgtggcctcgctgggtacctcgaccacggccgaccatatccagctgctgttccgggtgacgaataacgtcatctgctgctacgacggcgaccgggccggccgcgatgccgcctggcgcgcgctggagacggcgctgccgtacatgaccgatggtcgccagctacgctttatgtttctgcctgacggcgaagacccggatacgctggtgcgtaaagagggcaaagcggcgttcgaggcgcggatggagcaggctcagccgctctccacgttcttgtttaacagcctgctgccgcaggtcgatctgagtactccggacgggcgcgcgcagctgagcacgctggcgctgccgctgataacccaggtcccgggcgaaacgctgcgcatctatttgcgtcaggagttgggcaataagctgggcattttagatgacgcgcagcttgaacgattaatgccaaaacaggcggaaaatggcgcgccgcgtcccgcaccgcagctaaaacgcacgaccatgcgtatactgataggactgctggtgcaaaacccggatctggcgccgttagtcccgccgctggagggactggactcgcgcaaaatgccgggactgagcctgttcagcgaactggtgaagagctgtctggcgcagcctggtctgacaaccgggcaacttttagagcaatatcgcggcacaaaagaggcggcaacccttgaaaaactgtcgatgtgggacgatatagcagataaagacatcgctgaacaaaccttcaccgactcgctcaaccatatgtttgattcactgctggaactgcgacaggaagagttgatagctcgcgatcgcacacacggtttaagcagtgaagaacgccgggagctctggaccatcagccaggagctggcgaaaaaataa

SEQ ID NO: 221559 - DNA, 1842 bp, Klebsiella pneumoniae
atggagcaaaacccgcagtcacagctgaagcttcttgtccaacgtggtaaggagcaaggctatctgacctatgccgaggtcaatgaccatctgccggaagatatcgtcgattccgatcagatcgaagacatcatccaaatgatcaacgacatgggtattcaggtgatggaagaagcaccggatgccgatgatctgatgcttgccgaaaacaccgcggatgaagatgctgccgaagccgccgcgcaggtgctctccagcgtggaatccgaaatcgggcgcacgaccgacccggtgcgtatgtacatgcgtgaaatgggtaccgtagagctgctgacccgtgaaggcgaaattgacatcgccaaacgcatcgaagacggcatcaatcaggtgcagtgctccgttgccgaatatccggaagcgatcacctacctgcttgagcagtacgaccgcgttgaagcggaagaagcccgtctgtccgatctgatcaccggtttcgtcgatccgaacgccgaagaagatatggcgccaaccgccacccacgttggctccgagctgtctcaggaagagatggatgacgacgaagacgaagacgaagatgaagacgccgacgacaacagcgatgacgacaacagcatcgacccagagctggcccgtgagaaattcgccgagctgcgtacccagtacgagctgacgcgcgacaccatcaaagccaaaggtcgtagccatgccgccgcccaggaagagatcctgaagctgtctgaagtcttcaagcagttccgcctggtgccgaagcagttcgattacctggtcaacagcatgcgcagcatgatggatcgcgttcgtactcaggaacgtatcatcatgaagctgtgcgttgagcagtgcaaaatgccgaagaaaaacttcatcaccctgttcaccggcaacgaaaccagcgaaacctggttcaacgccgcggtggcaatgaacaagccgtggtctgagaagctgctggaagtgaaagaagatgtgcagcgcggcctgcagaagctgcagcagattgaagaagagaccggcctgaccatcgagcaggttaaagatatcaaccgtcgcatgtccatcggcgaagcgaaagcccgtcgtgcgaagaaagagatggttgaagcgaacctgcgtctggttatctctatcgccaagaaatacaccaaccgcggtctgcagttcctcgacctgattcaggaaggcaacatcggtctgatgaaagcggtcgataagttcgaataccgtcgcggctacaagttctcgacctacgccacctggtggatccgtcaggccatcacccgctctatcgcggaccaggcgcgcaccatccgtattccggtgcatatgattgagaccattaacaagctcaaccgtatctcccgtcagatgctgcaggagatgggccgtgaaccgaccccggaagagctggctgagcgtatgctgatgccggaagacaaaatccgtaaagtgctgaagatcgccaaagagcctatctccatggaaacgccgatcggcgacgatgaagattcgcatctgggggatttcatcgaggataccaccctcgagctgccgctggattctgctaccaccgagagcctgcgcgcggcaacgcatgacgtgctggccggcctcaccgctcgtgaagcgaaagtgctgcgtatgcgtttcggtatcgacatgaacaccgaccacacgctggaagaagtgggtaaacagttcgacgttacccgcgaacgtatccgtcagatcgaagcgaaggcgctgcgtaaactgcgccacccgagccgttctgaagtgctgcgtagcttcctcgacgattaa

SEQ ID NO: 221560 - DNA, 507 bp, Klebsiella pneumoniae
atgattagcgatatccttgcgccgggcctgcgcgttgtcttttgcggtatcaacccggggaagtcctccgcccataccggctttcattttgcccatcctggcaatcgcttctggaaggtcatccatcaggccgggttcaccgatcggcagctcaggccggaagaggagctgcagctgctggatacgcgctgcggcatcaccatgctggtagagcgtccgacggtgcaggccagcgaggtcgccttgcaggagttacgcagcggcggccgtgagctggtgcggaaaattgaggagtatcagccgcaggccctggcggtgctcggcaagcaggccttcgagctggcctttaaccagcgcggcgcgaagtgggggaaacaggctatgagcatcgggacgacccaggtgtgggtgctgcctaatcccagcggcttaaaccgggcgacgctcgataagctggtggcggcctatcgtgaactggacgatgccctggcaacccgcggccagtag

SEQ ID NO: 221561 - DNA, 858 bp, Klebsiella pneumoniae; identical to SEQ ID NO: 221276

SEQ ID NO: 221562 - DNA, 927 bp, Klebsiella pneumoniae; identical to SEQ ID NO: 221275

SEQ ID NO: 221563 - DNA, 474 bp, Klebsiella pneumoniae; identical to SEQ ID NO: 221274

SEQ ID NO: 221564 - DNA, 528 bp, Klebsiella pneumoniae; identical to SEQ ID NO: 221273

SEQ ID NO: 221565 - DNA, 2634 bp, Klebsiella pneumoniae; identical to SEQ ID NO: 221272

SEQ ID NO: 221566 - DNA, 705 bp, Klebsiella pneumoniae; identical to SEQ ID NO: 221271

SEQ ID NO: 221567 - DNA, 513 bp, Klebsiella pneumoniae; identical to SEQ ID NO: 221270

SEQ ID NO: 221568 - DNA, 549 bp, Klebsiella pneumoniae; identical to SEQ ID NO: 221269

SEQ ID NO: 221569 - DNA, 648 bp, Klebsiella pneumoniae; identical to SEQ ID NO: 221268

SEQ ID NO: 221570 - DNA, 846 bp, Klebsiella pneumoniae; identical to SEQ ID NO: 221267

SEQ ID NO: 221571 - DNA, 501 bp, Klebsiella pneumoniae; identical to SEQ ID NO: 221266

SEQ ID NO: 221572 - DNA, 573 bp, Klebsiella pneumoniae; identical to SEQ ID NO: 221265

SEQ ID NO: 221573 - DNA, 234 bp, Klebsiella pneumoniae; identical to SEQ ID NO: 221264

SEQ ID NO: 221574 - DNA, 846 bp, Klebsiella pneumoniae; identical to SEQ ID NO: 221263

SEQ ID NO: 221575 - DNA, 315 bp, Klebsiella pneumoniae
atggtaggaataacagtactggcaatgagtagcgccgcggtgggaaaggatgtcgtccccgatgaggcgcggacccgagatatgatgcgctgtcaggattatctgcaactggatccgcgcgcctggacgccgatggtgatttggctgatgaacgatcctttttcactggagccgccggagtggaccgacttccatgaagccgagctggtgctgacgccgatcctcaccgaaatctgccgtcaggagccggatgtctggctcacctcgctgcgggaacggctcaattcttatcagcaggtgcggtcactgaactaa

SEQ ID NO: 221576 - DNA, 615 bp, Klebsiella pneumoniae
atgaatgcgataatcattgacgatcatccattggcacgtatcgccattcgcaaccttctcgacagcaacggtattaccgtcgcggcagagctcgacagcggcgctcatgccgtgcagaccgcggaaagcatgcagcctgacctgctcatcgtcgacgtcgatattccggagctcagcggtatcgaggtgctggagcagctgcgcaaacgccgctaccagggaacaatcatcatcatttccgctaagaatgaactgttctacggcaaacgcagcgccgactgcggagcaaatggttttgtgagtaaaaaagagggaatgaataatatcctcgccgcaatcgacgcagccaataatggctacagctatttccccttttcactggaacgcttctgcacccacggcatcaccgatcaggaccggctggatacgctgtcaacgcaggagatgaaggtgttccgctatattctcagcggcgtcgactacaccaccatcggcagcaaaatgaatatcagcaataaaacggtaagtacctataaggtccgtctgatggataaattaggctgcagcaccctgcttgagctatatgactttgcgcaacgcaataaaatagggtga

SEQ ID NO: 221577 - DNA, 3243 bp, Klebsiella pneumoniae
atggcggttcgtcttattttatccgtcgttgtcgggctggcgctgagcctctcgcctgccgcgtatgccatgaaacagctggagctgaagagccattctcatatcgcggcgatcgatatcccgcttagcggtaaggagaaagcatggctggcggcgcagcctacgctgaccgtcgggacctggcttcccgagaggacgcccatcgtctatgacggcgacgagaaaagttatcagggcattaacgccgactatctggcgctgatggcgcacagcctcggactgaaggtgattatccgccagtatgacaccgagcagcaggcgctcaccgccctggccgaccgccaggtggataccctgctcactcaggtggcgcaccgggatgcgctcgccccgggcctggatcaatccgcgccgctgcttaaaacctggccgacgctggtcacctcgctgaaatcccctctgccgccgctgaccactgaccgccgcgtcacgctggcctgcacccgcgattgcgcttttttcgatattattcagcaggcgtttcccaacgccaaaatcaccctttatgatagcgactatcaggctctcgcctcggtggtcagcggcgagaatcagtattttatcggcaacaacatcaccactggccactgcatctcgaaatatttctcgcaatcgctggttatcgcgcactattttcgtcagcaggagcaacacaaccgctttgtcacccgtgacgatcggccagagctgcatcaactcttcgaccgttttatccatgccgtggacagcgacaccgcgatgcggatcatgcaaaactggctcaaccgtggcgatctgtcgtttctcaataccccgcttacctttagccccgaagagcagcgctggctgcagaagcatcgtcgcgtccgcctgctggtgaacccctattttccgccatttaccctggtggataacgaggatgaactgcgcggcatcatggccgatatgctgaatattgtctcactccagaccggcctgcagtttgaccctattctggtgcgcaaccgtcaggctctggcaaagcgcatggaaaaagaggactgggcgatcatgcccgccgccaccctgaccccacagccgcaggcctacgtcaccctcagcgatccgctcattaacgtggcctttgtgctggtcgcccgcggcagcgcccccgaccagcatctgctgacgcgctcggcacggatcgccctgccggtcgggcctatcgccgcccatgatctgaaagcgcgttttccgctgattaactgggtggaaacggataacgttggcgtcgccatgaagatggtagaggaaggcgaagtggatgccgccgtagcctcggagctttccgcccgctatatgatcgaccactactatccacagggtctgcactacacccgcattgatggactccccgtcgcggccattcggctggccatcccgcgcgatgaaccggtgctggccgccattcttaacaaagcgctgcaggttattccgccacgggatattctgcagatgaccgagaagtggtcgaaaatctccagtcagcaaatagagaactggagccagtacagccgccagttttaccagctgatcgcctttgcgctggtgctgatcgccatcagcctcggctggggactctctctgtgtcgggaagtgcgcaaacgtaaagactcccagcagcggctcgaggaggagctggcgcagaaggaggccctctcctgtgcgctggagcgcgaaaaagacaaagcgattcaggcgacaaaagccaagagccgctttctggccagcatgagccacgagctgcgcacgccggtgagcgccatcgtcggctttctggagctgctggcgaaacctgagctgaacgtcggccagcgtaaagaggcgatcgagctggcggggtcgacggcgcaaaccctgctgggacttatcggcaatattcttgatatcgacaagattgaatcgggaaaataccaggttaccccgcagtggagcgatgtcgcacagttagtgtcgcagcagtgtcataccttcgacgcgctggcgcagcaaaagggcatcgatctgcactaccataacgcgctgcaggaagggaccatgctgtgggtcgacccgcaggcgctacggcaaatcctcaataatctcatcggcaatgcgctgaagtttaccgtcgaaggcgcaattcaggtctcctgccggctgacgccggcgaatgagacacagggagagttggccctcatggttagcgacagcggctgcgggatcagtgaagcagagcaggccaccctcttccaccgctatgtccaggcgcgccagggacgccagcagaccggctccggactggggctggtcatttgcaaagagctggttgcgctgatgcagggtcgcctggagatggtcagccgtccgggtgtggggaccactttcaccatcacgctgccggtcaaggcgagccgctgcgcgatccacgcgccgcaggcgtcgcccgccagaccgcaggctctacccgggctggcgatactgatagcggacgatcaccccaccaaccggctactgctcaagcgccagctcagcactatcggctatagcgtcgatgaagcctgcgacggtgaagaggcagagaataagctcgccagcaaacattacgatctgctgataacggacctcaatatgccgaagaaagatggcctggcgctggcggcctcgctacgccgtcgctatccgggcctggtaatttggggcgtgactgccagcgcgctgccgcagtcgcgggaggcgtgtctggccagcggcatgaatatgtgtctgtttaagccggtgtcggtccagacgctgagtcatgagctcagccgtttagcggtgggccgcgcatcacctcacgctacccggcacctgaagctcagcgtgctgagcgagaatacggggggagaccaggcgctgatgaatgagatactggagacgttccgcgatgcgtcggccgcggatttacaggctgccggacaggcaatcgcccggcatgagccgcagatctttctgcgggcgctgcaccgtctgcacggttcagcacaaattctggggattactgcgctacaacaactgtgcgccccttttgaggcaaagcggcctgattcgctgacgccggcaagctgtctggaggtggtacagcgcatcaccggcatcatgcgcgagatcgatggcgaaatcgacgccctgatcggccgctag

SEQ ID NO: 221578 - DNA, 633 bp, Klebsiella pneumoniae
atgaaaaaagtcattctggcgagcctgctggcaaccatgatgagtacctctccggtatgggcaacagatagcgcgacggcagcgccagccgcggcagccacgacgcaggtacagaaagaagccgccgatgtgctgcaggtggcggtgcagggcgcgaatgcgatgcgcgacatccagttcgcccgtctggcgctgttccatggccagccggatagcgccaaaaaactgacagacgacgccgccgcgctgctggccgccgatgatgccagctgggcgaagtttctgaaaactgatgctaaagccaaaatgatcgccgatcgctatgtgatcattaacgcctctatcgccctgtctgaagactatgtggccacgccggaaaaagagagcgctatccaatccgccaacgaaaagctggcgaaaggcgatcagaaaggggctatcgataccctgcgtctggccggtattggcgtgattgagaaccagtatctgatgccgcttaaccagacccgtaaggcggtagcgcaggcgcaagaactgctgaaagccggtaaatattacgaagcgaatctggtgctgaagggcgctgaagagggcattgtggtggatagcgagatgctggtggcaggcaactga

SEQ ID NO: 221579 - DNA, 576 bp, Klebsiella pneumoniae
atgtttatgtttagccattacaccttaaatgcgtttagcccacgcgtcttcattcgatataaacggcatgcctgcctgatggcggtattgctgtttatctgcggagcctgttgtctggcctggccgttggtcgccggctggtatctcgccacagtaaccggcatgttattgatgatctgcggcttctattcgctgtacagcctgattgtcttccgccagcagcactggaaatcacgcctggtggcgctgatcttcgccatcgcctggatcgtgctcggcctgagctttgtcgtcaatcctctcaacggtatgagcagtctggccattttatttggctttttatttgttctcggcggtatttcccgcatcgttaacggatgtctaacccgcaaacaaagcggcgctggctggaatatttttatcggcctgttggatttacttatcgcttgcctgtggctggccatgaacccgcagcaaagctggttatttattaccgcctttatcggcgttgaaatgatatttagcgccatcggcttgttggtcctgcgcaataaaatgaagcacgctcaggcttaa

SEQ ID NO: 221580 - DNA, 306 bp, Klebsiella pneumoniae; identical to SEQ ID NO: 209982

SEQ ID NO: 221581 - DNA, 804 bp, Klebsiella pneumoniae
atgaaccagacttctaccttaaccgggcagtgcgtggccgagtttcttggcaccggattgctcattttcttcggcgcgggctgcgtcgctgcgctgcgggtcgccggggccagctttggtcagtgggagatcagtattatctggggccttggcgtcgccatggccatctacctgacggccggtgtctccggcgcgcaccttaatccggcggtgaccattgccctgtggctgttcgcctgttttgaacgccgcaaggtgctgccgtttattgttgcccagacggccggggccttctgcgccgccgcgctggtgtatgggctctatcgccagctgtttctcgatcttgaacagagtcagcatatcgtgcgcggcactgccgccagtcttaacctggccggggtcttttccacgtacccgcatccacatatcacttttatacaagcgtttgccgtggagaccaccatcacggcaatcctgatggcgatgatcatggccctgaccgacgacggcaacggaattccgcgcgggccgctggcgccgttgctgattggcttgctgatcgccgtgatcggcgcgtcgatggggccgctaaccggctttgcgctgaatccggcgcgcgacttcggcccaaaactgtttaccagtctggccgggtggggctcgatcgcttttaccggtgggctggcgatcccttactttctggtgccgctgctggcgccggtggtgggggcgattatcggggcgtttttgtatcgcaagcttatcggccgccatctgccgtgcgaatgcggtattgatgagtaa

SEQ ID NO: 221582 - DNA, 1824 bp, Klebsiella pneumoniae
atgccgttaatagccgggattgatatcggcaacgccaccaccgaggtggcgctggcgtccgacgacccgcaggcgagggcgtttgttgccagcgggatcgtcgcgacgacgggcatgaaagggacgcgggacaatatcgccgggaccctcgccgcgctggagcaggccctggcgaaaacaccgtggtcgatgagcgatgtctctcgcatctatcttaacgaagccgcgccggtgattggcgatgtggcgatggagaccatcaccgagaccattatcaccgaatcgaccatgatcggtcataacccgcagacgccgggcggggtgggcgttggcgtggggacgactatcgccctcgggcggctggcgacgctgccggcggcgcagtatgccgaggggtggatcgtactgattgacgacgccgtcgatttccttgacgccgtgtggtggctcaatgaggcgctcgaccgggggatcaacgtggtggcggcgatcctcaaaaaggacgacggcgtgctggtgaacaaccgcctgcgtaaaaccctgccggtggtagatgaagtgacgctgctggagcaggtccccgagggggtgatggcggcggtggaagtggccgcgccgggccaggtggtgcggatcctgtcgaatccctacgggatcgccaccttcttcgggctaagcccggaagagacccaggccatcgtccccatcgcccgcgccctgattggcaaccgttccgcggtggtgctcaagaccccgcagggggatgtgcagtcgcgggtgatcccggcgggcaacctctacattagcggcgaaaagcgccgcggagaggccgatgtcgccgagggcgcggaagccatcatgcaggcgatgagcgcctgcgctccggtacgcgacatccgcggcgaaccgggcacccacgccggcggcatgcttgagcgggtgcgcaaggtaatggcgtccctgaccggccatgagatgagcgcgatatacatccaggatctgctggcggtggatacgtttattccgcgcaaggtgcagggcgggatggccggcgagtgcgccatggagaatgccgtcgggatggcggcgatggtgaaagcggatcgtctgcaaatgcaggttatcgcccgcgaactgagcgcccgactgcagaccaaggtggtggtgggcggcgtggaggccaacatggccatcgccggggcgttaaccactcccggctgtgcggcgccgctggcgatcctcgacctcggcgccggctcgacggatgcggcgatcgtcaacgcggaggggcagataacggcggtccatctcgccggggctgggaatatggtcagcctgttgattaaaaccgagctgggcctcgaggatctttcgctggcggaagcgataaaaaaatacccgctggccaaagtggaaagcctgttcagtattcgtcacgagaatggcgcggtggagttctttcgggaagccctcagcccggcggtgttcgccaaagtggtgtacatcaaggagggcgaactggtgccgatcgataacgccagcccgctggaaaaaattcgtctcgtgcgccggcaggcgaaagagaaagtgtttgtcaccaactgcctgcgcgcgctgcgccaggtctcacccggcggttccattcgcgatatcgcctttgtggtgctggtgggcggctcatcgctggactttgagatcccgcagcttatcacggaagccttgtcgcactatggcgtggttgccgggcagggcaatattcggggaacagaagggccgcgcaatgcggtcgccaccgggctgctactggccggtcaggcgaattaa

SEQ ID NO: 221583 - DNA, 426 bp, Klebsiella pneumoniae
atgagcgagaaaaccatgcgcgtgcaggattatccgttagccacccgctgcccggagcatatcctgacgcctaccggcaaaccattgaccgatattaccctcgagaaggtgctctctggcgaggtgggcccgcaggatgtgcggatctcccgccagacccttgagtaccaggcgcagattgccgagcagatgcagcgccatgcggtggcgcgcaatttccgccgcgcggcggagcttatcgccattcctgacgagcgcattctggctatctataacgcgctgcgcccgttccgctcctcgcaggcggagctgctggcgatcgccgacgagctggagcacacctggcatgcgacagtgaatgccgcctttgtccgggagtcggcggaagtgtatcagcagcggcataagctgcgtaaaggaagctaa

SEQ ID NO: 221584 - DNA, 585 bp, Klebsiella pneumoniae
gtgcaacagacaacccaaattcagccctcttttaccctgaaaacccgcgagggcggggtagcttctgccgatgaacgtgccgatgaagtggtgatcggcgtcggccctgccttcgataaacaccagcatcacactctgatcgatatgccccatggcgcgatcctcaaagagttgattgccggggtggaagaagaggggcttcacgcccgggtggtgcgcattctgcgcacgtccgacgtctcctttatggcctgggatgctgccaacctgagcggctcggggatcggcatcggtatccagtcgaaggggaccacggtcatccatcagcgcgatctgctgccgctcagcaacctggagctgttctcccaggcgccgctgctgacgctggagacctaccggcagattggcaaaaacgccgcgcgctatgcgcgcaaagagtcaccttcgccggtgccggtggtgaacgatcagatggtgcggccgaaatttatggccaaagccgcgctatttcatatcaaagagaccaaacatgtggtgcaggacgccgagcccgtcaccctgcacgtcgacttagtaagggagtga

SEQ ID NO: 221585 - DNA, 1668 bp, Klebsiella pneumoniae
atgaaaagatcaaaacgatttgcagtactggcccagcgccccgtcaatcaggacgggctgattggcgagtggcctgaagaggggctgatcgccatggacagcccctttgacccggtctcttcagtaaaagtggacaacggtctgatcgtcgaactggacggcaaacgccgggaccagtttgacatgatcgaccggtttatcgccgattacgcgatcaacgttgagcgcacagagcaggcaatgcgcctggaggcggtggaaatagcccgcatgctggtggatattcacgtcagccgggaggagatcattgccatcactaccgccatcacgccggccaaagcggtcgaggtgatggcgcagatgaacgtggtggagatgatgatggcgctgcagaagatgcgtgcccgccggaccccctccaaccagtgccacgtcaccaatctcaaagataatccggtgcagattgccgctgacgccgccgaggccgggatccgcggcttctcagaacaggagaccacggtcggtatcgcgcgctatgcgccgtttaacgccctggcgctgttggtcggttcgcagtgcggccgtcccggcgtgttgacgcagtgctcggtggaagaggccaccgagctggagttgggcatgcgtggcttaaccagctacgccgagacggtgtcggtctacggcactgaagcggtatttaccgacggcgatgatactccgtggtcaaaggcgttcctcgcctcggcctacgcctcccgcgggttgaaaatgcgctacacctccggcaccggatccgaagcgctgatgggctattcggagagcaagtcgatgctctacctcgaatcgcgctgcatcttcattaccaaaggcgccggggttcaggggctgcaaaacggcgcggtgagctgtatcggcatgaccggcgctgtgccgtcgggcattcgggcggtgctggcggaaaacctgatcgcctctatgctcgacctcgaagtggcgtccgccaacgaccagactttctcccactcggatattcgccgcaccgcgcgcaccctgatgcagatgctgccgggcaccgactttattttctccggctacagcgcggtgccgaactacgacaacatgttcgccggctcgaacttcgatgcggaagattttgatgattacaacatcctgcagcgtgacctgatggttgacggcggcctgcgtccggtgaccgaggcggaaaccattgccattcgccagaaagcggcgcgggcgatccaggcggttttccgcgagctggggctgccgccaatcgccgacgaggaggtggaggccgccacctacgcgcacggtagcaacgagatgccgccgcgtaacgtggtggaggatctgagtgcggtggaagagatgatgaagcgcaacatcaccggcctcgatattgtcggcgcgctgagccgcagcggctttgaggatatcgccagcaatattctcaatatgctgcgccagcgggtcaccggcgattacctgcagacctcggccattctcgatcggcagttcgaggtggtgagtgcggtcaacgacatcaatgactatcaggggccgggcaccggctatcgcatctctgccgaacgctgggcggagatcaaaaatattccgggcgtggttcagcctgacaccattgaataa

SEQ ID NO: 221586 - DNA, 429 bp, Klebsiella pneumoniae
atgaacaagagccaacaagttcagacaatcaccctggccgccgcccagcaaatggcggcggcggtggaaaaaaaagccactgagatcaacgtggcggtggtgttttccgtggttgaccgcggaggcaacacgctgcttatccagcggatggacgaggccttcgtctccagctgcgatatttccctgaataaagcctggagcgcctgcagcctgaagcaaggtacccatgaaattacgccagcggtccagccaggacaatctctgtacggtctgcagcttaccaaccaacagcgaattattatttttggcggcggcctgccagttatttttaatgagcaggtaattggcgccgtcggcgttagcggcggtacggtcgagcaggatcaattattagcccagtgcgccctggattgtttttccgcattataa

SEQ ID NO: 221587 - DNA, 1164 bp, Klebsiella pneumoniae
atgagctatcgtatgtttgattatctggtgccaaacgttaacttttttggccccaacgccatttccgtagtcggcgaacgctgccagctgctgggggggaaaaaagccctgctggtcaccgacaaaggcctgcgggcaattaaagatggcgcggtggacaaaaccctgcattatctgcgggaggccgggatcgaggtggcgatctttgacggcgtcgagccgaacccgaaagacaccaacgtgcgcgacggcctcgccgtgtttcgccgcgaacagtgcgacatcatcgtcaccgtgggcggcggcagcccgcacgattgcggcaaaggcatcggcatcgccgccacccatgagggcgatctgtaccagtatgccggaatcgagaccctgaccaacccgctgccgcctatcgtcgcggtcaataccaccgccggcaccgccagcgaggtcacccgccactgcgtcctgaccaacaccgaaaccaaagtgaagtttgtgatcgtcagctggcgcaacctgccgtcggtctctatcaacgatccgctgctgatgatcggtaaaccggccgccctgaccgcggcgaccgggatggatgccctgacccacgccgtagaggcctatatctccaaagacgctaacccggtgacggacgccgccgccatgcaggcgatccgcctcatcgcccgcaacctgcgccaggccgtggccctcggcagcaatctgcaggcgcgggaaaacatggcctatgcttctctgctggccgggatggctttcaataacgccaacctcggctacgtgcacgccatggcgcaccagctgggcggcctgtacgacatgccgcacggcgtggccaacgctgtcctgctgccgcatgtggcgcgctacaacctgatcgccaacccggagaaattcgccgatatcgctgaactgatgggcgaaaatatcaccggactgtccactctcgacgcggcggaaaaagccatcgccgctatcacgcgtctgtcgatggatatcggtattccgcagcatctgcgcgatctgggggtaaaagaggccgacttcccctacatggcggagatggctctgaaagacggcaatgcgttctcgaacccgcgtaaaggcaacgagcaggagattgccgcgattttccgccaggcattctga

SEQ ID NO: 221588 - DNA, 354 bp, Klebsiella pneumoniae
atgtcgctttcaccgccaggcgtacgcctgttttacgatccgcgcgggcaccatgccggcgccatcaatgagctgtgctgggggctggaggagcagggggtcccctgccagaccataacctatgacggaggcggtgacgccgctgcgctgggcgccctggcggccagaagctcgcccctgcgggtgggtatcgggctcagcgcgtccggcgagatagccctcactcatgcccagctgccggcggacgcgccgctggctaccggacatgtcaccgatagcgacgatcatctgcgtacgctcggcgccaacgccgggcagctggttaaagtcctgccgttaagtgagagaaactga

SEQ ID NO: 221589 - DNA, 531 bp, Klebsiella pneumoniae
atgtatcgtatctatacccgcaccggggataaaggcaccaccgccctgtacggcggcagccgcatcgagaaagaccatattcgcgtcgaggcctacggcaccgtcgatgaactgatatcccagctgggcgtctgctacgccacgacccgcgacgccgggctccgggaaagcctgcaccatattcagcagacgctgttcgtgctgggggctgaactggccagcgatgcgcggggcctgacccgcctgagccagacgatcggcgaagaggagatcaccgccctggagcggcttatcgaccgcaatatggccgagagcggcccgttaaaacagttcgtgatcccggggaggaatctcgcctctgcccagctgcacgtggcgcgcacccagtcccgtcggctcgaacgcctgctgacggccatggaccgcgcgcatccgctgcgcgacgcgctcaaacgctacagcaatcgcctgtcggatgccctgttctccatggcgcgaatcgaagagactaggcctgatgcttgcgcttga

SEQ ID NO: 221590 - DNA, 1926 bp, Klebsiella pneumoniae
atgactgttcagactcaggataccgggaaggcggtctcttccgtcattgcccagtcatggcaccgctgcagcaagtttatgcagcgcgaaacctggcaaacgccgcaccaggcccagggcctgaccttcgactccatctgtcggcgtaaaaccgcgctgctcaccatcggccaggcggcgctggaagacgcctgggagtttatggacggccgcccctgcgcgctgtttattcttgatgagtccgcctgcatcctgagccgttgcggcgagccgcaaaccctggcccagctggctgccctgggatttcgcgacggcagctattgtgcggagagcattatcggcacctgcgcgctgtcgctggccgcgatgcagggccagccgatcaacaccgccggcgatcggcattttaagcaggcgctacagccatggagtttttgctcgacgccggtgtttgataaccacgggcggctgttcggctctatctcgctttgctgtctggtcgagcaccagtccagcgccgacctctccctgacgctggccatcgcccgcgaggtgggtaactccctgcttaccgacagcctgctggcggaatccaaccgtcacctcaatcagatgtacggcctgctggagagcatggacgatggggtgatggcgtggaacgaacagggcgtgctgcagtttctcaatgttcaggcggcgagactgctgcatcttgatgctcaggccagccaggggaaaaatatcgccgatctggtgaccctcccggcgctgctgcgccgcgccatcaaacacgcccgcggcctgaatcacgtcgaagtcacctttgaaagtcagcatcagtttgtcgacgcggtgatcaccttaaaaccgattgtcgaggcgcaaggcaacagttttattctgctgctgcatccggtggagcagatgcggcagctgatgaccagccagctcggtaaagtcagccacacctttgagcagatgtctgccgacgatccggaaacccgacgcctgatccactttggccgccaggcggcgcgcggcggcttcccggtgctactgtgcggcgaagagggggtcgggaaagagctgctgagccaggctattcacaatgaaagcgaacgggcgggcggcccctacatcgccgtcaactgccagctatatgccgacagcgtgctgggccaggactttatgggcagcgcccctaccgacgatgaaaatggtcgcctgagccgccttgagctggccaacggcggcaccctgtttctggaaaagatcgagtatctggcgccggagctgcagtcggctctgctgcaggtgattaagcagggcgtgctcacccgcctcgacgcccggcgcctgatcccggtggatgtgaaggtgattgccaccaccaccgtcgatctggccaatctggtggaacagaaccgctttagccgccagctgtactatgcgctgcactcctttgagatcgtcatcccgccgctgcgcgcccgacgcaacagtattccgtcgctggtgcataaccggttgaagagcctggagaagcgtttctcttcgcgactgaaagtggacgatgacgcgctggcgcagctggtggcctactcgtggccggggaatgattttgagctcaacagcgtcattgagaatatcgccatcagcagcgacaacggccacattcgcctgagtaatctgccggaatatctcttttccgagcggccgggcggggatagcgcgtcatcgctgctgccggccagcctgacctttagcgccatcgaaaaggaagctattattcacgccgcccgggtgaccagcgggcgggtgcaggagatgtcgcagctgctcaatatcggccgcaccaccctgtggcgcaaaatgaagcagtacgatattgacgccagccagttcaagcgcaagcatcaggcctag

SEQ ID NO: 221591 - DNA, 1098 bp, Klebsiella pneumoniae
atgctaaaagttattcaatctccagccaaatatcttcagggtcctgatgctgctgttctgttcggtcaatatgccaaaaacctggcggagagcttcttcgtcatcgccgacgatttcgtaatgaagctggcgggagagaaagtggtgaatggcctgcagagccacgatattcgctgccatgcggaacggtttaacggtgaatgcagccatgcggaaatcaaccgtctgatggcgattttgcaaaaacagggctgccgcggcgtggtcgggatcggcggtggtaaaaccctcgataccgcgaaggcgatcggttactaccagaagctgccggtggtggtgatcccgaccatcgcctcgaccgatgcgccaaccagcgcgctgtcggtgatctacaccgaagcgggcgagtttgaagagtatctgatctatccgaaaaacccggatatggtggtgatggacacggcgattatcgccaaagcgccggtacgcctgctggtctccggcatgggcgatgcgctctccacctggttcgaggccaaagcttgctacgatgcgcgcgccaccagcatggccggaggacagtccaccgaggcggcgctgagcctcgcccgcctgtgctatgatacgctgctggcggagggcgaaaaggcccgtctggcggcgcaggcaggggtagtgaccgaagcgctggagcgcatcatcgaggcgaacacttacctcagcggcattggctttgaaagcagtggcctggccgctgcccatgcaatccacaacggtttcaccattcttgaagagtgccatcacctgtatcacggtgagaaagtggccttcggtaccctggcgcagctggtgctgcagaacagcccgatggacgagattgaaacggtgctgggcttctgccagcgcgtcggcctgccggtgacgctcgcgcagatgggcgtcaaagaggggatcgacgagaaaatcgccgcggtggcgaaagctacctgcgcggaaggggagaccatccataatatgccgtttgcggtgaccccggagagcgtccatgccgctatcctcaccgccgatctgttaggccagcagtggctggcgcgttaa

SEQ ID NO: 221592 - DNA, 1071 bp, Klebsiella pneumoniae
atgaaaaagctgattaaccgtgttgaagatgtactgaatgaacaattacaggggctggctaaagcccatccgcagctgaccctgcatcaggacccgctgtatgtgacccgcaccgacgcgccggtggctggcaaggtggccctgctctccggcggcggcagcggacatgaaccgatgcactgcggctatatcggccagggcatgctctccggcgcctgtccgggggaaatcttcacctcgccgacgccggacaaaatgtttgaatgcgcgatgcaaattgacggcggcgaaggcgtcttgctaattatcaaaaactataccggcgacatcctgaattttgagaccgccaccgaactgctgcatgagagcggcattaaagtcaccaccgtggtggtcgacgacgacgtggcagtgaaagacagcctctataccgccggtcgtcgcggcgtcgccaacaccgtactgatcgaaaaactggtcggcgccgccgccgagcgcggcgactcgctggaagcctgcgctgaactgggccgccgcctgaacaatctcggccactcgattggtatcgcccttggcgcctgcaccgtaccggctgccgggcagccatcctttacgctgaaagatgacgagatggagttcggcgtcggcattcacggcgagccgggcatcgaccgccgccgcttcagctcgctggaccaaaccgtcgatgagatgttcgataccctgctggaaaacggcgcttacagccgcacgctgcgccagtgggataccgtcaagggcgcgtggcaggaagtgcagcagagcaaaaccgcgctgcaaaacggcgaccgggttatcgcgctggttaataacctcggcgccactccgctttccgaactgtatggcgtgtataaccgccttgcccagcgctgcgaagcgtccggcatcatcatcgaacgcaacctcatcggcagctactgtacttcgctggatatggcgggcttctccatcactctgctgaaagtggatgacgagacgctgacgctatgggacgccccggttcacaccccggcgctgaactggggaaactaa

SEQ ID NO: 221593 - DNA, 1422 bp, Klebsiella pneumoniae; identical to SEQ ID NO: 136693

SEQ ID NO: 221594 - DNA, 1650 bp, Klebsiella pneumoniae
atgtctcaattcttttttaaccagcgcgccagcctcgtcaacgatgtgattgagggtaccattatcgccagcccgtggaataacctcgcccgtctggagagcgacccggcgatccgggtggtggtccgtcgcgatctgaataaaaacaacgtggcggtgatctccggcggcggcgccggccatgaaccggcgcacgtcggctttattggtaaaggcatgctgaccgccgcggtctgcggcgatctgttcgcctcgccgagcgtcgacgcggtgctcaccgccattcaggcagtgaccggcgaggcgggctgcctgctgatcgtcaaaaactacaccggcgatcggcttaacttcggtctggcggcggagaaagcgcgccgactcggctacaacgtggagatgctgatcgtcggcgacgatatttcgctgccggataacaaacagccgcgcggcatcgccgggaccattctggtgcataaagtggcgggctatttcgccgagcgcggcttcaacctcgccaccgtcctgcgtgaagcgcaatacgccgccagccataccgccagcatcggggtggcgctggccagctgccacctgccgcaggaagccgacagcgcgccgcgccatcaggccggtcacgccgagctgggaatgggcatccacggtgagccgggcgcctcgacgatcgccacgcaaaacagtgcggaaatcgttaacctgatggtggaaaaactgaccgccgccctaccggaaaccggccgcctggcggtgatgctcaataacctcggcggcgtgtcggtggctgagatggcgattctgacccgcgagctggccaacaccccgctgcaggcgcgcattgactggttaataggcccggcctcgctggtgacggcgctggatatgaaaggcttctcgctgaccaccatcgtgctggaggagagtattgagaaagcgctgctttcggatgtggaaaccgccagctggcagaagccggtgcagccgcggactatcaacgtcgtgccgtccaccctcgacagcgcccgggtggattttacaccctcggccaacccacaggtgggcgattacgtggcgcaggtgaccggcgccctcatcgatcttgaagaacatctcaacgcgctggatgccaaagtaggcgacggcgataccggctccaccttcgccgccggggcgcgcgagattgccgagcggctcgagcgtcagcagctgcccctgaacgatctgccaacgctcttcgcgctgatcggcgaacgcctgacggtggtgatgggcggctccagcggggtattgatgtctatcttcttcaccgctgccgggcagaagctggggcaaggcgccagcgtggccgaggcgctgaacgccggtctggaacagatgaagttttacggcggcgccgatgagggagaccggacgatgatcgacgctctgcagccggccctggcggcgctgctggccgaaccggagaatctgcaggccgctttcgccgcggcgcaggccggggcggatcgcacctgccagtcaagcaaagccggcgccggacgcgcgtcctatctcaacagcgatagcctgctcggcaacatggaccccggcgcccacgcggtggcgatggtgtttaaggcgctggcggaacgctaa

SEQ ID NO: 221595 - DNA, 777 bp, Klebsiella pneumoniae; identical to SEQ ID NO: 209966

SEQ ID NO: 221596 - DNA, 555 bp, Klebsiella pneumoniae
atgcgacatcatcatgaagaagggcgtgggccacgcgggcgccacggtgatcccagcgaacacggcgaccatggccgccgccgcggcggacgtcgccagcgtttctttggccacggcgaactgcggctgatcattctggatatcctcagccgcagcgccagccatggctatgagctgatcaaagagatcgaaacgcttacccaggggaactacagccccagcccgggggtgatctatccgacgctggatctgctccaggaccagggccttatcagcgtggaagacgacaacggacgcaagaaaatccttatcagcgaggaaggaaaacagctgcacgccgagaaccaggagcacctggcccatatccaggagcgtctgcaggcgcggatggtcggctgcgagctgcgccgcgatccgcagatgaagcgcgcgctggaaaacttcaaagcggtcctcgacctgaaagtgaaccagcaggccagcagtgccgcccagctcaagcagatcatcggcattattgaccgggcggcgatggagatctctcagctcgactaa

SEQ ID NO: 221597 - DNA, 1380 bp, Klebsiella pneumoniae
ttgaacaggttaccttccagcgcatcggctctggcctgcagcgcacacgcactgaatctcattgaaaagcgcacgcttgatcatgaggaaatgaaagcacttaaccaggaggtcagggaatactttaaagagcatgtgaatccggggtttttagagtatcgaaaatcggtcacagccggcggggattacggagccgtagagtggcaagcgggagggttaaatacgcttgtcgacacccagggacaggagtttatcgactgccttggtgggtttggcatcttcaatgtagggcaccgtaatccagttgtggtatccgccgtcgagaatcaactcgcgaaacaaccgcttcacagtcaggagctgctggacccgctgcgggcgatgctggcgaaaacgctggcggccttaacgcccggcaagctcaaatacagtttcttctgcaacagcggtaccgaatcggtagaggcggccatcaagctggcgaaagcctatcagtcgccgcgcggtaaatttaccttcatcgccaccagcggcgcgttccacggtaaatcgttaggcgcgctgtcggccaccgcgaaatcgaccttccgcaaaccctttatgccgctgctgccgggcttccgccacgtgccgttcggcgatatcaacgccatgcgcaccatgctgagcgagtgcaagaaaaccggcgacgacgtcgcggcggtgatcctcgagccgattcagggcgaagggggcgtgatcctcccgccagcggggtatttgccggcggtgcgtaaactgtgcgacgagtttggcgcattgctgatcctcgacgaagtgcagaccggcatgggccgcaccggcaagatgttcgcctgcgagcatgagaacgtccagccggacattctgtgtctggcgaaagcgctcggcggcggtgtgatgccgatcggcgcgacggtggcgacggaagaggtcttctcggtgctcttcgataacccgttcctgcacaccaccaccttcggcggcaacccgttggcctgtgcggcggcgctggcgacgatcaacgtgctgctgacgcaaaacctgccggcgcaggcggcgcagaaaggcgatatgctgctggacggtttccgcctgctggcgcaggagtatccggacctggtgaatgaagtgcgcgggaaaggcatgctgatggccattgagtttgtcgataacgagattggctacgactttgccagcgagatgttcagacagcgggtgctggtcgccgggacgttaaacaacgccaagacgatccgcattgaaccgccgctgacgctcacccttgagcagtgcgaacaggtgctgaaggcggcgcgcaaggcgctggcggccctgcgcgtttcggtcgaagaagcgtaa

SEQ ID NO: 221598 - DNA, 297 bp, Klebsiella pneumoniae; identical to SEQ ID NO: 209963

SEQ ID NO: 221599 - DNA, 888 bp, Klebsiella pneumoniae
atggcagatttagacgatatcaaagaggggaaggacttcggcatcgaccgcccgcagcagaatacgctgtataccctgaaaggctgcggctcgctggattggggcatgcagtcgcggctggcgcgcatttttaatccgcacagcaaccgcacggtgatgctggccttcgatcacggctacttccaggggccaacgaccgggcttgagcgtatcgacctgtcgattgcgccgctgtttgccgacaccgacgtgctgatgtgcacccgcggcgtactgcgcagccaggtaccggcggccaccaataagccggtggtgctccgcgcctccggcggcaattcgattttgagcgaactctccaacgaatgcgtggcggtggcgatggaagacgcgctgcggctcaacgtatgcgcggtggcggcgcaggtctatatcggcagcgaatacgaacatcagtcgatcaataacatcatcaaactggtggacgccggcaatcgctacggtatgccggtcctggcggttaccggcgtcggcaaagagatgacccgcgatgcgcgctacttctcgctggccagccggattgccgccgaaatgggggcgcagtttgtgaagacctatttcgttgaggaaggctttgaaaaagtgaccgccagctgtccggtgccgatcgttatcgccggcggtaaaaaactgccggagcatgaggcgctggagatgtgctggcgggcgatcgaccagggcgcgtccggggtggatatggggcgcaacatcttccagtccagcgccccgcgcgcgatgcttaaggcggtgaaaaaggtggtgcatgagaatctgaacgcgcgcgaagcgtatcagttctggcaggaagagaaacagggagagctgaaatga

SEQ ID NO: 221600 - DNA, 1002 bp, Klebsiella pneumoniae
atgaaattaaaactgatcgtgctggcgctggcgatgagcgtggttaccgcgcaggcggcggaccgcatcgcctttattcctaagctggtcggcgtcggcttctttaccagcggcggcaacggcgcgaaagaggcggggaaagcgctgggcgtggatgtcacctatgacggcccaaccgagcccagtgtctccggccaggtgcagcttatcaacaacttcgtcaaccagggctacaacgcgattatcgtttccgccgtctcgccggacggcctgtgtccggcgctgaagcgggcgatgcagcgcggggtgaaagtcctgacctgggattccgataccaagccggagtgccgcagcatctatatcaatcagggcacgccgcagcagcttggcggcctgctggtcgagatggcggaaaagcaggtgacgaagcctactgccaaggtagcgtttttctactccagcccgacggtgaccgaccagaaccagtgggtgaaggaagccaaagccaaaatcgaaaaagagcatccgcagtggcaaatcgtcaccacccagtttggctataacgatgccaccaaatcgctacaaaccgccgaggggatcttaaaagcctatccggatctcgacgccattatcgcgccggatgccaatgcgctgccggcggcggcgcaggcggcagagaacctcaagcgtcagggcgtggcgatcgtcggctttagtacgccgaacgtgatgcgtccgtacgttgagcgcggcacggtgaaagcgttcggcctgtgggatgtggttcagcagggcaaaattgcggttaacgtcgccgatcgattactgaaaaagggcgatcttaacgtaggcgacagcgttgaggtgaaagatatcggctcgctgaaggtcgaaccgaacagcgtgcagggctatcagtatgaggcgaagggcaacggtatcgtgctgctgccggagcgcgtggtgttcagcaaagagaacatcaacaactacgacttctga

SEQ ID NO: 221601 - DNA, 999 bp, Klebsiella pneumoniae
atgaagctgaagcttaactgggaaagcgcgctgctggcgttgctgatcgtggagatcctgctgttcggcgcgctgaatccgcgcatgctggatctcaatatgctgctctttagcaccagcgactttatctgcatcggcatcgtcgcgctgccgctgacgctggtgatcatcagcggcgggatcgatatttcgctgggctcgaccatcggcctgtgcgccatcgccctcggggtgatgacccaggcgggctggccgctgtggctcgcggtatcgctgacgttgctcttgggactgctgtgcgggttattcaacgccgcgctgatccactacaccggcatcagcccgctggtgatcacgcttggtacgctgtatctgtacggcggcggcgcgctgctgctttccgggatggccggcgcgaccggttacgaggggattggcggttttcccgatagcttcaccgccttcgccaatttaaccctcgccggactgccgctgccgctggtgctgttcgcgattatcacctttttcttctggctgctgacccatcgcgggcgctttggccgccacctctttttactcgggcaaaacccgcgcgccgcgcgctatgccgcgctgtcggtgaacggcatcccgtacgtgctgtatggcctggttggcgtcgcctcggcggtcgcggcgctggtgatggtctcctatttcggctcggcacgttcggatttaggccgcgacctgctgatgccggcgctgaccgcggcggtgctcggcggggccaatatttacggcggctcgggatcgatactgggtaccgcgctggcggcattgctggtggggtatctgcaacagggtttacagatggtcggcatccccaaccaggtgtcgagcgcgctgtcaggggcgctgttggttgtggtggtgatggggcgttcgctgagcctgcaccgtgaatgggtgcgcgcgacctggcggcgtcttttctcgcataaaacaatcggagcataa

SEQ ID NO: 221602 - DNA, 1035 bp, Klebsiella pneumoniae
atgaaaacgttactcaagaatcgcgaactgagcgccttctttgccatcgtggcgctctttgttgtgctggtggcgctcaatccggcctatttcagcctgcagaccctggcgatgattttcgccagctcgcaaatcctctgcctgctggcattgggcgcgaccctggtgatgctgacccgcaatattgacgtgtcggtaggttcaactgttgggctatgcgccatcgccgtcggcgtggcgctgaacaacggctacgggctggcgacggctatcgccttcgcgctggcgattggcgcgctggccggggcgtttaacggcctgctggtcgtggggctgcgcattccggcgatcgtcgcgacgctcggcacgctggggttgtatcgcggggtaatgctgctgtggaccggcgggaaatggatcgagggcttgcccgacagcctgaaatcgctctcggagcctgcgtttatcggcgtgtcgccgctgggctggctggtgctggcgctgctgctggcgggcggctggctgctgtcgcgcaccgcctttggtcgtgatttttacgccgttggcgataacctcgccgccgcgcgccagctgggcgtggcggtcaaccgcacgcggatgctggcctttactctcaacggtatgctggcggcctgcgccgggatcgtcttcgccgcgcagattggttttgtgcctaatcagaccggcagcggcctggagatgaaagccatcgccgcctgcgtactgggcgggatctcgctgcttggcggtaccggtacgctgctcggcgcgtttctcggcgcctttttccttacccaaatcgacaccgtactggtgctgttccgccttcccgcctggtggaatgactttatcgccggtctggtgctgctcggcgtgctggtgctcgatggccgcctgcgccaggcgctggcccgccatcagcgggcgctaaagtacagccgtttccagcccggtaacaaaggggggaaacaggttgcccgctttcccgaacgcaaaagcaaagaggtggcttaa

SEQ ID NO: 221603 - DNA, 1488 bp, Klebsiella pneumoniae
atgaagccactgcttgaagctcgccagatccgcaaacagttctccggcgttgccgtgctgaagggcatcgactttacgctatgcgcgggccaggtgcatgccctgatgggaggcaatggcgcgggtaaatcgacgctgatgaagatcatcgccggcgtcgaaaccccggatagcggtgaactgacgatcggcgaccgcgcgtttgcgcgcctcagcccggcgctggcccaccagctgggcatctatctggtgccgcaggagccgatgctgtttcccaacctcagcgtgcgcgagaacattctctttcgtttgccgaagcgggcggataccgccgcgcgactgcaggaaaaactgcagcaactgaactgccagatcaacctcgatgccagcgccagcacgctcgaggtagccgatcaacagatggtcgagatcctgcgcggcctgatgcgcgaagcgcggatcctgatccttgatgaacccaccgcctctttaaccccgggcgaaacggagaggttgtttagccagatccgcgcgttacaggcgctggacgtggggatcgtgtttatctcgcacaaactgcccgaaatccgccagcttgccagccatatttcggtgatgcgcgacggggcggtagtgctgagcggcgagaccgcaacttaccgcgatgagcaactgattagcgctatgacgccggccagccgcgaccatacgctgagcgacacgcaaaagctgtggctggcgctgccgggcaaccgccgcacccaggcgcaggattttcccgtgctgcgggtggaggatcttaccggagaaggctttatcgatctcaatctggagatccgcgccggggagatcgtcggcctcgccgggctggtgggatccgggcgcaccgaatttgctgaaaccttatacggcctgcgtccaccacgcgccgggcggatctggctggagaatcgcgagattagtaatgacagcacccgagcccggctggccagcgggctggtctatctgccggaagaccgccaggtctcggggctgtttcttgatgcgccggtgcgctggaacacggtgatgttcaatcagccgtcgtggtggcagcaggggaaacgggaggcggcggtggttgagcgctatcaccgggcgttggggatcaagctggccgatggcgatcagccggtgcgcactctctctggcggtaaccagcagaaggtgctgctggcgcgctgtctggaggccaacccgctgctgctaattgtcgatgagccgacgcgcggcgtggatgtctccgcccgcgccgatatctatcagctgctgaaaagcgtcgccgcgcaaaatgtggcagtgctgatgatctcctccgatctggatgagttcatcggcctggccgaccgggtgctggtgatgcatcagggccgctacagcggcgagctggcgcggcaggcggtgaccgtcgatcgcatgatgaccctggccttcggagggcaggcatga

SEQ ID NO: 221604 - DNA, 972 bp, Klebsiella pneumoniae
atgagcgaaaaacgcattacggaagagaaccgctacgccgggctggcgttagccgaggaagagctggtggcgcgggtggcgtggtgctactaccacgacggcctgacacaaaatgacatcggcgagcgtttggggctgccgcggctgaagatttcccgcctgctggagaaaggccgtcagtccggggtgatccgcgtgcagatcaactcgcgctatgagggctgtctggcactggaaagtgaactccagcagcgttttggcctcaagattgcccgcgtactgccggcgctcaacaccccgccgatgaatacccggctggggatcggcgcggcgcagtcgctgatgggtattctgcagccgggacagctgctggcggtcggcttcggcgaagccaccatgagctgcctgcagcatctcagcggctttatcggctcgcagcaggtgcggctggtgaccctctccggcggcgtcggcccctatatgaccggtattggccagctggatgccgcctgcagcgtcagcattatcccggcgccgctgcgggtctcttcggcggaggtcgccgagatcctgcgccgtgagtcgagcgtgcgcgacgtgatcctcgcggcgacggcggcggacgcggcggtggttggcatcggcgccatcgatcagcggcgcgacgcgaccatcctgcgctccggctatatcagcgagggcgaacagcttatgtacgcccgcaaaggcgcggtcggcgacattttaggttatttcctgcaggccgacggcaggccggtagaaggactggagatccatcgggaactgctcggcgtgacccttgatgagctagcgcagctgccgaccatcgttggcgtcgccgggggagaagaaaaagcgcaggcgatttatgccgctctgattggcaagcgcattaatggcctggtaacggaagagacaacagcacgcgcggtgcttaccctggcctcctga

SEQ ID NO: 221605 - DNA, 1599 bp, Klebsiella pneumoniae
atgagttacctgttagcgttagatgccgggaccggcagcattcgggcggttattttcgatcttaatggccgccagctggcggtaggccaggccgaatggaaacacctgagcgttgataacgtccccggctcgatggagttcgaccttaccaccaactggcagctggcctgccagtgcattcgccaggcgctcgacgccgcccggctctctgccgccgatattcagtctgtcgcctgctgttcgatgcgcgaaggcatcgttctctatgaccgcaacggcgaggccatctgggcctgcgccaacgtcgatgcccgcgccagccgcgaagtggcggagcttaaggagatccacgactatcgcttcgaatccgaggtatacgaggtctcgggacaaaccctggcgctcagcgccatgccgcgcctgctgtggctggcgcaccaccgccccgatatctaccgcaaagcggcaaccatcaccatgatcagcgactggctggcggcgaagctttccggcgagctggcggtcgacccgtcaaacgccggcaccaccggcatgctcgatctgttcagccgcgactggcgtccggcgctgctggatatggccgggctgcgcgccgatatgctgtcgccggtcaaagagaccggtaccctgctgggcgccgtcaccgaagcggcggcgcagcagagcggcctgcgcgccgggacgccggtggtgatgggcggcggcgacgtccagctcggctgcctgggccttggggtggtgcgcgccgggcaaactgcggtactcggcggcactttctggcagcaggtggtcaacctgccgcaggtgcgcaccgatccgcagatgaatattcgtgttaatcctcatgtcattcccggcatggcgcaggcggaatcgatcagcttctttaccggcctgaccatgcgctggtttcgcgacgccttctgcgctgaagaaaaactaattgccgagcggctcggcgtcgatgcctattcgctgctggaggagatggccagccgcgtccccgccggttcccacggcgtgatgcctattttttccgacgctatgcactttaagcagtggtaccacgccgcgccgtcgtttattaacctctccatcgatccggaaaagtgcaataaagcgaccctgttccgcgcgctggaagagaacgcggcgattgtctccgcctgcaacctcgcgcagatctcgcagttctccggggtgacattcgacagcctggtgtttgccggcggcggctctaaaggcgcgctgtggagccagatcctcagcgacgtcaccggcctgccggtgcgggtgccggtggtccgcgaagccaccgcgctgggctgcgccatcgccgccggaaccggcgccgggctgtatgacgatatggccagcaccggagagcggttagtgagctggcaccgcgagttcaccccaaatccgcagcatcgcgagctgtatcaggagatgatgagcaagtggcagacggtgtacgccgatcagcttggccttgtcgatagcgggctgacaacgtcgatgtggcaggcgccgggtctggagcgccgccagcgcgttgcgtcttccccctcaccctaa

SEQ ID NO: 221606 - DNA, 2022 bp, Klebsiella pneumoniae
atgagccgctatccgtcgcttttcgccccgcttgagctgggcttcacaacgctcaaaaaccgcgtgttgatgggctcaatgcacaccgggctggaagagctgccggacggcgcgcagcggctggcggccttttacgccgagcgcgcccgtcacggcgtggcgctgatcgtcaccggcggcatcgctccggcgccctctggcgtcaccatggccggcggcgcggtactcaacgatgccagccatctggcgcaccatcgccatattaccgacgcggtacatcaggaaggcggcaaaatcgctctgcagatcctgcacaccggccgttacagctaccagcccgcgctggtggccccctcggcgctacaggcgccgatcaaccgttttaccccccatgaactgagccacgatgagatcctgacgctgatcgatgattttgcccactgcgcccagctggcgcgcgaagcgggctatgacggcgtcgaggtgatgggctctgagggctatctgattaacgaatttctcgccgcgcgcactaaccagcgcgacgaccaatggggcggcgattatgccaggcgcatgcgtttcgccgtagaggtggtgaaggcggtgcgccagcgcgccggccacgatttcattatcatttaccgtctgtcgatgctcgatctggtcaacgacggcagcacgctggcggaagtcaccgaactggccaaagcgattgaagcggcgggagcgaccatcatcaacaccgggattggctggcacgaagcgcgcattccgaccatcgccacgccggtaccacgcggagctttcagctgggtcacccgcaagctgaagggcgcggtgtcgatcccgttgatcaccaccaaccgcattaacgatccgcaggtcgcggaggatattctcgcccgcggcgatgccgatatggtatcgatggcccgcccgttccttgccgacgccgaatttatatcaaaagcgcaggacgatcgcgccgatcagatcaacacctgcataggctgcaatcaggcgtgtctcgatcggatcttcgtcggcaaagtcacctcttgtctggtcaacccgcgcgcgtgtcatgaaaccctgatgccggtcctgcctgccaacgcgcctaaacagctggcggtggtcggcgccgggcctgccggtctggccttcgccgtaaacgctgccgcccgcggtcatcacgtcacattgtttgatgcgctcccggagatcggcggtcagtttaatatcgccaaacagatccccggcaaagaggagtttcacgagacgctgcgttactaccgcaccatgctcgatctgcatggtgtcgatctacgcctgaacacccgcgtcacgacagacgatctgctggcgttcgatgagacgatcctcgccaccggtatcgccccgcgcctgccggcgatcgacgggatcgatcatccaaaagtgctgagctaccttgatgtcttgcgcgataaagcgccggttggcgcgaaggtggcgattatcggctgcggcggtatcggcttcgacaccgcgatgtttttaagccagtcgggcgtggccaccagccaggatatcggcgagttctgccgcgaatggggtatcgataccagcctgcaaacggcgggagggctgagtgctgaaggcccgcaactgagtaaaagcccgcgacagattgtgatgctgcagcgcaaagccagcaaaccgggcgaagggctcggcaaaaccaccggctggatccaccgcgcgacgctgctggcgcgcggggtgaaaatgatcccggcggtcagctatgaaaagatcgatgatgaagggttacatgtcactatcggcggcgagcgccaactgctggcggtcgatcaggtggtgatctgcgccggtcaggagccgcgccgcgagctggcggatccgctgcgcgcggcggggaaaacggtgcatctcatcggcggttgcgacgtggcggcggagctggatgcgcgccgggcgattgcccagggcactaaactggcgctggcgatttag

SEQ ID NO: 221607 - DNA, 1131 bp, Klebsiella pneumoniae
atgagccaggcagagttaaacggtgagttattcacattagagcggttcccacctaacgctgaagaagaagcgcttcaggcatgggaagcggcggatgaatatctgctgcaacaggtgaatgacgtcgacggcctgacgctcatcttcaacgacggcttcggcgcgctcgcctgcgcgctggcggatcgcaacccggtcagcatcaacgactcctttatttccgagctggcgacccgccacaacctgcggatgaacggtatcgatgaagagagcgtgcgctttcaggatagcctgagcccgctaccggccgcgccggcgctggtgctgattaaggtgccaaaacagctggcgctgctggaacagcagctgcgcgccctgcgcgaagtagttacgccggaaacccgcatcatcgccgcggcgaaagcccgtgatgtgcacaactcgacgctggcgctgtttgaaaaaatcctcggcaccaccaccacctcgctggcgtggaaaaaagcgcgtctgatccactgcgttttcaccgctcctgaacttgccgatgcgccgcaaacctacagctggaagctggacggcacgccgtggaccatccataaccacgccaacgtttttgcccgcagcgggctggatatcggcgcgcgtttcttcctgcagcacttaccctctgatttagaaggcgagatcgccgatctcggctgcggcaatggggtgattggcctgcaggcgctggcgcaaaatccaaacgccagcgtgatgttcaccgatgagtcgcacatggcggtggcttccagccggttgaacgtcgagcgcaatctgccggacgatatcgcacgctgtgaattcatggtcaacaactcgctctccggcattgagcccgaccgctttacggcgattctgtgtaatccgccgttccatcagcaacacgctattaccgaccatatcgcctggcagatgtttaacgatgcccgccgcagcctgaaatacggcggcgagctgtacgtcgtcggcaaccgccacctcgattacttccgtaagctgaagcgcgcgtttggtaattgcacgacgattgcgacgaacaataagtttgtcattttgaaagcaaccaaggtgcgtaagcagcgctga

SEQ ID NO: 221608 - DNA, 708 bp, Klebsiella pneumoniae
atgcgtagcgtaacgccgtcaatcgaatctgcggtcagccgcctggcgccgggctttcgggcattaagtattgtggtggagagcgcgccggtggccgatcccgccgtcgcggagcaggcgctggccgaggcctgcctggcggtgcagcaggatgatgtaccctgggcgcaagcgcacctggctgcatgggatgaagcgttcagcgccttcggcgcgaaggcgaaacgtaccccctgttcggcgcaggcgctgcgcaagcgggtgctgaaagaggggagcctgccggccatcgatccggtggtggatatctacaacgcgatcagcattcgctatgccgtcccggttggtggggaaaatctggccgcctaccgtggcgaaccgcggctggccattgcccgcggcgatgagccattcgatacgctaaaatcggcagagccggtagtggaatatccggagccgggcgaagtcatctggcgggatgatataggcgtaacctgccgacgctggaactggcgacagggcgtgcgcacccggctggacagcggcgcgcagacgatgtggtttattctcgaaagcctgccggcgatgccgttgtcggccctgcatgaggcgggagagcggttggtaggttatctgcagcagctgatgcccggcgcccgcgcgtcgataacgctgctgcgagccgatgacgagggcgatctacgctga

SEQ ID NO: 221609 - DNA, 603 bp, Klebsiella pneumoniae
atgaacgtaaaagtcaatataacgaccgattcaggatctgatgtcgaccaggtaagtcgcgccgtcgccacgcggctgaaggcctaccgtaaagcgaaaaaaatgtcgctggacgagctgtcgcgccgggccagcatcagcaaaggtatgctggtcgagatggaaaaagaggccgccaatcccagcattgcgattctctgcaaactcgccgccgcgctgggcgtatcggtagcggatattgtcaatgtggcaagcgaacccgcgttgcatattattcccgccgagcagatccccaccctctggcaaggcccgctggggggcagcgccaggctcctcgccggcaccgccgggccgaatatgattgagctgtggcgctgggagatgcagcccggcgaagcctttgcctcgcccggccacccggcaacaaccttcgagctgctgcacgtggaagccggcgcgctgacgctgacgcttggcgagatctgccgcacggtggcggccggggaatcggcggtggcccgcaccgaaatagagcacggttaccgcaatgagggtaccgcgccgctggtctttaccatgaccgtggctgaactgccctcctga

SEQ ID NO: 221610 - DNA, 501 bp, Klebsiella pneumoniae
atgacaaaactcatttatttacagggctatcctgaatcgctgctggcgcaggtgaccacgttaatcgagcaaggccgcctcggcgaggtgctgcaaaagcgctatccgcaagggcacgacgttaacagcgataaagcgctgtatcagtacacccaggacttgaaaaaccgctttctgcgcggcgcggcgccgatcaacaaagtgatgtatgacagtaagatccacgtgctgaacaatgcgctcggcctgcataccgccatttcccgcgtgcagggcggtaagctgaaagctaaagcggaaattcgcgtggcgacggtatttcgcgacgcgccggaagcctttctgcggatgatcgtggttcatgaactggcgcatctgaaagagaaggatcacaacaaggctttttatcagctgtgctgccatatggagccgcagtaccaccagctggagttcgacacccgcctgtggctgacgcacctttcgttaaatcgttctgcgtag

SEQ ID NO: 221611 - DNA, 990 bp, Klebsiella pneumoniae
atgatacgtttcgcagttgttggcacaaactggatcaccaagcagtttgtcgatgccgcccatgaaaccggcaaatataaacttaccgccatctactcccgcagcctcgaacaggcgcaagccttcgccaaagactatccggtcgagcatctgtttacctcgctcgatgaactggcacagagccctgacgttgacgcggtctatattgccagcccgaactcgctgcactttccgcagacccggctgttcctgagccataagaagcacgtcatttgcgaaaagccgctggcgtcgaacctgcaggaagtcgaggcggcgatagcgctggcgaaagaaaataacgtggtgctgtttgaagcctttaaaaccgccagtctgcctaactttctcctactgaaagaatcgctcgctaaagtgggcaaactacgcaaagcctttatcaactactgtcagtactcctcgcgctatcagcgctaccttgacggcgaaaaccccaacacctttaacccggcgttctctaacggttcgattatggatatcggcttctattgcctggcgtccgctgtggcgctgtggggcgagccgcgggccgttcttgccaccgccagcctgctggacagcggcgtagacgcccagggcaccgtggtgctgagctatggcgacttcgacgtgacgctgcatcactccaaagttagcgattccgcgatccccagtgaaattcagggcgaagacggcgcgttagtgatcgaaaaaatctccgaatgtcagaagctggcgtttgtgccgcgcggcggtaaagcccaggacctgacgcagccccagcacattaataccatgctgtatgaggcggagacctttgcgcgcctggtggagacacaggatgtggatcacccgggcctggcggtgagccggatcaccgccaaactgtccagcgaaattcgtcgccagaccggagtgatcttcccggccgatacgcagccgctggcgtaa

SEQ ID NO: 221612 - DNA, 972 bp, Klebsiella pneumoniae
atgaatactgtcggcacgccgttgctatggggtggattcgctgtcgttgtcgcgatcatgttggcaatcgacctgctgcttcagggacgacgcggttcacatagcatgaccatgaagcaggccgctggctggtcaatcctctgggtcacgctttctctgctgttcaacgccgccttctggtggtatctggtgcaaactcagggccgggccgtcgccgatccgcaggccttagccttcctcaccggttatctgattgaaaaagcgctggcggtcgataacgtcttcgtctggttgatgctgttcagctatttcgccgtaccgcctgctctgcagcgccgggtgttggtgtatggcgtactgggcgcgatcgttctgcgtaccattatgatcttcgccggcagctggctgatttcgcagttcgactggctgctgtacgtctttggcgccttcctgctgtttaccggggtgaagatggcgctggcgaaggaggacgagtccggcatcggcgataagccgctggtgcgctggatccgcagccatctgcggatgaccgataaaatcgagagcgagcgcttcttcacccgtaaaaacggggtgctgttcgccaccccgctgctgctggtgctgattctggtggaactgagcgacgtgattttcgccgtcgacagtatcccggcaatcttcgcggtcaccaccgatccgtttatcgtgctgacctcgaacctgttcgccatcctcggcctgcgcgccatgtacttcctgctggcgggggtcgctgagcgcttctcgatgctcaaatacggtctgtcggtgatcctggtgtttattggcgtgaagatgctgatcgtcgacttctaccatatcccggttgccatctcgctgggcgtggtgggcggcatcctggccgtcacgctgctgattaacgcctgggtcaacaggcagcacgacaagcagcgcaaactgccagagtaa

SEQ ID NO: 221613 - DNA, 1248 bp, Klebsiella pneumoniae
atgacaacacgcactccctcatcagggtggctctcccgcctggcgcaaggcagcctggtgaaacaaattttaatcggcctggtgcttggcgtactgttggcgctggtctctaagcctgcggctatcgccgtcggtctgctggggaccctgttcgtcggcgcgttaaaagcggtagcgccggtgctggtattgatgcttgtcatggcctcgatcgccaaccatcagcacggacaaaaaaccagtatacgccccattctgtttctctatctgctgggcacctttagcgcggcgctgaccgcggtgttgttcagttttctctttccctcgaccctgcacttaaccaccgccgccgacagcatcacgccgccgtcggggattgttgaggtgctgcgcggcctgctgatgagcatggtgtccaacccgatcgacgctctgctgaacgccaactatatcggcattctggtgtgggcggtggggcttggcttcgccctgcgtcatggtaacgacaccaccaaaaacctgatcaacgacgtctcccacgcggtgacctttatcgttaaagtggtgatccgctttgcgccgctggggatcttcggcctggtatcttccaccctggcgaccaccggtttcgagaccctgtggggctatgcccagctgctgctggtgctggtgggctgtatgctgctggtagcgctggtgattaacccgctgctggtgttctggaagatccgccgcaacccctatccgctggtgctcacctgcctgcgcgaaagcggcgtttacgcgttcttcacccgcagctccgccgccaacattccagtgaatatggcgctgtgcgagaagctgaatctggatcgcgacacctattcggtctctattccactgggggcgaccatcaatatggcaggcgcagcaatcaccatcaccgtgctgacgctggcggcggtgcatacgctgaatattccggtggatctgccgacggcgctgctgctgagcgtggtcgcttcgctgtgcgcctgcggcgcctccggcgtggcgggcggctcgctgctgctgatcccgctggcctgtaatatgtttgggatcccgaacgatgtggcgatgcaagtggttgccgttggctttattatcggcgtgctgcaggactcctgcgaaaccgccctgaactcctccaccgacgccctgtttaccgccgcggcctgcatggcggaagacgaccagctggcgaaaaacgccctgcgcggataa

SEQ ID NO: 221614 - DNA, 555 bp, Klebsiella pneumoniae
atgaccgcgtattggctggcccagggggtcggcgtcatcgcctttcttatcggcattaccacctttatcaaccgcgatgaacgccgtttcaggctacagctggcggtctatagcgctattatcggcgttcattttttcctgatgggcgccgggccggctggaatgagcgccgggctcaatgcgcttcgcacagtcatttccttacgcacccgtagcctgtgggtgatgacagtctttatcctcctgacgttgattctcggcctgggtaaactgcagcatgccatggagctgctgccgatcattggcaccgtcgccagcacctgggcgctgtttcgctgcaaagggctaaccgtccgctgcgtgatgtggtgctccaccgcctgctgggtcacgcataatctgtggttgggttccattggcgggacgctgatagaaggcagtttcctgatcgtcaacgggctgaacatcattcgcttccgccggatgcaaaagcgcggtatcgatccgtttaaggttgaaaacgcagtacaggaagagagcccctccgcccgatag

SEQ ID NO: 221615 - DNA, 1488 bp, Klebsiella pneumoniae
atgcaatacataaaaatccattcgcaggataacgtcgcggtcgcgctgacggatatcgctgccggtagcgtggtgacgattgataatgactcggtcaccctcggccaggatatcgttcgcggccacaagtttgcactgcgcgctatcgcgaaaggggaaaacgtcgttaagtacgggttgccgattggccatgcgctggcggatatcgcgccgggagagcatgttcatgcgcacaatacgcgcaccaatctcagcgaccttgacgcgtatcgctatcaaccggacctggttgcccaaccgccacagcctgcggatcgcgaagtacagatttatcgtcgcgccaacggtgacgtcggcgtgcgcaatgagctgtggatcctgccgaccgtcggctgcgtcaacgcgatggccagacaaatgcagaaccgtttcctgaaagagacgtatggcgctgaggatatcgatggggtacatctcttcagccacacctatggctgctcgcagcttggggacgatcacatcaacactcgcaccatgctgcaaaatatggttcgtcacccgaacgccggggcggtgctggtggttggccttggctgtgaaaacaaccaggtggaggcctttcgcgagacgctgggcgagtttgacccgcagcgcgtgcactttatggtttgccagcatcaggacgatgaagtggaggcgggggttgagcatctgcatcagctgtatgaagtgatgcgtcaggataaacgccagccgggcaagctcagcgagctgaagtttggcctcgagtgcgggggatcggacggcctgtcgggcattaccgctaatccgatgctgggccgcttctcagactatgtgatcgccaacggcggcactaccgtgctgaccgaagtgccggagatgttcggcgctgaacagttgctgatgagccactgccgcgacgaagcgaccttcgacaagctggtgaccatggtcaatgactttaagcagtactttattgctcacgaccagcctatttacgaaaacccctcgccgggtaataaggccggagggatcactactctcgaagataagtcgctgggctgtactcagaaagcgggctccagccaggtggtggatgttctgcgctacggcgagcgcctgaaggttcatggtctgaatttactgagcgcgccgggcaacgacgcggtcgccaccagcgcgctggccggcgccggctgccatatggtgctgttcagcaccggtcgcggcacgccgtacggcggctttgtgccaacggtgaagatcgccaccaacagcgagctggcggcgaagaaaaagcactggatcgactttgatgccgggcagctgctccacggcaaaacgatgccgcagctgctggaagagtttgtggatgccattgtagccttcgccaacggtaaaccgacctgtaatgagcagaatgacttccgcgagctggccatctttaaaagcggtgttaccttgtaa

SEQ ID NO: 221616 - DNA, 1413 bp, Klebsiella pneumoniae
atgacatcgtttatgactgaagattttctacttgataccgagtttgcccgccgtctgtaccatgattacgccaaagatcagccgattttcgactaccactgccaccttccgccgcagcaggttgccgaaaactatcgctttaaaaacctgtatgacatctggctgaaaggcgatcactataaatggcgcgcaatgcgcactaacggcgtgccggagcgtctgtgtaccggtgatgcgtccgatcgcgagaaatttgacgcctgggcggccacggttccgcacactattggcaacccgttataccactggacccatttagagctgcgtcgaccttttggtattacaggtaagctgttgtcgccatccaccgccgatgagatctgggaccagtgtaatgatttgctggctcaggatgccttctccgcccgcggaatcatgaagcagatgaatgtgaagatggtcggtaccaccgacgatccgattgattctcttgagcaccacgcggctgtcgccaaagacaactcctttgacatcaaagtgctgccgagctggcgcccggataaagccttcaacatcgagttggcgaccttcaatgattatatggctaagctgggcgaggtatccgataccgatattcgccgcttcgctgacctgcaaagcgccctgaccaaacgtctggatcattttgccgcacacggctgcaaagtctccgatcatgcgctggacgtggtgctgtttgccgaagcgaccgacgccgagctggatgacattctggcgcgccgcctggctggcgagacccttagcgaacacgaagtggcgcagttcaaaaccgcggtgctggtattcctcggcgcagagtatgcccgtcgcggctgggtccagcagtaccacattggcgcgctgcgtaacaacaacctccgtcagttcaaactgttagggccagacgtcggcttcgactcgatcaacgatcgtccgatggcggaagagctgtctaagctgctgagcaagcagaacgaagaaaacctgctgccgaaaacgattctctactgcctgaacccgcgtgataacgaagtgctgggcaccatgatcggtaacttccagggtgaaggcatgccaggcaagatgcagttcggctccggctggtggttcaacgatcagaaagacggtatggagcggcagatgacccagctggcgcagctcgggctgctgagccgcttcgtcgggatgttgaccgacagtcgcagcttcctctcctacacgcgccacgaatacttccgccgcattctctgccagatgatcggccgttgggtggctgccggcgaagcgcctgcggatatcgcgctgctgggcgagatggtgaaaaacatttgctttaacaatgcgcgtgactatttcgccattgaactgaactaa

SEQ ID NO: 221617 - DNA, 1302 bp, Klebsiella pneumoniae
atgcgtaaaattaaagggttacgttggtacatgatcgcgctggtgacgctgggcaccgtgctgggctacctgacccgtaacaccgtagcggcggccgcgccgacgctgatggaagagttacacatttcgacccaacagtactcctatatcattgcagcctattccgctgcctataccgttatgcagcccgtcgcggggtatgtccttgatattctggggaccaaaattggctatgccttcttcgccatcgcctgggcggtattctgcggctcaacggcgctggccggcagctggggtggactggcgctggcccgtggcgcagtcggcgcagcggaggccgcaatgatccccgccggcctgaaggccagctcagagtggttcccggcaaaagagcgctctatcgcggtgggctacttcaacgtgggttcctctattggcgccatgatcgcgccgccgttggtggtatgggcgattgtcatgcacagctggcagatggcgttcatcatctccggggtattgagcttcgcctgggctatcgcctggcttatcttctacaaacacccgcgcgaccagaaaaaattatctgacgaagaacgtgactacatcattggcggtcaggagtctcagcatcagaccaataacgcgaagaaaatgtcgccgtggcaaatcctgcgcaaccgtcagttctggggtatcgccctgccgcgcttcctcgccgagccggcctgggggacctttaacgcctggatcccgctgttcatgttcaaagtttacggttttaacctgaaagagatcgccatgttcgcctggatgccgatgctgttcgccgacctcggctgcatcgtcggcggatatctgccgccgctgttccagcgctggtttggcgtcaacctgatcgtgtcgcgtaaaatggtggtcaccatgggcgccctgctgatgattggcccggggatgatcggcctgttcaccagcccgtacgtggcgattgccctgctgtgcatcggcgggttcgctcaccaggcactgtccggggcgctgattaccctctcttccgacgtctttggccgtaacgaagtcgctaccgccaacggtctgaccgggatggccgcctggctggcgagcaccatgttcgccctggttgtcggcgcgctggcagacaccatcggctttagcccgctgtttgcggtactggccgtctttgacctgctgggcgcgctggttatctggacggtgctgaaaaacaaaccggctgacgatgactcgacgccgcttagcagccgcaaaccggtcacgcagagttag

SEQ ID NO: 221618 - DNA, 777 bp, Klebsiella pneumoniae
atggaaatcattgaaccacgccgtctatatcagcagcttgccgctgagctgaagacgcgcatcgaacaaggtgtctaccttgtaggggataagctgcccgccgagcgcttcatcgccgatgaaaaaaacgtcagccgcaccgtggttcgtgaagccattatcatgctggaagtggaagggtatgtcgaagtccgcaaagggtcgggtatccacgttatctccaaccatccgaaataccagcaggtggccgatgaaagccttgagttcgccaactatggcccctttgaactgctgcaggcgcggcagctaattgaaagcaatattgccgaattcgcggcgactcaggtgaccaaacaggacatcatgaagctgatggagattcaggagaaagcgcgtaacgagaaatgtttccgcgactccgagtgggacctgcagtttcacgtccaggtggcgctggcgacgcagaacagcgcgctggcggcgatcgtggaaaagatgtggacccagcgcgtgcataacccctactggaaaaagctgcatgagcatatcgacctgcgtacggtcgataactggtgcgacgaccatgatcagatcctgaaagctctgctgcgaaaagatcccaacgccgccaagctggcgatgtggcagcatctggaaaataccaagcaaatgttgttcaacgaaaccagcgatgactttgaatttaatgccgatcgctacttatttgccgaaaacccggtggttcatctcgatactgcagtcaacggcgcgaaataa

SEQ ID NO: 221619 - DNA, 663 bp, Klebsiella pneumoniae; identical to SEQ ID NO: 209942

SEQ ID NO: 221620 - DNA, 387 bp, Klebsiella pneumoniae
atgatggtcatgaaacgcccttccctgcgccagttcagctggctgctgggtggttctcttctgctcggcgccctgttctggctttggctggcggtgcagcagcaggaggccacgctggcgatccgcccggttggccagggtatcggaatgccggacggtttctccgtctggcatcatctcgatgccaacggcatccgctttaaaagcatcacgccgcagaaggatggtctgctgattaagttcgattccaccgcccagggcgcggcggcgaaagaagttctcggccgcgctctgccacatggttatattattgccctgctggaggacgataactcgcccaccgcctggctatcccgcctgcgcgacgcgccgcatcgcctcgggtaa

SEQ ID NO: 221621 - DNA, 369 bp, Klebsiella pneumoniae
atgaaacaccgcatcgctctgcttctggtcctgacttcacttagcgccagcgccctagccgcctctccctgccaggaaaaagagcaggatattcaacgagagatcagctacgccgaaaagcatcataatcaaagtcgcattgatgggctaaatactgcgctacgtcaggttcgggaaaactgtagcgacagtaaactcaaagccgatcataagcaaaaaattgccaaacagcgggaagagatcgctgaacgtcagcgcgatctgcaggaagcccggaagaaaggcgatgcggacaaaattaacaaacgccagcataaactcaatgaagcgcaacaggagttaaaaacgctggagtctcgggattactaa

SEQ ID NO: 221622 - DNA, 306 bp, Klebsiella pneumoniae; identical to SEQ ID NO: 136612

SEQ ID NO: 221623 - DNA, 399 bp, Klebsiella pneumoniae; identical to SEQ ID NO: 209938

SEQ ID NO: 221624 - DNA, 297 bp, Klebsiella pneumoniae
gtgaatggccgacaggagcgtgaacggcaaaaggcgcagctgctgcgccagatccagcagcaacggctggagctcagcgcctgccgccgtcactggcacgaggcgactgcgcccctcgaccgcggctggcatacgctgctgagtttacgttcgtggctgatggttggcagcggtctgatggccgtatggtccgtacgacatccgcattttttaatgcgctggaccaaacgcggactcggactgtggagcacctggcgcctggtgcgcgggatcctgcgccagtcggcagttcgctag

SEQ ID NO: 221625 - DNA, 393 bp, Klebsiella pneumoniae
atgaaaaaattagaagatgttggtgtattggtagcgcgtattctgatgccgattctgtttatcactgcaggatggggcaaaatcaccggttatgcgggaacccagcagtatatggaagccatgggcgtcccgggcgcgctgctgccgctgactatcctccttgagttcggcggcggtctggcgattctgttcggtttcctgacccggaccaccgcgctgttcactgcgggctttacgctgctgaccgcgttcctgttccatagcaactttgcggaaggcgtgaactccctgatgttcatgaagaacctgaccattgcgggcggttacctgctgctggccattaccggaccgggcaccttcagtattgaccgtgtactgaataagaaatggtaa

SEQ ID NO: 221626 - DNA, 987 bp, Klebsiella pneumoniae
atgggacaattagtcgacggcgtctggcaggatacctggtatgacacaaaatccaccggtgggcgttttaaacgttccgtttccgccttccgtaactggctgaccgccgacggcgcggctggccccagcggtgaaggcggttttgcagcggaaaaggatcgctatcatttgtatgtttctctcgcctgcccgtgggcgcatcgcacgttaattatgcgtaaattaaaaggtctggagccttttctccccgtatccgtggtcaatccgctgatgctggaaaacggctggacctttgacgatagcttcccggaagccaccggcgataccctctaccagcatgactttctctatcagctgtatctgcacgccgacccgcactacaccggacgcgtgaccgtgccggtgctgtgggataaaaaacagcagaccatcgtcagcaatgagtcggcagaaatcatccgcatgttcaataccgccttcgatggccttggcgcccgggccggggattactacccgccagcgctgcgggaacaaatcgatgagctgaacggctggatctatgacaacgtcaacaacggcgtgtataaagccggctttgccaccagccagcaagcttacgacgaagcggtggatgcggtctttacctcgctggagcggctggagcagatcctcggccagcatcgctatctgacgggcaatcagctaacggaagccgacattcgcctatggacaacgctggtacgcttcgacccggtatatgtgacccattttaaatgcgataaacggcgcatcagcgattacctcaatctgtacggtttcctgcgcgacatctaccagatgccgggtatcgccgagacggtgagttttccgcatatccgtcaccactattaccgcagccataaaaccattaaccctaccggtattatttccattgggccgcagcaggatctcaacgaaccgcacggtcgcgatcagcgcttccgttga

SEQ ID NO: 221627 - DNA, 369 bp, Klebsiella pneumoniae; identical to SEQ ID NO: 136615

SEQ ID NO: 221628 - DNA, 897 bp, Klebsiella pneumoniae
atggccaaagagagagcattaacgctggaagcgttacgcgtgatggatgcgatcgaccggcgcggaagcttcgctgccgcagctgatgagctgggacgcgtgccttccgccctgagctacaccatgcaaaaactggaggaggaactagacgtggtgctgtttgaccgctcaggtcatcgcacgaagttcactaacgttggaagaatgctgctggagcgcgggcgcgtgctgcttgaagcggcggataaactcaccaccgatgctgaagccctgtcgcgtggttgggaaacccacctgacgatcgttaccgaagcgctggtgcccactccggatctgtttccgctgattgagaaactggcgactaaatcaaacacccagctgtcgattatcactgaggtgctggccggcgcctgggagcggctggagcaggggcgggcggatatcgttgtcgcaccggatatgcattttcgttcctcttcggagattaactcgcgcaaactctattcggtgctcagtgtgtacgtcgcggcgccggatcacccgatccatcaggagccggagccgctctctgaggttacccgcgtgaaataccgcggcgtcgcggtggcggataccgcgcgcgagcggcccgtcctcaccgttcaactgctggataaacagccgcgtttaacggtgagtacgatagaagataaacgtcaggcgctactggccggactgggcgtggcgactatgccctatccgctggtggagaaggatattgccgaaggtcgcctgcgggtcgtcagcccggaatacaccaatgaaattgacattatcatggcctggcgacgggacagtatgggcgaagcgaagtcctggtgtctgcgtgagatccccaagctgtttgccggcagatag

SEQ ID NO: 221629 - DNA, 702 bp, Klebsiella pneumoniae
atgattactacccgaacagccaaacaatgcggacaagcagacttcggctggctgcaggcccgctacaccttctcctttggccactacttcgacccgaaattactgggcttcgcatccttgcgcgtcctcaaccaggaagtgctggcgcccggcgcttccttccaggccagaacgtacccaaaagtcgatatcctgaacctgattctggaaggcgaagcggagtatcgcgacagcgacggcaaccacgtgcaggccaaagccggtgaagcgctgctgatcgccacccagcctggcgtgagctatagcgagcataatctgagtaaagagcagtcgttaacgcgaatgcaactttggcttgatgcctgcccgcagcgggaaaacccgctgcagcagaaaatcaatgtcgcagacgcgacgctgcagctgctggcctctccggagggcggggataacagcctccagcttcgccaacaggcctgggtctaccatatcgcgctggagaaaggtgagcagatcaacgtgcaattacatggtccacgcgcctatctgcagtcgattcacggctccgtccatgccgtcgcacaggaacagcaaaagcaggctctcacctgcggtgacggcgcatttattcgtgacgaagctaacattaccctcgtcgccgatacgccgctgcgcgctttgctgatagatttaccggtgtaa

SEQ ID NO: 221630 - DNA, 168 bp, Klebsiella pneumoniae; identical to SEQ ID NO: 136618

SEQ ID NO: 221631 - DNA, 411 bp, Klebsiella pneumoniae
atgaaattgataacccgtattgcctttgccacgctgttgaccaccggtttctctatcacggctcaggccgcagacgttaaggcggcgccagcaccggcgcaggatcctattgttcagcacttaaaacttaccaacgatcaggttgcgaaaattaaaagcctgcatcagcagttggagagtaatgtccagcagatttcccaacaggaaattaaagacggggctctgataaacgtgattgattccggtaaatgggatgaaaaagcggtcaacgatcagctggcggccttcagcaagattgatcagcaggtgcgttattaccgcgtgaagtactattttgaggtgaataaggtactgacgccggagcagcgcacgcaggtgaaaaaagatcttgccgacgcgctgagtgaataa

SEQ ID NO: 221632 - DNA, 465 bp, Klebsiella pneumoniae; identical to SEQ ID NO: 209929

SEQ ID NO: 221633 - DNA, 1488 bp, Klebsiella pneumoniae
atgaataatatgtcatttatgatttggttttccgtttatgcctgcgcgatgattaccttaggctggtacgtttcgcgcaaacagaaaaccggcgaagactttttacttggcggtcgttcgctgccgatgatcctcactctcggttcgacggtcggcaccatggtggggaccggctccagcgtcggcgccgtcggctttggctacagcaacggctgggccgggatgctttacggcctcggcggcgcggtggggatcctgctggtggcatggttatttgcaccggtacgtaaacttcgcttcatgaccatgagtgaagaaatgtcgtattacactggcggcagtaaaattataaaaaacctcgtcgcaatacttatttttattgcctctataggctggctgggggcgcatatattaggcggcggattatacctagcgtgggccagcggcattgatattaatgtcgcgaaaattattatcgcgctggcttttgtggtttatgtcggtatcggcggctattccgcggtggtgtggatcaataccattcaatcgatcgtgctgttcgtgggctttattttaatggcgatactggcggttcatcacgttggcggctggagccatattcagcaggccgtcgatccggcggcgcaaagcctgttcgcggtcgataaattaggcgtgctgccggcgctatcattggcgatggtgatcggcgtcggcgtgctggcgacgccttcttatcgccagcgtatttactcggcgaagaccgtctcttcggtacgccactctttcacgattaccggcctgctgtatctgggattctccttcctgccggcgatcatcggtatggcggtatggaccatgaacccgcagttggagaacagcggcttcgccttcttgtttgccacccaggtgctgccgccggtgctggcgatggcgatcctgattgccggcatgtcggccaatatgtcttccggcagctctgatgccatcgccgcggtgtccattatgctgcgcgacctctacaccctggtgaccggccatatgcccgcgccggagaaagcgattcgcctgtcgcggatcttcctggttctggtgattgcgctggcgctgctgtttgccctgacctccaacgacatcatcagctacatcaccaaaatgatctcgatgattatgtccgggatgtttatctgcaccatgcttggccgtttctggacacgctttaactggcagggcgcggtcgccgcgctggccggcggcgccggggcatcggttgcggtgctggtggatagcgactggctggcgttctggggcaacccgtgtattccggcggtgctgacgagcctggtggcctcggttgtggtgacgttactgaccccggcaagcagcatgagccgcgagcaggcgctggagatgattacccgcgagcgtgaaagccgcccaacgccgccgccgctgccgattggcaaacgtcatacctcacgcgggtaa

SEQ ID NO: 221634 - DNA, 543 bp, Klebsiella pneumoniae
atggaatataaaagctgttccgataagtatatttggtctgccgatgactcctatttctataaaggactgtccgaactgattgtagacatcgacgaattaatttatctctcactggagaaaatcagaaaagattttgtgtttatcaatctcaatacggcttcattaaacgaatttatcaggcgtgacagcgaatggctatccgcggtaaaggggaaacaggtcgtattgattgcggccaggaaatcagaggccttagcgaactactggtattacaatagcgatattcgcggggtggtatatgttggtctgagtcgcgatattcgaaaagaactggcctatgtaattaatggcaggtttctccgcaaagatattaagaaagataaaattacagatcgggaaatgaaaattatccgcatgaccgcccagggcatgcagccgaaatcgatcgccagaattgaaaattgtagcgtgaagacagtgtatacccatcggcgtaatgctgaggccaaactgtattccaaaatatataagttagttcagtaa

SEQ ID NO: 221635 - DNA, 1644 bp, Klebsiella pneumoniae
atgaaagttaatgcactgatggcgctggcgatcctcgcgctgctctggccggcagccgcgctcagggcggcggtgaccaagaccacctggtcggatgcgccggcgcgcgagtttgtgtttgtggaaaacaactccgacgacaactttttcgtcacccccggcggggcgctggatccgcgtatgaccggcgctaaccgctggaccggcttaaaatacaccggctccgggaccatctatcagcagagtctcggctatatcgataatggctacaacaccgggctcaatgccaactggaagtttgatatgtggctggaaaactcaccggtttcacaccccttaaccggcctgcgctgcatcaactggtacgccgggtgcgatatggctaccagcctgatcctgccgcagaccaccgacgccagcgggttttacggcgcgacggtgaccagcggcggcgcgaagtggatgcacggcatgatgtcagacgccttctatcaatatctgcagcagatgccggtcggcggcagctttacgatgaccatcaatgcctgtcagacctcggtgaactacgatgccagcagcggcgcgcgctgtaaggatcaggcctccggtaactggtatgtgcgcaacgtcacccacaccaaagccgcgaacctgcggttgattaatacccactcgctggcggaggtgtttatcaacagcgatggcgtgccgaccctcggggaagggaacgccgactgccggacgcagaccatcggcagccgctcaggattaagctgtaagatggtcaactataccttgcagaccaacggcttaagcaacacctcgatccatattttcccggcgatcgccaactcgtcgctggcctcggccgtcggggcgtacgatatgcagttcagcctcaacggcagctcctggaagccggtgagcaataccgcctattactacaccttcaacgagatgaagagctcggactcgatctatgttttcttctccagcaacttctttaaacagatggtgaacctcgggatcagcgatatcaacaccaaggatctgttcaactttcgctttcagaacaccacctcgccggagtcaggctggtatgagttttccacctccaacacgctgattatcaagcctcgtgatttcagcatcagcattatctccgacgaatatacctcggcgccgtcgcgcgaggggtatgtcggcagcggcgaaccggcgctcgatttcggctacatcgtcaccaccagcggtaaaacggccgccgatgaagtgctgatcaaggtgaccggaccggcgcaggtgattggcgggcgttcctactgtctcttcagctccgatgacggtacggcgaaagtgccgttcccggcgacgctctcttttatcacccgcagcggcacgacgcagacctacgatgccgggtgcgatgacagctggcgggatatgaccgatgcgctgtggctgaccacgccgtggaccgatatctccggcgaagtggggcagatggataagaccacggtgaaattttcgattccgatggataacgccatttcgctgcggacggtagacgataacggctggtttggcgaagtcagcgcttcaggagagattcatgtccaggcgacgtggcgcaacattaactaa

SEQ ID NO: 221636 - DNA, 285 bp, Klebsiella pneumoniae
atgtccaggcgacgtggcgcaacattaactaaggccctgctgacggtgggctgcctgctggcagcgccgctggcgcaggcgatctcggtcggtaacctgaccttttccctgcctgccgaagcggatttcgccagcaaacgggtggtcaacaacaataaaagcgcgcggctgtaccgcatcgccgtcagcgccatcgatcgcccgggcggcagcgaagtccgctcccggccggtggatggcgaactgctgttcgcccccccgccagctggtgctgcaggcaggtga

SEQ ID NO: 221637 - DNA, 762 bp, Klebsiella pneumoniae
atgacaaccaaccaatccgctcaacccttgtccggccccgctgcgccgccgcaaaaagcacgcacctcgtttggcatcttaggcgcgatcagcctgtcccatttgcttaacgatatgatccagtcgcttattctcgctatctacccgctgctgcaggcggagttctcccttaccttcgtgcagatcggcatgatcaccctgaccttccagctcacctcatcgctattccagccggtgattggctacatcaccgataaacgctcgatgccgtggtcgctgccggtgggcatgtgcttcaccctctgcggtttgattctcctcgcgctggccggtagcttcggcatggtgctgctggccgccgcgctggtaggtaccggctcctcggttttccatccggaatcatcccgcgtggcgcggatggcctccggcggccgtcacggcctggcccagtcgctgttccaggtgggcggcaatttcggcagctcgcttggcccattgctggcggcggtgatcatcgccccgtacggcaaaggcaacgtcgcctggtttgtgctggccgctctgctggctattgtcgtgctgtcgcaaatcagccgctggtatgccgcgcagcatcgaatgaataagggcaaaccgaaaccggccatcgttaatccgctgccgcgcaagaaggttattctggcggtaggcattctgctgatgctgattttctcgaaatatttctatatggcggcattagtagctattacaccttttatctaa

SEQ ID NO: 221638 - DNA, 1653 bp, Klebsiella pneumoniae
atgcattatttcaaacacagcgtagcgctggcgctattcgccgctttatcgctgggcagcttgtcggcacaggcctatgagcaggataaaacctataaaattaccatcctgcacaccaacgatcaccacggccatttctggcgcaatgactacggcgaatatggcctggcggcgcagaaaacgctggtcgatggcatccggaaagaggtggcggcggaagggggaagcgtcctgctgttatccggcggcgatattaataccggcgtaccggagtctgatttacaggatgcagagcccgattttcgcggcatgaacctgatcggctacgacgcgatggcggtgggaaaccatgaattcgataatccgctgagcgtactgcgccagcaggaaaagtgggctaagttcccgttcctgtcggccaatatttatcagaaaagcaccggcgaacggctgttcaaaccctgggcgctgtttaagcgcggtgggctgaaaatcgcggtgattggcttaaccaccgacgatacggccaagattggcaatccggaatatttcaccgatatcgaattccgcaaaccggcggaagaggcgaagctggttatccaggagctgcagcagaatgaaaagcctgacgtgatcctggccaccacccatatgggccattacgacaatggcaaccacggctctaacgcgccgggcgatgttgaaatggcgcggagtttacctgcgggatcgctggcgatgatcgtcggcggtcactcgcaggatccggtatgcatggcggcggaaaataaaaagcaggtcgattatgtgcctggcaccccgtgcgctccggatcgtcagaacggcatctggatcgtccaggcgcatgagtggggcaaatacgtcggccgcgccgattttgagttccgcaacggcgagatgaagctggtgcactatcagctgatcccggtcaacctgaagaaaaaagtgacttacgataacggccaaagcgagcgggtgctgtatacgccgcagatcgccgagaacccgcagatgatgtcgctgctgacgccgttccagaacaaaggcaaggcgcagctgcaggtcaaaatcggcagcgtgaatggtcatctggagggcgaccgcagtaaagtgcgctttgtgcagaccaatatgggccacctgctgctggcggcgcaaatggcgcgcagcaacgcggatttcgcggtgatgagcggcggcgggatccgcgactccattgaggcgggggatatcacctacaaagatgtgatgaaggtccagccgttcggcaatgtgctgacctatgtcgatatgagcggcaaggaggtagtggattacctgaccgccgtcgcgcagatgaagccggattccggcgcttatccgcagtttgccaacgtcagtttcgtggccaaagacggtaagctgaacgatctgaaaatcaaaggcgaaccggtggatccggcgaagacctatcggatggcgacgctgagctttaacgccaccggcggcgatggctatccgaacatcgccgataaacccgggtatgtgaataccggctttatcgatgccgaagtgctgaaagagtatatcgagaagaactcgccgctggatgccgccgcctatgagccgaaaggcgaggtgagctggcagtaa

SEQ ID NO: 221639 - DNA, 705 bp, Klebsiella pneumoniae
atgagcttcttcgaaattgactcacgatttttgattgataccgcatttcaccgtctggaaatcatccgtgacgatgggctgtatcgccacctgcgcatgcagcagccgggaacatcttgctactactacgacgttatcacatggcctggttacttgaccgtaaccggcgacatgggaacctggacattcagtcgcatcgcggacatgttcgacttttttggcgcctgggagggtggaatcaatacccattattgggctgaaaagctggaggctggcgcgggatgttcggcacgagaaatgctggcaaaagagtatgaccacgacgcgttctgcaaaagcctgaaagagtctctgagtgattacctgggggacgacgaaagcgaggagccagaagaagatgacgactggggcgacgatgacgacacacccgatagcgacaaagcagtggtgcgcgaaatcgtccgcggcttgtgccgggcgggtttcaacaatgaatgggaggcttatcaggctgtttatgatgctgattggccagctggctggagcgcttgggatgtctgcgaaggactgacatttaaaacgtataccagccatttccgatggattctgttcgccatcacatgggcaatcagcaaataccacaacgcgaagattgttgataaagcgatggctacgttcttggccgttaagggagtttcagcatga

SEQ ID NO: 221640 - DNA, 273 bp, Klebsiella pneumoniae
atgagcaaaaacctacacatcgaactcggtgataaatacatcgtcacagggtcaacgcatgacctcatcctgaacgagaaacgcatcattaaggatggtaagaacgccggtcaggaaacgctggctcgactcggctactacagcaagtttgagcacctggtgaaagaactttgccatcgtgaaattctgcaatcagaagcgcagtcactgcaagaattgcgcgactacatcgttgctctcggcgagaagctgagtaaggcagtcgagttatga

SEQ ID NO: 221641 - DNA, 1137 bp, Klebsiella pneumoniae
atgagcgcggcagcttactacaacgagatcgacccattcgcggcgcagtggctgcgtaacctcatagccgccgggcatatcgcccagggcgaagttgacgaacggagtattgaagatgtcacacctgacgacctcagaagatttacccagtgccattttttcgccggtatcggcgtctggtcccattccctccgcctcgccggatggcctgacgatcgcccggtctggactggctcctgcccgtgccagcctttcagcgcggcaggcaaaggcgatggatttgctgacgagcggcacctttggccccacctcttccatctcatcagcgagcgcagacctcagcatgtctttggcgaacaggttgcagcaggtaacgcaaacgtatggttcgaccttgtacaagcagacctggaaggactgggatacgccttcgggcttgtgccgtttacgtcagcgggcatcggtgcgccgcacatcagagaacgggcctactgggtggccaacgccgacagcgtcatcagtgaccggcgcgggaacgtccgggcgacagggcgggatgaatattcagacggcgacgatgttgtctggctggccgacgccggtcgcgaacacaaaggatcagccagaaacaaagagagggctggagaatcttgccgggctggtgaagatggcgggctgggtaactccaacgtcacgcgactggaaggattcggcgggaatgacggcgcagcgggacgggaaagagcgactggaccagctgccgcgccaggcgttcatgacgggctggccaacgccacaggtcaactacatcaccaatgcaacgacggtacaaatgagcgcggacggcagggaaacaccgaacaaaatcggatgggcggcgagcctgtgcgggcccttgaggttaacggtttttggcgagatgcggactggctcttttgccgagatggcaaatggcgtccagttgaacccggcacattcccgctggttgatggggctgccacacgcatgggacgagtcgagcccggggtggcaagagtggcaagcagcaaccgcgtcggtcgcctgaaagggtacggcaacgccataaacgcccaggcagctgcggctttcattcgcgcttatatgggggtcgcatga

SEQ ID NO: 221642 - DNA, 657 bp, Klebsiella pneumoniae
atgaaccgctactcacttatctatgccgacccggcctggtcttacgggaacacggtcagcaacggtgctgccgtcgatcactaccccaccatgagcttgcttgatatgaagcggctcccggtatgggagctcgccgcggataacgccgtgttggcgatgtggtacaccggcacccacaaccaggaggcgatcgagctggcccaggcctggggatttacggtgcgcaccatgaagggcttcacctgggtgaagttgaaccagctggccgaactgcgcattaccaaggctctggcagagggagaggttgccgacttttacgacttcctcgacctgctgaatgcagagacgcgcatgaacggtggcaaccatacccgcgctaataccgaagacgtgttgatcgccacccgcggcgccgggctggagcgcaagcacgccggcattaagcaggtggtctacagcccactcggcgcgcacagcgagaaaccgtgggaagttcggcaccgcctggaactgctctatggcgacgtgccgcggattgagttattcagccgcagcgcagcgccaggctggagtcactggggcaaccagtgcgccaccgcttccgttgagctgatacccggctgcgccatcgacgttgtgaagacggaggcagcatga

SEQ ID NO: 221643 - DNA, 285 bp, Klebsiella pneumoniae
atgaacgcataccgcgcatacgacgtgatcgaagagcgtaagtgggccgagcagtcgctcaccgaagagaagcaaaagtggatcgacgatcgtgcgcaggaaattatcgactccctgccgaaagagccgtcaggcctgttccgcttctctgtaccgatggacaaaagtccatacgaaggcctccgcagcgatgcagctggcgaggcatataacgatctcatctcggcagtagcttacgcccaggcggaatacgactgggatcaccgcaccggctgcccgttttaa

SEQ ID NO: 221644 - DNA, 321 bp, Klebsiella pneumoniae
atggagaatgcaatagcccgaaagttagagccgccaatcctcaacccaattgagattgaaggcattttgttaaaccggcttttatccattggccaaaaggtttttgcggaaatgcggggagttagcgagtcgacaatcagtcgccgcaagtcggaggggtattacgccgagatggcgaaggaaatatcagcgttgggtctacaggttgttccgccagaggcggtggtagtttcccgccactacctgcagtcagtagaaacgctggcagatatcggtttgcgtgcggagcggtgccgcccgggtccgcttgggtgggactga

SEQ ID NO: 221645 - DNA, 147 bp, Klebsiella pneumoniae
atgcctaagagcaacagattttaccaggcacaaacacacaaaaatgttacccgcgatcgcttcattcgctctgttaacccggtggttggcatgaaaatgcgcggcatcctggaagagctgaaacggaaggaggaaggccgtgagtaa

SEQ ID NO: 221646 - DNA, 900 bp, Klebsiella pneumoniae
gtgagtaacgtatccaatttagccgaagccagagaggccagaaggctccagaaaccgcgcacgaatgacggtaaggggtttgccttgctgcaccgtaaaattatggatgtgccgttctacaaggatgctgaggcggctcatctatgggttcacctgctcctgcgcgctaatcacgaacagacactggtatcgactgatgtcggcgatgtgatgtgcgaaagaggggagttcatcaccgggcgaaacacactggcaatggaaacggggttaaccgctgatcgcgttaaatcactgctccgtaaattccagaacctgggcatgatcagcaccaaatctaacaaccgcttcactgttctaaaagtggtcaaatatgacgaatatcagtcaaatttttgtccagccgatgtccagccgatgtccagccaaaacgcagtagtaccaatgcctgcggaggtggagtgtccagccggtgtccagccagtgtccacagataacaatatattaaataacttactacctaacggtagtaagtatgtcgcaaatgaccagaaaccggctgaagagaaaaagtcacgtttgtcatgcgatgaagtatggcaatgcctgaaagacgaattacctgaagccaggggatggagatgccttactgatgagcgacgcaatctgatccgcaccttctggagcaaggcgaacaaaatcgcacgcaatctggatggtaagccgatggacatggatggttttcgcaactacctccgctacatcgctcagaactgtcgctggatgctggaagaccgaccagaccagaagtcaggaaagacatggcgccgcatgaaattcgataagtttctgacggaaaaactctacatcgaagtgcgtgagggggatcgtgatgaccgctga

SEQ ID NO: 221647 - DNA, 384 bp, Klebsiella pneumoniae
atgacaatcacattacaggcagtaaacgagctcatcgcctccctggagagcgcaggcgagctgtcgatcagagagcagaagttcctgaagctggcgaaagcgtttaagcagctggctgcggagaatgtggcgctgaaggaaagccgcaataatttggctgaattcatccatgaagaacttgatgctgattacccgctgaatatgaatctggaaacccatgcaaccgatcgtatcgtagccgggattaaggctgatggggtggaggagttcgcggcaaaacttcgaattcctggtgatgaccagttttttgacgctttagcaaaaggggttgcacttgctgctgacgacttcgccaagcagctgcgcgagggggccgacaaatga

SEQ ID NO: 221648 - DNA, 216 bp, Klebsiella pneumoniae
atggctatagaaaacccgagttcatgcccgcactgcggcggtgagaatggattccacacgaaagaggttgtggatttcaagcagttttatgcttgggatggctcattccttgaaggacagcacaccagcggcattcgcggcggaaaagcattctactgctgcgactgcggtcggaatataacatcgcgcatcaataagccaggagccaaccaatga

SEQ ID NO: 221649 - DNA, 636 bp, Klebsiella pneumoniae
atgaccagcaaattaaccagagagcgcattgagctaatcgctaactttcatcgtgcaatgacactgccgccgtctcacgctgaaattgaagaattggcgcgcattgcgctggccgcaatggacagcgagtctgggtgtttgcctctcgactacctgcagggacacaaagacggcctggagtttgcctcccaactggcagaagccaatcaccctgagaccggagactggctttacgatgaccctatcgagttggcaaaagctattcgcaaaggcccagatatgccgccagcgcagccggcagcggacagcgagccggatcgcaatcctgtgctggcgtatgccgacagttatcgtgatatggcgaaacaaggcgtcgagtcagtcccaatatggagcgtcattaccgacctcgagcgaaacattgctccgctctatcgccacgcgcagcagccggtagtgccggatgatgtgctggacgcattgcagaaggttgctcgtatacgcctcgacctgaatgacttcgacggcgatcgccgtggcatcgctgattgccttggtgatgccgaagaggcgctcatcgaggtggtaaatcgccgcgccgccatgctcgcagcctccccgcaggaggtaaagtga

SEQ ID NO: 221650 - DNA, 231 bp, Klebsiella pneumoniae
atggaaaataaaccagagtggcagcagcaggctgagaaacttgctgaactgtacggagcaagcttcgtgatattcaggaacggaaaggagccagagtgtgtcgatcccacgaaagtggtgctttcatttgatgaagaaagcaaaaggcgctttgaggagtcaagagaagccatgcgtcaggagcacgcgatggcatccagactgaccaagcatcgctttaatccgaaataa

SEQ ID NO: 221651 - DNA, 171 bp, Klebsiella pneumoniae
atgcacagcctgctcgctaaggtaatggagcgcggcatcttccgcgtacctgcgcgccgcaagcgcaaggtcgaagttaagccttccgacatcccgaccctgaaagactacaccgcccgcctggtcgataagaagtggctccgcctgagagcaaggaggccacatgcgtaa

SEQ ID NO: 221652 - DNA, 642 bp, Klebsiella pneumoniae
atgaaatgtaaggtagagggttgtgatagcgagtgtaaacattatccaggcaaaggcgtttgtcaaaagcactatttccgaatgatgcgctacggaacctatgagttgacgaagcgtggaaagagaaaggataggactaaaaactccaaaggttatcagatgattaattgtccagatcatcccttagtcatggcaaatggatttgtgtacgagcatcgaaaagttatttatgaccgatatggcgacactctccctccgtgtgagatatgtggcaaggaagtgacttggaagactgcgcacatcgatcacatcgatgaagttgtcgataacaactctgactcaaatttgagggtgctttgccgtgcatgcaatgtgatgcgctctcgcgtacacattcctgagcatacaaaaaaatctcgcatggcaattaccttcaatggcgaaacgaaaacccctaccgaatgggccagagacccccgggttttgatatcagttactgccataaagcatcggctgaaaaatggtatgagcgttgaagaggctttgttttctccaaaagttacccatcggcataccagaccaagatccagaacaccgcaatacggcgaatatcgcggacctaagaaagcggaggccgcatga

SEQ ID NO: 221653 - DNA, 318 bp, Klebsiella pneumoniae
atgcaaaagagcagatcgcactggacgcatcgggagcctcggctgatatccgggttgctgttgcgaatgatgattgcactaatcgccctgtgcctgctggcgcagttaagcggctgcaacaattcgcgaacggtctacgtcaaagtgccggtggtcccgttaccggccagcctgacggctgacaccccgcaaccggaaatccctgacaacctgacgtggggccagagcctcgatttaaacgtcagcctgctatcagcgctggggcagtgcaaccgggataaggctgacatcaggcaggcagaagcaaaacgtcagtaa

SEQ ID NO: 221654 - DNA, 1473 bp, Klebsiella pneumoniae
atgacgactgctgagcaaaaggcgtttgccagaaaggtggaatgtgaggaggacgggctttactacgctcgctatttcttcaagcagcgcaccggcggcaagatgatagttgcgcctcaccacaaggtgattcagaaaacactggaccgcgtcattgacggtgagattcagcgcctgatcatcaacgtccctcctggttacacgaaaacggaacttgcaaccatcaatatgatggggcgcggcctggcgctaaattgctgcgcccgcttcatgcacctgtcctattcgcacaacctggcgctcctgaactcctcgacggcccgcggcatgattaagtcgcaggcgtaccagtccatgtggcctatggcgctgcgcgatgacgcagacagcaaggctatgtggtggactgagcacggtggcggcgtttatgcatcttcagcggcagggcaggttaccgggttccgcgcagggcatatggagccaggctggcagggcgcgctgattatcgatgacccagttaagccggatgacgcttactctgagatcgtccgagacggagtcaacaaccgtttcaacgagacaatcaaatcacgactggcgatcgagaccacgccaatgattgtcatcatgcaacgaatccactaccacgatctgagcggctatctactgcgtggtgggagtggggaaaagtggcatcacctgaatttgccggtgattatcgatagcagccgcagctacgaagaaatatatccggaaaacactcacgctatcccgattgaccacggtctgcctgatggctggctatggccgtttaagcataacgaatcgcaccgtgtatctctgttctctcaccggcgcaccgccgaagctcagtacatgcagaacccgaaacgcttcaatgcggagggtgcgctgtggaacgaggagatgatcagcgccgcacacgcgatgcgaatcacccaggatctggcccgtacggtcgtggcaatcgacccgcaggccacaaatagcgaagagagtgacgaatccggcatcgctgtagcaagtgtttacggtagtggtgatgagcggcagtacagccttgatgctgactatagcggcaaatattcacccaacggatgggcgacgaaagccattgaagcttatgagcagcatgaagctgacgcgatcgtcatagagacaaaccaaggtggcgatatggcggaagatacgctgcgcaatgccgggttcggcggccgcatcattcgtgtgcacgccagtaaaggtaaatacgcacgtgcagaacctatctccgcgctgtatgcgcagggccgagtagctcaccgtggaagcctctacgaggtagaaaaccagttcatggagtacgtgccatccactgcgaagaaatcacctgaccggctcgatgccgcggtatacgcattaaccgaactatcagaaccacaatcaaccggcatgttggtgcgctcgcgctga

SEQ ID NO: 221655 - DNA, 1449 bp, Klebsiella pneumoniae
gtgaacgaaagcgaaaataaacaactcgccacgaacgccagcatcgaccgcgagcggatgcgttacgtcaacgctctgttcaatggcaccagtaacaccaagcgtcagcgcctgtatcaggagtttggatatcccaaggaactttgcttcgatgacttttaccgggcgtaccgacgcaacgccatagccggcgccgcagtgacgcgaatggtcgatggatgctgggaagattacccggaagtttacgaaggcgaccagactaaggatgcaacccagcaaacggattgggataaacggatcaacaagctactcaagcgatgttggaagcagatcaagggcgctgacaagcgtaacctagtgggtcgttactctgcgctactgatccaggttaaagacaacaggccatggtcagagcctgtagataaggcgatggtcggcaggctgcaggagagggcgctcgtccggctcgttcccgtctgggaggctcagttagacccggccagttacaacgaagaccagaacagcgaaaattatggcgctgtcagcatgtactcgtttaccgagataccggtgcagcagcagcgcagcggccagccaggtcgcatcatcaacgttcaccctgatcgcgttatcattctggctgaaggctcggatgacgggcggcttgattccggcgagtcgctactggaagaggggttcaacaagttgctggacctcgaaaaagtttcgggcggtgcggcggaagggttcctgaagaacgccagtcggcaactcaactttaacttcagtgccaagacaagcttcgcacaactggcgagggcgcttggtgttagcgaagcccaactctcagaagggatggatgatcaggttcgacgcctcaatgacagcacagatagcgcagtcatcatgcaagagggcgatacgagcgtgctttcagtggcggttgcggaccctgagccaacatggcgcaccgcgctgagcgagttctgcgcaacggtaccgattcctgttaaagagcttattggcatgcagacaggtgagcgcgcaagtaccgaggatgcaaaaggatgggcgcgcacgaggatgagccgacgcaatggcttcctgaccgacgtcatcaccgaagtggttactcgtttctggacgctgggggttatccctcccgccagcggcgaagaagtcaccgtgggatggtctgatctgctggcgcctagccaggcagagaggattgccaacatggacaagctcgcggacgtggctgtgaagtcgacgaatgcctttggccgctctgctatcacagaaaatgagatacgcgcggctggcgaactgcaagccctgcctgaacttgatgatgaggtgccgccagatggcaacaagccaaagcctgatccactggcctacccagaatcagaagccgaaaagtccggtgataccacggtcgaaagttga

SEQ ID NO: 221656 - DNA, 225 bp, Klebsiella pneumoniae
atggaagaggttatccaggcaacactgaaaagttttatttggctcgagggaagaacccagtttcgtgtagaactttcaattgatactggtgatgaagagatctttgatgtttcgatttacttcaataatggagaagacgccttctacacgagatattttaagacactcactgaagcttgcgctgaatttaacgggattgtaactgcagcgaagggcaagatttag

SEQ ID NO: 221657 - DNA, 162 bp, Klebsiella pneumoniae
atgtcggacaaaaccagtggtgggaaaatcgacgacgatgcctggtatggtgatgccgttgataggccagaaacactccacgttggcgctattcattacgatattgaaatggatgtggcgcatctcattgctgagcagcgtgaatctgagcggagggggtag

SEQ ID NO: 221658 - DNA, 369 bp, Klebsiella pneumoniae
atgggcgctaaagttcgcggcatccgccaggccaaggccaacctcgatcgcatcatcaaagacgtccaggggcgtaaagtcgtgcgggcaatccagtctgcgatgcttatcggcagcgcgcaggcagcactttacaccccgatcgatacgtcgacgctcatcaacagccagttccgcgaaatcatggctaacggcaccagggtaaccgggcgcgttggttactccgccaactatgcggtgtatgttcacgacccggcagtgaaacaggacttccggcgagcaacggcccgcaaggagttcttaacgaagggcttcgaggatacccgcagccagattgacgcggtggtgaagaaggagctttcgctatga

SEQ ID NO: 221659 - DNA, 384 bp, Klebsiella pneumoniae
atgacccctccgatgtatatgcgcctcaaagacctgtttgtggctgaggggcttaccgcggggtttaaggtccagtggcggcaatggcgcgacaccgggaaagacacggatcagttcatcgtgttcaggccttccggcggaaccgatattacctacgacctcggcggcgactggtatgtgatggtagatgtgatctcctcgaaggccaatcccgatgctgctgacgccgcggtaaacgccattgtcgagtatatcagcgcgcaatccggcgccgatgattgcgttggcgcgctgcggcttgtcggtaatgtcccggcgccgatccccaccgaagagggccgattagtaacccggctgctcgtatcctgcacttacggggagtaa

SEQ ID NO: 221660 - DNA, 765 bp, Klebsiella pneumoniae
atgcaaggctgcgctaatgacaccggcaagctgattggtaaggtagccgtgctccgcatggcttttggctgtgctgatacggttcctgcgctttccgaatggaagcgactcggcgccatgaccaccaagggcttcgactactccatgaataccgtcacctctgaggctgacgatacaaaggggctggttgagaacctggtcaacaatatggacttcaccatctccggagaaggtgagttccgcaagaaagacaagacgacggaagttggcgctattgccatctcgaaatatattttcgatgaagtgcaggcaggccgtcagccgacagtctgggtccgcttcgacttcactggtgaagacgccggcacttatatcatggggtacttcaacaccacctcctggtctggtgatttcggcaccacggatatttcgaccttctccggggaatggaaagtctacgatgcagacaccgtggaatttgaggtcgcccctccggcgctggcgtttaccacaaacctgccgacgaccaagagcgtggcggccgggtcggctctgaatatgtcggtcttggttgagggtggcacttcgccttacacctatgtctggaagaaagacggcacggttgtcagcgggcaaacaacggcgaccttcaacaaggccagcgctgcttccggtgatgccggtgtttatacctgtgaagtcaccgattcctccgcgacaccggtcaagatcacgtctgcatcctgcacggtcactatcagttaa

SEQ ID NO: 221661 - DNA, 696 bp, Klebsiella pneumoniae
atgaccccgattaaagaattaggcgaatgcgttatcggtaccggtgaccgggaattctttttccggccatcgtttcgcaacatggcacgcattggagatccagaggaaattgtccaggcgttctatgacctgtgcaatgacgagacgacgccattcgcgcagcgtgcggtagaggcctatgtccgcgatgagtacagccgacttcctgattgcgtccttcggtttatgcaaagcgggcttctgtcacgtaaagcgatcatggccgcgcatacggtactgacagcctgctgtgatgatgatatcggcgatctggttggctggatgaagccggggaaatcacgtaagcgtggtttcgtatggcgcccgggcagcatgccgccggagagcatgatcatcgtcgcgcaaaacctgatgatgcacggcattatcggcaaagcgaaggtgcgtaagctgcagcgttacgaaacgaacgagacaaccgcagaattccgcgcagccgactacatcatggcggcccgtaaccatttcggcataagccgggaagaggccgagaacctcacgatgacagaattcagcttacttctgaatgctaaatatccaaaccaaaagggcttcacgcgtgaagagtacgacacggtcatggacgaagacgatcgccgctggcaggcgatgatggaaagtcaggcaaatcattaa

SEQ ID NO: 221662 - DNA, 804 bp, Klebsiella pneumoniae
atgaattttgatgattcatttccaaaccgagtatcgatagcaagaaccgctcttggcctgacccaggatgaactagcccagaaggttggtgttgtaagaaggcaaattgccgcttacgagggcggggaagcaaaaccaagaataaatgcattacagaatcttgcagctgcgcttggtacaacaacatcctggctaacaagtggtgttggggatgggcctgatgtaagcaatgtaaagaaaacaataacgttgcctgagattccagtgctttctcacgtccattcgttctcttttgaagttgaggagtttatttcctcttcatcaattatcgatttcattcctgcacctcccggtgcacacgaaaaatgcttcgcacttgagatatcaggtgactcaatgtccaccgactcaggtgatagctttccccatggaaccatagttacatttgacccaaacaaggaaccaaagagtggggactatgtattatgctggctgaatgacaccggcgaaaatacgttcaaacaactgatactcgaccaaggccagccttatctaagagccttgaacaatcggtactatccagtaattagaccaactcccttacttatcatgggggtggcaattcattcacagcgatttctcaacaaaaaaatccatcaagaacaactaagcatgtttgaggatgatcactgggctgagcgagaaaacttaaattcgcagaagcatctaaagctcatagatagaataaaaaacttggaagaaaagatggatttaatccttaacttcgtgaaaaaacaaaaataa

SEQ ID NO: 221663 - DNA, 174 bp, Klebsiella pneumoniae; identical to SEQ ID NO: 207713

SEQ ID NO: 221664 - DNA, 621 bp, Klebsiella pneumoniae
atgaatagtgtacagaacaaagagctaactttccacaacaccagttttgcttacatggaaatgggtggtcaggtctggctgacggccaccgaagttggtgaagctctggagtacgctgacgataaagcagtgcagcgcatctactctcgtcatgctgatgagtttacagcacaaatgacaggggtggtcaaactgaccaccccttctggaaagcaggaatcacgcgttttctcgctgcgcggtgctcaccttgttgcaatgtttgcacgcacgccaaaggccaaagagttccgccgctgggtgctggatattctggatcgggaagtggcgcattcgccgattgcgaagcagttcagtgatgatgagctttgctctctggcatggttatggcgagcaagtgacatcatgcttacagcttgtgagagtgttactccattgctgaaggtggccgagcatcggcaggccgggcgctttcacacaatcggtcaggagttgccgcggacaattaacaaggcaagggcgctcattagccgcgagacggcgcatatcgagtttcacccatggaaggatgacaactggagcagggtattaccgcacctgcgtcaggagatgttgcaatga

SEQ ID NO: 221665 - DNA, 756 bp, Klebsiella pneumoniae
atgacttctaagaatgtagcaaatgtaggttcaattgtcactgataaaaccattgacagccagtccctgcttgaaatggtcaatcaggcgcgtaagcaatgcggagagaagccggtacgtaataacgtattcatcgatcgcattcgtgatgagcttgagggggagggttacaaaacttttgtaacccccatggacaagtctaagggcggcgccgatcaggtcgtaatcgaaatgacggtcaagcaggcactgcgcgtggctgcacgcgagtctaaggccgttcgccgttctttggttgataagttggaagacatgcaggctatccaggtgccttctaaaagcacttcagggcttactgaatatcggcttgccaaagctgaacaactcaaagctcaggcgctggagaaaaacatcgcatcggcccgcgagttgatgtcaatgttcccgcgacttggtgaatcggctaaccaggtgatcgttgccacccttgttaacccacttctcggtcacgaagttgtgccactgccagcgattgaagagcattactctacggcgggtgaagtggcggcgcagctcggttgcactgcgaacaagatcggtcgcgtagccaataaacacaacctgaaaactgagcagtacggcaagttctttctggataagtcgagacactcggataagcaggttgaggcgtttcgctataactccgagggggttcaggcacttcgccacctgattcatggtgctgatgtagcgtaa

SEQ ID NO: 221666 - DNA, 543 bp, Klebsiella pneumoniae
atggctgattggccttttggtgtcggcaatactggtgcctttgttcatcgcgttggttaccaagtagcgctgcggcgggttttgtcgtatcgcttcccctctgctacgattgccgcatcatttactgatggggatagggatatgaaacgcatcacggcagtggcattgctttctctcgcgttaaccggttgctataagtcagcgccaactgagcaagaggcgatcgatacggctaaaaaagaagtattgatggctgtatgcggtgataaaaacaatagttgcgtagatattagcggtgggaatgcgcatgtcgctgatcgaagaaatgacaacaccaaccaagttactgtcactttcaaaacaatcaaagccaatggtgacgcacaggaatcaaatgctgtaaacgtagatgcaggcatggtggtctacgacttcgacgccaaaacaggtgagacgtacattaaacaactttcgctctggtccgatgatggaaagcactctatagaactatgcggacatgattataagttttgtcgaaagtaa

SEQ ID NO: 221667 - DNA, 2037 bp, Klebsiella pneumoniae
atggcggctggcctgggtttgtccacggggaagttacgacaggcaatgcttgatggaaaaatcacagccgaggccgcccttaacgctatcgccaaacaatctgcggttgttaatcaggagtttaataaactccccaggacaatggagcaggccagcaatagccttaccgtctcgctttccttactggtcgggaaaatgaacgaagccaccggcgccagtacaacgatggtggccatcatcgactctataagtgcagccatagacaggttgagtggaagaaccgagacggcggcgcaaaaaattgctgacttaacatcaactgcagaaatgtacagcaaaagagcaaggacgtggtcatggctcggtcttgatggttggtctcaacagaataaggcgctttcagtgctaagcaccaaggcggccacccttgccggtgatcttagtgccgtaggtaaagcttctgaggatgccgctaattcgcagaaggggtttggtggtgtaaacgcggccaaccccaaacaagacaatctcatcaaaatatctgagcgccgtcttgcattggcaaaacttgaaggcggggcgcgagccaggcttcaggcccaatatgatgcagctgatgctggggtgaccgatccgaagcgaatcaaagcgctgcaggacgaatacgccgaaacctatcgggttacggaggcgaggaaggaaagcgacaaagccgggaagcagtcggcgtctaccgcagattctattgcccaaaaactcgaaaaccttcgccagcagtctgagcttgcagcggactcaactcaggaattgagccgtgagcaggcgatattgcgtgcgcagcagtctctcggtaaatcggctactcaggctcaaatccaggaggcaggcaaatacgcagccgccgcatgggatgcagccgcagcggcgaagggggtaactgaggcgctaaatgctattccagaacaggcggagaataaatcctacgctgaatccatgcagaacctgaaagcggcgctgaacgccgggaagattgatctgcaggagtacaacgcagccactgagcagatggagcagcagcatcaggccaaccttgccaaaatacgctcgcagcaggtggttaaccccacccagcaggcacttgccgaagttgacccggtgcagcagttggccaaccagcacgcgcaggagctggcgctgattcagcagttcgagcagcaaggggttctcgctcatgagaatgcattggcgctgaaaaatgccgctgaccggcaatatgagcagcagcggatcgcagctcaatgggaaattctcagccagcagagcctcggctataacatgctgacgagtgcggtggatgcgtttagcgggaatgcctccaatgcgatcaccggtctgctaaccggcacaatgtcagcgcaggaggcgatgcggtcgcttgggaataccatcctgaacagcgtgatcaacagcattgtccaggttggcgtcgaagcgctgaaaaactacatcctcggtcagacgctcggtgccgcatcggtggcgacatcagtcgggctggcagcaaccaccgcgtctgcctgggctccggcggccgcgatggcatcgcttgcctctttcggtgctaacgctggcccggctgcggctggtatcagttcgacagttgggcttgctagcgggcttgcgcttgccggcgctcgctacaacggcggcccggtatcagccggcggcctgtatcaggtcggcgagaaaggcaagccagagatttaccaggccagtaccggcaagcagtacatgatccctggcgataacgggaaggtcatcagcaataaggatatgcagggcggcggcgggttgaatgttcaggtagtcatcaacaatcaagcgtccaatgcagagccgcaatacatgggggccactcagaatgacggcaattatgttctggagttcctgatttctgatgcggaacgcaatggaccatatatcagcacgctacaatctactcttgggttatcacgtaaagcaaaaggagcattttga

SEQ ID NO: 221668 - DNA, 246 bp, Klebsiella pneumoniae
atggattcagatgtcaagagtgcgggcccaggtgagagtattactagagatttagaatatggaactccaactgtcttctgtaataatcggccagtaaagtttcgcattgaaatgactaatgggtcggcgctggaagggatcatccctgccaacacggattttattgtcacgcttcaaccaggcgacattactaagttcgaaattatcgttgaagacataccaagagaaccagcgattgtagaataa

SEQ ID NO: 221669 - DNA, 2244 bp, Klebsiella pneumoniae
gtgcgcctatcaagggcgacatgcacaatggcagaagttccactcccaacgccgacgcaggttccggtaccaagtaccgatatccgtaatgcggtatttgcaggcgcgaagcttgacgaagaagttactggcaccggtgaattctatactgaccgtcttggtgtaaagcgcctgacgaacaccggaagaaataatcagttcgatgccgcgcagctggacagagctaatcggtttgagcaattccttctgtcctccggctacgtttttcttggcgactatgaggatggtccttttcagttcagcgcccgtaaccagtacattcgttacgacaaccagtattaccgcctgaatgctgctactgacgtcggctttacgaccaccggaaccgatgcgaccagctttgcgaacgacgttactcactttgttctgatggatggtgacacgcttcgccaaaacctgggttcagacgaaggcgccgatttagtcgcaggcaaaaagccatatactggcactatgcggcgcaaagtagcagaaatgctgtcggaaacaatctccccgtgggattttggttgcaaacctgatgcagtctttgacccggtaacacaacgcctgatagacggcacagataataccgctaacctgcagcgaatgttctctgaggcgcattatcatggcgtggaaattaacttaccgttcagtggcaaatttgccagcaagtccctttatttacattatgatcctgtaaaaaatccagactggaccgaccgccctggtcgcctgacaattcgaggaagtgttcttggtcacgcaaccggagatgtagagcgtcaggggacggcgatttatcatattcccggagaaaactcgccgttaatatcaatgattggagaattcagtatttccaacccggcagcaatgggcgggtattttaagctgtcttcattgaatttaatcggcagtcaggacagctcagatgttcttctgttgcagggtagtcaggggcagatgaagttggaaagatacgatgtaaaagtactcaatccagctggtaacgggataacagaatccactacttgggaaacgcttcatctgcttgggtttatacgtgggccagctacaggagatggttcatgtaccggtattggtttgaatatcaaatctgatggtactattggtcagattaatatgaagcaatatcttctcgttaatgtgatgaagatgggatatggcatccgggcggggcgtcgtgaaaaaacaaatggaactttgggcccattggtgtttactggtgggcaaacttctggtgctgatcatcacgggatgtggctggatggcggggtaatttctttcacatcaataggtcagcagcatgaaggatgtagaaaaaatggtattagaatagataatatacttgaagatggggtggtaagctctgatcttgcacgtaccattaaattccagcagaactacattactggctgcggccgtattgaggatggaagtcaggatagttatggtgtaaatattgttaacggcgatgggattgaactggatactttaacgtttaatgaggtgggtaatggaatcgcattcgatgccgcaaacgtagataacctgttaattcgtcgcccacattttcgcactgttcgagcgtacggaacatctcagggctttggtatccgttcattctccgacggagtgccgcaaaaacgtcaataccttgaacacccggtatttaaccaaactccggccacacagattgatgataaagcccgtgaaatatttggtcgcggagcggcaggaggtcgaatctcattttcgacaaacacaccgacgccgagtattattcacggctcaggctcagggaatgagtcgtaccgcatcctcaattttaacaacacgacagccaccactattaccaacattaccggaggcacaccctatcagcgcctgctgattacattttcaaacgatgcaaccacgatacagcacagtagtaatattgttctgcgtggcggtaaagatgttcaggggacggtagggaagacgctggagctgtactacacggggtcattctggcaagaggtgggagacccggtaagagcgctcactggaaccagcgcaaatcgaccattcagtacagcgtttcccggtatggaatatttcgataccacgctgaataaacccatctggcgtaatgcggccaataacggctgggttgacgcggcgggtaatgtggtctga

SEQ ID NO: 221670 - DNA, 291 bp, Klebsiella pneumoniae
atgtcttttgtaataaataaaacgctggaggccagcgttattgcggacagtggcacggcgattggctcggttcaggtcacggtggatgtgacctatacaatcacgttgattcaggtaattgacgacagtacagcctacgcctcggtatcggcatcagtgaacggacaagcgccaaaacaggttgaccagtttgagtttaactacacaatggaaggtgggaagagcttgtttgagcaggcagaaagtaacctgctcagtagcggaaaatatgctggcgggatagttatctga

SEQ ID NO: 221671 - DNA, 285 bp, Klebsiella pneumoniae
atgtcagatattgaacttgaaagatttaaggcaatgcttcgtgatgagtctattgatgacctgctaaccgcgcttgcgtacaagattcctttgtacagattagacccattaatcatcagggggcgaacagagcacattacaaatgcggaattaatcgagtcgtttgaccgattatatcaggccggaattttgatgactggtaagaatggtcaagtagtgaaggggcctaaatgggttgaaccagagttcgtgaaaatggagaaatactttccgcatccgcggtaa

SEQ ID NO: 221672 - DNA, 540 bp, Klebsiella pneumoniae
atgccattacccgaacgtttgcaaccagccaaagtaaaccgccagaaactgaaacagctagcggacatggccgaagagatactggcgcaaattgataacggggctaaggaagaggatgccgggttgaaaatgttgataaatgactggaatagccaggttattaacccgtatgcattctctgatttccgggatttctcttcatggaccagtgcaaaagacttcacccggatggcgtttaatcaggaaaaatacgtggcggatttatcctgggatgagctgattcagatcatccagtttgtgtgtcaggccgaaggtaaggaatctgaacaaagctacgcgctgggactgcttgagaaaaactttgatgccaatccatccgaccttatctactggccagatgaatggtttcaggataaagacatgcttcatgtcgatttgacgcctgaagaaatcgccggatacctgatggcaaaatctggccggcggctaagcgatgcgccgcacatcgagctgaagtatcctatcccttcaaatatttaa

SEQ ID NO: 221673 - DNA, 1557 bp, Klebsiella pneumoniae
atgaacagcacctccgccgacttccagaatctgtaccaggccctgagccacagcgccgcccgcagcccggatgccctggcgctggcgtttgaggatcggcgctatctgtaccgcgattttcatctgcgggtacagcgagcgatggcgcagcttgatcgcggctggtcgctgcgcaaaggcgaccgtattctgttggcctggggcaatcaccccgctttttgcgaagtcctttttgccgcgctgggtttgggcatcgaagtggtgcctttcagcaccaagcttaagcaggccgaaagcgaggcgctggtaggccatatcgctccccgggttgtcctgttcgatgcgaccgtgcaggactggctgaaaaacacccccgacgcgcgtgcggtttcactcagcgaatggcaggcgctctgccttcccgaaccgctgacccgcccgccggtcccggttaaccgcgacgatacggcggtgatgatgttcacctccggcaccaccggagagcctaaaggggcgattatcacccacaataacctgctctgcgcgattgacgcctatacgcaaaaactgaatctcaccgccgcggatagcaccatcctggcggtacctatctatcacatcaccggcctgtcggcgctgctggcgctgtttattagcctcggcgcgagcatctggctgcagcatcggttcaatgccccgcaggtgatcaccaccctgcgcgagcagaacattacctttctgcacggctcgcccaccatttttatccttctttgccaggctgcgcgtgagcagagcgccagccatcccagcgattttccggcattgcgcacgattgcctgcggcgctggccacttgagcgatggactgatcaaggagttaaaaaccctgtttccgcataccgcgattcagccaatctacggcctcaccgaaacgacctcgcctgcgacgatttttgcgggcgacgtctggggcagcgataaatgcggcagttcaggtcaggcgatcccgggtctcgccattaccatccgcaacgatcgccagcagcccctccccgccggacaaatcggccatatctggctaaaaggcgatgtggtgatccgcgaatactggcagcacagcgagcgacgcccgagctgcgatgcgcagggctggttttgtaccggcgatctgggctatctcgacgacgaaggctggctgtacatcaaagaccgcagcaaggacatgatcaatcgcggcggcgagaaaatttactcactggagctggaaaacattctctctacctatcggggagtacgggaagttgccgtcatcccgacccccagcccggtctacggcgaagagcccgtggcgtttatcgtgccggatggccagcatcacctgaccagcgaagagatcctcgactggctgaaggtcaaaatcgcccgctttaagctaccggcgcgcattattttcacccgtgctttaccgcgtacccacaacggcaaagtgagcaaacagcagctcaaaacgcgtctcgcagaatccatcatcacgctatcaacggaggataaaaagtga

SEQ ID NO: 221674 - DNA, 1593 bp, Klebsiella pneumoniae
gtgagcagcaaatttatcgacgcccatgaggcggcgcggtgggtcgccagcggcgacaccatctgcaccgtcgggatgacgcttatcggcgcggcggagtccattttaagcgccatcgaagcgcgctttctgactgcgggcgaaccgcgtgacctgacgctactgcatgccgcagggcaaagcgatcgccagcgcggtatccagcactttgcccatccgggtatggtgacccgccttatcggttcgcactggggcctggcgccgcgctggatggcgatgatcaacaacaacgaagttgaagcctggtgcctgccgcaggggcagatcgttcatctctatagcgcgatggccgccggactgccggggcggctttcccccgtcggtctcggtacctttgtcgatccgcgcatagagggcggaaggatgaacgcccgcacccgcgaacgacccaatctgatcgagcacgtcacgtttcgcggcgacgaatatctgttttatccggctcttcctctggacgtggtcattgtgcgcggcacccatgctgatgaagacggcaacctcacgaccgatgaagaggtgatgaagctggaagtcctgcacgccgttctcgccgccagacgctacggggcgaaggtgctggcgcaggtgaaatatcgcgtagcgaaaggctcgctgcatccgaaaagcatcaccgttcccggcaacctgatcgacgccatcgtggtatgcgaagagccgcagacggatcaccgccagacttcaagctgggccttcgacccagcgctgtgcggcgatatccagctgcccgccgcgcaaaatgcgccgctgccgctggacctgcgcaagcttatcgggcggattgcctgccgctatctgacccccggctgcgtcatcaatctcggcaccggtattcccaatgacgtgattggcgccatcattcacgaggaacagctcggcgagcaggtcaccatcaccgtcgagtcagggatctacggtgggcagcaggcgggtggcgtggattttggtatcggccgtaatctgagcgcgatgattagccaccaggatcaaatgctctactacaacggcgcaggggtcgacatcacctttatgggcgccggcgagatggacccgcacgggcacgtcaatgccacacggctcggcgcatcctgccccggcgcgggcggttttatcgatatcacccagaatgcccgccacgtcgtgttctgctcctcttttaccgccaaggggctggagatcgcctgtgaacacggggcgctgcatatccgccgcgaaggcgaagtgcgtaaattcgtcgccggggtaaaccagatttcttacaacggcgaactggcccgcgccaaaggacaaaccatgcattacgtcaccgaacgggcggttttcgaactgcgcccggaaggaccggtgctgacggaaatcgcccccggcatcgatcttgagcgcgacatcctggcgcatatggattttcatccggcgatcgccgcggatcttcaggttatggacagccgtttgttcaccccgccgccctgcggtctcgcggaacatctgtcccggaattcatcctctgactcataa

SEQ ID NO: 221675 - DNA, 735 bp, Klebsiella pneumoniae
atgaaacttgccagtaaaaccgccattgtcaccggcgccgcgcgcggtatcggctttggcattgcccaggtgcttgcgcgggaaggcgcgcgagtgattatcgccgatcgtgatgcacacggcgaagccgccgccgcttccctgcgcgaatcgggcgcacaggcgctgtttatcagctgcaatatcgctgaaaaaacgcaggtcgaagccctgttttcccaggccgaagaggcgtttggcccggtagacattctggtgaataacgccggaatcaaccgcgacgccatgctgcacaaattaacggaagcggactgggacacggttatcgacattaacctgaaaggcactttcctctgtatgcagcaggccgctatccgcatgcgcgagcgcggtgcgggccgcattatcaatatcgcttccgccagctggcttggcaacgtcgggcaaaccaactattcggcgtcaaaagccggcgtggtgggaatgaccaaaaccgcctgccgcgaactggcgaaaaaaggtgtcacggtgaatgccatctgcccgggctttatcgataccgacatgacgcgcggcgtaccggaaaacgtctggcaaatcatgatcagcaaaatccccgcgggttacgccggcgaggcgaaagacgtcggcgagtgcgtggcgtttctggcgtccgatggcgcgcgctatatcaatggtgaagtgattaacgtcggcggcggcatggtgctgtaa

SEQ ID NO: 221676 - DNA, 660 bp, Klebsiella pneumoniae; identical to SEQ ID NO: 135156

SEQ ID NO: 221677 - DNA, 756 bp, Klebsiella pneumoniae
atgaaactaaagaccacattgttcggcaatgtttatcagtttaaggatgtaaaagaggtgctggcgaaagccaacgaactgcgttcgggggatgtgctggcgggggtagcggcggagagttcgcagcagcgcgtggccgccaagcaggtgctctccgatatgacggtagccgatatccgtaataacccagtgatcccgtatgaggaggactgcgttacgcgcctgatccaggatgacgtgaacgaaaccgcctatcagcggattaaacactggaccatcagcgacctgcgggaatacgtgctcaacgacgaggtcaccagcgacgatatcgcctttgtccgcaaagggctgacctccgaggtggtggctgcggtggccaagatctgctccaacgccgatctgatctacggcggtaaaaaaatgccggtgatcaaaaaagccaataccaccatcggtctgccggggacctttagctgccgcctgcagccgaacgatacccgcgacgacgtgcagagtattgccgcgcaaatctatgaagggctctccttcggcgcgggcgacgcggtgattggcgtcaacccggtcactgacgacgtggagaacctgagccgggtgctggatacggtgtacggggtgatcgacaagtttaacatcccgacccagggctgcgtgctggcgcacgtcaccacccagattgaagccatccgccgcggcgcgccggggggggcttatcttccagagcatctgcggcagtga

SEQ ID NO: 221678 - DNA, 1404 bp, Klebsiella pneumoniae
atgaatcaacaggacattgaacaggtagtgaaagcggtactgctgaaaatgaaagacagcagccagcctgccggcaccgttcatgatatgggcgtttttgcctcactggatgacgctgtcgcggcggcaacggtggcccagcagggattaaagcgggtggcgatgcgtcagcaggtgattcaggccattcgtgaggcgggtgaaaagtatgcccgtgaactggcggagcttgcggtgacggagaccggcatgggacgcgttgaagataagtttgccaaaaacgtggcgcaggcgcgcggcacgccgggcgtggagtgtctgactccgcaggtgctcaccggcgataatggcctgacgctgattgaaaatgcgccctggggcgtggtggcctcggtgacgccgtccaccaatccggcggcgacggtgatcaacaacgccattagcctgattgccgccggcaacagcgtggtcttcgccccccatccggcggcgaaaaaggtctcgcaaagggcaattaccctgcttaaccaggcggtagtggccgccggcggcccggccaacctgctggtgaccgtggcgaacccggatatcgacaccgcccagcggctgtttaagtaccctggcatcggcctgctggtggtgaccggcggcgaagcggtggtcgaggcggcgcgcaaacataccaacaaacgcctgatcgccgccggggccggcaacccgccggtggtggtggatgagactgccgatctaccgcgcgccgcgcaggcgatcgtcaaaggtgcctcttttgataacaacattatctgcgccgacgagaaggtgctgatcgtggtcgatagcgttgccgacgaactgatgcgcctgatggaaggccagcaggcggtgaaacccacggcggcgcaggccgaacagctccagccgctgctgctgaaaaatattgacgagcgcggcaaaggcacggtcagccgcgactgggtcggtcgcgacgcgggcgaaatcgccgcggcgattggtctgcaggtgccggcgcaaacccgtctgctgttcgtggaaacccccgccagccatccgtttgcggtgactgaactgatgatgccggtgctgccggtggtgcgggtggcgaacgtcgaggaggccatcgccctggcggtgcaactggaaggcggctgccaccatacggcggctatgcactcgagcaacatcgacaacatgaaccagatggcgaacgccatcgacaccagcatcttcgtcaaaaacggaccgtgcatcgccgggcttgggctgggcggcgagggctggaccaccatgaccatcaccaccccaaccggggaaggggtgaccagcgcgcggaccttcgttcgtctgcgccgctgcgtgctggtggatgcgtttcgaatcgtataa

SEQ ID NO: 221679 - DNA, 1869 bp, Klebsiella pneumoniae
atgaaagagccaaataaaatagatggaaatcgccgcgatctcctcaaaggtctggggattgccgcagtcgtgagcctgttaccagagacgggaaacgccgcgcaaaataatgccgccccgaaagcggcatgggatattcctttcaccggcgaaatccctgacacactgcccgaaggctacaatattttactaataacctgcgatcaggaacgttatttcgagcggtatccctttccggtgccgggccgggaacgcctgatgaaaacgggtatcacttttaccaatcatcagaacacggccaacgtttgtacgccatcgcgctctgtcatgtacaccgggctccatatgccgcacacccggatgtttgataatcttggcttcccctggatgaattacgatctggacccggaattacgtaccgtgggccatatgatgcgtgaactgggttattacacggcgtataaaggtaaatggcatcttacccgggagatcgatcagccggtcgctggtaaatcggtagaagaaatggacctgggcgagatcccgacgccgcgactgcatgaaattatggaaaagtatggtttctctgattatcacggcattggcgatgtcatcgggaaaagtaagggcggctatttctttgattcagtcaccacggggcagaccattagttggctacgtaacaccggccgcccgctgaatgatgaaaataaaccctggttcgcggcagtaaacctggttaacccccacgatgtcatgtttatcgacaccgatgagcatggtgagcaggtgcagtggaaagggccaatggataaagaaaaccacaccctgctgccaacccaacccccgcacaaccaaatctatcagcaaagctggccagactatccgctgcctgcaaaccgccatcagccgctcgatgagcctggcagacctgccgcccataaagagtaccagaatgccagggcggtgatggagggacagttccccgatgaagaccggcgctggcgcaaattactggattattatttcaactgtattcgcgataatgaccagcatcttgaggcgattctcaatgagctggataacctgcagctgacgcaaaatacgattatcgtctttaccgccgaccatggggaactcggtggctcccaccagatgcatggtaaaggttcctcggtgtacaaagagcagatccatgtgccgatgatcattcgccatccggcgtatccgggaaatatccgctgcaacagtttgaccaatcatctggatttagtaccgaccctgattggtctgactggacgcgatcgctcgctgcgagagaaagtcctggagggcagaaaaggccgggatatgagcccattactggcgcatcctgagcaagcgggcttaaatgcgctgcgtccgggttcgctttattgttacggcatgatcctgtatatggatgcgcaatacacggcaaaattcagaaagctggctggagagaaactcccgcacgatcaatttaaaaaagcgatcgcgtcactccatcctgatttttcccatcgctcagggatccgtatgatcaacgatggacactataaatttgcccgctacttttcgctcaagcagcatcatattcctgctaccctggccgaactgctggagaataatgatgttgaacttttcgatctggttaacgaccccgaagaaaatcataacctcgcccgggagccagagaaataccgggatctgttaatgacaatgaacgataaactcaatcagctcactgccgctgagattggcgaagatgatggcagctatatgcccccgtttgaaggaagccagtgggatctgacggcggcccagatgcatcaatatatgcgcgattag

SEQ ID NO: 221680 - DNA, 276 bp, Klebsiella pneumoniae
atgtcttttgtgaaaaacaaaacgcttgaggccagtgttattgcggacagtggcacggcgattggttcagttcaggttgcagtagacgtaacgtattctatttcacttattcaggtagtagatggtgacaaagcctatgcctcagtatctgcatcggttaatgggcaggcaccaagacaggttgatctgtttgagtttaattattttcttaataatgggaaaaccctttttgaacaggctgaagaagccttgcttatcagtgagagatatacataa

SEQ ID NO: 221681 - DNA, 2463 bp, Klebsiella pneumoniae
atgacagtttcaacgcaggtaagccgtaacgagtacaccgggaacggcgccactacccaatacgatttcacgttccgcattcttgataaaagccacctgctggtgcagacgctggatacctccgaaaacatcgtgacgctgacgctcggtaccgactacacggttactggcgtgaaccgttacaacgggggtaaggtggttctgacatcagcgctgccagctggctacaaaatctctatcgagcgcagcacgccggttacgcaggaagccagcatcaggaaccaggggggcttctttcctgagatccacgaagatgctttcgataagctgactatgctggtgcagcaggcgtatggatggtggtctggtctatctctcaggaagccatcatggctcgcgaactattacgacgcactcaacaaccgcattcgtaacctgcgtgacccgtcacaggcgcaggatgcggctacgaagaattatgttgataacggaatatctgggtctatttcacatgcagatgatctttttaaaagaactctgcgagtccctgaatcgttggttggaatgttgccaaatatttatggccgcaaaaatagaatattagcgttcaatgatcatggtaatcctattgctgtacttcctgaatcaggtagtgcagctgatgttcttatagaattggcttctgaagacggcgccgatttagtttggtacaaaaagccatatacaggtgctatacatcgcccaatagcagatcaactatctgaaacgatctctccgtgggattttggatgcaaatcagatgcagtattcgaccccgtaacgcaacgtctggtagatggcacagataatacgactgctctgcaaagaatgctgtgtgaagcacatcatcacggcatagaaattagtctgccgatgaacgggaaattcgccagcaggtccctctacatgcactacgatgccgtaaaaaatcccaattggactgatcgtcctggccggttgaaaatttctggcggggtgctggggcacgcaaccggggacgtggagcgtcagggtacggcaatattccatataccaggtgaagcatctgctttgctatcgatggttggagaattcagcctgaccaaccctgccggaatgggtggctattttcagctggaggggatgaatcttatcggtagtcaggacagctctgacgtcttgctgatgcagggcagtcaaggggcaataatgctggctaactatacaataaaggtgctgaatctcgccgggaacggactgacagaggctaccacatgggaaaccatgcacatgaacggtcttattcgtgggcctgctacaggagacggctcgtgtacaggtataggcctgaacatcaaatctgatggaacgatcggccagatcaatatgaagcagtacatgaacgtcaacgtaatgaaaatgggttacagtatccgcgcgggacgtcgtgaaaaaactaatgggactttagggccattagtattcgttggtgggcaaacttctggtgcagatcatcatgggatgtggttggatggtggcgtgatctcattcacatctatcggtcagcagcatgaaggatgcagaaaaaatggcataaggatagacaatgtacttgaagacgggacagtaagctctgacctcccgcgcaccattaaattccagcaaaactaccttactggctgcggaagaattgaggacggttcggtaaatagttacggcatttacattgctaacggcgacggtatcgagttcgacaccccaacgtttaatgagtgtgggaacggcattgcattcgatgctgcaaatgtcgataacctgttaattcgccgccccacattccgtactgttcgggcgtacggaacatctcaggggtttggaattcgctcatttgcagatggtgttcctcaaaaacggcaatatcttgaacaccctgtttttaaccagactccggcaacgcagattgatgataaagcccgtgaaatatttggtcgcggagcggcaggaggtcgaatctcattttcgacaaacacaccgacgccgagcattattcatggctcagggtccgggaatgagtcttatcgtatcctaaattttaataactcgacagcaaccactattacaaacatcacaggaggaacaccgtaccagcgtctcctgattacattctcaaataacactacaacaatacaacacaacagcagcattattcttcagggtggtaaagatgttcagggaatggtagggaaaacgctggagctgtactacacaggatcagtctggcatgaagtaggtgacccagtaagagcgttatcaggaacaagtgcaaacagaccttttagcactgcatatccaggcatggaatacttcgatacaacattaggaaagcctatctggcgtaatgctgcaaataacgcctgggttgactcagcaggtaatgttgtctga

SEQ ID NO: 221682 - DNA, 261 bp, Klebsiella pneumoniae
atgccagagcggtaccagtatcctgtcgacgaaggttttgcggatcgtattcacaccccggaaggggtaagatccctggttgtaaaatcacagctgatggagttgctcagggagatggagcgagacggccacgatgtcagcggtgcggcggcggaactggtggcgctggttaactatgtgacaagctcgcagttgtcgatgcgggagctgcaaacacacctggacttctgcacaatgcagattagacaacatttaaagtaa

SEQ ID NO: 221683 - DNA, 852 bp, Klebsiella pneumoniae
atggaaaatcatgttttaatgtttcctgatatgtttattaacgcagataataatagcatacatatagcacaatctaatttaaactacaggaagttattgataaacgctctttattgggataagattattactacaaacaacaatttaattcatgtttctaataatgacactccaggcgttccagagcttaaaagggaagggttatttactgaggtaatgttgcctatcaatggtaatggtaattttgctacgatattatatgaagcaaacatgaaatttatgatcgagtcacttgcgcgtaaagatataaactttattgccagtgaggctgataaggtattgattaagaatagtaatgaggttgcacctgataatggcgagttatttactttgataaatgcaattccagagcctgatgaaagtgtaaatattcatgatgttttggagtttaggcataaaagacagggtgaactaaaaaacctcatgaacaaaattaatgagttgaatattagggtgttaaaagctgaaaacagagacttagagttaaaggcagcaataaatgaaatagatattgcgtgcgctgatgtcattagactatataatgaaagccgtataaaatttaacttatcagaagtaaaatttaacttcaatattcctgagatagtaacaaatgcaggtgcagcgtattttggcgcaaaatcaataggtcttccagaaacaggtgctattttagcttctgcaacatacggatttaatacttttgtgaacttttcttctgccatgtcattaagaagaatagacaaatcaaacccatttaattatgttgggcaaatgagtgtaaaacttaattaa

SEQ ID NO: 221684 - DNA, 615 bp, Klebsiella pneumoniae
atggggattcttggtaagttcggtaattttttagagaaatctggtgtttctgttttttcaaaagaaacattaaaactgcttaccgagatgaatgatcagggtgtttaccaatcatcgcttgcggcagttgactttgcgttatcaatgagaaatgaagagcactttgaaaccttcgtactttcgagaattcttctcgagccgtaccagtccagcaatgatgagcgcatgaccttatacaggattatgcaagacaattatgggcaggggttaaaaatgttcaagaaatcattagctttcgcaaaacagtatggtggagaagatattgttaaaggtgaatttaatttcaaattaatgggtttcagaataattatgttcaaccttgcatataattctaaattaattgattttgatattgcctcaaagttttatgaaaccttgtggcgatctacaaaaggtgacactcctgataatgctattgatgattttatacaaagagaaaagttaatggtaagtatcggcgtatccgatccaactgcgaatcaaaaaaaagaggattatcaattttataagaatgtgatttctttgtgggcaagtcgtggaatcatgaatgtatga

SEQ ID NO: 221685 - DNA, 3390 bp, Klebsiella pneumoniae
atgccgacgtatgaacaggatccgaaagagttgcttggcgaggacattcagcagatagccgcgccagatgacagcgatttttatatggaaacgccttctttactttccgccgtaaacccatttaccagcgatcagcgcgtgcagaaatccaggcaagcggctttccgcatagataactccctgggtagcttcattgccagtgctccatttagtcagtttgatcgcgttgatggctataacccgtttgataatgatgccgcagatattaaaggctatgaggactttgctgattcatttatcaacgccggatcgccagaggaaactcttgctattaagcaccgcatagatcagcagaaggcggacagggaatatctatccgaggtcggaggcgcaggaacgatttcaagtctggcaatgggaatgattgatccagttaacgtcgctgcgatgttcattcctgctggagccgtggcccgcggcgggagcatcgcagaaacagcagggcgttttgccttagctaacgctgcaggcggagttgcgtcagaagcatcattgcaggcgacgcaggaaacaagatcggcgatggagagtatttcaaacgttgcggttgatgctcttgtcggcggtattcttggcgctggcgcacaggttcttgcagggcccgctcagcgctccgctgttgctaatgccattggtgaaaatttgcggggcatggactctccgcagagcattggcgccgcgcaggtgttcaatacgacgctagatcaggagcaactagctgggcttggtctcgcaaataaaacactcagcgtcacgcctgctggccggctggctcagtctccatcactggtttcccgacagataaaccagcaactggctgagaataactatttctttgccaaaaatgacgaaggcctagctacatttacggcagcagaaacaaagattaagcaatacgatgccatgctctataagcagatggaaaccacccgagacgcttatcagcagtacagcaagtccgtcagcgccagcggtgcgaagaggatgaactttgtagatttcaatgaggctgtgggcatggctatgcgccgcggcgatcagagtgatattcctgaagtggcgcaggcggccgccagtattcggcctattttcgagagcacaaaagcccgtatgcaggagcttgggatccttccggaagatgtcgatgttgtgacggcacaaagctatcttccacgtatttataaattcgataagatactttcagaccgcactgaattcagggggaggatagccaactggatacagggtattagtgctaaaggagctgataaagccgggcagagaattgaaaagataaatgcaggtctgaaaaatgcggaggaatcagcgccgcgcgctgaggccctggcgagtgatatcgccgaagccgagaaatggtccgggaaaaaaatcctactcatggaagagctggataaacgcaataagctcatatctcaggaagctgacacacaggcgcgccttaccagaatagaaaaacaattggctgatacttcatcagaaagacttcaggccagaatgatgaaagaaagctctgatctcaaaacacggcttgatgatatagctcaggctaaagaagaacttccggtctatcagcgccatatggagttgctggataacccacggaaataccgttctgagcttcgccgactgcaaaaacgggcaaattcaaccacaaggctgaatgcaagccgcgagcgggctctaaagcagatggaacctctatcccgagaggaagcagaggacgctgctgacgagatcgtgaataaaataatcggcgcaccttccggacttgttcctgccgatattatcccagagagactcgttggccgggctggtttcaccaaaagccgaactctacttattcccgatgaacgtatagaggatttcctggagtcagacgtcaatcacatcatggaaagctacctcaggcaggtggctccggaaatcgaactgacagcgcagttcggccgtaaagacatgggggatcagattcggcaggttagcgaagaatatacgcggctgatcaaagaggcgaaaacgcctaaacaacgtgcagcgcttgaaaaacaacgcgaagcagatatcagggatataactgcaatgcgcgaccgccttctaggcacctacggcgccccgcaggatcctcgcagtttcttcgttcgggccgggcgggttgcaaggaatgttaacttccttcgcctgcttggcggcatgaccgtcgccgcggccaccgatctgatgcggccgatgatgcagcatggtctgcgtaaatctctcggtcctatggccagcatgctaaggaacatggatgccgtaaagatcgccacaaaagacctgcgcgaaatgtctgttggcctggagtacgttctttcaacgcgtaccaaagctattgccgacctcaccgatccctacagccggcgcactgcattcgagcgcggtcttaactggatgacgcaaaagtttgggaactggacattgatgaaccagtggaacagcgtgcttaaatcgtggtcaggaatgattgtgcagtcgaggatacttgatgcggctcggcagatatccagcggcggcgagatagccaaaaccgaattacgcaagatggcgcaggttggtatcaatgaggatatgctgcggcgcatcggtgagcagttcggtaagcacggcgaggatatggatggacttctaaccggccacagccacttgtgggacgatcgtcacgttagggagatattccaggccgcggtgctgaaggatgtcgattcggtgattgtaacccctggcgtgggcgatacgccgctgttcttcagtaaagaggggtggaaactgatcacccagttcaaaacgtttatctttgctcagcataatcgcgtgctggtatctggtattcagcagggcgatgcatcattctatcttggtgctcttggaactgttgcgctgggctcgatggtgtatatgatgaagcaaaagcttagcggtcgtgacatagattacagctggaataaccttgtgaaagaggggatcgacaggggcggcatgctgggatggttgtcagagccgctgaacacccttgaaaatgtaagcggcggcaggtttggtcttggcgcgatgtttggggcgccgccggtatccaggttccagagccgcaatgctataggcgcattgcttgggccgaccttcgatctcggtggtgatgctgcaacggtggcgcatggggtactgaacggagaatttgacagccagcaaacccacgcggcccgtaaaatgctaccatttcagaacctgtgggcgatatcaccactactaaacaaagttgaagagcagatgaaataa

SEQ ID NO: 221686 - DNA, 1221 bp, Klebsiella pneumoniae
atgtccggtcagtcgttcaacggtagcagcgatctggtaccaatcaacgttggtagcgttgcactgtacgttcagcagaagggctccatcatccgtgacctgttttactcattcgaccaggacagctatcaatccagtgatctgaccctccttgccagccatctgtttaacggttacagcatcagagactgggctttgtctgtacagccgttcagcgttgcatggtgtgcgaggagtgacggcatgctgcttggccttacttatctccgcgagcagcaggtatatgcctggcatccgcacccaatgactaatggctatgtcgaatcgatctgcagtattagcgaagggcaggaagatgcagtctatgcgcttattcgccgtacggtgaatggatcgacagttcgttatgttgagcgactgaacaccaggcagtttacagaacagcaggatgcatttttcgtggattctggcctgtcttacagcggagaaaacaccgactattcacgcacaatgacgatcagttccgccggtggctggacatatcaggatgaattcacgctaacgtgcagctctgcaatcttcgactcatcgagcactgattacgagatccatattccctacaccgaaggcggtgtcagcaagtcgatgcgtttgagcattgctggtgttatctcatcaacagtggctaccgtattagcaaaccgtgatgtgccgacagcgctgcgcaacactgcgcaatcaacatggtcgatagcacgtcggacatttgctggactgtctcatctcgaggggcaggaggttagcattcttgccgacggtaacgttgaacctcagcaggttgtatcaggtggcgaagtgacgatcgaaaaccactcgtcagtggtgcatatcggtttgccggtagccgcggttatcgaaacgctggacgtgaacgttgcagggcagtctacgctgctggataagaccaaactcatcaatcagctttgcgtaatgctcaacagcgggcgctcggtttgggccggaacagatgatgctcacttactggagtatacccagcgtgagtgggaattctacgacgacccggtagggctaaagacgggcatcatcgatatgaacctcgatgcaaactgggagcgtaacgggagagttgtaattagccattccgatccgctgccgcttggcattctggccattataccgcgtgtaacggtagggggctga

SEQ ID NO: 221687 - DNA, 267 bp, Klebsiella pneumoniae
atgatcagcaaattaaccaaaaaagaatcggcctggttcgatgaagttaacgcggtgctggcgcgctgtccttcgccggaaaaattcggcttctacaccattggcgatcctaacgtgatggtatacgacctgcgcaaagagaaagagatcgatcgcttgttagacacacgccgttcgccagattggtgtattgcggttcgtgacgccgacgctgagatcgacgccaatatttactttccttctgccgtactgagcacggcaggataa

SEQ ID NO: 221688 - DNA, 285 bp, Klebsiella pneumoniae
atgagcaagcacctaaaactaactgacgctcaaattttcacgcttcgccgtatgtataacggcacacggtatttcatgcgcggcgacaaacaaaaaggtgagcaagataaaatctcccaccgcgttaattgcccctctattccggtgctttttcgtgaggggctagtgaattggcgtaatccagcgtgcagaaaatttgatggcctgtattacagcgtgaatttaaccccttcaggcttcgatgcagtcgtagatggaaaaaccagcaaggagcgtgccgcatga

SEQ ID NO: 221689 - DNA, 402 bp, Klebsiella pneumoniae
atgaacatcgaaacagtaaacgagctcatcgcttccctggagagcgcaggcgagctgtcgatcaaagagacaacggttatggcgctggcgaaagcgtataagcagctggctgctgagaatgtggcgctgaagaacgccattacagaccatagtcattcggttcacttctgcgaggtttgcggaaaggatgatccgtgcagcactgacgatgtttgttatgcgctgaaagatatccccgctaccgatgcctacctggccgggattaaggctaatggccgcgttgaaggtgcgcactttgtggctaaccgaatgctggccgcctgggatgcaggttttattgaagacacagccaaaaacgccgccgatatcgcccagcagctgcgcgagggggccgacaaatga

SEQ ID NO: 221690 - DNA, 507 bp, Klebsiella pneumoniae
atgactgatggatatgtcaatgaactcgaaatggggaaatgtggtgagtattacgcaattttctcattaacaaaacaagggtttatttgtttcccgtcagaccagggattgccatatgacatcgttgtccaaagtgaaggaaggttattgcgaggacaggtcagatcaacacttcgtatgcgagattacggtaagtcaaaaaatgtttacagatttagcaccagaaccggaaaagggagcatacgagcaactcaatgtggatattgtgatttttatgcctttgttgtgatcgaggatgaaaaaataggtttcatggcagcaaaggagcttaccagctgcaaaaacattggctcaataaaacaaactttagagtttcgcactgaagataaagtttacccaggacgaatttaccctaccggaaaacaaagaattcttgattattcaagaaatatcgaatcattttcatcttttcgtcgcgtagctgagctgttgaggaaaaaatcatga

SEQ ID NO: 221691 - DNA, 663 bp, Klebsiella pneumoniae
atgagcctataccaaaaaattaatggcgatgactggcgtaacgtgtgggtcgttggagacctgcatggctgctacaccaacctgatgaaccgtctggatgaggttggctttgaggctgataaagacctgctcatctccgtaggcgacctggttgatcgcggtacagaaaacgtagagtgcctggacctgatcaaccaaccgtggttccgggcggttcgcggcaaccatgagcagatgatgctagatggcattgctagcgctactcatgagcgccattggagggctaacggagggagttggttcttctatctagactacgaaaaagagcgtctggtgaagccgctactggataaggtggcaagactgccgttgatcatcgaacttgtgaccggagaccggaaagtagtcatctgccatgcagactacccccacgatgaatacgcattcgataagcctgtcccagaagaaatggtcatctggaatcgagagcgcgtcagcgatgcgatggatggcaatgtcagcgaaatcaatggtgctgacctgtttatcttcgggcataccccgatgcgcaatccgctcacatatgccaaccagatgtatatcgataccggtgccgtattctgcggaaatttaacattggtcaatatcggggaggcgctatga

SEQ ID NO: 221692 - DNA, 1062 bp, Klebsiella pneumoniae
atgttaaataatgggtgtgtaccctcggaatctggtcccacagaggtgacggctgattttcgttttacccgcgtgatggccgagcaggcggcgcgggcgcgtctgacgctggacgacgatcagctgtcactcatcgcccgccttgacgccctcggtcagcagttggtgtccacgacaggcagcccgcagggggtatacgtctggggacgtaccgggcgagggaaaagctttatcctcgaccactttttcgccagcctgccgctcgccgccaggcggcgggtccattttcatcacttcttccgcgaactgcaccagcggctgaatgcccccggagcgcccgacttgcagacggtgatgaggcagatgacatccggttgccgcctgctatgcttcgacgaatttcatctacacgaccccggcgacgccatgctgattaaagccttgctggaacacctctttcaacacggtatcgtgctgctggccacctcaaactacccgccggagatgctgctgcccaatccgctgtatcacgatcgctttttaccgtcgatcgcgctgatccgcgcccatctaacggtggtggcgctgaacggcgaggaggattatcgcgaacggcatctgagccaggataacgccttctgcagcgggcggatgtgggttaatccgaatgcacaacagcgtcagctgtatgacctgccgtcgctgcctggcgaaccggtttcgctgacggtaggctatcgcacgctgctggcggccgcggcgtcgcccgcgttgctgcacttcacctttacccagctttgtcaggccgccacggcggtgatggactatctgacgctctgcgaaagctatgccgtctggctactggacgaggtgccgccattggctacggtggggccggcggcccagcagcgctttatcaatgtgattgatgtgctgtatgaaaagcagatccgcctgctgctggtgacccgctgcgacctggagacgctggtggcaggggtggaactggaggatattcaacgaacgcggagtcgcctgcaacagctgccgcgggcggtataa

SEQ ID NO: 221693 - DNA, 1833 bp, Klebsiella pneumoniae
atgaaactgtttcgcggagacaacaccaccgatttgctgatgcctgactggaaaaatgtggtgctgagcaacgggcctgaaggccgtctggtctcgagttttattccgaaaattaaccatacgttgtccctcggggcagagcatatccacgtcgtagacgaagagacattcattattgatttcggtgccatcgtcaccggatttatcgatttatccattaccgcgtctgagaatcaacgtgtggaactgctctatagcgaagacgttgatgaaaactacgaactaaacactgactccacccttgcgggatttgtcggcaaacaggttactgaaggtgtgattattgacggcggaattggagcaccggcgagggcggaacagaaggatgcctttgaatgccgcagtgggaagaatcattttatcaatgcctttacctgtcattcgtttcgctatgtgcagttaagcggtattaatattgaacaattaaacaacgttcaggcgctttcagtacatactgtactaagggaaaacgggggcttttactgctcagatccttacataaataagctctttgaggttgctaaaagaaccaaactgaataacattcattcggtcttcggggattgtgcccgcgaacgtttcgcctatggtggagacattgtcgcgttggcccggtcgcaagtgtatcagtttgactctgccgctatttataagaaaactatctttgattttatcaatgatattcgtccctgtggtggtgtgacggaaactgcgccatttatgggaattaagactaatggagtcggcggggaaacgggccccctgggctggcaactggtattaccttatttgatagccattcactatcgacattatggcaatgtcaatctgctggccgaaagcttgccatttcttgagaagcagatcctctccctggaaatgcgcgactttgatgacctggtgacctgctgcctgggtgactggggaagccgcgttcatgatatgcgtaattacaaaaatggctcgccagctctccatttcaccagtgcttgtttccattattatcatttgttaattatcgcaaaaatatgtgatgatcttggctttaaagaaaaatggctaaaatatattggcaaggccaataaaattagagagaaaattttatcactctataagaatacggatggcagctttgccgatcgcagtcagaccagctttgtttttgcaatctacttcgatttgtgtgatgatatcgagagttcattgaatgcattgatcgatctcatcaaaaaagagcaaaatgttatcacttgtgggatttttggccaaagttttgcctatgaaatatttcatcgctatggtcataatgaattaatccttgaatggttaagagtcgaagccggattcaagaaaatgcttaaaaatgatgccagcacattgaaggaatttttcggtgataacctgaatggttcgaataatcatgcgatgttcagttcttattccagttggctgtttcaggctttgggcggcattaccgtcgctgaggaggcggttggtgctgatgttattttaatcagtccatcctttactgacacgattaactttgtggattgctggcatcaaaccatcagagggcgtattgagtgtcgctggcggcgctataaaaaaggcattgaattagtcatcaaagtgccatttaacctcaaaaaatgcacccttaaattaccaaaagtgtatcaacttaataaacaattacctgcgccgatagactgtgatacctatcatcacttttatgacattaccgatgcaggtgagataaaagtactattgtaa

SEQ ID NO: 221694 - DNA, 1500 bp, Klebsiella pneumoniae
atgtcacggcaatggatgacgctgatggcgattttgctggtttatattccggtggcgattgacgctacggtgttgcatgtggccgcgccgaccctcagcgtggcgctgggtagcagcggcaatgagctgttgtggatcattgatatctactcattagtgatggccgggatggtgctgccgatgggcgcccttggcgataagatcggctttaagcgcctgctgctgctcggcagcgccatttttggcatcgcctcgctgtgcgccgcgctgtcgccgacggccatgacgctgattgcctcacgcgctttgctggcggtgggggcggcgatgatcgtcccggcgacgctggccgggatccgcagcacctttgccgaggccagccagcgcaatatggcgctggggctgtgggcagcggtcggctccggcggcgcggccttcggcccgctggtgggcggtatcctgctggagcatttctactgggggtcggtgttcctgatcaatgtgccgatcgtgctggtggttatcgcgattaacgcgaaagtggtgccgcgccagcccgcgcgccgcgaacagccgctcaatctactgcaggcgctcgttttgattgccgcgatcctgatgctggtgtttagcgcgaaatcggcgctgaagggccagctggcgctgtggctcaccgcgctggtggcgctcggcggggcggcgatgttaacctggtttatccgcaagcagctgtcggcggcccgcccgatggtggatatgcgcctgttcacccatcgcataatcttaagcggggtgatgatggcgatgacggccctgattaccctggtcggttttgagctgctgatggcccaggagctgcagtttgtgcaccagaaaacgccgttcgaggcggggatatttatgctgccggtaatggtggccagcggcttcagcggcccgattgccggcctgctggtgtcgcggcttgggctgcgcgaggtggcgaccggcgggatgctgctcagcgccttcagctttctcggcctggcgttgaccgatttcagtacccagcagtggctggcctgggggctgatgacgctgctgggctttagcgtggccagcgcgctgctggcctccagttccgcgattatggcggcagcgccgaaggagaaagcggcggccgccggggcgattgaaaccatggcctatgagctgggcgccggtctcggcatagcgctgttcggcctgatcctgacccgcagctacagcgcctctattgcgctgccgtctggcctgagtggcaccatggcgcagcaggcggcgtcatcgattggcgaggcggtgagtctgtcccaggcgctgcccgccggggtggcgcaggcgctgatggcggcggcgaagacggcttttattcaggctcatagcctggtgctggcgacggcgggtgtattgcttctgctgctggccgccgggatctggcgcagcctcgccaccgtggcgaaaccgcagtcggcgctatag

SEQ ID NO: 221695 - DNA, 1545 bp, Klebsiella pneumoniae
atgaaaatccgttctcaggttggaatggtgctgaatctggacaaatgcatcggctgtcacacctgctcggtcacctgtaaaaacgtctggagcagccgcgaaggcatggagtacgcgtggttcaataacgtggagaccaaaccgggcattggctaccccaaaaactgggaggaccaggatcagtggcaaggcggctggatccgcggcattagcggtaagctgacgccccgcctcggcaatcgggtcagcgtattatcgaagattttcgccaacccggtgctgccggcgatcgacgattactacgaaccctttacctatgactaccagcacctgcacaacgcgccggagggcaaatatctgccgaccgcccgcccgcgctcgctgatcagcggcgagcgtatggataagattaactggggcccgaactgggaggagctgctcggcggcgaattcgagaaacgcgcccgcgaccgtaacttcgaagccatgcaaaaagagatgtacggccagttcgaaaataccttcatgatgtatctcccgcgcctgtgcgagcactgcctcaacccgagctgcgtggccacctgcccgagcggcgccatctacaagcgtgaggaagatggcatcgtactgatcgatcaggataaatgccgcggctggcggatgtgcatcagcggctgcccgtacaaaaaaatctactttaactggaagagcggtaagtcggaaaaatgcatcttctgctatccgcgcattgagtccgggcagccaacggtctgctcagaaacctgcgtcgggcgcatccgctatcttggcgtactgctgtatgacgccgaccgcattgaagaggcggccagtaccgaacatgaaaccgacctctatgagcgccagtgcgaggtgttccttaatccaaacgatccggcggtcatcgaggaagcgctaaagcaagggatcccgcacaacgtcattgaggcggcgcagaaatcgccggtctataagctggcgatggactggaagctggctctgccgctgcatccggagtatcgcaccctgccgatggtctggtacgtgccgcccctgtcgccgatccagtcggttgccgacgccggcggcttaccgagcaacggcaacatcctgccggcggttgagagtctgcgcatcccggtgcaatacctggcgaatctgctgagcgccggcgataccggaccggtcttgcgcgcgctgaaacggatgatggcgatgcgccactacaagcgctcgcaaaccgtcgagggcgtcaccgatacccgcgccattgaagaggtgggcctcagcgttgagcaggtcgaagagatgtatcgctatctggcgatcgccaactacgaagaccgcttcgtgatccccaccagccatcgcgaactggcggaggatgcctttccggaacgtaacggctgcggctttacctttggcgatggctgccacgggtcagatacgaaattcaacctgtttaacagccggcggatcgacgccatcgacgtcagcggcgtgcgtaagcatggggagggcgagtga

SEQ ID NO: 221696 - DNA, 681 bp, Klebsiella pneumoniae
atgatccagtatctgaacgtcttcttttacgatatctacccttacctgtgcggcaccgtctttctggtgggcagctggctgcgctacgattacgggcagtatacctggcgcgcctcatccagccagatgctggataagcgcgggatggtgctatggtcgaacttatttcatatcggcattctcggcatcttctttggccatctctttggcatgctgaccccacactgggtctactcgtggttcctgccgatgtcccagaagcagctgatggccatgatccttggcggcatctgcggcgtgctgaccctggtaggcggtatcggcctgctgatgcgccgcctgaccaacccgcgaattcgcgccacctccacgaccgcggatattttgatcctgtgcattctgctgattcagtgcgcgctggggctgacaaccatccccttctccgcccagcatccggacggcagcgaaatgctcaagctggtggactgggcgcaggcggtggtcaccttccacggcggcgcctcggcgcatctggacggtgtcgcatggatttaccgcgtccacctggtgctcgggatgaccatctttctgatcttccccttcacccgcctggttcacgtctggagcgcgccggtggagtatttcacccggcgttaccaggtggtacgctcccggcgctga

SEQ ID NO: 221697 - DNA, 477 bp, Klebsiella pneumoniae
atgatcccacaaatttctcaggcgccaggggtagttcaactggtgctgaattttttgcaggtactggagcaacagggttttaccggcgataccgccaccagctatgccgacaggctaacgatggccaccgacaacagcgtctatcagctgctgccggatgcggtcatttttcctcgatccacggcggacgtggcgctgctggcgcgcgtcgccgccgaaccgcgttttaaatcgctgatcttcacaccgcgtggcggcggcaccggcactaacggccaggcgctgaacggcgggattatcgtcgatatgtcccgctatatgaaccgcattatcgaaatcaaccccgaagagggctgggtgcgcgttgaagccggggtcatcaaagatcagctgaaccagtttcttaaaccctatggttacttctttgcgcctgagctatccaccagcaaccgcgccacgctggggggggatgattaa

SEQ ID NO: 221698 - DNA, 774 bp, Klebsiella pneumoniae
atggtaaccgagacgatagcgcgcggcgcggcggtatccatcagccatcttcatcatgcgtttacgcttggcaaacagatggtaccggtgctggagaatatcagcctgcagctgcgcccgggggaaagcgtggcgctgctgggcccttccggctgcggtaaatcaaccctgctgcggctgctggcggggctggaagcgccgcagagcggacagatgcagatcgacggcgcggcactcggcgccccggggccggagcgaattctggtgtttcaggatccgacgctctatccgtggctgacggtgcggcagaacgtgctgctgggcccgcaggcgcagggcaaaaaggggctggaggcgaaggcagacgcgctgattgaccgcatcgggctgcaggccttcagcgaggcgtggccgcggcagctgtccggggggatggcgcagcgtgcggcgctggcgcgcgccttgttgaacgaaccgcgtctgctgctgctcgacgagccgttgggcaaactcgattcgctgacccgcatcagtatgcagcgggagctgatcgccctctggcagcagcaggggtataccagcctgctggtgacccacgatatcgaagaggcgctgctgctgtgcgagcgggtgctggtgatgtcgccgcgtccagggcggattatcgccgagtttgcgctgccgctggcttttccccgtcatcgcgataacccgcagctgctgcagcatcgtcaggatatattgcgcatcctcggccagggggcggactggtaa

SEQ ID NO: 221699 - DNA, 954 bp, Klebsiella pneumoniae
atgcgttggttcgtctcattgctgctgttgctgacgggggccgtcagcgccgccgccccacaaactcaaactttcaccgatgatttaggccgcaccgtcaccgtgccgctgcatccgcagcgtatcgtttcgatgcacgatctcgatattaccattccgctgattgagctcggggcgccgccgatcgccagccacggccggacgcgcccggacggcagccactatctgcgatccagcgtccagctcaccggcgtcgatttcgacaacagcgatatccgctttattggcaccgccgatatcgatctggaagcggtagccgcagccaggccggatctgatcatcactgagcccagccgccacgtgtcagtggagcaactggagaagattgccccgacggtgagcatcgaccatctgcagggcagcgccccggagatttaccgcaagctggcgcagctgaccggcacccagccgcggctggcgatcctcgagcgccgctatcaggaacaaattaaacaactgaaagcgatggtcaacccaccgcagtacagcgtctcagtgatccaggcgaacaacggcaaggtcacggtgcatcattcgtatcatgcgctgggccgggtgctgcgcgacgccgggttccgctttccgccgctgattgagcggatccccgatggtcagcgcattgacgtcagcgcggaacagctgccggagctggacgctgattttgtcttcgccacctggcggtcggataccggcggtaagccgcaggatgagctgcaggcgatggaaggcgtgatgcccggctggtgcgactttatgcgcgcctgccgcaccgggcactatattttgctgccgcgggaagaggtgatctccaactcctacgccgcgctgtctctgatggtggcccaggtgcagtcgcatattgccggcaggccgatcccggcggaggccaaatga

SEQ ID NO: 221700 - DNA, 390 bp, Klebsiella pneumoniae
atgaataaattcgctccacccctccagatgagcagggagggaatgacagtagaaacacgtatcagcagatgcagagaacgcatcaaagagattgagcataaacttgctatagagcgtcgcttgttgtctcaactcttcgctgaggaacgcgagcaagccctgaagcgtgaagctgaggccaatccagagaaagagttaacccactggcaaaaagtgagacacgaagaaggaatgagaatgctaaaccagttaacgaaacgctccatcgagaatggaacctatgaagccataatgaaagaatggggtaaagaaatggatgaagcacgtaaatatggtgaatataaagatgcaatggataaagctcatttctggttagagagattgaaatag

SEQ ID NO: 221701 - DNA, 420 bp, Klebsiella pneumoniae
atgaaacgtttaattattgtggggcttttggctgcacttagcgctagcgcaatggcagacaccaacctgaatgaaatggcagcacttgagaatgcgcttgctaagcccaagtcaaagaactctgtaccagacactcactgggtatgctcacatacagctgacaatggctttgtacaacctgacatccctttagtgctcacatactggggagctaacagagcagtgatgtttagcccctctggtgacactggagacattttcatctttgtcactgaggacagcctttcacatggcgtatatgacgtctcacgacaggctgcaataagcctcaccaaagaagacgctaacacagcggctgtgatttataagacagcacaggacaccctgaactttgattgcaaactgggtactgaacagtaa

SEQ ID NO: 221702 - DNA, 351 bp, Klebsiella pneumoniae
atgtttaatcctgctgagcatcccgtaaaggtcgactcactagcccctgtgaagttcagggtggtacgtgaaagcgataatgtcacagtaactgagggaaccacaccaaccaccatcacggttaaccagcgtgaagcaccctatcgtgtacaggcagtgaatagcgacgggaagtatgtgaacgatggagaaattaagtctgtgcacagctctaactgggaatggggtaatgtattaaccctgaacctcggggacattccagacgtaattaccaaatcttatcaggtgcttcctgattcattcagactcacagaccccgatacagtggcttatttcaaagaacttaactaa

SEQ ID NO: 221703 - DNA, 372 bp, Klebsiella pneumoniae
atgaaaaaggcacttgttgcagctttagcttgcctagccctctcaggatgccactcagaagaaagcaaatattatgcaggtggtgagtcctctggtgctaaagactattacacttttgacgtggatagcaataaagcagtaatgcatagccacctgcacgggatgtcgcaaatctaccccaaaaccagagagggttattgcagggttattagttcaaccttcaaagagaaaacatgcctctcatttgctaacgaaaatgatgtaattatgtgggatgaaattgcatcaaccgacctacaatacaagcatgagtttggtgttgtgaactttaacgacccaatggaaaccgtgcactatttaaaggccaactaa

SEQ ID NO: 221704 - DNA, 249 bp, Klebsiella pneumoniae
atgaaaaacatcgctattaaatctctctatgtggctggctggtttactttgctgtcggtggtcatgttttgggaaccgagcagcgaccgtgtgcatttaatctttgcatggatgtccagcgaaacgatggttatggttggctttgcatgcatccctttagccattatctcagcgctacctgctatgtggtatggactccttatcacggtgtcatacagcattaagtttgtacggaataactcaaaatga

SEQ ID NO: 221705 - DNA, 207 bp, Klebsiella pneumoniae
atgattaccatcggcttttatcacatttttattgccatttgcgtttatctcctgaataagcgagttaacggattctgctcaaaacgagtagtaattggctgcatgctggttcctctggctggtgtttattgcctgtatcgcatgattacaggttattgggctggagtggctgaacttcgtttcaatccggtgaagtgggaaaaatga

SEQ ID NO: 221706 - DNA, 1023 bp, Klebsiella pneumoniae
atggctttaactatcggtgaactggttaagtggactaaagaccagattttaaatgttcaggataacgtggaaaaccgtaaacttgattttggtaaagagggctacttaaagggcaaatggaatgactcccttggtgattactttgaagtaattaaactgaatggcgttgaaattctggttgacggccatcacagacaggatgcaattaagcgcaaggcattaacagacctacctaagctctttcccgtacttctgcgtgaggctgacagcattgaggacattcgcaaccgtcaagatgcattgatggaaaacaagcgtgctccaactgctggacagcgcaaagacattgctagcaagcgcgttaagctgggagaactgaaaagcaaacacgccaaggctgttggcgtgactgcgtacaagcaattgggattcaaaggaagcgacctgttaattaaaggggcaaccgactataggaaagaattgtttattttcgatgagtgggacattgaatacaaaaaatcaatgttttcgcagggcatattagcggctgtactgaaaaccattcgcatgaacgagaagcttgcacatatcttttggaccaatgtaactaaaaatgccagcgacaagcattccaaaaaggtcagagcaaagatgattgctggcggtatgggcgaaggctacaactcagcctgttttgaattggcaacagaccgctttgaacagtgggctgaagaaatggagagcaatgagcaagcattcacaccagctgaaccagagaaaaaagaagaatctgataatgagtttcttttgcgactcactggcttagggtttggcgacctgcttgaagaagaggatgagaaacgcttaaccagcctgaaagagaaaggcaatgaaaaggccgctactatttatgaattactaaccgcaccagagccagcagaaggcgataaaaacggaaacgtattgcctgtggcaaaaacacgcacgcaggcctgtatagagcgtttcaggggcattgtatga

SEQ ID NO: 221707 - DNA, 267 bp, Klebsiella pneumoniae
atgaagccgtcgataatgctgttcgatgagcccacttcggcgctggatccggagctggtgggcgacgtgctggaggtgatgaaaaacctcgccagcgaggggatgaccatggtaatcgtgacccacgaaatgggctttgcccgcgaagtggccgaccgggtgatcttcatcgaccagggcgtgattcaggaagagggcaagccggggcagatctttagcgcgccgagcaacccacgcaccgccgcgttcctcagcaaggtgctgtaa

SEQ ID NO: 221708 - DNA, 1233 bp, Klebsiella pneumoniae
atgaaattagcgttgggaccgtacatccgttttagcagaatcttgttatttccgctggcgatggttatctatgatttttctgcttatctgactaccgatctcattcagccgggtattatccacatcatccgggaatttgaggctgatgttgcgttagccccggcctctgtcagcctctatttagccggggggctggcattacagtggctgctggggccgctctccgaccgcattggtcgccgccccgtactactgaccggagccatcatctttgctttggcctgcttcagcatgatctttgtcacgtcgattgatcaatatcttatcgcccgttttatccagggaaccagtatctgcttcatttcgacagtcggttatgtctccatccaggaggcttttgatgaaaaagagtctatccgcattatggcggcgctgacatccatcgttttgctggcgccggtaatcgggcccctggcgggcgctggcctgatgaatttcctgcactggaagttattgtttgcgatcatcggcgccatgagcttgctggcctgggcgttactgatttttaacatgccagaaacggtcacctctcagggccgggggtttcgtccgggagaggtattttccgagtttgtccgcgcctttaaacagccggtggtgctcacgggcgcgctggcgttgtcattcagtaacctgccgataatcacctgggtagcactctctccggtgatcctgatcgatgacggcgggatgtcgcgcggcgcctatgcctggacccaggtgcctgtctttggcggcgttattattgccagcatcatcgtggcccgttttatcaaggatccgacctctccccgctttatctggcgcactatcccgatacagctgaccgggttgttggtattactggcgggaaatattgcatggccccatacctggtggtggtccgtttcaggaacgagtctctatgccctcggaacaggcctgttgttccccgtattattccgttttgcgcttttttcccactccctgccgaaagggacggtttcagcgaccatcaacattgtggcgctcagttttatggcggcctcggtggaagtagcgcgctgggtttacttccaggctggcggcagaatagcctttcactgcctggcgctgatagcgggaatcgtcgtcatcatgctgatctcgcgcttgttaaaactccgtcaacaacatctccttcagccagcctga

SEQ ID NO: 221709 - DNA, 999 bp, Klebsiella pneumoniae
atgaataataatctttatcgtttgattgttgactttcaagataatgtccaggtggctttaaagctaatgtatcggtctggaattaaaatgccatcaagttgctatgagtggattgaatctgatatacccaattttggtgagctagatggtggtgtcaaatattataaacatggtgctggatgcagggtggatctaaactccgggagcgtagattttgattttggagggcgaggcgaggtaggagggtttaattcttggtggttgactaactttgcaggggaaaatctaatagattacggattcagaaattttgatgatgtctctgatcatttaaaaaaggccctagatgatggagaactgatttttccagatcatgatctttattattttgctaatgtcccacatacttacgctatagatacagattgccgcttccctgaggacaggctcccatgtcgcaatcacgaccgcgtattaacattacaaattcattatttcgaaacagctgatcttatgtttaaaaattacaataagctcaacaaaaaaatgacaaagaatggccatttgagtgagagagaaaaatttgatatgggaatttatctttctacatggttaggttttttaggtgtggtctgcgaaggatttaaaagcttaaacatgcgactcttactcgataatgaacgccctagagaatttaaagaattattaccaatttcagatggcatcggaaaattgatgaaagaacattcgaactcactcaggatatttagaaataatgtttttcatcttagagaaagtactggctttatacatcatttttttgataaggaagttgagcgtcttccatgggcaggtgaattacatatagcactttcacatttcttttcgcagtatagaattttttgcgaagtgcattatgttattaatgggcgtaaaggagagagcaatatgataaagaaaaaggtaacacgccctaagaaagttgctttgagatattaa

SEQ ID NO: 221710 - DNA, 1359 bp, Klebsiella pneumoniae
atggcaccaatagttatcaatccaataagttattcaagattcaatgcactagctacatatgctagaaacccacgagttaaatcccattctaaggagttagaatggttcgaaaccttcgacggaaaagtattaggcatgttgttgttggatactatagactacgattacactggaattatattcgctcgagatctaaatagaaaatatcgcttcattgatatgactgaatttgacgataacaaagccaaaacaaagaggaggttattaaataaaatacgtgaattacatccatcagctgatgagcaaggagtgcaaggtgatgagactgttgaaacaatggatttttttgttgaccttaataagcaaaacaccaactcagactttattttagtaaaggaatcgccagagtattcagcggccaaaaacattatagaaccattaatgagatggtactctgacatagatgggaattttgtagagcaatttcaaaccacagggtttaatcaaagggtctgggagatactcctttactgtatatttactgaaaatgactgcttgttcgatacttcattcaatgctcctgattttaacttatcctatgttaatggattctacagcataccattcgcaatcgaggctactactgttaataaaccggtagatcgtagaggactaccaatcccaataccagaagtaaacagggaaaatatagaagaatacaataatcttttggtaaattattttccaactcgatattctggacctttgcttgcgaaattgaaaaagaaatattgggagcaggagcatgttaccggaaaaccgtttgcaatcgctatagctgattgtcagtttaaaggtgctggtaatgttagtcacgacgcattaccattatatctttatggttttcaacaaaaagtaacatccgaaggtgttgagacgcgtgaaaagattggttgtcatatctggggaactaaggaagttccatcaggtttttttgagcttgaaggggctgaaaacattagtgcaatattattttctccatcgagtgatattgacaaattcaaccggatggggttgaaagatggctttaataacaataagtataaaatcagacgtaccgtaaagtcacctaatattaacacttgggcgatcgaacacattacaaaaataattccaaccaaaaaatacactgagacttggggtgaaggtttagtcgtttatcacaatcctaatgcattacatcctttcccaataaatatattgccaaatgcatctcattatcatgtaattgatggtaagttggttgttgatttcaatagtcttcctatattagaagacgtgtcagaaattataatataa

SEQ ID NO: 221711 - DNA, 495 bp, Klebsiella pneumoniae
gtgaagtattattatgttttagcattgttacttggttacagctcatgtgtactggcagaagagtgtatggataactcaaatatagattctctaagagaggttttcaaaaaaaataataagaagttgttgattgaaatgtcttcaaaagaaatgaggcgttatgttgaaagtgatttacttatcaaaaataaatacagtacacttgtcaatgtatctgaggtttactatggctggggagtggacaaaaaatcaaagtatcctgttaacacatcggcagttttcccaaatgaaaaagtgtgtgtatggaatgtatcttttgcactaccagagtctattagaaaaaaatgtgatgatgatggtgcttatgggtattttattgaatttaagaaagttaatgggaaaacagttctatataactttacctctttgtttgattctcttcccgacggaactttagcttgcaaagctgccaataaatttatgctgcaaaaatag

SEQ ID NO: 221712 - DNA, 483 bp, Klebsiella pneumoniae
atggttaaaatcatgctgtccagcttattatattgtttttgttaccattcctttgctaacgatttttgttccattatgtccaaaacagccgagaatgagcaagcatatgtagatcattctaagagtttatttaggattgcatcgaaaaccagactttacttcaatagcgcaccaagtaaacgatgcaagattagcgatttatttatagttaatggtgatgttgtttcaggatacaccacacttaatggttatttgtttgcgtcatacttcaagagaaatggcgattcagttgatggatggcttaaattatcagatttaaaaaatactggatatacaagtggtccgtcaagtgacgaacaaacggcttttaatattattccggatgccattaagaagaacgcactggctacagcacctgaaaaatgtatcaatatcagtagagatgacactaacaataaatactacaaattcgctataaattga

SEQ ID NO: 221713 - DNA, 213 bp, Klebsiella pneumoniae
atgggaaatgcttgtgaagcaggagcaatcagaattatttccttggattctgaaaataaaatccaggtgcataagccgatagattattgcatggggtctgttatgattaataatgacggcgataaagtcattgttaatattcaagatatcaatgattctaaaaaatctgaggtgtgggtatttaaagacaacaaactagcgaagctaaaatag

SEQ ID NO: 221714 - DNA, 270 bp, Klebsiella pneumoniae
atgggttgtgccgaccaggcatcagacgccgcaaagaaagacatgaacattgtttaccagaaaatatacaaaatcattaaagcgcgtgaaatgcctgacattacaagtaaattcaagacggcgcaaaaaaactggattgcatcacgtgaaaattggtgtgatgttcaagggtttataatcggttcgccgatgtacagcgtatgccgtatggacatgaatatttcaagagtgaatgagttaaatgacttactggaacagattcaggattaa

SEQ ID NO: 221715 - DNA, 1083 bp, Klebsiella pneumoniae
atggcgcgagaatcacagccagcacgtaccgggctgacgctggcccttaacaaagatatctggcgggccaatttttatcgtttctgccagttgctggaacaggaaaatccggacgcgccgaaactgggcaccaccagccatccgggcgatgatccggtacgattcagaccctggcctggtatgggtttcccggtcagtaccctgaaagcagtggagactgacgaagaccatccgacattacccccaacggttcgcacgacatttctaggggtgtatggcgtggactcgcctctgccgacgtcctggctggacgatattgcgcagcgccgcgaaggacacgaggcggttacctcattcctggacattttcagccaccggatcaccactcagtattaccggatctggcgaaaatacgcgtatccggcgaccttcgaggccggtggccgtgatgccacatcacagtgtctgctgggactggtgggactcggtataccaggcacagcggaacgggtggcaacgccggtttcccgttttctggccctgctgggcaccatgcgattacccacccgtaatgccgaaggtatccgggccctggtgagcctgttggcaccgaatacccgggcaattatcaccgaacccgatccggttaaggtccatattgataaccgcagtgggctgggggccaaaaaccgcatccgtctttcgcagcgggccacgctgggtaaaacggccagggaagcatgcagtcgggtactggtgacgctggaaacggaagatccgggcgaagcggaaggctggttacccggtgctgtcctccataccgatttgctggtcctgctgcgcgtctatcttggctaccgcagtgacgcccgactgcgcctcacggtacccgtgcggttattgcctgagcctcgcgttggcaaaggcaggcgtattcagctgggccgaaccggtttgctggggctgaaagcaggaaaactcagcaataacagggagagtctgaccgtcagcctgggctgctatgaagggttgcaatgctctgttttacctcctgctgaagacgggcattaccgcttcgactaa

SEQ ID NO: 221716 - DNA, 2322 bp, Klebsiella pneumoniae
atggatagctggctggcgctttttgacggacagacccgatattttctggatatcaatgacagttcagtgaagccggatattctgcgctttcgtggcagggaagccctgagcgagcccttccggtgggacattgagtttacctccctgcaggcgaacattctcccggaacaggtgctgatgaaatatgcctctttccggatgcggagcggcaaaagtgttcacggcatggtgacccgcctggaatggctgtccacctctcaggaccagtctcactaccggctcacgctcagttcccgcctggcgctgctgggatacacccggcagtgcgcggtatatcagaaccagtccgtgccggaggtggtggagcaggtgctgcgcaaacatggcctgcaaggacctgattttgacttccggctggagcgcacctacccgccgcgtgaaattatcacccagtggcgggaaacggatttgcagtttatccggcgcattctgtctgaggtggggatttactggcgtacggagatggatgacacccgtgagctggatacgtacatttttgccgacagccagctgaactaccggtttgatgtgcgtctgccctacagcgaaccatcgggtctgtttgacggcgcggcagagtcggtctgggatgtgcggacctggcacaacatcgccaccggcactgtcaccacgcgggattacaactaccggacagcctccacgccgatggatgcgacggtcagcgtgcgtaacgatgcggtcaccagcggggagcattaccgttacgcggcaccgtatcgtgacgcaggtgatgacgccagcccggagccggaaacggaatccggggcgttctatgcgcacatccatcacgagcgggagctgaataaatcagcccgtattcatctgttcagcaacgctgctcatctcacacccggacaggtgctggagccgcagggcgatgtcattgcagccctgaaagaaggcgtcgtcctcaccctggtgacctaccggggggcccgtgattcccgtctgcatgtgtcagtctggggccagccttataccgaacgttactgcttccgtccggtagagatccctcgcccggtcatcccgggtacgcttccggcccggatcgaaagtcgcgaaaaaaatgatacctacgcacacctggacgggcaggggcgctaccgggtgaagctggacttcgaccgggaggggacggagccgggttacggctacctgtggctgcggatggcgaagccgtatgccggtgaaacactcggctggcatacgccgctgattgatggaaccgaggtggcgatagcgtacagcaatggcgatattgacctgccgtatatcgcgtatgcgctgcacgactcggagcaccctgaccccgtaaaccgggacaatcacacccggaacattctcagaactcccgcgaacaacaagctgcggatggaagacaggcgtggtgaggaacacatcaagctcgccacggaatacggcaggacgcagctcaacagcggacatctggtggacagccgggggcaacgtcgcggtcagggggccgaactgcgcaccgacgagtggggagccctgagggccgggaagggactgtttgtcagtgcggatgcgcaggcaaaggcgcagggtgaggcgctggacagggacgccgcgctgaaggaaatcgacaggcttaaccagcaactgcagcagctgaaaatggcggcagagcaggcgcaggcgctgaaggtggatgtggacagccagatagagatgtttgagcagaggctgaaaccgctcaatgaagtcgtgctgttctcggccccggaaggcatggctctcaccagcggggagcgtctgcaaatgacggccacgaagaatgtcgccattaatgccgggggcgatatcagtgccggtgtcatgggtaacatgaccgcactggccggggagaagcttgggctctttgcccggaccggccagctgagtctgaaatccggagaagggccagtggaggtgcaggcgcagaatgccagcctgcggctgtttgcagagaagaaactgacgctgagctcagcgagtgatatttcgtttgccgggaagaagcgtatcacgctgattggtggcgggagctatctgcgacttgaggccgggagggtcgagtatggcacgacggcgacgtatatacggaaggtgaaaaggacgatggcagctgccgctgcatcaataccggttaaggctacaacgggtggcggtatctgcctgagctgcctgatgaaagcgacgatgaatggcgatacttttgttgtaagaggtgaatcatga

SEQ ID NO: 221717 - DNA, 504 bp, Klebsiella pneumoniae
atgagcagtgacagctttagtcttgcggctcaacacctgatttactcaacaaaagtgacattgtatgccctggtggacggtctgcaatatgagcggtatttcggtgagggcctgtccgctccacaacccgccgccatgcctctgttcgatacctggccggattcccgcatcgcttttgctggcccctggataattcagatgagctgtgcgatggatatcagtgaaaagctgtgtcatctggaaactgcgctgccctctgtttcctggatattgtcgtcttctgcactcacggaacaggtggttcatctgaagaacaatatgaatgttgggctgccggatggtcgggctgctttgctgcgtttccaggatccacgcgttcaggttcgtctggcaacgatgctgaacgacctgcaacaccagaagctgacaggtttaatgcaggaatggttgacaatagtggacgggaaagtctggtcatttaaacaaagggaattcatatgctga

SEQ ID NO: 221718 - DNA, 771 bp, Klebsiella pneumoniae
atggttatgtttccaccagtagttaccgggggaatggggggcgcggctaccggaagcgtcggtgtggcaggtggctcaaccggaacagcaacatttcccggagcaggaagcacccatggcggctgggaagaagaggatatgtcttatcctggctcaggtagtgggtcgcgtcaggggaccggagggtttgactatcagggaaaaccttatgatccgatgctgaatgaccccatggcggtcagtgcggagacgcacggtgatttctgggaagatgatatagattactccgaaacggtcagttacgaaggtgtagacacgaaagcgggggcacaggcgaagacggatgaaaagacctgtgataactgcccgcctgagggcaaggtgatgccgatggtgagacgctgttcgcgctggagtgcggtaacgattagctaccagacgagaatatgtgggacgtactataatccagaaactaaacagatacaggaatttaagtattgtggtgtatcgtttgatggctggaaagataagctttgtcagttctgggaggcgaaggcgagatatgatcagtttttcagggctgatggtacaaaaaaagagtggtggcgaggggataacagtgcaattaatcaagccgggcgtcatcaagctgttgcgacagttaatcaacctttaaaagtagtttggatttttatgcagccaatgagttgctactatttttcaaaaatcttcataagatttaaagatattgttgtcagatgggagccttga

SEQ ID NO: 221719 - DNA, 723 bp, Klebsiella pneumoniae
atggatacacgttttatagtaaactttgattatcgtaccaaaaatgatgacattcagttttcacaaataattgaacactttgcatttatcatagcgcaacttaataagttatttcaggtggaaaagaattggtatgaaacgggttattccagaaagcaagctctaaatcagatagcttttcagaatggaggtatcacagataacactcgtttgaaatgggagcgccgatataaaaaaaatatgccgatgtttgtagatagcgtttgggatgccaatgatgatgagcacagctgtggcatctcttatagaaaaatgttttacgaacaaaaaaatagggtttccgtggagttaagtttagttgtaaataatgatgaaaattcattgctccgatttataacgctcttatcacatttggctttattttttgattgttcacatataagcatcgattcaaatggatacaatctgttcgggcgaaacgtattccctgacagactggctgtaggttggatgttatacatcccccacatagtcttaactgaattaattccagaagcagccagagttgtgccggtaatggatggcgacaatcaaaaaggcaccattattgtgtctactgaggaaatattcgatggaaacaataaagaacacataggtaaagctaacgacattgaaattaagcttctggatcttggcttattgccacttatgaccgagctttaa

SEQ ID NO: 221720 - DNA, 1224 bp, Klebsiella pneumoniae
atggcacgaagaaataaagatgataatgttgcaattctcattttgatcattataggagcgatggcctgggggatttatgttgcggtaaaggcgttaatcaatcttaatgagcgattcattgaatccgtatcgaatccggccggagtcatcggtctgttctttggtttgctgatagctgttgcgctgataatccgggttttcatttatcgcggctttagaaaaaaagccactgacctggcaaaaaaggagcaagcctttgacgaaaccgtcagtagcgaagtggcttgcaagctgtatcaggaaaagcaacagcttgccgttcagtggacagaatttcacaatgccagaaataaagcctcccgtgcactgcagcgtattgtggattctgcgtataaattcaaagtcaaaacactactttccggcaccacggtaaataactggcaaagcaaatacgaccagctcaggaaggagagagacgcttacgcggccattagcgagaaaatcacctttctggaacttgaagataacgccgactgggaagctgtaaagcagcagtttctggataaggtcgccctgctggaaaaagcgcaggaagaaaaagagtatcaggctgagcttaagcgtcagattagggaagaaaaacagcgtcaggatgaactggaacagcagcagcgcgaagcggaagaagaggagcaacgccttgctgagcagcagcgtttactggaggaagctcttctcgccgctgaaggcacacaccgggaagagctggaaagacagcgtctggagctggagcagaaaatccaagacgtacatcagcagtatgaacgcgccaaatccatggcccagctcaccaggcaaggatatgtgtatatcatttcgaatatcggctccttcggtgaaaatgtcttcaaaattggtatgacccgacggctggagcctatggaacgagtaaaagaactaagtggggcggcggtaccttttgattttgacgtccatgctatgatttcctgcgacgatgcccccgcactggaaaaaacgctgcatgatcacctggaaaattatcgcattaataaaattaatctgcgcaaggagttttttcgggttgagcttcgtcggattattgatgaggtcgagcgccatcatggtcaggttgaatatattgccgacccggtcgcgttgcaatatctgcagagtttggaatatgcagaaagcgaagctgcataa

SEQ ID NO: 221721 - DNA, 279 bp, Klebsiella pneumoniae
atgaactggagtttgatccacgagcctggcgcgaatggcagaagcctggcgagacggtcaaaaaaacagttcaaaaataagctccagcagattgtgcagaatctgcgaattgagtcggccaggctgagcgatttaccggattgctacaaaatcaagcttaaggcgtcaggttatcggttggtgtatcaagtacgagatagtgtggtggtggtttacgttattgccattggcaaaagagagaaagcggccgtttatcatcaggcgaataaacggctctaa

SEQ ID NO: 221722 - DNA, 525 bp, Klebsiella pneumoniae
gtgttttttcgcgaaacgctccgcggaatcccactccccgacccggcaagcgcagcgccgccggggaggatacctccggcgccatacccgcctttgtgccggatggcgctacgcttatccggcctacggcctcctcccgtaagctcctataccccaggcccggtgctgcttttatgccgggcggcggctcacgccttgcccggcatacggttcgtgcgacctgccgttaatttattcaccattgttgctgaaactgccggtgctgacggcctcaaaatcgctgagacgttcccggaaggccggggcagcccgcatggatgcgggctgagggccgtgttttgcacggacgctgcctcggcccgacccgaagcctgcagggataagtcgaagggaccgcgtagcggcgattttgctggccggagcccgggggtgcagggggcggcggcgactggccgccccctgtgcgctccctgcgccatgccaggcataacgcagaagattaaccgggagcgcaatgtgcgctga

SEQ ID NO: 221723 - DNA, 795 bp, Klebsiella pneumoniae; identical to SEQ ID NO: 211464

SEQ ID NO: 221724 - DNA, 567 bp, Klebsiella pneumoniae
atgaatttatccgctaccattcttctcgctttcggcatgtccatggacgccttcgcagcctccatcggcaaaggcgccaccctgcataaacccaaattttcagaggcagtacgcaccgggctgatttttggcgccattgaaaccctgacgccgctggtcggctgggggcttggcatgctggccagccagtttatcctcgagtggaatcactggattgcctttattttactggtgtttctcggcgggcgaatgatcgtcgaaggttttcgcggcgacagcgacgaggcgtgcgaggcgcctcaccgacatggtttctggcttctggtcaccaccgccttcgccaccagccttgacgcgatggccgtcggcgtcggtctggccttccttcaggtcagcattgtgaccaccgcgctggcgatcggctgcgccacctttatcatgtcgacgctggggatgatggtcggtcgctttatcggcccgctgcttggcaaacgagccgaaattctcggcggtatcgtgctgattggcatcggcagcgaaatcctctggagccatttcgccggttaa

SEQ ID NO: 221725 - DNA, 165 bp, Klebsiella pneumoniae
atggatacctcttcaataattaccggcaccacccttaaccgttaccagctggatattccttcatgtaccgcatcgctggatgtggaagaattcagtggggcagaaaaactgagtgaactttattattacactattacgtttaccagcgcagaaaaaaaatattga

SEQ ID NO: 221726 - DNA, 1503 bp, Klebsiella pneumoniae
gtggtggtggccaaccatgcgctggtgatggcggcgatggagagcgaagcggtgctgccggaaccgaaaaacctgctgctggtcctcgatgaaggccatcatctgccggacgtcgcccgcgacgcgctggagatgagcgccgagatcaccgccccctggtttcgcctgcagctggatctgttctgcaagctggtggccacctgcatggagcagtttcgtccgaaaaccacgccgccgctggccaatccggagcggctcaccgctcattgcgaagagcttttcgagctgattgcttcgttgaataatattctcaatctctatatgcccgccggtcaggaagcggagcatcgcttcccgatgggcgaactgccgcaggaggtgatggagatctgccagcggctggcgaagctcaccgagttgctgcgcggcctggcggagctgttcctgaacgatctcagcgaaaagaccggcagccatgacgtggtgcgcctgcatcgggtgctgctgcagatgaaccgcgcccttggcatgtttgaaagccaaagcaagctgtggcgcctggcgtcgctggcgcagtcctcaggcgcgccggtaaccaaatgggcgacgcgggtggtgcgcgacggccagatccacgtctggttccactgcgtcgggatccgcgtcagcgatcagcttgaacggctgctgtggcgcagcgtgccgcatatcgtggtgacgtcagcgacgctgcgctcgctaaacagcttctcgcgcctgcaggagatgagcggtctgaaggagaaagcgggggaccgcttcgtggcgctggattcgccgttcaaccacgtggagcaggggaaaattattattcctcaaatgcgttatgaaccgctgatggataacgaagagcagcacattgccgagatggcggcctattttcgccagcaggtggagagcaaaaaacatctcgggatgctggtgctgtttgccagcgggcgggcgatgaaccgcttcctcgagcatgtgaccgatctgcgcctgatgctgttggtgcagggcgaccagccgcgctaccggctggtggagctgcatcgcaaacgggtggaaagcggcgagcgcagcgtgctggtgggtctgcagtcctttgccgaaggtctcgatttaaaaggcgatctgctgagccaggtgcatatccataaaatcgcttttccgcccatcgacagcccggtagtgatcaccgaaggcgaatggctgaaaagcctcaatcgttatcccttcgaggtacagagtttgcccagcgcctcctttaatcttattcagcaggtggggcgtttgatccgtagccataactgctggggagaggtggtgatttacgataagcgtctgttgaccaaaaactacggcgcgcgtctactgaacgcgttacctgtttttcccatagagcagccgggcgttccggaggttatagtaaaacggaaagcaaaacagacagcaaaacagacgggccgcaaacgtcgctga

SEQ ID NO: 221727 - DNA, 615 bp, Klebsiella pneumoniae
atgtacttttatcaaccttcgcagggccacggcctgccgcatgacccgctgaacgcgataatcgggcctcgcccgataggctggatcgcctcgcaggacgccgagggccagcgtaatctggcgccatacagcttttttaactgctttaactatcggccgccaatcattggtttcgccagcagcggctggaaagacagcgtgcgaaatatcgtcgaaacaaaggagtttgtctggaacctggcgacgcgaccgctggccatggcgatgaatgaaacgtcagcctcgattccgcaccatgaggacgaattcgtgcgcgccggcctcaccgccgccgccagccgcctggtcagcgctccccgggtcgcggagagtccggtgaactttgagtgccgtctgtcgcagtgtattcaactcaccaccgccgacggcaaccctgtcgatacgtggctggtgctcggtgaagtggttgccgtgcatattgatgaatcactgctggacaacggtatctatcaaaccgcccgggcccagccgatcctgcgcgccggtggcccgagcgcctattacggtattgatgacagcctgcgctttgacatgatccgccctgacgcccgttaa

SEQ ID NO: 221728 - DNA, 1002 bp, Klebsiella pneumoniae
gtgatcgatttacgcagtgataccgttacccgtcccgggcgcgccatgctggaggccatgatggccgccccggtcggggacgatgtgtatggcgacgaccctaccgtcaatgaactgcagcgctatgccgccgacctggccggcaaagaagcggcgctatttctacccaccggcacccaggccaacctcgttggcctgctcagccattgccagcgcggcgaagagtatatcgtcggccagggggcgcataactatctgtacgaagccggcggcgcggcggtcctcggcagtattcagccgcagccgatcgacgccgcggcggatggttcgctgccgctggataaagtggcggcgaaaatcaaacccgacgatatccattttgcccccacccgcctgctgagcctggaaaacacccataacggtaaggtgctgccgcgcgactatctgcaggaagcctgggcgtttacccgccagcgcaatctggcgctgcacgtcgacggcgcacgcatctttaacgccgtggtggcctacggctgcgagttacgcgatatcgcccaatactgcgactccttcaccatctgcctgtcaaaggggcttggcgctccggtaggctcgctgctgctcggcagcgaggcgtacattcgccgcgccgtccgctggcggaaaatggtcggcggcgggatgcgccaggcgggcatcctggccgccgccgggctgtacgcgctgaaaaataacgtgcagcgcctgcaggaggatcatgacaacgccgcgtggatggcagagcagctgcgcgctatcggcgccgacgtcacccgtcacgataccaacatgctgttcgttcgcgtcggcgaagagcaggccccggcgctcggcaagtttatgcaggcgcagggggtattgattaacgcctcgcctgttgtccgtctggtcactcacctggatgtcaaccgtcagcagctgagcgaggtggtcgcccactggcaggcttttttacaacgctaa

SEQ ID NO: 221729 - DNA, 435 bp, Klebsiella pneumoniae
atggttaaaggattgttaaacacagtaaatcgcaggctgtcgcatgatgacgccggtaaactcttgttacgacttgccgtcggcggcttaatgcttttccatggaatccataagctgatagatggtgtggatggcattagcgggatgctggcggcgcagggattgcccgggtttatcgcctacggtgtgctggtgggggaagtggtcgctccctgcttgttaattctcggcgtcctgacccgcccggcggcgttggtgctggcgttcaccatggtggtggcgtggctgatggtcggcttagataagacgtttgcgcttgatgcggtgggagcatgggccattgagaatctggtctatttctttgttggcgcactggcgattgcgctactcggcgcggggcgttattcgctggccggtcagtcggcctggcggtaa

SEQ ID NO: 221730 - DNA, 969 bp, Klebsiella pneumoniae
atgactatgccaacctcccagtgcccgtggcggatgcaggttcaccacattcaccaggaaaccccggacgtgtggaccctttcgctgctgtgccacgattactatccgtaccgcgctggccagtacgctctggttagcgtgcgtaactcggcggaaacgctgcgcgcctataccctctcctcgacgccgggggtcagcgaatacattacgctgaccgttcgccgtattgacgagggtacgggttcgcagtggttgacccgcgaggtcaaacgcggcgattacctttggctgtccgatgcgatgggcgagtttacctgcgacgataaagcggaagataaattcctgctgctggccgccggttgcggtgtgacaccgatcatggcgatgcgccgctggctggctaagcatcgaccgcaggccgacgtacaggtgatttataacgtgcgttcgccggaagatgtaatctttgccgaagagtggcgcaactacccggtcaccctggtagcggagcacaacgcgacgcacggttttgtcgccggccgtctgacccgggagctgctgcagagcgtgccggatttagccagccgcaccgtgatgacctgcggcccggcgccttatatggagaaggtcgagcaggatgttgccgccctgggcgtcacccgcttctttaaggaaaaattcttcaccccggtggctgaggccgccaccagcgggctgaaatttactaaactgcagccggcgcgcgagttttacgcgccggtgggcactacgctgctcgacgcgctggagagcaataaagtgccggtgaccgtcgcctgccgcgccggcgtctgcggctgctgcaaaaccaaagtggtttccgggaagtacagcgtcaccagcaccatgacgctgaccgacgccgaaatcgccgacggctatgtgctggcctgctcctgtcatccgcagagcgatctggttctcgcctga

SEQ ID NO: 221731 - DNA, 696 bp, Klebsiella pneumoniae
atgttcagaaaattagcagccgaatgcttcggcaccttctggcttgtatttggcggctgcggtagcgccgtgctcgccgcggctttccccgagcttggtattggttttgccggcgtcgcgctggcatttggcttaacggtattaaccatggcgtttgcggtcggccatatttccggggggcatttcaacccggcggtcaccttaggcctgtgggccggcggccgttttccggcaaaagaggtcattggctatattatcgctcaggtggtcggcggaattattgccgcggcggtgctgtacgtggttgccagcggtaaagccggctttgatgccgccgccagtggcttcgcctccaacggctatggcgaacactccccgggcggcttctccatgctgtcggctatcgtcattgaaattgtcctgacctgcggcttcctgctggttattcatggcgcgaccgataaacatgcgccggcgggctttgcccccatcgccatcggcctggcgctgaccctcatccatttgatcagcattccagtcaccaacacctcggtcaacccggcgcgcagcaccgcggtggcaattttccagggcggctgggcgctgcagcagctgtggctgttctgggtcatgccaatcgtcggcgggatcctcggcggcgtgctgtatcgcaccctgctggaaaaacgcgattaa

SEQ ID NO: 221732 - DNA, 1659 bp, Klebsiella pneumoniae
atgcttcttgagcgcgtagaaatcgtcggttttcgcggtatcaatcgtttgtcgttgatgctggagcaaaataacgtcctgatcggggagaacgcgtgggggaagtccagtctgcttgatgcgctgaccctgcttttgtcgccggagttcgatctttatcactttgttcgcgatgatttctggtttcccccgggcgacatccaggggcgcgaacaccatttgcatattatcctgaccttccgcgaaacggagccaggccgccatcgggtccggcgtttccgtccgcttcagcgctgctgggtgccttgcgatgacgggtatcaccgggtgttctatcgcctggagggcgagctcgccgaagatgacagcgtgatgaccctgcggagctttatcgatggtgaaggcgaagcgttggtgctggaggagattgatgagctggcccgacacctggtgcgtttgatgccggtgctgcgcctgcgcgatgcgcgctttatgcgccgcatccataacgggacggtaccgcactcgccgcagatagagatcaccgcccgtcagctggattttctctcccgcgaactggtcagccatccgcaaaatttatcggacggtcagatccgtcaggggctatcggccatggtgcaactgcttgagcattactttgccgagcaaagcagcgctcagacgcggcatcgcctgatgcggcggcgctcccatgatgaacagcgcagttggcgttatctggatattatcaaccggatgatcgacaagcccggcgggcgcagccatcgggtgatcctgctggggctgtttgccaccctcctgcaggcgaaagggacggtgcgcctcgatcgcgacgcgcgaccgctgctgttgattgaagatcccgagacccgtctgcatccgatcatgctttccgtcgcctggcacctgctgaatttgttgccgctgcagcgtgtgaccaccaccaactccggagagctgctgtccctgacgccggtagagcaggtctgccggctggtgcgtgagtcgacgcgggtatcggcgtggcggttggggccgggcggaatgaatgccgaagagagccggcgcattgcttttcacatccgcttcaatcgcgcctcatcgctcttcgcccgctgctggctgctggtggagggagagacggaaacctgggttatcaacgaactggcccggcagtgcggtcatcattttgatgctgaaggggttaaggtgatcgaattcgcccagtccggcctgaagccattgatcaaatttgcccgccggatggggatccagtggcacgtgctggtggacggcgatgaggcggggaaaaaatatgccgcgacggtacgaggtctgcttaataacgatcgcgagctggagcgcgaccatctgaccagtctgccggcgctggatatggaacactttatgtatcgtcagggatttgatgacgtttatcatcgggtggcgcagatcccggataatgtcccgatgaatatgcggcgggtgatcactaaagccatccatcgctcatccaagccggacctggcgattgaggtggcgatggaggccggccgccgtggcgtggacgctgtgccgacgctgctgaagaaaatgttctcacgggtgctgtggctagcccgcggtcgtgccgattaa

SEQ ID NO: 221733 - DNA, 2520 bp, Klebsiella pneumoniae
gtgcaggaggaagtgaaacgtccgccgctctattatttcgaggaagtggaagagaagcgggcgcgcgaacgcgagctgttggcctcctggtatcagccaattcctgagccggaaagtccgattgccactaaaccgctgacgccgccgaccactgcgtccaaaccgccagtggagacaaccgtagtctctgcggtagcggctggggtgcatcaggctaccgccgccagcggcggcgcggcggcagcaacctcgtccactgccgcatccgctgcggctacgccattgttcagcccggcgtccagcggcccacgggttcaggtgaaagagggcatcggtccaaaactaccgcggcctaatcgcgtgcgtgttcctacgcgtcgggaactggcctcctacggcatcaagctaccgtcgcagcgggaggcggaacagcgcgcgcggcaggcggagcgcgatccgcattatgatgatgagctgctctcggatgaggaagcggatgctatggagcaggatgaactggctcgccagttcgccgccacccagcagcagcgctacggtcatcgctgggaagacgataaggcgactgatgacgatgaggccgacgccgcggcggaagcggagctggcgcgtcagtttgccgctacccagcagcagcggtacgctaccgagcagccgccgggcgccaacccgttctcgccggcagattatgaattctcgccgatgaaaacgttggtcaatgacggcccgagcgaaccgctgtttacgccgacgccggaagtccagccgcagcagccggcccagcgctatcaacaaccggcggccgctccgcagcagagttatcagcctgcgcagcatcagccgatacaccatcagcctgtgccgccgcagccgcagtcctatccgactgcgtcgcagcccgtacagccgcaacaaccggttgcccctcaggggcatcagcctgccgcccctgagccgcaggagagcctgatccacccgctgctgatgcgcaatggcgatagtcgaccgctgcaaaagccgaccacgccactgccgtcgctggatctgcttaccccgccgccgagtgaagtcgagccggtggatacctttgctctcgagcagatggcacgcctggtggaagcgcgactcgccgatttccgcattaaagcggatgtggtgaactactcaccggggccggtgatcacccgcttcgaactgaatctggcgcctggcgttaaggccgcacggatctctaacctgtcacgggacctggcgcgatcgctgtcaacggtcgccgtgcgcgtggtggaggtgatcccgggcaaaccgtatgtcgggcttgagctgccgaataaaaaacgccagaccgtctacctgcgtgaagtgctcgacaacgccaagttccgtgataacccatctccgctcaccgtggtgctgggtaaagacatcgctggcgatccggtagtagccgatctggcgaaaatgccgcatctgctggtggccggtaccaccggttccggtaagtctgttggcgtcaacgccatgatcctcagcatgctctacaaggcgcagccggaagatgtgcgtttcattatgatcgacccgaaaatgctcgagctgtcggtctacgaaggaattccgcacctgctgacggaagtggtcaccgacatgaaagacgccgccaatgcgctgcgctggagcgtcaatgagatggagcgccgctacaagctgatgtcggcgctgggcgtgcgtaacctggcgggctacaacgagaagatcgccgaagccgcgcgcatgggacgtccgatcccggatccgtactggaagcctggcgacagcatggacgccgtacatccggtgctggaaaaactgccgtacatcgtggtgctggtggatgaattcgccgatctgatgatgactgtcggcaaaaaggtggaagagctgatcgctcgcctggcgcagaaagcgcgcgcggcggggatccacctggtgctggcgacacagcgtccgtcggtagatgttattaccggcctgattaaggccaacatcccgacgcgcatcgcctttaccgtgtcgagtaaaattgactcacgtaccattctcgatcagggcggcgcggaatcgctgctgggtatgggggatatgctttactccgggccgaactctaccacgccggtgcgcgtccacggggcgtttgtgcgcgaccaggaagtccacgccgtggttcaggactggaaagcccgcggtcgcccgcaatatgtggatggcattacctccgacagcgaaagcgaaggcggcggtggcggcttcgacggcggggaagagctggatccgttgttcgatcaggcagtcaactttgtgaccgagaagcgcaaagcgtcgatttccggggttcagcgtcagttccgcatcggctataaccgtgccgcgcgtattatcgaacagatggaagcgcagggtatcgtcagcgagcagggccataacggtaaccgcgaagtgctggcgccgccgccctttgaatga

SEQ ID NO: 221734 - DNA, 609 bp, Klebsiella pneumoniae; identical to SEQ ID NO: 137011

SEQ ID NO: 221735 - DNA, 486 bp, Klebsiella pneumoniae
atggatttttatcttggtatcgatattggcacctcgcgggtgaaagcggtgctgtttgatcagcatttcaccgcctgcgccagcgccgcggaaaatacctcaccccgcctgtcggccaatggctacgcggaacaggatatgacccagctgtggcattcggtgctggctattctgcgccagattgcccgccatccggcgctacaggcggggcggctgcgggctatcggcctcgccgggcaaggggagggggtctggctcagcgatgagcagggcgaaccggtgggcccggggatcctgtggagcgatacccgcagccacgagctaatgagcgacctgctgcgccgacccggcttcgaccgccgctatttcgccgataccggcacccacctgcagccctgcaataccagcctgcagctgtactggctgaaacagtatcagccggcgcggctggcggccgcgcgctatctgtttttcgccaaggactag

SEQ ID NO: 221736 - DNA, 990 bp, Klebsiella pneumoniae
gtggcggcgctggagctgacggacgccagcagctcgttactcaatcagcagaccggcagctggtcctcggtggtgatgaacgagatggggctgaacgaactgctgccgctgtttcccccgctgctggccccggatgccccggccggcacgctgagcgacgcggtggcggcgctgaccgggctgcccgccgcgacgccggtggccgccggggcgctggatgtctgtagcgccgcgctgggctgcggcgcggtcaacgaaggggatatctacacgatcctcggcaccacctgctgcaccgggatcgtctgccgcggcccgcagacggtgaacgaggcgacgcgctttgtcacccataccgaagccggacaggtgatctccctgtttccgatgcaggccggtacgccaaacattgactggctgcagcagcatatttcgctggacgccgatctggggcgcctggagcaggcgatcgcggcggtggagccaggcagcggcggcgtcttctggcagccgtacctcaatggcgaacgtgcgccgttttacagcccggacgcgcgggccggctttttcggcattagcccgcacaccacccgcgccgaactgcagcgcgcggtgtttgaaggcctggccttcgccattgtcgatgcgctgcagggttatccgcagggcggcgagctgtatctgaccggcggcggcgcagcctcggcgacctggctgcagattatcgccgactgtaccggacgcacggtggtctccagcgcctttaacgaactgagcgcgcgcggcgcggcgatcctggcggcccgtagcgtcgcggcgctggccgagacgcctccgctggcgcagacccgctatcagccgcgccctcaggcgcatgcccgctacgcggcgctgtatcccgtttaccgcctgctgcgcgagcagatgctgccggtatggcaggccagacaggccgcccttcaacctctttctcaggacctacaaccatga

SEQ ID NO: 221737 - DNA, 1284 bp, Klebsiella pneumoniae
ttgattttgcttaccaaacgtatccgctataccttccttcgggactctatctactacattcagttttgccttccagatgggaaaatgtttaggcgctctctgaacactgatagccatcgtgaggccagtgtgttgatgatagctttaatgccttttatccttcaggttaagaatcgccagttaactccagaagctctctgtctccagcttaacgcgcttaacactaatcgaatgcttgaaagggcagctagagctttcccgctctctatgccgctctcccttcctccagagaagcagatagagcaaaagaaggggctgcatttaggagaagcttgggcgcaatacaaacatgagcgggggaagggttggactgctgctatccactctgcaaatgagcgctatatggaagtgttattaaccatacttggagatgatagggatgtagctaccatcacaaagcgggacataaagcaggtgatggaggtggtagaaggcctccctaagcgagtcatacagccttacaggtctatgaatataaaacagctcattgcttgcgatgtgccggaggaacacctgatagggacggaggcgattcacaagcatttaaaaatttataaatctttgtttaaaacatttttggtggaagaaaaggacgtacttacagcatcccctacagatggtgtcatagctccgccgtctagcgctcgctatggggcttatacaaatagtgagatgaagagctttgtcagttatgcaatcgaagaggccaagcctgaatggctcaaatggattatcctgcttcttgcgtatacaggagcaagaaggggagagattgccaccctcactaaatcacaagtgagatatgacgatgatagtaatcgtcactatctactcattacggacggaaaaactgagaacgcagcgagggaggttcctctccataaccatcttattgatttaggttttctggattttgctgcaagcaagaagacggagcttttcagtgaagtagcgggaaccaatatggctaagattggtaaggtgatgtcagatatcagggaagagcttaacatcccatacagagacatccacaaccagcggaggatagtgcatagctttagacatagcgttgttacagcggccactggatggatgaatgacattactcacttgcagcaagtagtagggcatgagaagacggggacaggcataacgcgcaggtatatccacaccttcccactgtccgttgtatgccatatcattgatggacttaactggcgttaa

SEQ ID NO: 221738 - DNA, 579 bp, Klebsiella pneumoniae
atgaacatcttcgcctattgccgtgtatcacgcagtgacctatctacagctaaccagaagcttgctattgaacgttcaggctataagcccacccatgtgtatgaagagcaggtgagcggctctgtgtgtgctgtagagcgtcctgtgtttgctgagatgattagtcacatggggccgggggacacgcttgtagtgctgaagattgacaggctaggcagagataatatggatgtacaggctaccattaaattactgatggagcgtggcatcactgtagttagtctggacttaccagcaaaagacctcgccagtgctgaaggcagaatgatgatgcagatgtttgctgtctttgctgagtttgagagaagccgtatagctgaacgtactaaggatggtatagccagagctagggctgaggggaagaagctggggagacctgaagcggttgatactactgcgatggtacagaaagctaaggctgatggtatgacgcagcaagctgcaagtgatatgttggggctggggatagctaccgtaaaaagacactggaacaaatctatttcgccagtagtagtataa

SEQ ID NO: 221739 - DNA, 258 bp, Klebsiella pneumoniae
atgacaagccttgaagctgtacgcgttctcaatgaggctgtagcaaaggctggggtggctaaggatggcaacctgcttaaagcctatctgaagctacttaaacttgaatatgtagactattccaatcaacgctctaaggctctatggggccttcattcctctggctggtctaatgtcatagacaagctggagcgttgctctctgtgtgttacagagcgtgatgagagcgggaacatcctcaccatatcattgacgtaa

SEQ ID NO: 221740 - DNA, 1833 bp, Klebsiella pneumoniae
atgacaggtttatttgacacttcagatactggcggcaatgttagtggtggcgtctccccacaacaggccgtagctccagctcccagcgctattacctctgctgtaggcagcggagccctaaattctgtagggaatctctttacagctgtggctcaaggatacgcagaaggggctaagaaagctcaggccgctaaagatgctggagtgattagtaactacggtcagaagctcacagctttagacgctgctgtagctcaaggttctatgtcacatgcggaggctcaacgccgccaacgtgctctatataactcagctattgctaacaacccccatctcactgagaaacttacaggcttcactaaagacgtaacaaccactgagggcttaggtgatacgctggctaaaggtacagcagtagaccagcagattgttacagatactaaatcagctaccgctgaaggctttattactgaggggatgacaccagagcagcaggagaatgggcttaatctctatcgccaacgtcaacagcaaattggggaaatgaaattttatagccagcaactggacattcagaagcagaaaatgagtattcaggctcaggcagagagcattgcagcttcccgtgtacagcgtgctaatgctgctgctgagttgcagattaggaagaaccagatgtatgcacgtcaggctacagcagactttagcgctaacgtaatgcagcacactcagacgcagcttgataagattcaggcagacctgagcgctggtaagattacgaatgagcaggctatggtgcaggctaacagccttaaagatgccatcatggcgcagacacagaagattcgtggtgcagcaggtggcagctatgttgatgacatttcctcccccatcttcaaatcgattgataaccgcatggagtttctgtcaggcaaaatcactgaggatacgctgaagagccgcaataactcattacaggcacaggctgaactgccttacctgtcagaccctaagatggcctccgtcattgcttcctctaagtatctgggcggcatcactaatcctcagattctgggagaggccgggggctatatggctgagttcttacgcaagaatatgaaccctaacgccactccagccaaccctgtatccactgacccggatgagaaggctggaacgaaggcatacactggcgggttggttgataacatcaataacctgaagaataaaaaccctgctattgccgaccctaaaggcacctttgaggaattacaggtgcatgttaatcagcttatgaaaggtggggctgcattctctgggactactgacgaccctaaaggttataacaatctggttaacttccttgccaaccctgctttccttgattatcagaagatgggcgggcatatagacgcagataacctgagaaatatgcgtaacgctatcgcctccaactattcagataagctggttcccgccattcagaatgcatgggaacaagggaaaagtgttgtgggggtgcctcagactggtacgcagattggtgcagcattcgtcccgactcctaacactaaacctgctgaagacaccatccgctatgtatggactggtaaaactattgagtttaagccagctaaaggatttgagaacaacgcaggtgtacgggctaaggccggggaattgcagcgtcagctagcccctctcattaacaagaatgtcatgatgcgtgctcaccttgatggctcctctgattattctaaatatttcaaaatgagtgagccggagatgtttggcacgaaagctcaggacacctcctctgttaatgggcgctaa

SEQ ID NO: 221741 - DNA, 234 bp, Klebsiella pneumoniae
atgagctacaatttgattcctttccctctcgatattacgcctgaagcggctttaaagattgtggaatctaatttcattatcttgtctggtgcgtccatgaaggccattgtgcagcgggacgctgaggcactggaagatatccgcagcttgagtgaacagctcacctatattgagcattcactgaaagccgctatcgatggcacccttattgattctgattacaacttacattaa

SEQ ID NO: 221742 - DNA, 525 bp, Klebsiella pneumoniae
atgttatttgcacctccggcattaaagaagcagcgtgtaccaaacagaaagaagccttcagagaagcgcagccgctatatggaaactacccctgaatattctacacgtaatggttatgccatttacgcttataagggtgtagtgattgagaaacgcatgaatgtttattacatcgctaagcgtattcagattaaaggcttccctgaagaagtaatcaagaagatggaaggcacttttacagcagcctacatcctgaaagatctgattgattttggattagaaagtgttgatgcaaagcgtcacgctgaagtgagagaaaagcttaaaaactggaaatgtccccattgtgaaaccatcaccctgttagacgctaagcacaagcatgttgtctggaagtatgtaaagaacgaatggggcgaggaagaccgcattgacacaggccgtagacgcctgaggtgtcattattgcatggaagaaacgttgatggaagaagtggaatatgtctcagatgagactgtgttttaa

SEQ ID NO: 221743 - DNA, 4743 bp, Klebsiella pneumoniae
atggcagacaataatttaaatatcggttcattcagtgatgatgaagggtatcaggttgaagattttcaggatagcgatagtgttgggatggccccacctccagcaactaacatcccctcaaatcgtaatcaggccgctactgtagccctcctcaattcaaatgaccccgtacaacagatggcaacctaccagaatgtcaatgctgagctggtcaatcatggcaacagccccaccatgcaggatattacggaggaaatcacctccaatgagcaagccgctatgcagcgcactacagctcagtatctggctaaccctgctatctctgatgaatggaaggcaaacgccattcaggctgtgaatgaccgcagcaacccgatgtataacccacgcaccatgctggcaactaaagaggctacacagccagctcccaattctaccgctgaatctgccgatttacgtgagctgtacgctcagggtgttggtgaggctatggcctaccagcgtgagaagcagaaagtatacaacgcaactaaggctaaagagagcggccttgccaatgcggtagatgttggtgaaagcttcctccctctggtggctggtgctaaacaggcgggggtagagcgggctgttaatggcggtgggtggaatgcccttaaagcctttattctccctggcagctctcgtgctgatatggctgagaagtttaactccttgcctattgaccagcgtcaggctgcattgcagggactggcagataagattaacggggagggtaagacagccctcctgcctgattccattgaccagacaaactacgaagggctccagcaggtaatcgagaacggctcttacactgtctccgataaatatgtggataacattgtagggttgttggacattgtcggcatcggctccttgattaagggcaccttcaaggctgctgctgagggggctacggctcttaaggggctggatacagcggaagggctggcagaggctacagcacgtagctgggagcgccgcaccattgcttcagacattcagcccgtgtcaccatctcagaccattaaggatgccaaccccgctaaagctcgtgagcttcacgctctaacagaagctgatgaaacaggagatgttgctgaggctctgtatggcaccacacgtactgatgctattgctggagatttagccccacagccggggagtgtcactggtggggtgcagagcaaagtgcatcgccctgagattgcctcagacaatgccaacattgcagaccctgatattgttaacatggtgactaacactgcctcccctcacatatctcaacgtgagaaacaggttttagctgctaacgtgtccaatgatttcttcaatgctacaggcatggcctcccgtaaagaaatgagttctattgcggaaagtgttgatggaggtctgagcattaaggctgtgtatgggcctacagatagtggctggtctagtgtaggtgatgctgtcaatcaggctcaatacgcattacgcaagtatggtgtagatgaaaatgaaatctccattctgatgcgtcagggtgaagagtatgtgccaatcagtaaagaagctcaggcttccctgctggctggtaacaacgcccagattaaaggtgattacctcctccagattaatcatcgttatgaatacacctccgctgacattcaggcttcacagtttgaaaagtttggagttagctcagtattcaacttcatgaaccgctttgagtttgccaatggtaaaacaggaaatggttccctcacctcacagattgttgacccggcctccatgttctcccctgagtttctcaagggggctgtaattggtgatgtggctggagatgctgtatccgctaagctaatgaaaacagctaagccttttgttgacaccatgaagaaagttccggctgaccgtcactttgctatggagcgtcgcattaaagaggccaacctgaaaggacaagctctgtctgaaactacgctgaaggctgagggctggagtgcgcaggagattgctggcttcctgagcttccgtaaaactcaggatacgctgtgggaagttaccaacgctgatttagttaaaagctacaagaatcgtggatatggcaaactaacttataaggaaacgggttttgatgttgttgcccgccctgtatctcgcaatcaagtgtcagacggcatccgtgcttatgaccctgtgaaggatgaagtgcgcaccttgtccagagcagagcttgatgagatgtatgcaggaaacaaaagcatcgctgagacggctgatgtgatggatgtagacggcctcaaggtacagtatgtaatcaaccataacagcgctgaagctggttacattcgctccctgagtgctggtgaacctattatggcataccgtcatggatattacgctgtacgctataaagaccctcacttcattgagcgtaagctagttgacgagatgggaaccccactccgagacagccacgggaatgaagtgtggaaagctgtagcaacagcccctgatatcccctccgctgaaaaggccttggcccgatataactcaacctcaccgggggaatatcgtcgccgtaacgacctcaaaggggaggaatacgaggcagcgaatacacagctacacaccgcaggtggcttgtcagctcaacgtattcgcgggaagcgcttagaggatgctacaggcagtaacatggaacttgatgctgtacacattgagtctccgggggaatcgatgatgaatagtatcaacgctattagttctcgtgtctcctatcgtgactggctggaaacttcgaagcagcgcctcatggctacttacaaagatgtaatgcctgtccgccaaggacgccctgactatcccacccgtgttgatgagatcaagggcaccagcaaagaggcggcagatgcaagggcaacgtttgaatacatccgcgctatggagaatggctataccaacctgatagatgatggatataaagcaattgcaaacagcgtagccgatatggctggtactcgtggctttggtaagatggagcggttcgcccgtgaattctcagaagcctcagtgaccaacaaaatcaaaatggttccgtttactctgatgattgctctatccccgttgcgtcagcttgtattgcagacttcacagatagcgatgttagccggacgtttcccagcgtacatcccgcatctcattggagataacctcctgcttatcactcataaccttatggggggcaatgtcccagaagctgtgctgaagacgttcggcagagataagtattattgggacaagatggtgaaaagcatggatgagagcggcattacaaaaggtgtaggtaagcacgacttagcacggggaatcattgattccactgctgacagttccatccgctctatgaatgcagcacgtagcagcctattgggtaaagtagcaaaagcccctgtcaccgcagggagagcaattgttaacacgtcacgtaagattggctttgatgctggtgaatacatggttcaggcttcctccttcatggcgcattatcatgatgcggctaaagctggaaaagttcttaccaaaggacagctagacgatgtaattcacgtggcccgtaacttcactggtaactttgggaaatcaggctcactcgccatgaaccagaacagtgcctctgtatttacgcaatacttgcaagtacctgtcaaaatagcgcagcttgtactgactaataaagcaatccctctgaagagccgtttagtaatggcatccaccacggctattatgtttggcattgggacagaagacatttacaacatgttctctgatgagcttccgaaagacaagttcgcaagggacgttgtggtagatggccttctcagcgcttcagttaacggcatcattagtgccttcactgataagcctactaacattgatgtaagcggattaaaccccgtcaacgcgtatggcgtggttgagttcttacagaaggtgggctcaggtggatttactaagctggtaactgaaagccctgctggctctattgtctttggcaataacccccgtatcactaacctagttaagactatgggcaatatggtgggctatggcgatgttgctgatgagttacgcccgcagctttggggacgtctctggaaagacgtaattaacctttcctctggtacgtccaatggctacaaggcgatgctggccctcaagtatcggaaagagtatgcggctaatggtcgggtgctccgtgatgatgtttccaccccagaggcactagctatgctgatgggctttggtgggcaggagggcaaagctaactggaaagtaattgaggatatggcgggtaaatataaggcccgcaaagaggatgttctcgaaatcttcaatcaaaactcaagaatgctcattggcaccactggcggggatgaactggcttatcaggttaagatggggcagctagccatgtcactattcaaagacgacccacaaggcgctgaatggtatatggacgctctccgggagcaagtgtcaaatagtgatgaccgccttctgaaacaaatcatggcagcttcgcgctgggccacgatggaagatgtgcatcattggctggacaccgttccaaacatcactgatgagcagcgagccaattacagggcttgggctgatatggcgtataaagcgccgtctgaggctaaagacaagtaa

SEQ ID NO: 221744 - DNA, 375 bp, Klebsiella pneumoniae
atgtctgatttatttgaaggctgcaagcctcagtttcgtatctggagcattctggacattcctgcatttgagtatgaaggaaccactatcccctttcccccgcaacatcgcattgtatttgcgtatatggcctcactggctaatcgatacggcgatgtaagggtttcatattattcagtgtgcaaacgcacagggctggatgaaatagaagaagccgcagcaatctttaaatggctggaagcctttggcctcattaagcgtagagtgtccctgtttgaagatgacaagggcaagaaagaagctacccgctatctaattaactaccctgaaaacaaatttccctaccccaccctttccccaacaatggagcgataa

SEQ ID NO: 221745 - DNA, 384 bp, Klebsiella pneumoniae
atggcatatcccgtagcagaaatgatgcagaagctgttagaagctggttactcctcgactgaagccgctaacatggttgctgctgatgcacagagacaagctgaagaacgacaggctgtctccaccaccccaacattacgcaatcaatatggcggccttgacctgaataagactaaagagtttttctctcatgctcgtaagcaagaggaagcgaaacgattcttcgacccgctggaaggtatgcaatccactgacaatctgtctaaacgtgaacagatggatatgattcgagggaagcacgttggtaaaacagagaacgtttctcctttacagagcgttaacgctggtattgatttctttaaatcattgcgtgaaggtaaataa

SEQ ID NO: 221746 - DNA, 297 bp, Klebsiella pneumoniae
atgaattatacagaagacagcattaaagtgctgagtgaggatgaagcagctaaacattccccatttggcattgctcactccctctcaattaaatatcccctgatggacagcaagcattgccagacaattagtgagacattattcctcactggcattgatattacgctctatgagcgccgctattgctctccattgaacgctgtagctgatgacatacattttacagcagcagaattagacacgctctcagagctgctggaagcgtttaaagacatatcaaaaagaaaaggaaaataa

SEQ ID NO: 221747 - DNA, 222 bp, Klebsiella pneumoniae
atgaatgaactggtaaaactcacttctgatgtagaacacctcctcgcttccagagttgattactcaggcgtcaatgctaagcgctctcctaataatccagatgatgctcgctcaagagcagcaaggaaatgccccaatagacagagcctgcctgagcacaagaaaagctatcatacccaatacgcatacaatgaatttatgccatttgaatatgcagactaa

SEQ ID NO: 221748 - DNA, 165 bp, Klebsiella pneumoniae
atgaatactgatgcatcactgaagcgcttgcaaataagagtgcccccggcaatgcgtgagcctctgaaagaacattgcaagcagatagataaaagtccaaatgaaatcatcctcagtcttctcaaaagatatttagaattaacaggagcctttgattatgaatga

SEQ ID NO: 221749 - DNA, 246 bp, Klebsiella pneumoniae
atgaccttcacttacacccgccccacttccgaacacttaactaaatcgcgtcaagcttccgctgagaaatatcagcaggctgtacgccctattgtggaagaactgctcacctttggctatggctatcaggccttgtcaaatgttcttaatgcccgtggtattttcaccccgcaaggcaagccatttaataaagagaacgttcgctatttgctttctgttctggagctgtccacggcaaatcaataa

SEQ ID NO: 221750 - DNA, 576 bp, Klebsiella pneumoniae
atgtcttacatccctcgttcaatctctgtaggcgacattatcccaaccaacaactgtggtgacattcgtattgttgaatacaagaatgctaaacacatcactgttgaatttcttaacactggctctctcaaggtagttaaagcttcatccattaaagcgggtaaagtagaggataagatgaagcccacctttatgggagttggttgtatcggagaagggaatcatcctacacgcattaacggaaaggttactcgtgaatactctgcatggtctaatatgattcggcgggtatatgggaatcaccctaagtatgcctcctacaaagattgcacagttcatcctctgtggctcaacttctctaccttctgcgatacgcttcctcaattgattgggtatgctgaatggaaggctaatgagaaagagatgagcctcgacaaagatgttctgtttatcgggaacagagtgtatggcccattcacttgtatgtttgttgatgcgtccctcaattcattagagagtaacatccgccgctggcgtaaagagcacgctgataaagtggaaggggaggctaaataa

SEQ ID NO: 221751 - DNA, 123 bp, Klebsiella pneumoniae
atgcatttaaaacttccacagtcgctctttaccgcaatggttaaagaagcgcaagaaagtagcaccagcgtgcaagccctgattgtccgcttcctgatgcagcattacaaactgaccaaataa

SEQ ID NO: 221752 - DNA, 213 bp, Klebsiella pneumoniae
atgaagatcatcccccttatgaaagtgctgcgtgctccttccgggagcgtcccaatgtctgagcttatggctcacttggatatctcccgagaacatttgattgctgatattaaatgggctttcatcaatcgcctgtttgatatgtatatcaatcacaatgatgaactggtatacaccctccgccctgaaggaactttcttccataacgcgtaa

SEQ ID NO: 221753 - DNA, 828 bp, Klebsiella pneumoniae
atgattgttaagtgtgaagatgtttttgtagactctcttacaggcgagattattaaccctttagattactgtctaccagaaggttacgatgtgtcaccagctgtgacagaggctttaactggcctccctttgaaagggacttatactactactggcgaaattaaaaagggtaaagggcgtaagcctaaagtgcttgtcaacacgtattgctccctcttccaaaaccttgagcgtaaagatgttagaactactactggcgaaattaaatcagtagccattctaccgtcagtcattgatgatgtagtgacaggggcgttacgcttgaatgagggaggagacaacacaacggttccacgtaatcagctcctttttgttcttgcccacttagaaactctgtcagtagaaagcatccaaagtctgttcactgctaagcgtgagcttaaaggtgatgctgctccgggtatcagctattgccgctacatcttgcgtaaatgtgaaagcgtcattaacagcctgtcatatcatattgaacgcggtaacttctctcagcgtacatcatttgatttcgctcaggatgctaaggattatgaaaagtatggatgcgtgccctcttgtgtaatttctccagctccatttactaaaggggataaagagataattcgtaaacttgctattgaagggaagctcatagaagcggataagtatgttaaagcagtatctgatgcacaggataaactgatgaagaagttctccgctccaacattaaaacagattgaagctgagatgaatgctgagtttccgtatgacccatacattaggcaatattaa

SEQ ID NO: 221754 - DNA, 774 bp, Klebsiella pneumoniae
atgcctgagctgttgaatcccgcgcctgtcgcgcacctgcgccatctgctgcgcgcccattccccccttgtgcactgcatgaccaatgacgtggtgcagacctttaccgccaatgttctgctggccgtcggcgcctcgccggcgatggtgatcgatccccgcgaagcggcgcagtttgccgctatcgccgatgcgctgttaattaacgtcggtaccctgaccgaagatcgcgccgtggcgatgcgcgccgcggtggagcacgcccggcaggccggcaggccctggacgctggatccggtggcggtcggcgccctgaccgtgcgcacggccttttgtcatgagctgctggtcctccagccggcggccattcgcggcaatgcctctgaaattctggcgctggccgggatgagcgccggcgggcgcggggtggataccaccgatacggccgccgcggcgctgccggcggcccaggcgctggctcgtcggctggctaccgtggtggcggtcactggcgaggtggattacgtcaccgacggcgagcgggtgctcagcgtggcggggggcaatccgctgatgacccgggtggtgggcaccggctgcgcgctgtcggcggtggtggcggcgagcgcggcgctgccgggagaccggctggaaaacgtggccgccgcctgcgggctgatgaagcaggccggggagatcgccgcccgtcagggaggcccaggcagctttattccggcgtttctcgacgcgctgtatcaggaggtgcagggatga

SEQ ID NO: 221755 - DNA, 1284 bp, Klebsiella pneumoniae
atgtccgttaataacaaacagtggtacggtctaccgctcaacctcatctggggatatgtcgccatcgccgtgtttatgaccggcgacggctttgagctggcttttctgtcgcactacatcaaagcactcggattcaccccggcgcaggcttcctttgcctttactctctacggtctggctgccgccctgtcggcgtgggtctccggcgtggtggcggaaatcattaccccacgtaaagccatgctgattggcttcgtgctgtggtgtgtattccacgtactgttcctcgtcttcggcctcggtcgcgccaactatgcgctgatcctgctgttttatggcatccgcggcctggcctacccgctgttcctctactcctttatcgtcgccattatccacaacgtccgcagcgacagttccagctccgcgctgggctggttctgggcggtctactcggtgggtatcggcgtgttcggcagctatattccgagctttaccattccccacattggcgaaatgggcaccctgtggctggcgctgctcttttgcgccaccggcggcattattgcgctggtgtcgatgcgtcataccgaaacgccgcgccatatgcagaacctgaccactcgtgaaaaattcgccgaactggggcgcgccgcgacgctgctctataccaaccgcagcattctgttctcgagcattgtgcgcattatcaacaccctgtcgctgtttggttttgcggtgatcatgccgatgatgtttgttgatgagctgggatttaccacctcggaatggctgcaggtatgggcggcattcttcttcaccacgatcttttcgaacgttttctgggggattgtggcggagaaaatgggctggatgaaggttatccgctggttcggctgcatcgggatggcgctttccagcctggcgttctattacctaccccagcacttcggccataattttgccatggcgctggtaccggctattgccctggggatttttgtcgccgcgtttgtgccgatggcggcggtgttcccggcgctggagccgaaccataaaggcgcggcgatttcggtctataacctgtcagccgggctgtcgaactttctggcgccggcgattgccgtggtactgctgccctatttcagcactatcggcgtggtaatagcctataccgccttatatattctggccttcttcctgtgcccgttaatccgcgttgaacagcctggctttaccagcgatcagcatgcgaaaccgtttaccgccaacgcggcagagtcttaa

SEQ ID NO: 221756 - DNA, 336 bp, Klebsiella pneumoniae
atgaaccgtgtcactttcagcgtggtcgccatcatgttactcgcagcagcaacgacattgccgtttgttcttaatgccggttttggtaaagcgccgcagggggcacagcttagccaggtggaagcgtctccccactaccgggacggccagttccataaccaattgcccacgccagggttcaccgggcagaaaaatatgctggcggcgtggtgggatttcctgatgaccaaacgggaaaacgcccgtcccgcgcaaccgctgccgctggtgaagaccgatctggcgacgctgcccctcgggcaggacgtgatggtctggctcggccactcctcctag

SEQ ID NO: 221757 - DNA, 654 bp, Klebsiella pneumoniae
atggatatcgtatcggtcgctttgaagcgctattccaccaaggcctttgacgccacgaaaaagctgactgccggggaagcggaacagctgaaaacgctgctgcagtacagcccgtctagcaccaactcccagccgtggcactttattgtcgccagcaccgatgaaggcaaagctcgcgtggcgaaagccgccagcggcacctacgtgttcaacgaacgtaaaattctcgacgcctcgcacgtggtggtgttctgcgcgaaaaccgcgatggacgacgcctggctgcagcgcgtggtggatcaggaagaggccgatggccgtttcgccaccccggacgcaaaagccgctaaccacaagggtcgcaccttctttgccgatatgcaccgcaaagagctgaaagatgacgatcagtggatggcaaagcaggtgtatctcaacgtcggcaatttcctgctgggcgtagcggcgatgggtctcgacgccgtgccgattgaaggggtcgattttgcgatcctcgatgaggaatttgacctgaaagcccagggctacaccagcctggtggtggtcccggtcggccaccatagcgtagaagatttcaacgctaccctgccgaagtcgcttctgccgcagtcgacgaccattaccgagatttaa

SEQ ID NO: 221758 - DNA, 1188 bp, Klebsiella pneumoniae
atgctgaatatcgccgacctgcgccagcagcaaattccgctggccgctgagccgcgctcgccggtgccgtttcatattctgatgaagccgattggccccgcctgcaatctcgcctgccgctattgctattacccgcaggacgaaacgccggtcaacaagatggatgacgcgcggctggagcagtttatccgccgctatattgccgcccagcccgccggcgcgcgggaaatcaactttgtctggcaggggggcgagccgctgctggccggcctgagcttctacaaaaaagcgctcgccctgcaggcgcgctatgcccccgacggcgtgactatcagcaacagcctgcagaccaacgggacgctgatcaacgacgcatggtgccgactgttccgcgaacatggctttattatcgggttgagcctcgaaggcaacgaagcgctgcaggactaccatcgtccggataaacgcggccggtcgacctggtcggcggcgctgcgcggcattgacctgctccatcagcatcaggtggactttaatctgctggtggtggtgcataacgagatggcggcccacgcggcggcgatttatgaccggctggtcagcctcggcgcgcgctatctgcagtttcagccgctgatgagcgaaggcgcggccctgcgcgaaggataccagctcagcaccgataactggggacgttttatggtcggcatctggcgacagtggcggaagcgctgcgatagagggcgggtgttcgttatcaatatcgaacaggcgtgggcgcagtatttcactcataccagcggcagctgcgtgcacagcgcccgctgcggcagcaacctggtgatggagcccgacggacagctctacgcctgcgaccacctgatcaacgccgaacatcggctgggccgcctcgatgagcagacgctcgccgccgcggtcgacgcctcggtgcaactgcctttcggtcagcagaaaagtctgcgccgcgaatgccagacttgctcggtaaaaatggtctgccagggcggctgcccggcgcatctcaacgccgcaggcaacaaccgcctctgcggaggctactaccgcttctttagcgacatcctcgcaccattacgcccattttcccgcgatcttaatggcctgaaggcctggcgggccgcgtttgttgggactgcgcatactgcgtag

SEQ ID NO: 221759 - DNA, 558 bp, Klebsiella pneumoniae
atgactacggtatttgttgcaggctcgataaccatcaaaaacctcgacacgcttatcgtggatcgcttgaaaaaaattgttaactcacaatttcagatagttgttggtgatgccaatggtgtcgactcatctgtgcaacgagtgttggtagacctagggtgcagacaagccaccgtattcagcagttccgaaaaaccacgcaacaatcttggttcatggcctgtacatgttgtagatacaaatcatgcctcaggctcccgtgcgtttttcactgccaaagacctcaaaatggctgaagaggcagattatggcttaatggtttgggatgcgaaaagtacaggcactttgagcaatgttatcgaattactgaagcgtaaaaaatattcggttgtctttgtgaataaagccaaaaaattttttattatcaaaacgcccgaagatttggatgctctccttgattgcatgacatcagccgctttggaaaaagctgatgaaaaaatcaagttacgcgaaaaagtaaaccagctaaaaaacgaacagatgcagatgtttatgtga

SEQ ID NO: 221760 - DNA, 582 bp, Klebsiella pneumoniae
atggatgtcaacctgaaacaaattgatggtaattggcagctaggttttgcaatggataagcacagcattcgcagcattccaatcggagaagacgaatggggacatatgcgattcgaaacagaacgaacggaagtcggtgaagcacttttccagttgaaatatcggaatgattggtcgcaagtcactcctctggcccaatgcctggctgataacgcctaccccaacttcgacaacatcggctttatcgtgcccatgccagcatcaaatccaagagatcgacaacctgtgacagagattgctcaggaattggcaagattagttgataaaccctgttttgatggcttactacggaaagctcctggaggggcctcgttaaaaaacttaagttcaaaggccgaaaagatcgaagcaataggcgattcgttctcggtacaagatatcattagcaatcaaggatgctggaacgtacttgttatagacgatctgtatcatacaggggcctccatggaggctgcatgtgctgttctaaacgggtatgctaaagtaagaaacatatatgtagcagctttgacctggagataa

SEQ ID NO: 221761 - DNA, 876 bp, Klebsiella pneumoniae
atgtcgcgactggcactggatatgaaaaaactggcacaccgcgcaggtggcagccacaaaaccgtccacgaccgcgaacggatggcgcagcgttttgcccgtcatctgctgacgcaaaatattcaggtcaccagcaccagccaactcaaagccagacacattgcaggatatattcatgaacggctggcacaggggatttctctgcgaacactacagaatgaaatggcgatggtgcgctccattctggctgaagccggacgcacacaactcagccagtcagaattaatcagcaaccagtcgctcggtatcagtggtgccagccgtaacgggactcaccgggccattccggatgcactttaccatcaggtactggaccgggttcatcatatcgacgtaggtctcgcagccagcctccaactggcgcgggtgatggggctgcgcggtcaggaagcggtacagtgctgccagtctctgaaaacctgggataaacagctggaaaaaggggctgaacgtctgccggtgatctttggcaccaaaggcggacgaccgcgtatgacgcaggtgattaatcaggaagctgttcgtcaggccgtgaaagaggcgctgaatattgccggggagcgtgacgggcatctgattgacaaaccggatctgaaatcagcgatggactactggcacaaccatctccgcgatgccgggctgacgggcgaatactctccccactcccttcgctatgcctgggcacaggacgcgatccgctattatgaggaacaggggttaagccacaaagaggcgctggcggtaacctcaacggatctgggccatggagacgggcgaggaaggtatattgagcaggtgtacggacatagtgcgtaa

SEQ ID NO: 221762 - DNA, 147 bp, Klebsiella pneumoniae; identical to SEQ ID NO: 102984

SEQ ID NO: 221763 - DNA, 450 bp, Klebsiella pneumoniae
gtgggcgagcaggttttactgctggccgtgggcggcgagctcgataccgcctttgtgctgcccggtattttctctgatgactaccccgcaccgtcggcatcggctgatgcatttcacattacctttcctgacggggcggttatcgagtacgagccggagaccggcgcgctgaccgtaagcggcataaaaaccgcagacattacggcgtcggattccatcgccgtgacggtgccggtggtgacggtgaaagcggagacccgcatcaccctcgacaccccagaggtggtctgcaccaacaagctgacgaccgggtcactcgaggtcaccaaaggcgggacgatgaaaggcaatattacccataccgccggatcgctttcttcaaacggaaaagtgcttcatctgcataaacaccccggcgacagcggcggtgaaacagggacaccactatga

SEQ ID NO: 221764 - DNA, 141 bp, Klebsiella pneumoniae
atgctgagaacaatggagatcattatttttttgagcctgcaaagtattcagatggtagatatttcgctccgcattgggaagatacaaaatataaaggccttcatcatatgtatgtgtctttctgggatggtgaacaactaa

SEQ ID NO: 221765 - DNA, 1050 bp, Klebsiella pneumoniae
atgtcgactaaaaatatatattctaatttggaaaaaagcttagagaaaactatttctgagtccaggagtatacggttgcgtgattctggctatatttctgaggcagcatcgagttcccttgcagggatggaaaatctagatagtagatatgattttgtgaaaagctctgttgccttagaaagcgtgcgtgctgattctaatgaacaacattacgggataactgaattagtgaggcataattttggaaagcatggccgattaatgccaagttttggatgtcatcctgatttcgataatatggatgaaggagagttgagaaatggctactcagttactatgtttatggatatcattggctccactaaacttggtgtaatcttcagtcctgaaactgtttttaaaataaaaaatgatattattagatgtgcaatagaaacagtaaactctttcgatggacatgtgcatcgtattatgggtgatgctgtgatggccttctttagaagtgataagtgcgagagagaaggtcgcattgcagacagtgccattgatgcattgaattgcgcgacatatttaatcgatatgtttaaaagtacggtaatccctaaactaaatgagctgggggtagatgaaaatcttggcatacgtataggaatcgactatggagcacatgaccaagttatctggggtaaatatggttatatggaaagtcaggaggtaactgctacatctttttttgtcgacgtagcagctaaactacaacaaaaggcaccgaaaaactcgattatgataggtgatagtttagcaaaacttttaggctttgataccaatcaactggcagtgagaacaaaaataaaaaataatgaagaggtttctcttcattatatcaccccgaattataaggatgcgtcggggaaatcaattaattacaggcagcatcttttaaagaatgagtcatactacaagcttttgccaacagggatgcttgatagtgatttctatatacgagccagtctgaaaagggacaaaaacgatccatctgatgataattag

SEQ ID NO: 221766 - DNA, 546 bp, Klebsiella pneumoniae
gtgcgaaaattaagcaaggggaatgaaggcgcgatagacaaaaaaattgaattaatgataaaggttattattcgtactgactcttatctaaactcagcaaacactaagtctactatattacttagtttgtcatcagcactattagttgctctgtctgtaaacttcaagaacatcactggtatggtgatagttgattcagataaagctgttcttgctgttctgataagtttaatgatttttttactaataacgtcaattgttttctcgcttagaggtattactccatatattaaaccaagtacggtaagtaacaccttttcatttgttgatatttcaattaatttccatgagttacatttatataaagaacgttttaattcagtatctaaactggagtatttaaatgaattaatttcattaaatcataatttatccaaagcgctcgttgcaaagtataataagcagattactgcaataacctgtattgaagcaactgcgtacgtcctgtgtttttcagtgtatatgattattatagctaattgctaa

SEQ ID NO: 221767 - DNA, 450 bp, Klebsiella pneumoniae
atgaatgactttaaaccgttcgacgataagctcgccgggctgattgcggcgctgtcaccgaccgcccggcgcaagatggccgcagatatcgcgaagcccctgagagcccgacaacagcgccggattaaaacgcagaaagcgcccgacggcaccccatacgccgcacgaaaacgccagccggtgaaagcgaagaaagaccgggttaagcgggaaatgttcgcgaaactccgcatcagtcgctttatgaaagccacggcgggaaatgatgtggcggttgtggagttcactggcaaggtgcaaaggatggtgaatgtgcatcagtacgggcttaaggacaaacctagccctaatagcggctctgtagaataccctgcacgtatcttgcttggattttcgccttccgatattgactttgcatccacaaagattgttaattatctatcggagtga

SEQ ID NO: 221768 - DNA, 324 bp, Klebsiella pneumoniae
atgtacaagccaaagagtctgcgaaaagccttaactgacgccgtgcctgatttggcgcgtaatcccgaaatgatgcgtatctttatcgataacggaaaactggcctcgacgctggcggcgtcgctgtcgtttgaaaatcaatacacgctcaatgtggtggtgaccgacttcaccggcgatatcgagctgctgctcgtgccgattcaggcatggttgcgcatccatcaggccgacattatgacgaccgacgagggtcgcaaaaaggcttcccctattttgccgatatcaacgacaacgacagcgccgatatcagtatcagcctga

SEQ ID NO: 221769 - DNA, 291 bp, Klebsiella pneumoniae
atgagaatgaacagattcgccgctggtactgcgctgatttgcctgatgctgtgcgccggttgcaccagcgcgccgcctgtgccgacgccggtgattgtttacaacgcttgcccgagggtcagcctttgcccgatgccgggaagtgacccgaccaccaatggcgatctgagcgcggatatacgccagctcgtaagcgccctcgagggctgcgcgcttcaggtcagaacggtaaaaaactgccaggacaaaatcgatgtacaagccaaagagtctgcgaaaagccttaactga

SEQ ID NO: 221770 - DNA, 1014 bp, Klebsiella pneumoniae
atgaacaaaatcagagccgccgtggtcggcgcaggtatctacggcaaacaccatatgaacgcgtaccgccataacccggacacggtgctggtcgccatctgcgacaccgacacagaacgctgtgacgaccttgccatggcctacggcgtaatcggctacacccggctggatgtcctgctgcaggaggaagctatcgacgtggtctcggtggcgacaccggacccgtaccacaccgaatccatcctcaccgccctgcgccacggcaagcatgtgctggcggagaaaccgctcgccacctcagtacgcgagtgcgagcttatcgtggagatggcgcagcaacgggacctgctggtcggcgtcgatttccacaaacgctgggacctggcggtgatgcgcattaaggctgaacttgagaagccggaagccgggcgcatcctgcgcgggcatatcagcatggacgacgtgattagcgtgccgacagagtggctgaactgggcgggcgcaagctccccggtgtggtttctcggttcccactgctttgaccttgtgcgccacctttccggacaggaggtggtgtcggtgtatgccgtcgggcagaagcggctgatggtcgaatgcggcctcgacaccttcgacagcgtgcagagcctgctgacgatggccgacggcagttcgtgggtggtggaaaactcgtgggtgctgccggagggctttccgaaggacaacgacggacgtatcgatattctctgcgaggcaacgtatatccgcagtacttcccaacatctcgggctggaaatcaccacgccgggcatgacgctcacgcccaacagctatttcatcaactaccgcaacggcatcgccagtggtttcggtatcgatccgataaacgactttgtgcgggcggtcaggaaccgttcaccttacccggtcacagcggtggacggactggcggtcagccggatttgcgaggcggtgcatcgcagtctgaagagcggaaagcctgaaaaaatttga

SEQ ID NO: 221771 - DNA, 981 bp, Klebsiella pneumoniae
atgaatacggtgcttattccgcccggtcccggcggctacggtaaagggctgtggctgcccgttgccagtggcaaaaaggtgctgtcgctgaccggacgagagattcatccggtggcgatagaaatcggcgcgctcaccgaatcggaaatcgttaacggcttctctgacattccgccggataacgacatcctgtgcgtggtgattaactgcgccgggtccctgcgctgcggcctgtatccgcagaagggcatcccgaccatcaacgtgctccccacctggcgcgccgggccgctggcgcactttattaccgaagagaattacgtctccgacgtcacgatggaacagctggttctggtggataccgccgaagcgccggacagcgagcctgagataacaccggagcctgcactacgggttatcaccacaccaccacctcctcgcggcgcggagaagctggtgcgcatggtcgagcagaccggcaccgccgtcggccacgttatcgccctgctgttcgccgccagccgtgaagcggtggacgtgtcgctgcgcaacgtcatcccgtttatggcctttgtctcgctgctgatagccctggtacaggaaaccgcgctcggcagcctgattgcccatgccatgacgccgctggccaactcgctgtggggactggtgctgctgtcgctcatctgcggcattccgttcctctccccggtactcgggccgggcgcggccatctcgcaggtcatcggcgtgatgattggcacccagattggcgctggcgcaatatccccggccttcgccctgcccgcgctgtttgccatcaacgtgcaggtcggctgcgacttcgtgccggtcggcctttcgatgcaggaggccaaaccggagaccatcgccaaaggcgtacccgcctttttgctgtcgagacaactgaccgggccgctggcggtcatcatcggctggctgttttccctgggcttattctga

SEQ ID NO: 221772 - DNA, 375 bp, Klebsiella pneumoniae
atgatgatttactgcgcgcgtattactgccatcgggctgtttgtcgccgacggcctgaccgacaagatgctcatcaccttcgacagcaacgggccgaaggactgtctcgattactcgctgtcgctggagccgtcgttccgggaagagagcctgatgatactccccggcgaccgcctgatgctggcgggacacgactatctggtgactgccgtcggcaagggggcacaacaggcgctgtttgagctcggccacctgacgctggtgttcaacggtgacctgaatccctgccacaccggtacggttcatctctccggcccggtaccgaatctgcgcgacctccacggtaatctggtgatagaggagggacgcccatga

SEQ ID NO: 221773 - DNA, 522 bp, Klebsiella pneumoniae
atgtttctggtctccctggctgaaggctttatccacctgttccaggccgcaggcaaaatctttctcgacatgatgaccgggcttatcccgatgcttatctgtctgctgctggccatcaatttcctgatgaagctggtcggcaccatcagaatggagaaagtcgccgccctgctcggccgctcgcgcatcctcacctacggcgtgctgccggtgctcggctggttctttatgagcagccccggtgcgctgaccctcggcaagcttcttcccgaaaagagcaagcccggctatgaagatgcgctcggcaccacagcccatcccctcaccagcctgtttccccacgtggtgccgtcagagctgtttgtctggctcggcgtcgccgccggggttaaggcgctcggcctgcccgtcacctcgctggcgctgcgctatatcgctgccgccatgctgattggcctgatacgcggaattatcaccgagtacctgttcctgcggctcagcaagcgggggaatgtgccatga

SEQ ID NO: 221774 - DNA, 285 bp, Klebsiella pneumoniae
atgaaaaagtcaacaaccaaagactggcaccccgccgacatcatcgcagccttacacaagcgcggcaccagtctggcgaaactgtcgcgggaagcggggctggcctcgtcaacgctgtcgaataccctgacgcgcgcgtggccgaaaggcgagtggctgattgccatcgcgctcgacgtgcatccgtctgaaatctggcccggccgttacctcaattccagtaacaaacgtgaaccccgaaaaccgcttcacccgatgacaacaaccgacaactccgggacataa

SEQ ID NO: 221775 - DNA, 2070 bp, Klebsiella pneumoniae
atgaaacgcgccccctttctctgtaagcagtctccggaccgcacgctcgaagtggtgatccttgccggaagtctggcatgggagacctcacgcatctggcgaaaagatcccgagcgggaagatgatgttcccccggtggtgctcggcccggatgaactggccgatctggataacctgaccattatcagacccgacacactctacgtccgggtactccgcaccggcgatatccgcgaagaggagttgctgaaaattgcggtaaaactggcgcacgcgggtgtgcagatggcccggctgatgagccctgacggtgagttgctggaggactggagcggtcagcttgcacgcctgcgacaggaaaggccttccgacattctgccggatcacttccgcctcgatgaggaggcactgtggtttgacaagctcaccgaacgccgcgacggtgaaagcgacgtccagccccagcgcatctgttcccctctgcgcgtcaccgccatcacctgcgacagccatgacgacagctatggacgcctgctggaatggcacaccaccaccgggcagttgcggcgctgggccatgccgatggcaatgctcagcggcaacggcgaggagttgcggcgcatcctgctggaaaacggcctgacctacatctccacccgccccgccctgcgtagcctgttatgtgagtacatttcgcggtcactccccggacgccgggtcacctgcgtggagaaaaccggctggcacaacggcgtgtatgtgctgccggatgaagttattggtccgggtggcgacaacatcattctccagggcagccactacctgaccggcggctttgcgcaggcagggacgctggcagaatggcaggggcaggtcgccgcactctgtgcaggcaactcgcggctggtctttgccgtctgctgtgcgctggccgccccgctgctgcgcctgaccggaacgggtggcggaggttttcatctacgcggtgagtccactgacggtaaaaccacggtgatgaaggtggccgcttccgtctgtggcggcacggattactggcactcctggcgggcgaccgggaatgcgctggagggaattgccagccgccacaacgatgccctgctgccgctcgatgaactgcgcgaagtggacccgcgggaagccggaatgattgcctatatgctggcgaacggccagggcaaggggcgcgcccgcactgacggcgaagtgcgcaaccgcaggcactggacgctgctgctgttctccaccggagagctgtcgctggcggaacacaccgaacgcgccggggagcgcctctacgccgggatggacgtgcgcatggtacaaatccccagcgatacagggaatcatggcgcgtttgaacagctacacggctttgccagcggccagcagttcgccgataccctctgcgaccgggtcgcccgcttccacggcaccgcctttcgtgcctggctggccttcctcacccacgaccaggacgccagcaccacgctggcaagagagttacttcgccgctaccagactgccctgatgccggagaacgccggaaaccaggtgcagcgcatcgtggcccgttttgcgctgctggcggtggccggagagatggcgacgctgcagggtatcacgggctggcaggaaggcacggcatatggggcggtccagatctgcctgcacgcctggctgaacgagcgcggccatattgctaaccaggaggatgaaggcgtgctggcgcagatcaagcggttcattaccgcgcaccagtacagccgttttgcctcgtgggacggcccggaccgcccgctgaatatggtgggctttcgccgggtggaaaaagatccgctgacgggtgaagaatacacactgtttcacatcctgccggagggctggcgggaaatgtgccggggattcagccccgccagagcggccagattatgtctggaagcggaatgcctgctgcccggcagcgacgggaaataccagtcgcaggttcgcctgccggagatcggcaaagccagggtctaccgccttacctcccgcatcctcagtatctga

SEQ ID NO: 221776 - DNA, 216 bp, Klebsiella pneumoniae
atgaaaacccgtgctgacaataacgatgcttttcccgaaagcggcaatgtgcgtatgcggcaggtggtccagtttctggcgatgagcgaatcgtcggtttaccgcctgattaaagacaccgactttccccgccccgtccacctctcttcccgactggtggtcttcgatgctgctgaaatccgccagtggcaacagcgccgcgccgccattcgttaa

SEQ ID NO: 221777 - DNA, 3804 bp, Klebsiella pneumoniae
atggctctattggataaaattaaaagtctcatatcagcaaatgagactgctactcaaaacatagaagaagaaagcgtttacgacactttaactcctaaaataattactgatagtagtgttaaacactattttgatgcattggattttgctttttcgaaacaggatgtcaaaaacatcgcaatcacagggccttatggtgcggggaaaagcaccgtgattcagtcctatctgaaaacacatctcaatagagaatttataaacgtatcacttgccgatttttcattatcaggaaaaagtgatgaagcaccgttggaaaactcagagattgaattaagtatacttcagcagattttatataaagagaacaaagataaccttcctgattcacgtatcgatcggattcagaataggaataaaaaacacatttcctctctatttctcaccgtactgtcagtagtagcaccattattattactggctataaccatattcccaaaatatttcttctctttatttggtgcaacagaacccacgatcaacgtgatcgttaatatgtttcctgaaaggtttttcgttagtatcatcatgggtttgctctgtttattctttattgtaagagttgcatcaaaggctggtatttttgataaaaaaataaagctcagtaaaatcgcatttcttcaaggtagtgccgatatggcatcacaggaatcatcatccttgctcaataactgcttggacgagatcgtctattttttctcccgttcacaatataaaattgttgttttcgaagacttagacagactaggtaacgctgaagtatttgttaagttacgagaaataaaccagatagttaataacaaccttcaaagtgaacctgttagatttatttatgcttgccgtgatgatattttccttggagcagatattagaacaaagttttttgatttcattttaccagtaataccggtaatggatgccaggaatgcctacactcatttaaaaaataaactatatgatttcccagaaaatgaacaaccacttcttaagcagatgtcactatatataagtgatatgcgttccctacaaaatattgtcaatgagtttaatttatttaaaaaggttgttgatgataatactaaccaagcgaagatatttgcactcattttttataaaaatatatatgcccaagattataatttaacagataaaaaatcaggtgtgctttattcattcatacataattatcgcctacgtaaactacatgaaaaccatttcaaacttctcgaccaacgattagaagaacttaataataaacttgtaaaaattagaaaagaatctgttagcactgatgcagaattacgtaaacagattattagtagatttatttccccagaattatggcctatagtttattttataaaagatacagggaattatcatcagcgttatataaagttctcagcagaaagcttttataatagtgaacatgaatttatcaactactttgaacaaaactcgtcactttatataggatatccatttaatggaaatcagcaccaattagctaagattgactcaacttcgataattgaagagtacaaacaaagaaatattcttatttccagcaatagagatgatgcatataaaaaaacaacaaaagaaattgaagaactgaaagaaaacattcgaaccaggaatgctatttctttagcgaatttactgaagataattggttgggaaaactttagaacaattgctgaagaatatattgcaacatgcgatgatagaacaataatagatccagagcagttagagactattcgcaatggattccgcttcggtggttttgaagcgctctactatttactaaccaatggatacatcatgcaggattttatgatgttccgctccatctttaatcaggggacgatctctgctaatgacaacgactatattaaagcggttggtcgctacatcggatgcgaagaggcaaaccaaaccttcttgttggataattctaaagatgtgttagccgaactggttggtcaacattaccaatatcgtgaaggtgcattacatcatcaaatcattgcctttttacttgatagtcaagataaccaagatcataaaaccttgtcggcgatgatagcgatgatttttcgtcaacctgcatcagtaataatagctatttttaagatattagaagaccgttttattaacgttgattattttactcgtttagtagtctcctcactgagtgaaaataagtatctggataagatgatctccgttcttaaggaacaggaacataacgctatttccaaatcaattgcttcgaaaatgatagctttagtttcaccggatatatctactgatcaaaaaaactatcaaaaatttatcgaggatcttggtttcagtttagtctctgaagtagaacctaacaatcttcaatattttcttcacaatatagaacaacttcaagttatttatcatgatatttacttgccagttactccgaatgaaatgaaagccttgaatttcattggcgatcatcaaatgtaccctctggacagggccacttatcgagttgttgttgctggattattgcagagtgacaatgttacttgtgaaatggtagatgatttaccgtggtcattattggataaacatcaactttccaaaataaaagtttacgtaaacgacaacattaatatctttgtaaaagatatttttatagactcaaaagaaagcagtaatgctattgtttcagtgattacacattcagatctcagcgatgaactcaaaatcttaatactcgaaaaaatgcaattcaccgtgaccgggctaaatgaattcccagaatatattgatgttgatggtaacgaattatcatatcacgatctgttctatcgatatgatcatgtaacgccaggatgggaagcgttattggcctatatttgcgaagagtgcaaccttgagatactaacgcagtatattgaaaattatgctgatgtattaagccaagaggcaataaatttgatggaaggagatcgctatgaccttctatatatgaaagttatctgcaatgataacctcagtgatagcgcgtatgctgccatattagagccagtttatattaatacccatcactgggatgagcgcatgagtttgaaaaacctttaccgcttgataaaaaatagaaaaatagaactggatcccgagacttttaaacaagccatacaatattttatttcgaataatgatttgaaaagaatcgagccatttgttttgtggttttcacaatttaaagacaattttttccccaatatagaatattatctttgcgttaatcaagatgatgttttttttaaggagtcattgattggaattaataattcccatgtattcactttgcaagaaaaatcttcaattttattcaaatgccgtgagcattatgagctatctttatttgaggaattaactatttctaatgagggacttattgccttagttaatacatctacagatgataatttcactatttatgtaataattaaattattaaaaaatggttaccgtagcagaacggagattgcacacttcgtgagtaggttggaagaaaaagaatacacaaaaatattttatcaaaagagcgcaacattgaatcttgataaacctcaagaggcggagttatttctgtctgcgttgcaacaagcaaacctgatcaagaaatggacacttagggatgtgggtaaatattacgttcaatgtcgatatgaggaagacgagagctatcttgattaa

SEQ ID NO: 221778 - DNA, 648 bp, Klebsiella pneumoniae
gtgaccagccccattcgtcagaatctgtttgaacgggaatgcgatatgccgctgctggaagcgcggcatctcgcccttctgcttctcggcctcgatgcttcccaaccggcaaacgccctgccggaagaacatcaggaaaattaccgtatcctgcacgacgccatcagccgcaccatcaaagctacaggcatggtcagcgccccggctaataaacgcatgttctatgccgatgagatgttcgcgctggcctggcggcttattgatgacgaactgacgccgccagaaattaaggcccgcagcctgaaggcggtgatgaaactgtcacgcaacagccgtggccgcaagtggctgaagacgctcggtgacgacgcgctaccagatctcactacttcagcacaaccttcccagcgtgggatgcataaacgcgacaaagcgcgggagaatactgccaggctctgctggctactggttcagcttctggttgaggagactgacgggcgttatgggacgtctgataaaccggcttcggataggatacttcgaaagctgagagcgctagcgcaggagcgggaattgccgtcagacgggcttgggcgagggacgttttatgaggtgttgaagatggggcgggagaggaagtataggtaa

SEQ ID NO: 221779 - DNA, 1248 bp, Klebsiella pneumoniae
atgcctaagcaactgaaacccttaacaaatgtggagatcgctggcgcgaagccccgtagcacagattatgagctacgggacggtgaaggcctgtacttgctggttaagacttcagggaggaaggtctggcatttcgagtactatcaccccatcaccaaaaagcgcaccaaaaccagccttggcccttacccggtcgttacactggctatggcccgcgaaactcgcacgcagtacagacgactactctatcagggcatagatcctcgccaacacttagcaggaatagctgaagaaaaacgtatccagactgaatgcacgctggaaaaggtggccggacagtggctcaaagagaagaaacggaccagcgaccttagcgaagatcacgccaaagatgtctggcgttcgctggagatgcacgtcttcccttctctgggcagtacgcccgtcactgagatccgcccgaagatgctcaaggagcacctcacaccactggaagaacaaggcatcctcgaaacgctgcggcgggtcatctcacggctcaatgaaatcttccgctttgccatctccgaagagctcatcgagttcaatccggctgacaacctggtcgcccgctttaagaaaccgaaaaagcagaacatgccagccctccaccccagcgagctgggcaggttaatgctgacgctacagaacgcctctatccgcaaggaaacacgctgccttatcgaatgggagctactgacctgggttcgccccggcgaagccgttagcgcccgctggtgcgacatcgatatgaaaaaagcggaatggcgcatccccgacacctttatgaagatgaaccgttcgcacacggtgccgctcagcaaacaggcgctgcgcgttcttcagataatggagccggtcagccgccatcgcccatgggtgttccccagcatccgcaaaccactggagcatatgcaccagcagaccgcaaacgccgcgcttatccgcatggggttcggcggcgaactggttgcccacggtatgcgcagcatcgccagaacggcgggagcaggccattttccccgtgaagtactggagtctgcgctggcacaccagaaagaagacgagatcgaagcggcctacaaccgcagcgactatctggaacaaaggcgaccgctaatgcagtggtggggaaactacgttgatgctgccagacggcaggcgctgctcggtgaagaagaaccgctgcggatcgtggaaggagaataa

SEQ ID NO: 221780 - DNA, 402 bp, Klebsiella pneumoniae
atgcacgataaggcttttacttttcagacgcttcgcccggataccattatcgatgggttattcgatctgggtatgcgggtggactccggcctcaccccgctaaacagctatgagaaccgcgtttatcagttccaggacgaagagcgccatcgctatgtggtaaagttctatcgtcctgagcgctggtccgcagaacagatccttgaagaacaccagtttgcgcttcagcttgtagaagatgaagtgcccgttgctgcgccgctcttatttaatgacagcacgcttcatcagcatcagggattctactttgccgttttcccaagccttggcggtcgtcagttcgaagcggataaccttgatcagatggaatgggttggccgctatctggggcgcctgcactag

SEQ ID NO: 221781 - DNA, 3387 bp, Klebsiella pneumoniae
atggcaaccctgcgtgaacttatcattaaagtttctgctaactctcagtcattccagaccgagatagcccgcgcgtcacgtatgggggctgattattataagacaatgcagaatggcggcaggcaggctgcggcttcagctcgggaaactcgccgttctattgctgagctaactgaccagatggagtcagcaaaggctaccgcactggggttaaccggggcatttgctggtgcttttgctacggggcatttaatagccctggctgatgaatggaattcagtaaacgctcgcctaaaacaggcatctcaatcaactgatgattttaccagctctcaaaaacagctgatggatatcagtcagaaaacgggtacatctttttctgacaacgctaatttattttcccgttcagcagcctcaatgcgggaatatggttacagctccagccaggtgctggatattactgaggctatttctactggtttaaaactttctggcgcgaatgctcaggagtccagttcggtcatcactcagtttagccaggctctggcgcagggcgtgctgagaggtgaagaattcaatgccgtcaacgagagcggcgacagggttatacgggcgcttgcggcagggatgggggttgcgcgtaaagaccttaaatctatggcggatcaggggcagttaaccattgataaagtagtgccagccctcatcagccagcttggtaagctacggaatgaatatggtgaattgccgcagactgtttcatcgtcggcaacaaaagttgaaaacgcttttatgcaatgggtcggtggagctaatgaagctagtggcgcgacaaataccctaaccggattacttgatggcgtagccaacaatattgatcaggtcgccactgctgccggagcgcttgttgccgttggtgcagcccgatatttgggaaatatggctcttggtgccagctctgcaacggctgggattattaacgctgcaaaaagtgaagtagctttagctgaagcccaggtcagagggacgcaggtttcgacagctcgcgcgcgtgctgcagtttatcgtgctcagcaggcactggcagcggcgcggggtacagacgcgcaggccgccgcagaaaaacggctctcactggcgcaggagtcacttaaccgtaatattcaggccagagtatccgctcagactgcgctgaactcggttactgctgtaggttcccggctcatgggtggagcattaagcctcgttggcggtattccagggctggttttgcttggtgccggtgcctggtacacgatgtaccagaatcaggagcaggccagattatccgctcaggaatatgcaaacaccattgatgcagtccgtgaaaaaacaaaatcaatgtccctgcccgaagtttctgataatgagaccaaaacccgtcaggcgctggaggagcaaaaccgtcttgttgatgcacaggcatcaaaagtaaaaagcctgaaggaagagatcgcgggctatcagtatgttctgtccaaccccgggccgacaaccagtggcggtttcatgataaaccaccttacttcggttgaaacggtcacccatagtctggaagaagcgacttccgctctggccgttgaacaggagaggctgactcagatgcaggctaagtctgagtcgatccagtcggtactggaagggatagagaacaggcgaatagcattaatccggcagcaggccgcagaacaaaattcagcatatcaatcgttattaatgatgaacggtgagcatactgaatttaaccgtttgctgggtctcggaaataatctcctcatggcccggcaggggctggtaaacgcaccactacgcttaccacaggtagacctgacaacccagcaaacggctgcactggaaaaaagccgccgtgacctggcgctttcaaaactcaaaggagaggacaaagaacgcgcacgactgggttacgctgcggatgacctggggttaactaacgatcctcagtttcagaccggacggcaggagttgattaataacggcctgaatgaatggagaaacaaccaggaaaataaacccaagccaaaaggaaggcatgggaaaaccgaggcggagaaaaccgaagatacctatacccggttgattaaacagcaacgggagcaaattgctctttccagccaaaacactgaactggcaaagatgaaatatcaggttactcagggggaattatcttcgcttgaaaaatccaaaaaggaaacattgctacacaatgctgcgcttattgatcagaaaaatatcgctgaacagttaaaaacattccgcgaaggtctggccgacagtaatgctgccgcccgggaaagggggaatatcgatttcctcggcgcgggacaaggggataaagcccgtgatcgaatgaaggaaatggcggatattcgcgctgattttctgaggcagcagcgtgatttacagcgtgatttcagtcgtgggcagatttccgaagacctgtataaaaagcaaacggaagcgcttaaaacggcgcttgccgaacgcctggatattcaggaggagtattacaaaaaaaccgatgaacagcagtcagactggcgcgcgggaatcagcgattccctgatgaactatgccgatcaggcttctgatctgagttcaatggctgccactgcaaccagcgagattctggatgccaccacaaactctatctctaacaacctgacaaacgtcctgacaggcgctgcttcttttaaagatgggatgtctaatattttctcttccctgggcgaaacggtgattaagacgctgatccagatggcaacacaggcgttaatcaccaaagcaattatggcgtcatttggcggcggagcgggtgggttgttcggtagtctttttggcggtgccagcggtgcggcaagtagtggtaccgctattcaaagcgcgggagctaatttttcatttaacgctctcggaggcgtttacgattctccgtcactttctgcctacagcaatggtgtttacagcactccccaatattttgcgtttgcgaaaggggcaggtgtattcggcgaggccgggcccgaagccatcatgccgcttacccgtggcgctgatggttcgctgggggttcgtgcggttggacgtgagtcaccggcagtccaggatgctgcaaggcagattgaggcgcaaccaagaatcgcggtcagtgttgatgcccgtagcacgtttagcgggcaacctgacgacgcaacaatgctggcagtagatcgaaggaatgctgcactggaacgacgcatcatcaacacactcactgctgaagtaaataacccccagaagaaattcggacgcgccatctactctaatctacagcccaaaaaaccaagatag

SEQ ID NO: 221782 - DNA, 186 bp, Klebsiella pneumoniae
atgatcctgatgatactcgcgccacttgttggtgtgctgggggctattctgctctcattcggtgcctgggttatttacccccctgctggctacattactggcggtattctgtgcctgctctggtcatggcttgtatcccgctccctttccggtaactggaaaattgaatccggggagggtggctaa

SEQ ID NO: 221783 - DNA, 1731 bp, Klebsiella pneumoniae
atgagccgaaaagcctatccaaacgttaacgctgcaaatcagtacgcaaggcatgttgtcgccggaaagattccggcatgccagtatgtcattgatgcctgccagcgacatatcgacgatttgtcaaaatcgcagggaaagaaatttcgataccgctttgataaagaccttgctgagcgtgccgcacggtttattcaacttctcccgcacaccaaaggtgaatgggcatttaaaaggatgcctattacccttgaaccctggcaattatttattatttgctgcgcttttggatgggttcataaaggcagcaggctgcgccgattcagagaggtctatacagaaatccccaggaaaaacgggaagtcagcgataagcgccggtgtggcgcttttttgtttcacctgtgatggtgaatttggtgcggaggtgtattccggtgcaaccactgaaaagcaggcatgggaagtatttcgacctgcgcggctgatgtgcaaacgcacgccactactcgttgaagcctttggaatagaggttaacgccaagaaccttagccgtcctgaagatggcgccagatttgaaccgctgatcggtaatcctggtgacgggcagtcaccgcattgcgctattgttgatgaatatcacgagcacgaaagcgatgcgctgtataccacaatgatcaccggcatgggggcccgcagacagccgattatgtgggctataaccactgctggttataacattgaggggccttgctacgataagcgtcgtgaagttatcgaaatgctgaacggaaccgtgccgaatgatgagctttttggcgtcatttacaccgttgatgagggtgatgactggaccgatcccgctgttcttcacaaagccaatcccaatatgggggtgtcggtttactcggatttcctcttaagccagcaaagcagggccaaaaataatccccgcatggccgggatattcaaaacgaaacacctgaatatctgggtcgccgcacgtgctgcttatttcaacctgttaagctggcgaaaatgtgaggatgagacgctcaccattgagcagtttgaaggacagccctgcattctgtcttttgaccttgcgcgcaagctggatatgaactctatggttcggctatttacccgtgaaatagatgggaaacggcattattactgtatatctccgcgcttctatgttccgtatgacaccgtatacagcaacgatgttgacgatcaccgcaccgctgagcgttaccgtaaatgggttgaagcaggatatatcaccgtgactgatggtgcggaaattgattaccgagtaatacttgaagatgccaagcgtgataatcagcaaactccggttgaacaaagcccaattgacccgcacggtgcaacaaacctttctcatcagcttgctgatgaacagctcaaccctataaccattatccagaactacaccaacatgtctgacccgatgaaagagcttgaggccgctgtagagtccggtcgatttcatcatgacggtaatccgataatgacctggtgtatttcaaacgtggtgggtaagcacctgcctggaaatgatgatgttgttcggccaattaaagagcaaaacgaaaataaaatagatggggctgttgctctgattatggcgattggacgggcaatgttatttgaaaaggaagaaaccctttcaaatcatctcgaaagctatggcgtgcgctcactttaa

SEQ ID NO: 221784 - DNA, 495 bp, Klebsiella pneumoniae
atggctggaacggcggggcgttccgggcgtagaccaaagccaacggcgcgcaaggagctggccggaaaccccggcaagcgagccctgaataaagaagaaccagtattcacccccatcaatggcgtagcacctccggactggtttgcagaagaggaactcccgttagcatccatcatgtgggagctgacgaccaaagaattatgcggacagggcttgctctgcgtgaccgatcttgcagtactggagcgctggtgcgttgcctatgagttctggcgcagggcggtaaaaaatatagctgttgatggtttatccatcactggcgcaatgggcgggaaaattaaaaaccctgaacttacggctaaaaaagaacaggaatcggaaatgagttctaccggttcaatgttggggctggaccccagcagccgacagcgcctggtcggtctggccggaaagaaaaagaacgaaaacccattcctgaagatgatcacgccatga

SEQ ID NO: 221785 - DNA, 243 bp, Klebsiella pneumoniae
atgaacatacataatgttaacgccgcttcaatcttatgcgaaaagcttaaggaacttgaagggcaatactcactcgtcgcacgcggggaagggttaggcatcgcgattcagagtcgttatcaggatgatgattttgttaatgcggtacgcaggagtgttaccggagaacttagccgacgcattggagcggtaaagcatcagcttactgaattaggcataacgtcatttaccaaagagcagtag

SEQ ID NO: 221786 - DNA, 276 bp, Klebsiella pneumoniae
atgagcttcgaaattatcgcggggctggtggtcgtcatcctgggtgctatcgctggcgcgtttggcattggtcatgctcgcgggaccagtaaggcagaagccaaagccgataagcagcgtaccgaagagaacgccgccgccaccgtcgccgcggcagaacgtaaggcggaagtcatgaaaggggccagtgatgtacagcagactgttagccgtatgcctgatgactatgttgatcgggagctgcgcgaaaagtttacccgccccggtagtcgttga

SEQ ID NO: 221787 - DNA, 348 bp, Klebsiella pneumoniae
gtgaagatgatcattttcgctttgctcgtgctggtggctgtgctcgttctgttacttctgcgcaaatatacccggctggagttcgtaggccatgccagcctgctgctgaaaacttggtctgtaaagcttggagctatcggcgcgctggttggtgtatgggcgcagtcgttcccggatgctgcgctgcacgcctgggcgatgctgccgccggatatcaaaaatatcctgccgccaaacatcgttgcgttgattagccctgcgctggtggtgctggccgtgctatcgcaatacgtacgtcagccagcattgaaagaaaaggccgacgaactgaaggagccgcagaaatga

SEQ ID NO: 221788 - DNA, 540 bp, Klebsiella pneumoniae
atgacagcagaccagattattgagggcattctcggaaaagaaggtggttatgtcgatcacccctctgataaaggtgggccgacccgctggggcatcacgcaaaccaccgcccgtgcacatggctacaccggtgatatgcgagacctgcccagggaaacagcaaagcaaattctgctcagcgattactggaccggcccccggttcgaccaggtggcgagtttgtctacgttacttgcagatgagctttgcgacactggcgtgaacatggggcccagcgtcgccagtaagttctttcagcgctggctgacggcaatgaatatgcgcggaaagctgtatcccgatctgatcccggatggtgccattggcccccgaaccatcaccgcgcttaagggatatctttcagcccgcgggaaagagggtgaacaagttctgttgcgcgcgctgaactgcagccagggtgccagatacctcgaactggcggagggccgcgaagccaacgaggattttctctacggctgggttaaggagcgcgtcctgtga

SEQ ID NO: 221789 - DNA, 312 bp, Klebsiella pneumoniae
atggcaaagcatatgcaagacaaagagagcatggccggaatcacctggctggctctgctgatcattgctggttggggcggccttgtccgattcctgatggatgtgaagcagggtaaagcaaaatggagctggataaatgcctttgcgcagattgtggtctctgctttcactggcgtcattggtgggctaatcagcattgagagtgggctgagtatttacatgatactggccacagccggtatcagtggtgctatgggttccgtagcactcacgtatttctgggaacgaatcaccggagtgaaagcacaatga

SEQ ID NO: 221790 - DNA, 378 bp, Klebsiella pneumoniae
atgaaactgactttaccatttccaccgagcgtaaatagttactggcgcgccccgagcaagggaccgctgaaaggcaggcatctggtaagcgagacagggcgcaagttccagcaggcagcgagagcggcgattattgagcaactgcgggccgttccccggccatcctctgatctggccgaggttcacatagtgttgtatccgccggatcagtgccgtcgggatatcgataactacaacaaagcgctgttcgatgccctgactctaacaggcgtctgggaagacgacagtcaggttaagcgcatgctggtggagtgggggaacatcgtgaagaaagggaaagtagaaatcaccatacgacgttttcgtgcagttgcctga

SEQ ID NO: 221791 - DNA, 825 bp, Klebsiella pneumoniae
atgacctcgaaaacatggcaacgtccattccttaagtgggctggtggaaagtatacccagctggctgacctgttcgtgcatatcccggcagggaaacgcctgatagagccattcgttggtggtgggtcggtattcctgaacagcgataagcacgcagattacctgctggcggacgttaacccggacctgattaatctgtatcagatgttagcggtggtgccggatgaagtggaattaaaggcccgctggatgttcgagcacatgcggtcaccagatggctatgaactgatccgttccgagttcaacgctcagacgctggatgctactgaacgcgcagctgcattcctgtatctcaaccggcattgtttcaatggcctgatgcgctacaaccaggcgaataagttcaatgtgggctggggaggctacaaggccccgtattacccgatggatgagatgaaagccttcgcggctatggcgcataactgcgtcttcatgactgctgactatcgccgaactatcagcctggccgggaaaggggatgtggtttactgcgatccgccttacgaaccgatgccgggaacaaccggattcaccgcctacgccgctggtggttttagctgggagaaccaggtagacctggcgaagcaatgcgtatcagcctttcaccgtggggctcgggtagtaatttcaaactcatctgcaccgaaggttctcgacctgtaccgggagcatggttttaacctgcaattcatcaacgcgcgccgttcgatctcctgcaaaagcagtacgcgggaagttgcaaaagacgttgtagcgatcctttaa

SEQ ID NO: 221792 - DNA, 969 bp, Klebsiella pneumoniae
atgagcactaaattaacaggatacgtctgggatgcttgtgcatcttcggggatgaagctatccagcgtggcaatcatggcgcgcctggctgacttcagcaacgatgagggtgtttgctggccttctattgcgaccatatcccgtcagattggcgctggtgaaagtactgtcagaacggcgatagctgcacttgagaaagaggggtggctcactcgcacacagcgccgcaacggcaaccgtaatgcatcgaacgtctaccagctcaacgtttccaaactacagaaagcggcattttctcacctgtcagtttctgacacatcaaaatctgacacgtcaaaatctgatgcgtcaaaatctgatgcgtcaaaaattgacccctcaaaatttgaggcgtcggaatccaccaaaaaaaccagttttgacccgtcagaatctgggggggatccgtcagtaaaatcaactactgatccatcagatataaatccttcttgtccggacgcttcgcaaccggacgaacagggctctgctgatgaatttctgtcacgacatcctgacgcggtggtgtacagcgctgcaaagcggcagtggggaagccaggacgatttaacctgcgccgagttcatttgggggaaaattatcagcatgtacgaactggccgctgaaagtgatggtgaggtagttcggcctaaagaaccaaactggaccgcatgggcgaatgaggtgcgcctgatggtgatgcaggacgggcgaacccataaacaaatttgctcacttttcaaacgcgccaacaaagattcgttctggtgcaaaaacgtgcttagcccgtcgaaacttcgggaaaaatgggatgagctgtcgttaaaactttctgttccactcaatagctcccgccaggaggcgtcgatttcgcgagccagcttcgaaggggttgattactcattgccagaaaactcggggttccggtcatga

SEQ ID NO: 221793 - DNA, 660 bp, Klebsiella pneumoniae
atgaaaacagagatgaaagaccgaataagatcccgtcgagtccagctcgacataacacagcagaccctagctaaacgcttgggggtaagccgtgtttccgtaacaaaatgggagagcggcactactaaacctgatggtgagaatctccatcagctggcggtggcgctgcagacaactccagaatggattctttacggtcgaggtgaggaaacgccggatgatacaaaagttattccgttccttaagccacccacggcagttcctattatctccgctgttcaagctgggatgtggactgatacttatgcatgctcaaggctttctgatgtgatttcatggacgcaaaccactgcaaacgtttctaatgaagcattcggactggtagttcgcggggagtctatgactaaccctcatggtctgccatccatcccagaaggatcgatcgttattgttgaaccgcactatggtcaattggatgacctttacggaaaaattgtagtggcaatactcgacggctctgctgaagctaccgttaaaaagctggtatgggatagccctttcgcatacttgatgccacttaaccctgcctttaaacccatcccgatagatggtaattgccggattgttggtaaagtggttcagattacccaaaacatttaa

SEQ ID NO: 221794 - DNA, 918 bp, Klebsiella pneumoniae
atgaaattatcaaagttacgtaacgccattgtctatcgggctactttgcccagtattgaagcggttgaagggcacctgcaggaattgccctactctgaacttacagaaacggagttcgcgcaggcttccttcgtccctaacccgattaccggtgagctggttacgccaattactggcggttatgcaatcgtggttcgccgcgatgagaaaataataccccagcacgtcgtaatgaaagaagccaatgagcgtatccagcgcatcgaaaatgcgtgtggtcaaaaattgaagcgcgctgaccgtaacaacattatccaggatgctaaggttcagctctgcaaacaggcattcatcaagtcgtctctgatcctggccctgtataacactgaagaaaatctgctgatcattaattccgccaataaaaatattgccaatttagtcggggcgatgctggttaaagtgattggctcagtaaaaacagtcacgatcaacatcagtgatatcaaaaacggcctgacaacgcgccttaaaaaccatctggacggcgaagaatcagcctttgccgggtttgaggtcggtgattatgtccagctatcccgcctggcagaacagaaagaagttattcgctactctgcggaacacacttccgttaccagtgaaattctggagagcctgaacacaggttttatcgtcgataacatggaattaagaggctgcggcgtctcttttctgcttacagataagttccatttccggcggatcgataccaaggataatgattattctgatgatgacgacaaagcctaccgctggcgtcaccaggcaggtacggacatgttccagttctgtaaagtaattaaccagctttgtgatctgctcgcctacaaagagcccgaagaacaaaaaccagcagcctga

SEQ ID NO: 221795 - DNA, 300 bp, Klebsiella pneumoniae
atgggaaaaacagtacagcagttaattaaagatgcctttgaggcagctaaaacaatgcctcctgcaaattcagaacttattaaagagctggcaacaatgctcgatgtttcgaatattacccttcggcaggcatgtaaagaacgtgacgctatgaaggaagaagttatttcctgggcgaaagaatgcgatcgaattgttgagcgtcacacaaaaaaccgcagcaatatgcacgtactggaagcaatgcgcgatctgaagagtatctcaacgacatccaccagcaatccggaggctgtctaa

SEQ ID NO: 221796 - DNA, 135 bp, Klebsiella pneumoniae
atgaatattgatcatgagaattatagcaaatacaccctacgtcggttcgccgccttgttcgatgtgatctgctgggtgcttattgccgtagtaaccgttggtatctgcatgtttattgagtggtgggtagcatga

SEQ ID NO: 221797 - DNA, 1077 bp, Klebsiella pneumoniae
atgagcatagttggagattatttctttgagttccctgcgtctcgcggcgttcagggcggagcgattgtccttatgatgacagtgccagcacgaaccttggcacgcgtcctcgccagtgataattacggagatactttagaacgttctcagcgtgaaattaacccagcgcgtgctaagaaattctatgaatatctggttaatgctcacgaaaataaagagcccttcattatcccaccgctggtcggtaactgtaactctgagattgagtttcaggaattcggcaataccaacgttggtgttgtgcgcttccctatggatgcagaaattaagcttttcgacggccagcaccgtgcagcggggatcgccgaattttgccgcacagttggcgaaccaatccacgtaccactaatgctcacacataagctctcgttgaaaacacggcagcagttcttttccgacattaacaacaatgtttcgaagccatctgcggctatcaacatggcctataacgggcgcgataagaacgcgcaggagatggtcagttttatcagttcacacgacgtcttttctgaagtcaccgattttgagcataacgtcgttcctgcgaaaagtgataagtgggtcagcttcaaagcccttagtgatgccacggcaaaattttcagattcctgctcacaggatgatcttgaggggttgtggaatgcttggctgatgctgactggtttagatgatattcgccgcggtacgaatcaggccgaatacaaacgcgagtatatccagttccatgccgtgatgattaatgccttcggttacgccgtccagcggctaagcgaaggccggggagttcgcggggtcaccctgatgattgaggacctggtaatgaatactggcattgcagaacgtgaagatttcttcctcatttcatcatgggatggtatttgcgccagctgtgagaaaaccaggccaacggtcattgcgaatgtctcgtctcagaaagctgcagcatcacgcctgatggatgccatcgtgaataaaaacttgtctgtcagtagaggtaaggaatcagcccatgactaa

SEQ ID NO: 221798 - DNA, 909 bp, Klebsiella pneumoniae
atgactaataacctgttaaccagagaacgtctggaaaaaattaaatcatggcgtgacgcctacggtgccggaagcaacgtaatgctgccagctgaagaggctgaggagctggctcgcatggcgctggccgcaatggacaacgagccggtggcgcttcaacctgagctggcaaaagttatctatcacttccgtgactggaatgaaggatttccggttgagcggttcaaggccgactacgtcattagttggatgctggcaaattatccgccagcgcaaccagcaaaggaccgagagcaggtacgccgcgagcacgcagagtggtcacaggcaacattcggtaatgtcggcccggttggcccgctgaagcacctcagcaaagaagcactggaagccgctgccgagcctggcgacctgtcggagtgggctgatatgcagttcctgctgtgggacgcccagcgccgtgcaggtattacagatgagcagattacccaagcgatgatcgaaaaactggcggtgaacaaacagcgctcatggccggagccgaaagacggtgaaccgcggttgcacatcaacgagcagccagcgcttactggcaactttcccataatcggcattgacctggcatccggtccggatcgcactgtcgaggttagttacgttgcacctcccggttacgttatggtgccaatgaggttaacggctgagaacggcgcaaagggggcgctatcaggtgagttttcagaaaccaagttcgtaaactgctcggaatgctttggtgatgatgagtgcgaaacctgcgacggcagcgggagaattgaaatcacggtacctgtctcctggacaaccatcaaagaaatctgggctaaaggtgttgagcatttcgcagccgccctgcaggaggtgaagtga

SEQ ID NO: 221799 - DNA, 228 bp, Klebsiella pneumoniae
atgagcgatcgcttcctgactgatgaagaactgacagaggccacgggttcgccccaaaagtcactgcagaaagaggtattaacccagaacgggatcttttttattgaacgccgggacggagcaatcaaaacgacctggtttcatattaaccatcccgtacagcgcatacttccaccagcaggccatatgcctattccaggcatgaactttgacgctgtagagagataa

SEQ ID NO: 221800 - DNA, 993 bp, Klebsiella pneumoniae
atgggccgcaaaagagcgcctggtaatgagtggatgccgaagggtgtgtttttccgcccttccggttactactggaagccaggaggtactaccgagaatctagccccagcaaacgcttctaaagcggaggtttggttagcttacgagaaagtcgttgaaggtcgaaaaaaactactcacctttcaacaattgtggaaaaaatttttgaatagtgctgactatgcagaccttgcccccaggacacaaaaagattacctggcacatgaaaaatacttgttagcggttttcggcgatgcagaagcaaaggccattaaacctgaacacgtccggcgctacatggatgcacgtggtaaaaaaagccgtgttcaggctaatcacgagcatagttcaatgtctcgtgtataccgctgggggtatcagcgtggttatgtaccaggtaatccgtgtgttggtgtcgataagtttcctaaaccccagcgcgaccgctacataactgatgaagagtacatcgctatcttcactcatgcgacgcctgcagttaaagccgcgatggaaattgcgtatctttgcgctgcaagggtatctgatgttcttaaaatgaactggaatcagattcttgataaaggaattttcatacagcaaggtaaaactggtattaaacagatcaaagcctggactgagcgtctcagtgcggctgttgatatttgcagggaatggggacaggatggtcctgttatcaggacaatgtatggtgagcgttattcatacaagggatttaatgaagcatggagaaaagcgagaaacgcggcttctgaagaacttggtaggccacttgattgcaccttccatgatctaaaggctaaaggtatttcagactatgaaggatctggcagagataagcaaaaattcagtggtcataagacagaatcacaggtacttgtttacgacaggaaagttaaaatcagcccgactttgaacaagaaaatgagatga

SEQ ID NO: 221801 - DNA, 942 bp, Klebsiella pneumoniae
atgacgatgcggcgtgtgaaattactttgttctgcgctgatgctgctcgccagccacggcgcgctggccgtcagctatccgctgccgccggagggaagtcgtctggtgggcagcgcatttaccatcgccgtgccggagaacaacacccaaccgctggaaagttttgccgcccagtacggccaggggttaagcaatatgctggaagccaaccccgaggtcgatgtctatttgccacgctccggttcgacgctgaccattccgcaacagctgatcctgcctgacaccgtgcgggaggggatcgtcatcaacgtcgcggagatgcgtctctattattacccgccgctgggcaacagcgtggaagtcctgccaatcggcattggccaggccggacgcgaaaccccgcgtaactgggtgacggcagtagagcgtaagcaggaaggccccacctgggtgccaaccgccaatacccgccgcgagtatgcgaaagagggcaaaaccctgccggcgatggtgccccccgggcccgataacccgatggggctgtatgcgatctacatcggcaggctctacgccatccacggcaccaatgccaactttggtatcgggctgcgcgtcagccagggatgcattcgcctgcgcaatgacgatattaaattcctgtttgataacgtgccggttgggacgcgggttcagctgatcgatcagccggtgaagtacagcgtggagccggacggcagtcactggctggaggtgcacgagccgctgtcgcgcaaccgcgcggagtttgaatccgacagaaaagtccccttgccgatgacctcggcgctgcgcgagtttactcaggggccgggagtgagtccttcgcaggccgagcaaaccctgcagcgccgctccggcatgccggtgaatatcagcgccacagcggcgcagggaagtttgtag

SEQ ID NO: 221802 - DNA, 3549 bp, Klebsiella pneumoniae
atgggcggcgccaccgaggcgtctatctggtctaacgcctgcgaaattcacgacgtccccgcccactggcgctccatcccttacggttttccgctaaccaaccaacgctaccgggtggtggatgaacagggccgggactgccctgactgggtgccgggtgaattatggattggcggcattggggtcgcggaaggctatttcaacgatcccctgcgtagcgagcagcaatttttgacgctcccggacgagcgctggtatcgcaccggcgatctcggctgctactggccagatggcacaatcgagttcctcggtcgtcgcgacaagcaggtcaaagtcggaggatatcgcatcgagctgggcgaaatcgaaagcgcgctcagccagctggcgggggtgaaacaagcaaccgttctggcgatcggcgaaaaagaaaaaacgctggcggcatacgttgttcctcagggcgaggctttttgcgttaccgatcatcggaacccggcactgccgcaggcgtggcacacgcttgcgggaacgttgccctgttgcgccatctcgccagagatctccgcagaacaggtagccgatttccttcagcatcgcctgctaaaactgaagccgggtcacaccgctggcgccgatcctctccccctgatgaactcactcgctatccagccgcgctggcaggccgtggtggaactctggttagcatttctggtgacacaacggcgactgaagcccgctgctgaaggttatcaggtctgcgctggtgaagaacacgaggatgagcacccgcacttcagcggacatgatttaacgttatcacaaattcttcgcggtgcccgtaacgaactgtcgttactgaacgacgcgcagtggtcgccggaaagcctggcctttaaccatccggccagcgccccgtatattcaggaactggcgacaatttgccaacagcttgcacagcgcttacagcgcccggtacgcctgcttgatgtgggaacccgcactggccgcgccgcagaatcgctgttagcacagctcaacgccggacagattgagtatgtcgggcttgagcagagccaggagatgctgctgagcgcccggcagaggctcgccccctggcctggcgcccgtctgtccctctggaatgcagacacgctggcggcgcacgctcactcggcggacattatctggcttaataacgccctgcatcgtctgctgccggaagatcccgggctccttgcgacattacaacagcttgccgttcccggcgcgctgctctacgtgatggagtttcgccagttaacgccgtccgccctgctcagcacgctcctgttaaccaatgggcagccggaggccttgctgcataacagcgccgactgggcggcattatttagcgcggccgccttcaactgtcagcatggcgatgaggtcgcggggttacaacgcttcctcgtacaatgtcctgacaggcaggtgcgccgcgatccccgtcaacttcaggccgccctcgccggacgtctgccggggtggatggtgccgcaacggatcgtcttcctcgacgccttaccgctgacggctaacgggaaaattgactaccaggcgctgaagcgtcgtcatacccctgaagcggaaaacccggccgaagcggatttaccccagggcgacattgaaaaacaggttgccgccctctggcagcaactcttatcaactggcaatgtcaccagagaaaccgacttcttccagcaaggcggcgatagcctgctggcgacccgtctgaccgggcaacttcatcaggcaggttatgaagcgcaattaagcgacctgtttaatcatccccggctggcggattttgccgccacgctgcggaaaaccgacgtcccggtcgaacaaccattcgtccactcccctgaagaacgctaccagccctttgcgcttaccgacgtgcagcaggcttacctggtggggcgtcagccgggctttgccctgggcggcgtcggctcacatttctttgttgaatttgaaattgccgatctggacctcacccggctggagacggtctggaaccgattaatcgcccgccacgatatgctgcgcgccatcgtgcgtgatggacagcaacaggtgctcgaacagacgcccccctgggtgatacccacacacaccctccatacgcctgaagaggcgttgcgggtgcgcgaaaaactggcgcatcaggtactcaaccccgaagtgtggccggtattcgatctccaggtcggatacgtggacgggatgcctgcccgcctgtggctgtgtctggataacctgttgcttgacggtctgagcatgcagatcctgctggcggagctggagcacggctaccgctacccgcaacagctgcttccgccgctgcccgtcaccttcagggattatctgcaacaaccctcgctacagtcgcccaatccagattctctggcatggtggcaggcgcagcttgatgatattcctccggcgcctgcgttgccgctgcgctgcttgcctcaggaggttgaaacaccgcgcttcgcccgcctgaacggcgcgctggacagcacgcgctggcatcggctgaaaaaacgggcggctgacgcccatctcaccccgtcggccgtactgttgtcggtgtggtcaacggttctctctgcatggagtgcacagcctgagttcacgcttaaccttacgcttttcgacaggcgaccgctgcacccgcaaatcaaccagattctgggcgatttcacctcgctgatgctgctgagctggcatcccggcgaaagctggctgcacagcgcgcagtcactacagcagcggctgagccagaacctcaaccaccgcgatgtgtcagccatccgcgtgatgcgtcaactggcgcaacggcaaaacgtgcctgccgttccgatgcccgtcgtctttaccagcgcgctgggctttgagcaggataacttcctcgcccggcgtaatctgctcaaaccggtctggggcatctcccagacgccgcaggtctggctcgatcaccagatttatgaatccgaaggcgaactgcgctttaactgggattttgtcgccgcgctgtttcctgccgggcaggtggagcgccagtttgaacagcattgcgcattgctaaaccgaatggccgaggatgaaagcggctggcaactgccgctcgccgcgctggtgcctcccgttaaacacgcagggcaatgcgcagagcgctcaccgcgcgtatgccctgagcactctcagccacacattgcggcggacgagagcaccgtcagcctgatttgcgacgccttccgcgaggtggttggcgagtctgtcacgcccgcagaaaacttctttgaggcgggcgcaacgtcgctgaatctggtgcaactgcacgttttgttacaacgtcacgaattttccaccctgacgttgcttgacctcttcacccacccttctcctgctgccctggccgattatctggccggcgtcgccacggtggagaaaacaaaacgacctcgccctgttcgccgtcgtcagcggcggatatag

SEQ ID NO: 221803 - DNA, 366 bp, Klebsiella pneumoniae
atgtcaaaaaaatatcagccattgcttataactcattatatgtcaacatgggtcactataacggaagcagttgagatcactaccaaaaccataaaacaaaaaattactcctagcgatatttatcgtcatgccttgagtggcaacatcctactatcggtctatttccagtctcctgtgatacttaagaagatacaaacttttaatggaaaaataaaattcaggcagtttgagggagacctacttgataaactatgcatgcttgacagggacggttttatttatggtcaaaatttaagactctgtacagaagccagatatgtttgtcctgtgcaacaaattatagataccccccctgataggctatga

SEQ ID NO: 221804 - DNA, 480 bp, Klebsiella pneumoniae
atgagaaaagtacaattagacaatagcgatttgttggcatattttaatacaatcgaagaactcaaaaatcatccatcaatggatgaatatagaacaggataccgtaagctacgtgatgacaatgcatttgcatatgaaataaaaaaatataggtctgcacatgccacactgcgcagactggataagaaaagacaatctcttttggatagctttattggtgagcttaatcctataagttactcagcagctaacaccgctgctaaatcatcaggaaattttgatttaattaatgaacgaatactttatagaaaagccattgaagaaaaaagtgatgccgaaatcattgctctggtgataaaacaacgcacagaggccgcacttgcgttccagcgctctgttgagatgagtcttgaacaactttcttctatcgcatcagattttgagtcctcaaataaaagtagaagaaaaatgtctttttaa

SEQ ID NO: 221805 - DNA, 264 bp, Klebsiella pneumoniae
atgaagaagcgtttttccgacgaacagatcatcagtatcctccgtgaggctgaagccggggtttctgcccgtgagctctgccgcaagcacgccatttccgacgccaccttttacacgtggcgcaagaagtatggcggtatggaagtgcccgaggttaagcgcctgaagttgcttgaagaagagaatgccagactcaagaaactgcttgccgaagccatgcttgataaggaggcacttcaggtggctctggggcgaaagtactga

SEQ ID NO: 221806 - DNA, 1110 bp, Klebsiella pneumoniae
atgaataaacatataaatcattttatcacctctttaattgactggtttttcagagtcaaaactgttcctgctatccttcttaaggctggattactttgcctttctttttctctgattggtgggtgggctttaaaagttaaagttccattagaagatggagattttatctttgattatgattcatcaggatttactcccgccttgattacctatattacattcgtagtcgcgattggcttgattttaacaagcgctttgatatatattaatgtttattttcgtgaaaatagacttgctgataagaaaaaactcattagtatagaatcaagagggttgcgagatggtgctggtgagccattatcaaaatatattccccaaaaaaacaaggttcgtccgatagaaatcattttagatttaaggcaaaaggttgaagacggatttattgtaaaacctgatgtggctatacgtaagatattgactcttcaagaacaactggaaagccacacgtcacagtattcaagggaatatattgaggtttattttggaggtttaacccctgtaccattgaatgtattaaatggtatcatcttagatgatgagtgcaaaattactattatggactgggataggcattctagtgagtggaaaactcttgataaagaagatgatgaagaaagatataccattcaaggtgtcaaagatgtgcaggcaaccgataatgaagtgcttttggttatttctagttcatatttaattaattcttcactaatacaaaaacaattcccatctatgaagttagtaactatgtttttacctgcaataaatactgataatttatggtcggagattaagcaggtcgagttaggtaagcaattcttgcatgccgttgctgacctgtcggggttgggtgttaaaagaattcacctttttttggctgcacctaatagtctatgctttagattcggacggctttatgataagagaaatctcccggaattggttgtctatcaatatgaaagaaatagtgatgtaacctatccatggggaattttaatgcctgtggcaggaatccaagttcctgaggtgattcattgtaaaagagacatttag

SEQ ID NO: 221807 - DNA, 504 bp, Klebsiella pneumoniae
atgttgcggataattgaaagtggacagctaatttggaatattgaaggtattgccacaggatgtttatcaaaaaaggttatcacgcatttgttgaattttgtccaaaaaggtagatacgcacatgaatccggcggagttttgttaggatatattgattcagatacaaatggattacttgttgaaaatgcaacatttccgggttcaggagattgttcttcgcggactagcttttatagaagttctcgacatcaagaagatgctgaaagctggataagtttaactaatggaaaagggacacatttgggattatggcatactcatcctgaacttacgccaactccgtcagacattgatatggctgattataataatgtaattaaaaatgcaactttaaattctggtttgatttatataattatcggcactcaagaattaaaaatatggtatgggattaaaccctgtcaattaatccctgtagggacaatttcattggataaactataa

SEQ ID NO: 221808 - DNA, 1635 bp, Klebsiella pneumoniae
atggtatgtaaatgttcttttgaagaggctgtatcattcagcctcgaatcctatggttgtaaacatattaaggttgcaaaacaaagtggctttgtaacatcatggtttttttctttagattttaaaaactatttatgggattttgagcttatttcaactacgaatgatctttctacacttccatctttgagatggatcaggcctcataaggtatggggatggcctcatattaattctgctggaatcatatgttttgaggatggacaaggtattgaattcgagccaaaagatatagctggagttataacatgggtcttagacgaggggacaaatctacttaaaaaatattggaatatgggtaaagcaaaaaggaagagagagttctttgatgaattagatggttatttaaaaagcatgggggttccagaggtattacagattgatagctatggaaataaggatgtagatatagcgtatgctgaagttgaatatcctaaaataggaaaggaaagaggggtcgtaagaagagtttttaggtcgtcgctgagttacgttccttctcggaattcctgtgagaaattggtggttatgacaataagttataagaaaataccaccaattactggtcaggttaatgaatcgtggtggaagaaaatttatgaccaattatcacaagaacaactctttttacttgaggggaaacgttgcagaggtataatttttcgggttaaaaatagttacgggtattgcgaatttttaattcattgggggcagggtaaatataataataaacggtggttgggtagattgtatcgaattcaatttgcaagttgggaatatgtaacccaaaggacaggaatacccgctagtcgacagcgtattgcggttgtcggtgttggagctgttggttcaagaattgcagaaatggcattgctttctggtgctagtgatatatatcttgttgatgatgacaagttttctgcggataatatggggcgacatttacttggattgaattccgttggtaaatataaagttgacgaactaagtatccatttcaagagtcgaattccgggtgtaaacatacatcctttcagagttcgtgctcagaagtatttttctcaagacaataatgactatgacattatttttttagcgactggaaattcaagtttagagaaggggattatacttcgtgctttcaaagaaaaatggaattcagtattagtttcagttagtgttgaagcatatggagttggtgggcaaattataataatgcacactaatataaaagggtgcttatattgtctttacatcgataatgaaactaatactcttatgcctaacctacagggaggattcattgagccgggacaaaaaataagcaagcaacttactggttgtggagcatttacgcctttttctgcgctcaatgcaagtaaaactgcaatgctagcatatgagtatgctgtttccaaaaaatatggttatttacgttgggcgggcaataatgatattgctatgagtgaaggaataattcttacccctgcatattttaatatctttaatgaaaacactccctcttttctccattctgaacaaatagctaagaaagggtgcccatgttgcggataa

SEQ ID NO: 221809 - DNA, 1002 bp, Klebsiella pneumoniae
atggctacggcacaaacacaatttgaaaattttcattcaaaaatactcatgggatacgatgataatgagccactacgtgaccgtcgggatactttaattcaggaattaaaagataaattatcttcagatgtccctaatatgaagttctttcatcaaggcagttatgcgctacatacagggattaaccctctaaatggtaatccagatattgatattggtattatttttgaatgcgatcctaatgatgaagattatcaagatccattaaaattaaaaaaaattgtgcgagatgccctgaataccaaaaatagaacggtgaaaatcaaaagaccctgtgtaaccgttgaatatcttcgagatggtgagccgatttatcatattgatttagcattatatagttgcgagtatggggatagtgatgggcaaaccttccttgcaagaggaaaagaaacatcatctgcagaagaaattgaatggcaaatatcttctgctcgtgagttgacggatgttattttaaataaatatacagattcctcccataaaaaacagttcaggaggatagtacgttatttaaagcgttggaaagatgaaaagttaggacacaagaatacaccaagtataggattgaccgtagcagcttatgagtttttttctgcaaattttgactttgtgagtggcaaagctcaagatttactggctcttctatcattagttaattctatgctaaataattggggaggagatgatcgtctacatatatatttaccagtagaaccttctacagacctttttgaacgtatgtccgataatcaaatgaaggatctcaagacaaaacttgagaaattgtctgctgtattgattgaagctcgagatcaacctgatactcatgaagcatgtaaattgctaaaagcacaatttggtgacgattttcctgtgccggataaaagtgaaactacgaagtcatcttcatccagtgttgttccagcagggcgttcagcttaa

SEQ ID NO: 221810 - DNA, 261 bp, Klebsiella pneumoniae
atgattgatgaattccatattatgtatatgtataaaaaaatccaagctgaagcggctactaccgacattaaaacactggaacaacttttgaagaagttccgtaaggttgttgctgagcgccgggaagaatactatcgggagatgggtgagaagaaggcgcataaactcaagatgaaaagattgcaaatgttgcttgaaaaaatggagaataatcatatttacccagaagacctcagtttaaaaaaaagtgaaccatattag

SEQ ID NO: 221811 - DNA, 366 bp, Klebsiella pneumoniae
atgaaagagattattttaaatgaaagtaataaaatgaaaataaatattatcacaaatgtattacagggatattgcgaaacgatctatagtatctctgaaaaacagcctgaaacagccatgaatattttaacaggggaaatgttatcagagatactttatgatgttttgattgcctgtgaagttgaagactatgttaaaagtggaagaggtaaagatgtatctgatatcaatatggatgagttaaaggaaacgattttatactggcataaagagcatatcattgagcttgtactgaaaaacatcaaaccggatgatgtggatgaacgtattttctggaagttaaaaatgactgtgaatcagtattga

SEQ ID NO: 221812 - DNA, 237 bp, Klebsiella pneumoniae
atgaagaatgatatgtcagtaatcgtaagtatgttatgtgaaaaaacacctaaagtgatgaaccttatccaagagagcttggatatatttatcgcattaagaggtagttcagtcgaagaaataatgaatgataagaccttgttagatgatttaaatcgttatgtaaatgagacactgtatgatgagatggatctggaatatggttcggtaatcatcaagatagtatctaataaatag

SEQ ID NO: 221813 - DNA, 297 bp, Klebsiella pneumoniae
atgactaaagaaaatactattgaaaatagatcaaccgaacttttttatgatcttgcttgtagatcgttttccgcaagctggaatatgtttatggaagtcaatggcgatggagatgccaatgactatctggatgatccggattttatgagtccatttattatttatgtgattgaccatattcagaataactttgagagatttaccacgcaagaaggaaacagcggtgatattaatcaggtcaactttgaacaagtaacagcgctgctggtagggtattcagaaaactttagaaagtaa

SEQ ID NO: 221814 - DNA, 318 bp, Klebsiella pneumoniae
atgaaagtgaaaagaatagaaataaatgttagtaatgatgatacaaaatactttgttctgaaaagtggcgaagactatgactactatttgcgatgtatgtatgagtatatgggggaaaggttctatcataaccttgaagacgatagttatatggaaggtgttttaaaatcaataatagagaatggtaagaaagattttaatgagttcttgaaaaaacataaatataaagcatcgcttaaaaacgtatattttgatgaagtgcttgtcaacctgaggcagatacatcatatgatgagtcactatattttacatacataa

SEQ ID NO: 221815 - DNA, 213 bp, Klebsiella pneumoniae
atgagaaatgaaatcgcaggtaaaagattaatccgtgttccagaagttctgagaagagtcggatttagtcgaaccacaatgtatgagcttatcaaggaaggacgattcccggataaggtaatcataggggcaagatctgtagcctttgtggaaagtgagattgatgcatggattgaaaataccatttccgattcacgcagaaataataaataa

SEQ ID NO: 221816 - DNA, 846 bp, Klebsiella pneumoniae
atgaaacgaagcgaactcaggaaagtactggaagaatggtttgatgttgaacggtatgaagcgataaaggaactcaccctacagcaattctatgttgaggttgagcggcgtatattggcctacaagatgttgctgaaacgggatacgttaccgcctctgagcagagccttattggatgattaccgctataagatcctccgaggcgaaattttgtttagcggcgacacatccacgcagggagatgggcttgccagaacctatgcagtggtccccgtaacccggagcaacgcacaattatatgcgaaaagtttgacactgattggaacccatcctgagacatcccagataagtcagtctgaatacgtgtcggagtatctgaaggaatccggtatcaaaagtctgtcctcaattaccgtcgatatcttcctgcaagaagcttcaaccgaagacatcatcgaacacctgaaggtgctcattccccaatggaagaaacagctaaaaatgaacgatccggctgttcgcgagtatcgttttggcaaaagcacgctgagaaaaatcattgattatcgactcatcccgatgatggatctcattttttggggagcagataataatgataccaaaatctcactttcactgatgtcatcgctgctgcatgagaacagcgagaaggatagggatgagggaatgcttaaggtgactgactatccgctggctatggcgttgctgacagacgagaactatctgaaatcgtttgaagattacatgatggaaaacaatgtcttaaaggacacaaagattgtagatcacgtcaaagacgagaagaagacgaaagaagacaagtaa

SEQ ID NO: 221817 - DNA, 1371 bp, Klebsiella pneumoniae
atggataaaaattcttctgatggcgtgccgttgccgcaacgctatggcgccattctgaccatcgtgcttgggctgaccatggccgtgctcgacggggctatcgccaacgtcgcgctgccgactatcgccagcgatctcaacgcctcaccggcggcttcaatctggatcgttaacgcctaccaaatcgccattgtcatcgccctgctgccgctctccttcctcggcgacatggtcggctatcggcgtatctataagataggcctggtggtgtttatctttacctcgctggcctgcgcgctgtcgcgtagcctcgaaatgctaaccttcgcccgcgtcgcgcagggattgggcggcgccgcgctgatgagcgtcaacaccgcgctgatccgtctgatttatccgcagcgctttcttggtcgcggcatgggcattaactcttttgtcgttgccgtctcttcggcggcaggcccgactatcgccgcagcgatcctctccctcgcctcatggcaatggctgtttttaattaacgtgcctctcggcatcgtcgcctttgttctggccatgcgctttctgccgcccaacagcgcgcgcagcaaaatcatccgcttcgatctgccgagcgccattatgaacgcccttaccttcgggctgctgatcaccgccctgagcggtttcgcccaggggcagtccactcagctggtgctggcggaggtcgccgctatgctggtggtggggttcttcttcgttcgccgccaactcacgatgcccgtccccctgctgccggtcgacctgctgcgtatcccactcttctctctctctatctgcacttccatctgctccttctgcgcgcagatgctggcgatggtctccctgcccttttttctgcagtcgatgatggggcgcagcgaagtggagactggtctgctgctaacgccgtggccgttagcgaccatggtgatggcgccgctggccggctatttgatcgagaaatgtcatgccgggctgctgggggctatcggcctgctgattatggcctgcggcctgttcggcctggcgctgctgccctcgtcgccctccgatctggatatcatctggcgcatggcgctgtgcggcgccggcttcgggctgtttcagtcgccgaacaaccataccatcgtcgcctcggctccgagccatcgtagcggcggcgccagcggcatgctgggcaccgctcgcctgctcggacagagcaccggcgcggcgctggtggcgctgctattcaatttgctcggtaacaacggcacccacaccgccctgctgctggccggcaccctggctatcgtcgccgcgctaattagcggtctgcgggtcactcagccgcgcgcagcctga

SEQ ID NO: 221818 - DNA, 549 bp, Klebsiella pneumoniae
ttgggttccgtccagtacaccatccagaagttctatcgtattaacggcggcagtacgcagcgcaaaggcgtgacgccggatatcatgatgccaaccggcaatgaagatcgcgaaaccggcgagcagtatgaagacaacgcgctgccgtgggatagcatcaacgcggccacctatgtgaagtccggggatctgaccccgtttggaccggagctgctcaagcgccacgacgagcgtattgcgcaggatcctgaattccagtacatcatgaaggatattgcccgttataacgcgatgaaggacaaacgtaacatcgtctctctgaactacacccagcgtgagaaagagaacgaagaagatgatgcgattcgtctggcgcggattaacgatcgcctgaaacgcgaaggcaagccgccgctgaaaaaactggacgatctgccgaaggattaccaggagccggatccgtatcttgatgaaacggtccatatcgcggtagacctggcgcatctggaaaaagcgcgcccggcggtggaaccgccggccagcaaataa

SEQ ID NO: 221819 - DNA, 1494 bp, Klebsiella pneumoniae
atgaacacattttttaaaatcaccgcgcttgcgggcctgctggcaatagcaggccatgcattcgctgttgatgacataacccgcgcagatcaaatccccgtgctgaaagaagagccgcagcacgcgacggtaagcgagcgcgtgacgtcgcgctttacccgctctcattaccgtcagtttgatctcgacaacgccttctcggcaaagatttttgaccgttacctgaacctgctggactacagccacaatgtgctgctggccagcgatgtggcgaagtttgcggctaaaaaagaccaaattggcgatgagctgcgcagcgggaaactggacgtcttttacgacctctacaacctggggcagcagcgccgcttcgagcgctatcagtatgcgctgaaggtgcttgaacgtccgatggactttaccggcaatgataatttcaaccttgaccgctccaaagcgccgtggccaaaagacgaggccgagctgaacaagctgtgggacgctaaggttaagtttgaccagttaagcctgaagctggcgggtaaagacgataaagagatccgtgacaccttaacccgtcgctataagtttgctatccgtcgcctggcgcaaaccaacagcgaagatgtcttctcgctggcgatgaccgccttcgctcgcgaaatcgatccgcacacaaattatctgtcgccgcgtaataccgagcagttcaacaccgaaatgagcctctcactcgaggggatcggcgccgtgctgcagatggatgatgactataccgtcattaattcgctggtggcgggcggtccagccgcgaaaagcaaagcgatcagcgtcggcgatcgcatcgttggcgttggccagaccgggaagtcgatggttgatgtcatcggctggcgtctggatgacgtcgtggcgctgattaaagggccgaagggcagcaaggttcgtcttgaaatcctgccggccggtaaaggagccaagacgcgtattgtaacgctgacccgcgagcgcattcgtctggaagaccgtgcggtgaagatgtcggtgaaaaccgtcgggaaagaaaaagtcggcgtgctggatattccaggcttttacgttggcctgaccgatgacgtgaaagtgcagctgcagaagctggaaaaacagaacgtcagcagcatcatcattgacctgcgcagcaacggcggcggagcgctgacagaggcggtatcgctctcgggtctgtttattccgtccggtccggtggtgcaggtgcgggataataatggcaaagtgcgcgaagacagcgacaacgatggcgtggtttattacaaagggccgctggtggtgctggttgaccgctttagcgcctcggcgtctgagatcttcgccgcagcgatgcaggactatggccgcgcgctgatcgttggcgaaccgaccttcggtaaagggacggtacagcagtatcgctcgttgaatcgtatttacgatcaaatgctgcgtccggagtga

SEQ ID NO: 221820 - DNA, 246 bp, Klebsiella pneumoniae
atgagtgatgccaatacgctgttcagtaccgcgtcgcagctggcggtagggctggggatcacgctcggggcgattggcattcgcctgggcgagcaggtcggcgactggctgcatcttactgaactaccggggatcagcttccgcctgtcgtttgtgtttatcgccttgatctgtctggtagggatgatcgacagcctgcatctggccaaaacggccggcagcagcgtgtcggagaagaagaaatag

SEQ ID NO: 221821 - DNA, 249 bp, Klebsiella pneumoniae
atgttcaagtgtcctatttgcggtgccgttgccaaaacgcgcaccagtcgcccattgagtaataccaccgttcgccattatcaccagtgccagaactttgaatgcagcattacttttaccaccctgaatagcgttgaaaagctggtcactaagcgcagcccacgtgaagcattgccggatgatttcattccgtccgatgcctttccggcctcgcattacggccgagatcaactcaatctcgccctttaa

SEQ ID NO: 221822 - DNA, 1155 bp, Klebsiella pneumoniae
atggcactgacgacagacacaatcgacaaggcaaaaacgcttctggatgagggggcacaacgattccaggaatatcaatccgagctgtcgcgcgtaccggccttcagtattttgatgggcggcaaggcgctgacgcagcttgatccgcgcgtcatctcactggagctgacggacaaccgaggctttgaggctgatgagctgacgattgctatcgacgacagcgacggtctgatcgagctgccgccgcgcggcgcagagctgtcggtgtcgctggggtggcagggtgagccgctggtttacaaaggggtttacaccgttgacgaggtcgcccactcgggtccaccggacaagctggagatcaccgcccgcagcgcagattttcgggatgagttcaacgttaagcgcgaggtatcatggcatgacgtgacggttgagcgcatcgtgtcagccatcgccaggcgctacaaactgacgccggtgatttccgagcagctgatgagcgcagagattgatcacgccgaccagacccaggagagcgatatgtcatttctgacgaggatggccgaccttctgggggctatcgccaccgtcaaaaacggtagcctcttgtttatcctgcccggcggtggtgtcagcgcgaacggcaaagccctgccgcagtttgcgatcacccgctccagtggcgaccggcattccttccgcatcgccgaccgtgacgcatacaccggcgtgcaggcgtactggctggatctggagttcggcaaaaagaaaaaagtgacggttaaagcccgcaagaaaaagacccagaaaaagccacgcagcagcgccagggaaggggattatatcgcgggtgaagatggtaacgtttttgtgctgcggacaacctacagcagcgagactgctgctcaacgcgccgctgcggcgaagtggcaacagcttaaacgcggtgctgccgaatttaatatgacgctcgcttatggccgtgcagatctctacccggaaatgcacggcacggtatcgggctttaaaacggatattaataatcaggactggataattgcgaaggccacgcacacgattgacgacggagcatttaaaacgcagctggagcttgaagcgaaaatacctgaatggattgcagaaacggagtcatag

SEQ ID NO: 221823 - DNA, 1182 bp, Klebsiella pneumoniae
atgaccgacaactttttccatggggcgcgcgtcagggaaaacaccgacctccagaccgcgatcaatgacattgattcaacggtcattggtctggtcgcggtagccgaagacgccgaccctctcgcttttccacttaacacaccggtgcttgtgacgcgggttatcagcgtactcggcaaagcaggtaaaaccggctctctgtataaatcgctgaaagctatttctgaccaggtcagtacccgcgtgattgttgtgcgcgttgcgaaggcgggaaccggcgagaacgatccgacgcagtcgcagctgattatcggcggtacgcaggctgacggcagctacaccggtatgtttgcctttctgacggcggagcagaaaacgggctatcgcccgcgcattctcggcgtgccggattacgacactgccgaagtgaccgcacaactgcgggttatcgcaaagcagttgcgggcgttctcttacagctactgccacggctgcgacaccattgcggaggcgaaaacataccgcgagacgtttgcggagcgcgagggaatgctgatctggccgaacttcatcgcctataacccggcgaccggtgtgaatgaagaattccccgccgtggcgtatgcactgggtctgcgggcgcttatcgacaacgagcaggggtggcataaatcattgtcaaacgtgccggttaaaaacgtgctggggattgcgaaggatgtgttctgggcgttgcaggcggaggactccgacgccaacgagctgaacgccaacgagatcaccactctgattaagcgcgacggcttccgcttctgggggaaccgcaccaccgacaccgaagaatttattttcgaggtgtacacgcgaaccgcacaaattctggcagacagcattgctgaagcgcagttcaccaccgtggataccccgttaactccggcgaacgtgaaagacgtggtgagcggaattaacgcgaaacttcaggcgctggtcacggcgggcaaactgattggtgcggcctgctggtttgatatcgtcgataacccaaccgttggtctgcggcagggtaaagccatcgtgcgctataactatagcccggtaccgccgctggaagacctgacgatgatccagacgttcaccgatcaatactacgaaccggcgttcgcgtcgcttgggggtgaatag

SEQ ID NO: 221824 - DNA, 516 bp, Klebsiella pneumoniae
gtggctattcctaaaaaactccggctgtttaccctctttgttgatggggaaaacttcatcgggaaagttccgagcgtgacgctgccgaagttgacccgcaagaccgaagactatcagggcggcggtatggtcggctcggtagctgtcgatctgggtcttgactccggggcactcgatgcgtcgatggtagtcggcggcgtggtcgaaacgctgatcctgaaatatggcggcgatattgacgaagtgcgcctgcgttttgctggtgagatttacagcggcgggaccagctctttgctggaagttgagatgcgcggtcgcatcaccgaaatcgatccgggtgatgcgaaacagggtgatgacaccaatcacacctacgcgattaaaaatacctactacaaagagtcggtagacggtaaaccgctgcttgaaatcgacctgttgaactttatctacaagcgcaacgggcagaatctctacccggatcgcattatgtcggcgctgggcctcggcggctga

SEQ ID NO: 221825 - DNA, 2931 bp, Klebsiella pneumoniae
atggatcttagtattcgcgttgcgttcagtgcaattgacaagcttacccgcccggtcagcgccgccagtaaagctattggcggcctttctgattccctcaaaaaaacacagtcttccattaaagacctggagaaaggcgcggcgtctttcgacaagctgcgctcacaggccaacgataccgcgcaaaaactcagaagcacacaacgtgcctttgatggcctcaatcagaaacagcgcgaaggcagccagcttaccgaagctcagacggcgcggcttgaaaacttgcgtaacaagctctcgcgcctgacggacacctacaacaagcaaactacccaactgcgctctgccggtcaggcggtgcgccagcacggagttaacctcaccgccggtagcggcgcggtgcaatctgctatccggcgaaccgagcaatacagccaggcgcttgagcgtgagcggcagcgcctggcggcggtaacgcgcgcacaggcaagctatgaaaaggcgaaggaaaccggcgcgaaacttcgcggtggcggcacgatggcggtggccggcgccgcagtggctggatatgcaagcggtagattcctgtcacccgctgtcggcttcgatactgatatgtcgcgagtaatggcgctgactcgcatggataaaggggacagtcgatttacagatctgcgagaacaggccaaaaaattaggtgctgaaacagcgttttcaagcagtgatgcggcgcaaggacaggcattcctggcgatggccggctttgtacctgaggccattcaggccgctttacccggcgttctggatacagctattgccggcggtgctctgagcggggatatatctcttggtgaaactgccgatattggcgccagcgtgctcaagcagtttggcttgcaggcaacggacatgggacgtgttggcgacgttctggcgggcacgtttacccgatccagtacaaacctgcgcgccctcggcgacaccatgaaatacgccgggccggttgcttccgctctgggtatcagcctggaagaagcggcggcaatggctggcgttcttgctaataacgggttgcggggcagcgatgcgggtacagctatgcgcgcctctcttacccgattgtcggcgccaactggagcggcagcgaaggccctcaaagagcttggagtgagcgtcgcggacagtcgcggtaagttgcggcctgtcgagcagattctcggcgacctgtacaaggcaacaaaaaaatatggtgataccgatcaaattagcttcttcaaggatatcgctggcgaggaggcaatggtcggattgcagacactcgtcaaatccgtgggaagtggagatcttcagaggcttattgctgagctgaaaaaggcacagggagagtccgcgtctacggcaaaaaaaatgtcggataacctcgggggtgatatttccaatctcagcagcgcctgggaggggttgcagatccaaatttccgataccgttaatggccctctgcgcagtctggtgcaatggcttgatgaaaccatttcacgcgtaacggtctgggttaaagctaacccccgaattgcgcaaacgctcctgcttgttgggggcggagcgttggcacttgctgccgctcttggcgcgctctctcttgcagcgggcatcctgattgggccgctggcaaaactacagctcggcttcacggtgctaaccggtggtcgtggcattctcggcacccttgccgcattccgcaccctggggactgccgctggcccggcgatggcaagcatgcgtggctggcctatcgttatatcgggtatcgcatccggtttcgggaggatctccgccatcatgcccgcgattcgggccgggttaatgggtgcgtttctggctccgggtgcggcgctggcgtctcttggtaaaagtcttggcatgctgctgttgaggctgaccggcctccctgcgctctggggaatgatcacaggtgcggtatccgttctgggtggggcgctgtctttcctgctcagtccgatcgggctgattggtgcggcgttcgtcgcggtggggctgctgatctggcgctattgggagccgatcaaggcatttttctccgggttctttactggcgtatggcaagcgctgacgccactcagaagcgcgttttctgcactcgcgcccgtcttctccgcgctgggtagcggtattaaggccatctggcagtggttcaaaaacctgttaacgccgatgcagaccagcaaagacacgctggataaatgcgcctcggctggtgaaacctttggccgggtgatgggtaccgcgctgagtgtgctgctgtggccgctccagcagttaatgaacggcgtcagctggctgcttgaaaaactggatcttattcccgacgggatcgaaagagccaagcagcaggctgacaaagcccagcaggcgcttgaggcatcagcggtcgcgctggccgggcatcaactccctcttggtcaggctaccgtgtccgcaggtactaaaccaccggtcatcactggcgacaacggcacgctgaggcgcctgaataacattgccgataacacgaaagcaacggcgaacaacacgaagaagatcggccccggcgatatcatctttaaaaatctgccgcgtgcgctggcgctgcgtggcgcctatcaggaagcgcgagttatcccgctacctgtgccgcgcgtctctgctgctgcggccggaggtgttttgtcggtaccgacggcaacgcagggatcgacgtctgcgccggtcgctgcggcttcgggtgctgcgccgttcttccagctggtctttaacgacgtcggcaagcgctcggatcaggagcttgaaaaaatggttcgcaacgctgtgcgcgatgcaatggccagcacccgcaaaactaaccgtggttcattccgcgatcgggagtaa

SEQ ID NO: 221826 - DNA, 1158 bp, Klebsiella pneumoniae
atgagtaaaatttttaaatccataattacggtggccggacgggaaaaaatagcatctgccatcgttaatggagataaagttattttctctcaaatgtccgtaggggatggcggagggagagcgacaaccccaggcgacgagcaaacctcattagtcaacgagtgtttccggacacaactgaacagcctgaagctgtctgataccgagaatatcattatcgcggagatgataattccgcccgaagtgggcggatttaccatcagagaggccgcgttgtttgatgatgccggtgtgtgcatggcagttgccaatgtcccggaaacctataaacccgctcttgctgaaggttccgggcgctttaccatcctccgcatctggctggcggtcagcagcactgaagccgtcgaactggttgttgatccgggtattgtgttggcaactgtagaggatgtgattaactccggtaatgaaaccaaagattactccgatgagcaactgagtaatcatgcgggctcgcgggatcacccggatgccacactagaggaaaagggttttactcaactcagcaacgccattaccagcagtgatcaggataaagccgccacaccgctcgcggtaaggttggctgttgaggcggctatcactgccgcatgggagctggataaccctgtaggaaccgtgaagttttacgcccaggacgttgaccccaatgagcgctatccgtggacggagtgggcttataccggcgaaaacaaaacaatccgcgtcggcaaggcggatggctcagatgtcggcacgaccggtggcagcgataccgttacgctccagcaagccaacctgcccgccgtgcagattgacgtgagcggcgaaaccagcgagctacccgaagcaacgctgactactaaacctgccggcaggcacaaacacggcggcgtacccagccgggaaaatccctgggaaattggcggtgatatcagccagcgttttaacccggcaaacctgggcgaaacggatgaggtcgaggaccatcagcacgaagttgtgcaaccgccgcataaacacacgaccagcggtaaaaccgcgcagctcggcaaaggcaattcgttcagcgtggtggaagcgcataccctgctgatgtgctgggcgagggtggcgtga

SEQ ID NO: 221827 - DNA, 1032 bp, Klebsiella pneumoniae
gtgccgttcagcgcctggctcagcgagcgctggggggcgaaacggctgtttttactctcgctggggctgttcagcctcggcgcgctggcggcagggcttgccaacagcctgagcgaactgattttatggcggacgctgcaggggatgggcggcgggctgttaatccccctcggccaggcgctgacgtggccgctgtttcagccgcatgagcgggcgaagctgtcggcggcggtgatgctggtcggcctgctggcccccgcctgctcgccggcgagcggcggcctgttagtcgaggcgttcagttggcgctgggtctttttcgccagcctgcctgtcgctctgctaacctttgtgctggcggtgcgatggctgaacgacacccccggtccggttcgcccgactcgctttcttccactgtcgctgctggccgatcccctgctgcgcttcgcgatgctgatctacctctgcgtgccggggatgtttattggcgtcaacgtggtggggatgtactacctgcaacgcgtcaccgggatggcgccgggggcaatcggtgccctgatggtgccctggtcgctggcctcgtttgccgccatcacctttaccggcagatatttcaaccgcttcgggccccggccgctggtcgtcatcggctgcctgcttcaggcgatggggatcatgctgctgctgaagatcgatgcggacagcccgctggcgctgttgattctggcctttacgctgatgggcggcggaggcagcttatgcagcagcaccgcgcaaagcagcgctttcctgcatacgcctgccgaagagatgcctgacgccagcgcgctatggaatcttaaccgccagctcagcttctttgccggcagcgccctgctcgccctgctgctgagggtattcccgccggcctacgcctggcagggggtatttattagcgccgccgtcattaccctgttgccgctgctgttttgcctgcggctgaataatcgggcgattatccatcgcctgcacaccactctggagaagtcatga

SEQ ID NO: 221828 - DNA, 870 bp, Klebsiella pneumoniae; identical to SEQ ID NO: 15677

SEQ ID NO: 221829 - DNA, 252 bp, Klebsiella pneumoniae; identical to SEQ ID NO: 15676

SEQ ID NO: 221830 - DNA, 333 bp, Klebsiella pneumoniae
atggacagaggggaaatctggcttgtttcactggatccgattgctggccacgagcaaagtggaaaacgtccggtactcattgtatcgaaggcatcgtttaacaagctgacccgactaccggtcgtggttcccgtcaccagcggcggaaactttgcacgtacagcaggtttcacggtttcactggaagaggcggggaccaaaacaacaggcgttattcgctgcgaccagcccaggactatcgatatggcggcccggaaaggcaagcgtctggaacgcatacctgacgtcgttgtcaacgaggtgcttgccaggctggatgcgatgctgagttaa

SEQ ID NO: 221831 - DNA, 258 bp, Klebsiella pneumoniae
atgtatacaactcgcctgaaaaaggtcggcggatccatcatgctggcggttcctcccgccgtgctgaaaacgctggagctgtcgacggacagcgaagtgggtatgaccattgataatggctgcctgattattgaaccccagaaacggccccgttattcgcttgaggagctgctggcgcagtgcgatccgcacgccgaaatgagcgaagaggatcgggaatggattgatgcgcctgcggtgggcaaggagattctgtaa

SEQ ID NO: 221832 - DNA, 207 bp, Klebsiella pneumoniae
atgatgcaacaggactggcaacccgccgacattattgcggcgctgaaaaagcggggaacgtcgctgacggcggtttcccgtaacgccgggctggcgtcctccacgctgaccaacgcccttaaccgacgctggcccaaaggcgaaagattgatagcggaagcgttaggcatcgcacctgagcaaatctggccttcgcgctatcgctga

SEQ ID NO: 221833 - DNA, 462 bp, Klebsiella pneumoniae
atggctactatcccaatccagacatatccgttacttgctgttccctttaatgctgccacggatttcaccgtactcgctggtcattgcgaaacctttgccgaaaccctgattgaaagcaacgatcccacgctgaaaatggcgctctgcggcagactaaacgcctgtctgacgctgctccagcccacgctgttagagcccgtcccgccccatcttattgaaagcctgactgttgatgccctccctgcaaattccccccgtttcgagcctgaatgcacagagctttgccgctactgtctctccctgacgcagatgctggcagggcaaagcttttactctgaaatggaaaaataccttagctgcctgctgtatgaactgattaagtattttgctgcggaaatgatagccccgcgctggctgcgtaccgccgatggcgttaaatttattgacgaggtgacggcatga

SEQ ID NO: 221834 - DNA, 582 bp, Klebsiella pneumoniae
atgaaaatattttggggagtattacatgttaaacaggcaagtcaggcagattcaccccaagaggataaagatagccaaactaagacatttggcgattattcggagtcccctaacattgttctgcttggcgatcctggtgctggaaaaacccatcttttcaaacaattttcggcatttcatagggcaaactatctgacggtacggcactttctaagtggtgttccgatagataaccaaaaagctctatttattgatgcattagatgaaaaaaggagcagtcataacagtagcgatgttatagatgtcatagtccgaaggcttttttcccaaacaccgcaaaaagtcagaatctcctgtcgctctcaggatatttacgaatcttatcaacgaatcgaagatgttcttttcataaaagaaagtgattttattcgccatttcgaacatttacttcagataacgcgttcagcaattttttcgtttacttttatggtgaggcatgaggggatgaaagagaagaaagaggatatccactatttgaccagagaattacatgcgaaaaaatatccagaagattgggagtaa

SEQ ID NO: 221835 - DNA, 1749 bp, Klebsiella pneumoniae
atggtcaacaggaagtcaaaaaagaatcggaataagcaacaacgacagaagaaaaatgaaaatccccaacgaagagggaatagtgaatatttattcaacaatactatacttccaactaatattccattgattgacttttgttcacttgttattgatcaggttaaattaaacccagcactagaaaatagtccagattatcatttttctaatatgattgttcattgggaaaataaagattatgagtcacacaggatatctgcatttttattactgatgactatttatgatgaagtcccctcatatataacaagactgatgactgaagaaaatgaatttattttatcagagagacttttatttattcatttagataacataagtgaagggttaaagttagcacatgtatattataaactaattgattgctttatacgtacgggggctaaaggacgtaactcaacgtattttaagacctttatgaaagtgattgcaaataaaaaagagaattccaactatcctttacatcattatgacgatattttattacggttttatgagtactatcatcgagtattgattaaaaatgataatgagttgaataacctcacactttttatttatcaacatcttgagggcgaagggagtcagtcattatatttctttttgtcttatttctgtcttaataaaaatgatcaacaagcaatagactatgctttaacgtgtttgaactcaagaaattatgcagatggaacatcgtataatttttcattatgtaagaatacaataagagcaactattcgctgtaacctttggcatgaatatgataagtggatggacattttagaatcagcagttggtggtgataatccagagttgttacagttacgagaacaaggtgaatgtgcaataaataaagcattagctagacatgaacatccaataaatcccaccaatgtaactccaattaccctggattctgtgaagacagaagaattgttgatattgttatcaataattgatggatgtggtggggattggggaattgttgctaaagaagaacttttacgctatacatttccatcaaaggaaattgcaaacaagcaactaataaatctgctcactcagcatattctcaaaatttcagtttctgatttttcttcattgaaagatgatgatttatataactttgacgcattcatcaacctctgccgtttccacttaaatataattggaataagtgatacgaaaactatatcgttaaaagttttacaagaagaggttttaaagagggaggatataaaagatagtattatcaatctttggcgtaaaattaatctagggtatttttacaatacgttagaatattatctttccaaaatatctgagcgatgggctcaggaatttcttcttaacgaaaatactaggcagcgactagagaatattataaccagtgctaggcgattgtctttttcagcatataaatcggttaattcgacagtagggtttcatgaattacaaagtacgggaacaaaacacacacaaaatatgcttttgcatgagataaataaatatatcagttttattgagcaaagtgatgttgattattcaaagccacgttatgataaaatgcctatactttcagtagaaaggcagttatatgatttgtttaatcttgagccagcaattttgtataatgaagttccatctataggtattgttgaaaactgtatgctgcttgatgagttttga

SEQ ID NO: 221836 - DNA, 705 bp, Klebsiella pneumoniae
gtggggcgggggggctttaaaaccggtagtcagtatatctgtgaacagctggcaagtgattgggtatttttctacgatgacgatgcttacccctatccagacacgttgaagtccttttcacagctggataagcggggatgtcgggtatttagtggactggtgaaagatccgcaaggaaaaccgtgtccgatgaatatgccgttctcgcgtgtgccaacttcacttggcgacactgtacgctatttacgctaccctgcagagtttatcccggcagctaatcgttctatgttcgtacaaacggtttcattcgttgggatggtcatacatcgtgatctgctcgcgaccagtcttgaccacatccatgaacagctctttatctactttgatgatctttactttggctatcagctatcattagctggtgagcaaattatgtatagcccggagttgcttttttatcatgatgtgagtattcagggcaaacttattgcccctgaatggaaggtttactatctatgccgtaatttgatcctgtcgaagaaaatattccagaaaaatgccgtgtatagcaattcagcgatagcgatacgcatcctaaaatatatattaatcctgccatggcaacgtcaaaaatattcctatatgaaatttattcttcgtggaatttcacatggcataaaaggtattagtggtaagtatcattaa

SEQ ID NO: 221837 - DNA, 210 bp, Klebsiella pneumoniae
atgaaatatacggcattgatagtgacattcaatcgtctcggcaaactgaaaaaaacggttgaagagacccttaaacttgaattcactaatattgttattgtcaataacgggtccacggatgggacccaagcctggctttcgtcaattgttgatacacgagtcattgtattaaccctcaccgagaataccggtggggcgggggggctttaa

SEQ ID NO: 221838 - DNA, 1155 bp, Klebsiella pneumoniae
atgaaaagtaaaaaaatattgatcgtaggtgctggcttctctggtgcagttatcggtcgccaacttgctgagaagggacatcaagtccatattatcgatcagcgtgatcatattggggggaattcctatgatgcacgggacgctgaaacgaatgtgatggtacatgtttatggaccccatattttccatactgacaatgaaacagtgtggaactatgtcaacaagcatgcagagatgatgccctatgtgaaccgggttaaagcgacagttaatggtcaggtattttccctgcctattaatttgcatactatcaatcagtttttctcaaaaacttgttcgcctgatgaggccagagcgctcattgctgagaaaggggacagcactattgctgatccacaaacttttgaagagcaagcgttacgctttattggtaaagagttatatgaggccttttttaaaggatatacgattaaacagtgggggatgcaaccctcggaactgcccgcatctattcttaaacgtcttcctgttcgttttaactatgatgataattattttaaccacaaatttcagggcatgccgaaatgtggttatacgcagatgattaagtccattctcaatcatgaaaatatcaaggttgacttacagcgggaatttatcgttgacgagcgaactcattacgatcacgtattctatagcggtccattagatgcgttttatggctaccaatatggccgtctgggctatcgaacattagattttaaaaagtttacctatcagggtgattaccagggctgcgcagtgatgaactattgttctgttgatgtcccctatactcgcatcactgaacataaatatttttctccctgggaacaacacgacggctctgtttgttataaagagtatagccgtgcttgcgaagaaaatgatattccttactatcctattcgccagatgggagagatggcccttcttgaaaaatatttgtcactggccgagaatgaaaccaacatcacttttgtcggtcgtcttggaacctaccgttacctcgacatggatgtgaccatcgccgaagcattgaaaacggcagaagtctatttaaattcactcactgaaaatcagccaatgcctgtgtttacggtttctgtacgatga

SEQ ID NO: 221839 - DNA, 1005 bp, Klebsiella pneumoniae
atgaagtttttggtcactggtgccgcaggttttatcggcttccatatcgcgcagcgcctgctgaatgaagggcatgatgttgtcggaatcgacaacatgaacgactattatgacgtcagcctgaagcaggcacgtctggatcgcctggcatctccggcattccatttccagcagctggatttggccgaccgtgaaggtatggcaaagctgttcgccacagagcaatttgaccgcgtgatccacctggccgcccaggccggcgtgcgctactcgctggaaaacccgtatgcgtacgcagacgctaacctgatggggtacctgaacattctggaaggctgccgtcataccaaggtgaaacacctggtgtacgcctcctccagctcggtttacggcctcaaccgtaaaatgccgttctccaccgaagattccgtcgatcatccggtctccctgtatgccgccaccaagaaagccaatgagctgatggcgcatacctattcccatctgtacggcatcccgaccaccgggctgcgcttctttacagtttatggtccgtggggtcgcccggatatggcgctgttcaagttcacgaaagcgatgctggaaggaaaaagtatcgacgtttacaactacggcaaaatgaagcgcgacttcacctatatcgacgacatcgtcgaggcggtggttcgggtgcaggatgtgatcccgcaggccaatgccgactggaccgttgagagcggttccccggccaccagctccgcgccgtatcgggtatataacattggcaacagctcaccagtggaactgatggactacatcaccgccctggaagaggcgctgggaatggaagcgaagaagaatatgatgccgatccagccgggagatgtgctggacaccagcgcagacacccaagcgctgtatgacctggtgggctttaagccgcaaacgtcagtgaaggacggcgtgaagaacttcgtggaatggtacaaggattactatcagatctaa

SEQ ID NO: 221840 - DNA, 543 bp, Klebsiella pneumoniae
atggctgcatcccttgacgatgctaatgctgccaacgtgatgccaaggcttttacaggcagcagctgagctgatgacaaacgttggcgttagtacaaccttacgaagaattagttctattcaggctggacgaaacagaacagccccttcttcgcttgagaatgcattggtagcacttgctctggccccaacccgacaaaatattcgaacgacactccttttgctcgaagagaaggaagagacacgcgtattcagggccggagctctgcacgttctaaaagatgcgataaatctgtccatcagttcacctgacaaaagcattagagagtcagcatcagttattcgtgaacaacgtagataccaaggtgaaggacgcgtatcgcaccgttcaataggctcaactcttcttctaaaaggtctggaatgcgaccactcggtgatactagatgcgggaaatatgggggcaactgatttgtatgttgcgctctcaaggggagctaaatctgttacgatcttctcaggtcgtgatgagttcacaccctaa

SEQ ID NO: 221841 - DNA, 195 bp, Klebsiella pneumoniae; identical to SEQ ID NO: 102222

SEQ ID NO: 221842 - DNA, 1029 bp, Klebsiella pneumoniae; identical to SEQ ID NO: 102220

SEQ ID NO: 221843 - DNA, 2028 bp, Klebsiella pneumoniae
atgaacgaatttacgggatcggcagcttcacaggctgactttatttggaagaacgcggaagacctgtggggggacttcaagcatactgactttggcaagatcatcttgccgtttaccttgctgcgccgcctggagtgtgctctggagccgacccgcgaggcggtgagagaggcatacgccgctttcaaggatgccgatgttgagctggacaccattctgcgctcaaccgctgattacccattttacaacacctccgaatactcccttggcaccttgggtagcaccaagacgcgccgcaatctggaagactacatcgccctgttttcagataacgcccgcgctatcttcgaggagttcgagttcggcaataccgtgatccgactggagaaggctggcttgctatacaagatatgccagaacttcgccaagatcgacctgcaccctgatgtggtgccggatcgggtgatgagtaacatctacgaacacctgattcgccgctttggtgccgaggtaaatgaaggggccgaggacttcatgacgccgcgtgacatcgttcacctggcgaccgcattgctgcttgacccggatgatgccctgtttgaggccagccccggtttgattcgtactttgtatgacccgacctgtggcacgggtggcttcctcaccgatgccatgaaccatgtgggcgactacggtaaccgcgacaagatcccgccagtgctggtgccgcacgggcaggagttggagccggaaacccatgcggtttgtgtggccggtatgctgatccgccgtttggagtccgaccctggccgagatctgtcgaagaacattcgtcagggcagcacgctgtccaacgaccagtttgccggtgagcgtttccactactgcctgtccaatccgcctttcggcaagaaatgggagaaggacaaaaccgccgtcgaagcggaacacaaaaaaggtgagttgggccgttttgggccgggcctgccgaaaattagcgatggctccatgctgtttttgatgcacctggcgagcaagctagaactgccgatcaacggcggtggccgcgccgctattgtgctgtccggttcgccactgtttaacggcggtgccgcgtctggcgaatcggaaatccgccgttggttgctggaagacgacctgattgaagccattgtagctctgccaacggatctgttcttccgcaccaatatcgccacctacctgtggattctgtccaacaagaagccgcaggagcgcaaaggcaaggtgcagttgatcaacgccaccgacctgtggacttcaatccgcaacgagggcaacaagcgccgtattgtcagcgatgagcagcgccgccagattctggacatctacgcagcaggcgaaaccggtgcgctttcccggatgctcgactaccgcacctttggctaccgccgtatcagggtactgcgcccgctgcggatgaccctggaactggataaggcgggcatggagcgcctggaagccgacccctcttgggaaaagctccctgacgcgcatcaggcattctggcgcgacgccctcaagccgctgatcgggcaaacgcagacctatggctgggcagaaacctttgccaaggacgcgatcaagtccgacgaagccaagcagctcaaggtcaaggccaacaagacatttatcgccgcgctgatcagcgcctttggtcacaaagacccggaagccgagccggtcacggatgccaacggcaacctggtgccggatactgatttaactgattacgagaacgtcccttatctggaggacatcgacgactactttgctcgcgaagtgcttcctcatgtgccggatgcctggctggatgagagctttaccgatgccagggatggtcaattgggccgcgttggctacgagatcaacttcaaccgcttcttctaccagtaccagccgccgcgcaagctgcatgatattgatgaagacctgaagcaggtagaagctgagattgccgcgctactggcggaggtggccagcgaatga

SEQ ID NO: 221844 - DNA, 1359 bp, Klebsiella pneumoniae
atgagccagtacagagcatatcccgcatataaggattccggtattgagtggattgggcaggtgccggagcattggcaggtaaaaaggctgaagcatttaatatcccaatgccagaatggcgtttggggtgatgacccactggaagatggctcggatacattatgtattcgggttgcagatttcgatagggataacaacgttgtcatttataacccctcaacgtatcggcagattaccaaggaacaccaagatagccggttagtttccaaaggagacattctccttgagaagtcaggaggcggtgcacaaacattagttggtgcaaatgtgcgctatctgggagaagagcctgccgtttgctccaactttgtagcagttataaagccgtcaaaaatggccgagtccgcatggctaaattatctaatggcatctatgtatgcgctcaagataaatctacgttccattaagcaatctacagggattcaaaatctggattctgagcaatatcttgatgagggtgtcgctgctccttctcttgacgagcaggccaccatcgcagccgccctcgaccgcgaaactgcccgtattgatgcgcttgtcgagaagaaaacccgctttatcgagctactgaaggaaaagcgccaggcgctgattacccatgctgtcaccaagggcctagaccccaacgtgaatatgaaggattccggcgttgagtggattgggcaggtgccggagcattgggcgatcccagcgctaaaatttttgctatcaactccgattacagatggccctcatgagaccccggttccggcagaaccgcaggatggcatcgtgtttatatctgccgaggccgtgtcatccggaagaatcaatttcagcaaagcttggggatatatatctcgagccgaccataagcgttattcacgaaagtataagccgcaacaaggcgatatttacatggtcaaatcaggtgcaacaaccggaatcacagccatggttgaagataatcgagagttcaacatatggtctcctcttgctgctatccgcgccaattccgagacggcaccaaaattcttgctatatgcattgcgctcaaccgagtttcaagccggtgttgcgctgaactggagctatggaacgcaacaaaacataggcatgaatgttctggagaatttgccattgccaattcctccatataaagaacaagccaccatcgccgccactctcgaacgtgaaaccgcccgtattgatgcgctgattggcaaggcagagcaaagtattaccctactcaaagagcgccgctcggcctttatcaccgccgctgtcaccggccagattgatttgcgaggaaaacaataa

SEQ ID NO: 221845 - DNA, 333 bp, Klebsiella pneumoniae; identical to SEQ ID NO: 127331

SEQ ID NO: 221846 - DNA, 432 bp, Klebsiella pneumoniae; identical to SEQ ID NO: 143379

SEQ ID NO: 221847 - DNA, 1485 bp, Klebsiella pneumoniae
atgtacggagaggagaagtcggactcgctcatagtagcggcgaagcaggcgaacaacccgaaaggagcggagtcagtggagcgaaggagcggggccaaggggaacgcggaacagccacacatgcgccggacacagagccgggaaagcatgtcacagaggctgtcacgcgtgcgggaagctgcgaagcagcggaagaaagaacggtttacagcattgttccacctgctgacagtcgaagcactggaagccgcattcctctccctgagcaggaaagcggccgccggagtggatggcatcaggtggatggactacgccggaaacatgaagaacaacataacagatctgcaccggaggctacatcagggcagctacagggcgcagcccggcaggcgtcactacatcccaaaagcggatggaaaacaacgcccgctcggcatcgcctcgctggaggacaagatcgtccagtatgcgctggtgaaaatcctgaacgcagtctatgaaaacgactttatggggttctcatacgggttcagacccgggcgaagccagcacgatgcactggacgcactggccacagggctggtacgcactaacgtaaactgggtactggatgccgacatcagtcagttcttcgacagggtgagccacgaatggctgatcaggttcacagagcatcggatcggcgaccggagggtaatcaggctcatacgtaagtggctcacagccgggacctcagaggaaggagaatggcgggcatcggaggaaggcaccccacagagtgcggtcatctcaccgctgctggcaaacatatacctccactacgtcttcgatctgtgggcgcatcagtggcgacgtcgctatgccacaggcaatgtggtaatggtcagatacgccgatgacatcgtcatcgggttcgacaaacgatacgatgcccggcgcttccgtatagccatgcagcgcagactgagggagttcggactcacggttcacccggagaaaacccgtctgatggagttcggccgcttcgctgccgaaaaccgtgccatcaggggaaaaggcaaaccagaaacgttcaacttcctcgggttcacgcacatcagcgggaaagatcgcaacggcaggttcatgctgatacgaaagacccgccgggatcggatgacggcaactctgaaagccatcaaagacggtctgcgaaggcgctggcattactcaatccccgaacagggaaaatggctcaggagagtggttcagggatacctgaactatcactcggtaccgggcaacttccccaccatgcagaagttcaggacacacgtaacaaacctctggcgccgggcgctcaggcgcaggagccagaaggatgatacgacctggacgaaagcaaacaaactggcagccgcatggctaccaggggttcgggttcttcatccatggcctgtggagcggttcaccgccagacacccgaggcaggagcccggtgcgtaa

SEQ ID NO: 221848 - DNA, 390 bp, Klebsiella pneumoniae; identical to SEQ ID NO: 92370

SEQ ID NO: 221849 - DNA, 675 bp, Klebsiella pneumoniae; identical to SEQ ID NO: 92371

SEQ ID NO: 221850 - DNA, 393 bp, Klebsiella pneumoniae; identical to SEQ ID NO: 217930

SEQ ID NO: 221851 - DNA, 390 bp, Klebsiella pneumoniae
atgaaaaacaacaccgaacaaccggtcagtacgacctctcatccctttcgccggatacccgtcatcgttgctctcgtgtttttcgccctggcaaccagcgcgtttctctcgcgcgtggttctggagtactccacaccgcgggtggtggcttttgatatgaagaagacgctcgacagctttatggacagtgtcagtcagaagcagctgacagaagcgcagtcaaaagcgctctctgaccggtttaacgacgcgctggagaagagtctggcggagtatcagcagcagcatcatgtggtcattctggtttcacctgccgtggttcagggcgcgcccgatgtgacccgcaacatccagcacgacattgcccgccgcatgaaaggagaacagtaa

SEQ ID NO: 221852 - DNA, 627 bp, Klebsiella pneumoniae
atgttacgactgaaaggctgtctgctcgccgcctgtctgctatcgccgctgactcaggcggctgatctcggtacctggggggatttatggcccatccgggagcaggacatgctgcagctcatcacgcagcgtctgcagtcgctgcaatcttctggccagtgggaccagacgatggatgcgtttaagcagcgggttatcgagaacagtcagcgtccggcaccggtggagggcattaagcgtgcggagaaatacgagcagcgctggtttgatcccagcatccgcctgaccgaagacctgaaggacaatgaggggcgggtgtttgcccgcaagggcgatgtggtgaacccgcttaaaaccgtaccgtttgtccagaccctgtacttcatcaatggagacgatgccgaccagctggcctggatgaagcgtcaggtgccggaaaccctgatgagcaaaattatcctggtgcgtggcagtatcccggacacctccgcagcgctggacagccggatctatttcgaccagaacggtgtactgagcaagcgatttggcctgacggcggtcccggcgcggatcacgccggcgccctccggtgaacggctgaatattgagaccttccctgtaaaataa

SEQ ID NO: 221853 - DNA, 549 bp, Klebsiella pneumoniae
atgaagcataagcatctggattgtttgatgcaggacttacacaatatcagtcagatgattgccgatgatatcctgcaacgatcggaggctgccagggaggtacaggaagtgctcgataccatgcgaatgacactattaaacagaaaatgcccctcttcgcgactggctgagtatgcggtctgtctcctgcgggcagaacgatatcgacaggtgcggatttacggtaaatcgttaagagaagtcagggatctcagcctgtggattacaggactgaaagccttcagacggagactggagaaaacagaggaaacctggcggtaccgccagtgggaagcaagccgtgctgcatattcgctggccggattatttattctgccagcgtaccttattttctcccttgcggtaggtgtcggttgcgacttacggataagctcggtcatcctggggggatatcttgtctgtttaactggcgtggctgtccgggccaaagactgcgtagccatttactggtcgttgtacagtttcattcctctggtgatgctgaattga

SEQ ID NO: 221854 - DNA, 690 bp, Klebsiella pneumoniae
atgctttataccgtagcgatcgtactgtttggtttcgcgttcactgccaggctcaggttcagataccatcattctttatttctgtttcttcagcacacccgcaacactcaggttattttcgtcctgcttttcagtatttatttcatttctttattttgccacttttctccacaaaactattttaataccccgttattcattattctctcaattatatttccttgcgtagtgttttatatgacctttgcgaacctgaggtgcaaagagtcagggttgctactaaccgcattcaggaacctgaggatagatattcagccaaaatatttacctgacgaaacctcaaagaaggaatatgtcagcgcactggtaagactggttgacaacatcgttgttcttcaggcattacctttccagaaaatttatttttcatctcacctgataagagtgcaaggtaaaaactttctgaagaaagaattcaggaagcggaaaataccctgttactgcaaagcttacaaactatgctggagtgaagtagcagtgctgaactttcgctatggcggtcggacccgcttttgtcttttctcacacaaacttcacactaacggggttaaaatcgggcgcacggggcacgcatttgctatcaaaaaaaggagcatcaaaaatatcaattcagcatcaccagaggaatga

SEQ ID NO: 221855 - DNA, 603 bp, Klebsiella pneumoniae
atgactggtatcagtacaaaaaaggatattgaatacataaaggccgtttttaatgacctcagtgaagcgttaacgcagatggcatatggacaggttgttctgcccgtcgatatcaaagggttgctttctgacattcaggcgtctctgattaaaggacgtctgccatgtgccctggaagtcgactgttttgaggaaagccttcttttgttcctccgaagtgtcaggcagcaacggcaaagcattgtctacaccactgaggtggacaggcaaatggccagactcagggatgtcagatactttcttgttgtgttaacaggatatcctgagagagtacaagaaccaccccggttactgtggagatggcgggatattaaaacgctgtccgtgctcttcctcagtgtagtactatctttttgttctgtcctttatctcgcctcaggtaataatggtgctgtgcatggtgtttattgtattgcgataattttattttctatttcaatatatgcattagaagagtctggggttggtggtgtggtgttttctctctcgggggtgaccatttttactgttgctgctctttgcgaatacttaccgcctcaataa

SEQ ID NO: 221856 - DNA, 327 bp, Klebsiella pneumoniae; identical to SEQ ID NO: 92393

SEQ ID NO: 221857 - DNA, 573 bp, Klebsiella pneumoniae
gtgaaaaacagcctgaagaacctcgctaagacgccgctggcggcactggctctttcccttgctctggccgggatggcacatgcgggaacgctcgatgaggtgaagtcgctctgggatccgcggggaatctccggtactgaaacggcctccccgcagagcgacactccccaggcggtgagcggggcatctcagccacgctggttacgactcagcaacggaaagcaggtggacctgcgcgactggaaagtggtgctgttcatgcagggacactgtccctactgtcataaatttgacccggtgctgaagcagctggccggacagtatggcttctccgtgttctcttacaccattgacggacagggtgatgacgcgtttccggaagcgctgccggcgcctcctgacgtgatgcagacctttttccccaatatcccggtggccacaccgactacgtttctggtgaacgtaaacacgctggctgcgtacccgatcctgcagggcgccacggatgcgcagggctttatggccagagtggatacagtatttcagatgatggagaacccgaataatggataa

SEQ ID NO: 221858 - DNA, 429 bp, Klebsiella pneumoniae
atggataatctcaacaaaatatattcttcgatacccgtactggaaagaaataaacgcctgaagttatcccggcaaaagagattcgatgtttattattgtctcgcttttatgtttggttttgccggattatttctgtggtggggaagccatgcttttttcaatgtgttcactgacctgttaaccccgccggaaaaaatggagtcggcaaataacatcatcaatcagtggaatgtcctgatgtatttcgttccctttattcttttctcgctttccattggttgtctggcaacggctttactgggggtactcattgccgaactcgctttttggtttgaatatgcctttgaaaaaaggttcctgagatatttaaaccgcaaccttcgacggaaaaataaaatgaaagaaggagagcctgatgttcatccgtaa

SEQ ID NO: 221859 - DNA, 615 bp, Klebsiella pneumoniae
atgttcatccgtaaaccattatcggtgctttgtgggatgttgctaggggtgtcattgacggcggctgcagatgttaacggtgacatgaataacttcttcaataagctggggtttgcgtccaataccagccagccgcaggtctggcagggacaggctgcgggctacgcctccggcggttcgctgtatgcaagaacgcaagtgaaaacgatccagctggtcagcatgaccctgccggatattaacgccggctgcggcggcatcgatgcgtacctggggtcgttctcctttatcaacagcgagcagctgcagcgctttgccaaacaaattatgtccaacgccgcgggctacttctttgaccttgccctgcagactacggttccggagatcaaaaccgcgaaggatttccttcagaagatggcgagcgacattaacagcatgaacctcagctcctgccaggccgcacagggcattgtgggcggtctgtttccacggacccaggtggcgcagcaaaaggtctgccaggacattgccggcgagagcaacattttttcggactgggcggcttcccgtcagggctgttcggtggggggggcagatggacaaagtgcaggataa

SEQ ID NO: 221860 - DNA, 2874 bp, Klebsiella pneumoniae
atgcttgagatatatgccattgcaggcggtgactggttacggggcaacctgaacgcgattgcggcgtttatggggaccggcacatggtcgaccatagaaaagatgtgtatcgccatctcggtactcattgtggcggggagctgggtaaaaaaacacaacgtaatggacctgattggctgggtcttttcgctcaccctggtctctatgctggttgtcattcgcacccctgtgcagatcatcgattacagtaacgttgcgcaggtctatgaagtcgataatgttccaattggtctggccattccggcgtcgctgacaacacgggtgggaaacgcgcttatccagagttatgagatggtcttctctctgccggacagtgtcacgtacagtaaaacggggatgctatttggcagtaatctggtcgcgaaaagtacggattttttatcacaaaatcctgaaattacgacgctgttctccgattacgtacaaaactgtgtgatgggcgacattttcctcaatcataagtactcttttgaggatttactgaattcacctgacccgtacaccctgatttttgcaaacccgagtccactgcgccaggttcccaataacagctataattttttggataaaaactatcttggtaccacatttatcagttgccaggaggcggcgacggagctgaaacaacgccttgcactggatacccagacaggcggtaaaacctggaactactatgttcgtcagctgtttggcggcaaacctaatcccgatctgcttttcagccagatgattggcgacagctacaattacttctacagctcaggacagagcgccgggcagattatccgccagaacgtcacgatgaacgccctgcgcagcgggatccagagttatgcagcccgcagcggcgataccgccagtctggtcaatatcgctaacacatcatcccttgaaaagcagcggctggcacaggccacaatggggcaccaggcgcttcgcacacttccgctgatgcagaccgttatcatggggataatgattgggatgttcccgatcatggtgatggccgccatgtttaatatgatgacgctgcaggtgctaaaggggtatgtgtttgcgcttatctggctgcagacgtggccattactgttcgccatcctgaacagcgcaatggcctactatgcgaagcaaaatggcgtaccggttgttctctctgagttgtcgcaggttcagctcaaaaactcggatattgcgaccaccgcgggctatattgccgtgatgataccgcctttgtcgtgggggatcgtgaagagcatgggagcagccttctccagtgcctacagccatttttcttcttccgggcttggtgcaacatcgcaggcggcttccggcgtggtggacggcaattactcgtttgccaacatgcagatggagaacgtcagcggctacagctggggaacgaacagcacaaccagtttcggacagatgtcgcgtcagctggggaatggagggatgagtacccagacccgggatggttcaacggtcctggacagtagtggcgccatgtcaaaactgccggtggatatcaacgtcggtcgtcagatagccagtgcgcagcagcagatggccagggaggccgatgtccaggccgaaagcgcactgcatggttataacagcagcgtcaccagtgcctggaatagtctgcagcaatttggcaccaataaagggaacagtgcatcaacaacgaccggggccgatactaccgagtcttcgcaggattcgatggccagaagcaaaatgtggaatgcggttgttgctaatgcgaaagccaacaacattagcaatgagcagtctttccagaatttaatggatgagtcaagaaaaagaacaatatcgggtgagttgtatggcggtgctaaaattgattcttctgatgcagctcttgggaaaatagggagctgggttaccggaggcagtatatttggtggtgttaaagtggcagccagtggtgccgccagtacggggtcaacggatactgttggacgatcaggtaggcattctgaagataatcgccatgataccagcactcaggcggcgaaagactttaaggaagcatccgattactttaccagccataaaacaaccacatcaggcaataacaccgataacaatgccagctcgcgtgttgaccagtttgccgcgtcactctccagtgccaaaaacagctatgaccagtatacaagcagccggacacgcagccacgagtacagtgagatggcttcgcgtacagagagcatgactggccagatgagcgagaatctcactcagcagtttgcgaactttgttcagcatcgtgcacctcaggacgctgaaactattctgaccaacaccagttctcctgaagttgcggcgcagcgtgaagccctggcgcgtgaattcgtcaaagagcaggttgaacccagggttgatggtgcgtatcaacagggtcgcgaaagcatcggtcagaatatgtctggggtgtcaggcggtggcgacaatggttcggtcatggcggactacggacataatgccggccgtattgatgccatgaccaaagaggcgggtattaaggatgatgtggggcaaaaagtggatgggatgattgcagagaataaacaacagcatcaggaagcccgagaaaaaatacaacagcaaggtgttgaggtgaaaaaagagaatgctgaactggaaaaagaccacaaaacaaaagaaaatgatttcaaaaattcttataatgataagaaagaacatcaaaccagactgcctggcgcggactcaaccaaagagctactggataaggcaacaaaattagaaaacgataaatcaaagagatag

SEQ ID NO: 221861 - DNA, 534 bp, Klebsiella pneumoniae; identical to SEQ ID NO: 171704

SEQ ID NO: 221862 - DNA, 2310 bp, Klebsiella pneumoniae
atgagtttcaatgccaaagatatgacgcagggcggtcagatcgccaatatgcgctttcgcatgtttggtcagattgccaatattattttctacgtgctgtttattttattctgggtgctgtgcggactgatgctgatgtaccggctcagctggcagacctttgtgaacggctgcgtatactggtggtgtacgacgctgggtccgatgcgcgatattattcgctcccagccggtatacaccattcaatattacggccagtcgctggaatatacctcagaacaaatcctggccgataaatatactatctggtgtggagagcagctgtggactggtttcgcctttgctgccgtggtttctcttgttatctgtatcgtgacgttcttcatcgccagctgggtgctgggccgccaggggaaacagcagagtgaggatgagaacaccggcgggcgccagctttccgataaacccaaagaagtggcccgtcagatgaagcgtgatggtgtggcctccgatattaaaattggcgacctgcctatccttaaaaactccgaaatccagaacttctgcctccacggtaccgtgggttccggtaaatcagaagtgatccgccggctactgaattatgtccgtgcccggggcgatatggccatcatttacgatcgctcctgtgagttcgtcaaaagctattacgacccgtcactggataaaatcctcaacccgctggactcgcgctgcgcggcctgggatttgtggaaagagtgcctgacgctgccggacttcgacaacatctccaacacccttatcccgatgggcaccaaagaagacccgttctggcagggctccggtcgcactatctttgccgaaggcgcgtatctgatgcgcgaagacgacgatcggagctacgagaagctggtcgataccatgctgtccattaagatcgacaagctgcgcgcctatctgcagaacacgccggcagcgaacctggttgaagagaaaattgagaaaaccgccatctccattcgagctgtgctgaccaactacgtcaaggctattcgctacctgcagggcattgagaagaacggcgagccgttcactatccgggactggatgcgcggcgtccgtgaggaccgacccaatggctggttgtttatttcctcaaacgctgacacccatgcctccctgaagccggttatctcgatgtggctgtcgattgccatccgcggcctcctggcgatgggcgagaaccgtaaccggcgtgtgtggatcttcgctgacgaacttcccacgctgcacaagctgccggacctggtcgaaatcctcccggaggcgcgtaaatttggtggttgttatgtgttcggtattcagtcctatgcccagcttgaagatatctatggcgttaagcctgccgccacgctctttgacgtgatgaacacccgggccttcttccgctccccgagtaaagagattgcggagtttgctgccggtgaaattggtgagaaggaaattctcaaagccagcgaacagtactcttacggtgctgacccggtgcgtgatggggtgtcgaccgggaaagaaaaagagcgggaaacgctggtcagttactccgatattcagacgctaccggacctgtcctgctatgtcacgctgcccgggccgtatccggccgtgaagctggccctcaaatacaagccgcgtccgaaaattgccgaaggatttattccccgcactctcgatgcgcgggtggatgcgcggctcagtgcgctgcttgaagcgcgggaagctgaaggcagtcttgccagggcgcttttcacgccggatgccccggcatccgggccagatgatgccggcagtcacgccggtgaacagcctgagccggtcagtcagcctgcgccagcagtaatgacggtaactcctgcaccggtaaaagcgccgccgacaacaaagcgtccggcagcggaaccctccgccaggacagctgagcctcccgtcctgcgggtcacgaccgtaccgttgatcaaaccaaaagcagccgcagcggccggaactgccgcaacagcatcctctgccggtacccctgctgcagcggcaggcgggacagaacaggtactggcgcagcagtccgcagaacaggggcaggccatgctgccggccggtatgaacgaggacggtgtgattgaagacatgcaggcgtatgacgcctgggctgatgagcagacgcagcgggatatgcagcggcgtgaagaggtcaatatcaaccacagccaccgccacgatgagcaggatgatctcgaaattggagggaatttctga

SEQ ID NO: 221863 - DNA, 1077 bp, Klebsiella pneumoniae
atgccgcgacagcttctccgtcgtgcgcgccgcatcctgcgccgagtacagccggaggtgacttccgctctgtgccagctggttgagggtggcgttatccagctcaagctgcgtcaccgacgcaaagaccgttgccgtctcgctaaccgacctgccgggactttccacccagccgtggccgactttaataccgtcaaacacgcccgcgcccgcggccagggtctgcgtggttttctgccccggccgctgtaccgtcagctgcccctcctccactttcatcaccgtgatgctttccccgcctttcaggcgtgtgtccggtatcttcccgagcaccgccagacgttccccctctgccaccggcagtgtatctgcccggaacagcgtccactggctgtcgaccgcggaaaccttcagatccagacgacccccttcccggtctttcagggtcagcatattgctgctcgcggtcacccggtcaatgacaaagcgatcgtgcgtccggttctccggatcccagcgttccatcaccatcccctcccggtaataatcccgcacgccccggcttttgctgtccagccacaccggcgtcagggctgtaatggtcgtgtctttctcacccagcaccccctcctgtctgagggagtcacggatgaggccgttgagtacgctctgttcacgggtcccgctgatttgggccacgctttcctgcccttcacgcacgctgacggcaaactcctgtgccagccggctgtagcgtgctcctttatccggttcactgatgatgtcggctgtggtctgatggccaccctgccagcgatacgtattcacgccgctgtccttcagcaccgtcagcgcgctgccggtcccgctgcgcttcccgctgtcggagagcaggacctgcacgttatggcgcatcgcgccatcgagcagggaaatcgtttccttcaggctcagcttctccgcctgatccacgatgagtgttccgcccggaataaacgccgtcccgtcctgcagggcggatttaccggtcaccgtttccccggccagacgcacatcaccggcgagaaaatcacgtga

SEQ ID NO: 221864 - DNA, 1218 bp, Klebsiella pneumoniae
atggatcagactgttcagcgcccgccggtccttattcagatgggtgatcaccagcgtctgcgactgtgcctccggggtccgtccggtatagtccttcaccagcgcctcgtagagtgtcgcgggctgaccttccggcagggttttcccctcgctcagcgccttttctatcgccttttcctgctttggcgtgaattccaccacagaactgcccggcgcccatgcgccttcttttctcggcacctgctccggcgtgacctgctcgatggtggtcagggcgcggtgcacatcccgctcaatcaggctgtagaccgccggtcgcagctcaggcatctggcgtacaatctctttcatgatggcaacgtcggcggcgctgcgctgctgcgtcagcctgaacggctggcccgacgcgatgggcggcagctggtcggtatccccgctgggcaccgcccgtccaccgccggcggcgatgagggagtgggcttttgccatatcggccagccccaccatcgagctctcgtcgagcaggaacagggtgttgctgaaatcgggtgtctgcccattgcgctgcagcagctgcgtgtcgtggaggaacgacgccgtcgtgcgcgcatccacgccagcactctgcatttccccgaccgcgcgatgcgtcggcgccagaccgatgacgcgcgggcgggtctcttccggcagcagactgatggcactcatgactgcccggaactgggtggttttccccaccccggcatacccctgaaccaccgtgaaccggtccgtgctctccagaatcatccgggtcgccgcccgctgtccggcggtcaggtccgtcatcagactggccggcacgcggtccatcaggggggccaccgcgcctttaccttccagcacgtgggtcaggatgcttttttcggcgtcccaggtctgacgggaaatcagcaggtcattgccgtagccgtgcgccaccggtacattcagcaactgccccgacctgatttgtgcctggatggtcgtgtcgatgtccgccatcgaaaccttcccgcccccggtttccattgccgtcgccagcagctggggccgggagaaggtcaggtcctggctctcaagcagcgggatggccaggtgaatggcctgttctgccggggtatgcagcccggccttctgctgcgcaatggccgtatccaggtccgtctcgccggatcgggacttcagctgctctga

SEQ ID NO: 221865 - DNA, 369 bp, Klebsiella pneumoniae
atgaaatttctattatctatcagtttattaagcttctttctttcaccggctttcgccggcacagcggtaaaattgtcctgctctttacgcaaaaatgtgaccatctcgcgtttccattaccagctatcgaccatgaagtggggcgaccatttccaggtggcttccggcatgcgtcaggcgcagaccaataatcatattccctatcgggtaaccagctttcgcaacggcgacgatctggtctttttcccggacagtcaggagtactttttcttctactcgggaatggcgacgccggaccgttgcgtggtggaggaacactacgagtatccggtcacacagctgccgtattataaaaagcccgctgcctga

SEQ ID NO: 221866 - DNA, 894 bp, Klebsiella pneumoniae
atgattgatttacgccagttgaagtactttgtggtggtagcggaagaggagcatgttggccgtgccgccgaacgcttacatatttcgcagtcgccgctcagccgccagatagcccagctggaggaacgccttgggctgatgctgtttgaacgtaaccagcagcgtattcgcctgacggcggacggacagacgtttttggccgaaacgcgctcgttgctgacccacgccaaccgtctcgagtcattaggtaaacgactggggcgcggcgaagacggcgggttgtgtatcggttatatcgaaaacgccatgcactcgggcgtgctttcgaccgcgctgcgcattctgcgaacgtcgcgcccggacgtgcatatagcgctgtatagccagccgcccgctacgcagattgagggcctgcgccagcgcagcctggatttctcgctggtggacatgccgccttcagcgggggaacaggatctggagtacacccaggtgcttgatgaccgaatgctgctggcattaccgcagaatcacccgctggccgcggcggaaaacttgcagccggcgcagctggccgatcagcagtggatcgcggttatccataacgacgatgcccattcgcgcgatgatttcgtcgccgcctgcgtgcgcgcgggctttaatccggatattcgtttggaagccggagagccattaacggccctggggctggtggctgcgggactgggcgtggcgctgatccagcacagcctgcggcataacgcccctgagggggtcgtgctgcgggaaattccgtggatgagctattcgacccagctgtgggcggtatggcacaaagccaaccagcgcccgctggtgatgcactttcgtgaggtgctacgcggcgagaataattag

SEQ ID NO: 221867 - DNA, 1011 bp, Klebsiella pneumoniae
atgagcatcaaacatattctgccaggtaacatcggtttaggcggcgcgccgctgggtaacatgttccgaaacatcccggaagacgaggcgcacgccaccgtcgccgccgcctgggatctgggcgttcgttacttcgataccgcaccgctgtacggctccggtctttctgaaatccggatgggtgaagcgctctcgcaataccctcgcgaccagttcgttctgagcagcaaagttggccgcatcatgcttgatgaaatggaagacccggccacgcgtgattttggtgagaaaggcggtcttttcgaatacggcctgaagaacaaaatcctcaacgattactcggccgacgccaccctgcgttctattgaagacagtttaaaacggctaaaaaccgaccatcttgacatcgtatggatccacgatccggcgcaagatttctacggcgacagctggctggagcagttcaacatcgcccgtaccggcgctttccgcgcgctgacccgcctgcgtgaagaaggcgtaattaaagcatgggggctgggcgtaaatcgcgtcgaaccttgcgaactgaccttagcgctcgacgagccgaagccggatgcgttcctgctggctggccgctactcgctgctggaccacaaacgcgccctgcagcgcctgatgccggaagcgctggaacagaatgtcgatatcgttgtcggcggcccttacagctcgggcgttctcgccggcggtgaacacttcgaataccagaaagcctctgcggcgatccaccagcaggtggcgcacatcaaggccattgccgcccgtcatcaggtggatgtgaaagccgctgcgctgcagtttgccctggctcatccggcggtggccgccgtaatcccaggctccagccgtccgggtcgtatggcggaagatctggccgcgctgaaagcgaccatccctgccgctttctgggaagagatgcgcagccagaatctggtggctgataacgcgccactgccgattcgttaa

SEQ ID NO: 221868 - DNA, 798 bp, Klebsiella pneumoniae
atgaaactggatctaacccataaagtcgccgtggtgagcggctccacttccggcatcggactaggcatcgctaaaggccttgcctgggcaggcgcgaccgtggtcatcgtcggccgtcaacagcgcggtgtcgataccgccatagcggcgattaatgccgaacatcccgatgcgcaactgcgcggggtggtcgccgaccttagcactgaagaaggcgtcagcgcgctgctcgccgccgagccgcatgctgatgtggtggttaacaacctcggcatctttaacgataaagatttctttagcgtgccggatagcgagtggatgcacttttataacgtcaacgtgctttccggcgtgcgcctgtcacgccactacgcccaggggatgatcgataacggctggggacgcattattttcgtctcctcggaatccggcgtcgcgattcctgccgacatgatcaactacggcgtgaccaaaagcgccaacctcgcggtctcccatggtctggcgaaacggctcgccggtaccggcgtcaccgttaacgccattctgcctggccccaccttcactgaaggtttgcaggagatgctggcggaggccgctacgcagtctggccgcagcccgcgtgaacaggctgatgaatttgtaaagaccgcgcgcccaagctcgattatccagcgggcggcggacgtcgacgaagtggcgaacctggcggtatatctcgcctcgccgctctcgtcggccaccactggcgcggcgctgcgcgtcgatggcggcgtcgtcgacaccctggcaatgtaa

SEQ ID NO: 221869 - DNA, 417 bp, Klebsiella pneumoniae
atggctactaccactgtatctatcgaaatcccggcttctgtcgaccaggtctggcaactgatgggcggctttgactcgctgcccgactggctgccgttcatcccgaaaagcatggtgagcgaagggggacgcgtgcgtacgctgaccacatccgatggcggcacggtcattgaacgtctggaagcgtttgataaccgccagcgcagctatagctactcgatcatccaggcgccgttcccggtagtggattacctctccactatcgcggtagtggcaactgccgatagcaatatcacccgcgttgagtggtccggcagtttcactccggttaacgtcagcgacgcggatgccgaagcgctgttcagcggtatttatcgcgacggcctgcaggcgttgaagaataactttagcgcctga

SEQ ID NO: 221870 - DNA, 1008 bp, Klebsiella pneumoniae
atgaccgttcgtaaactcccctctggtaaatggctgtgtcagtgcttcccgcatggtcgtgacgggaagcgtattcgcaggcagtttgccactaaaggcgaggcgctctcttatgagcgccgcaccatgaataatgcaaccccccaggagttaaacgataatgcagtgacgctgtctgctttcgttgagcgctggtatgaaatgcacggcaaaacgctgacatctggcgatgagcgcaaagtgaagctgctggccatctgtgagcgccttggtgatcccctcgcctctcacttcgataaaaatacatttgcggtttatcgcgaaaaacgattggccggtgagtggaatcagaaaggcaaaatgaaactcagtgaggcgacggtaaatcgcgaacagtcatacctgcacgcggttttttcagagatgaagcggctgggtgagtgggagggagataacccgctatcaggtatcaggcaattcaaggagggggatcaggagttggcttttctgtacgaggaagagatagagcgacttttgacggcttgtgatcaatcggcaaacaaggatttgggggtcattgtgcgaatctgcctggcgaccggcgcaaggtggagtgaggcgcaggatttaaagcaatctcaggttctgcctggacgattgacgtttacgcagaccaaaagcaaaaaaaatcgaactgtaccgatttctgaacaactacagaagttgctacccaaaaaacgcggagcgcttttcgcgccagcatacgaagccttcaaatcagcgcttacaagggctgctattgagttgccaaagggtcagcgcacccatgtactacgtcatacctttgcgagtcactttatgatgcgtgggggaaatattttggtgcttcagcagatactcgggcacagtacgatcatgatgacgatgaggtatgcgcatttcgcccctaatcatctcgatgcggccattgcgttaaatccatttgataatcgcgagggggtcaagtaa

SEQ ID NO: 221871 - DNA, 867 bp, Klebsiella pneumoniae
atgaaaactatatgtttcaccggttttggtaaaaatgaaaaaaacgaactgattgaagttgcaaagcagaggggttatagcgtcaaaggtgatgttattaagggtctttgctacctgtgctgtggcgaaaacgcggggccaagtaaaataaataaagcaaaagagaatggttccgagctgctatcagcagctgaatttctgaacctgtctcccctttccgatgtggttggttgcgacatgagtcccgacatcccgccaacaatgaccatacatgatgagcacgagctcttagatctgctctggtctttgattgatgccaaaaagacgatatccattgtttatcacggtggcggaaccgcaggcgcagaaagaagcattacccctctaactttgctagataactttacgctgcgggctatcgatttatctataccaagccatcccataaagacatttagtgttgagaagatcgaggtgtcaggcattgaaagattaaacctgcccccacaccaaagtaagaagagaaagaagaagcaatattcagtgggaatgtataaaaatatcgcggatgttcacgcggcatttgttgatacgcttcaaggaatggggtggcatgttgcaacgtatatggatgattctggcttaggtagtcgcctggatgtttgtgatttttttaaaaatggaaagccgcgcaaaaccccagtagtaagcctatcttatcaaccagaaaacttgacccgcccctttgtttgtcggtgtcgtgatatcgaatttgtatcaacctacgctcaccttgatagcgccgctgaaatgttcatatctttggcttatgcaggctccgaagatgagtccgaggtgcggggatga

SEQ ID NO: 221872 - DNA, 630 bp, Klebsiella pneumoniae
atggcggtaaattcaactggtgagcaaaatcgtatttctggccgtgattttaatgaaaataatatccaaatagataaatttgatggtcgtcacacaattaacatcgcaatcccttcggaaaagcatgatgaacggccactcgtaaaagcacagcgcaaagaacttaataccctcgttgccactgtatccgctacctgtggcggcgaagcatatgaaatttggcaaaaggtgcatgctgaaataggtgtctccagcattgaggaaatgactgccaatcagtaccagaccgctattagctttttacaggccatgatcgggcgaggcaaggataaagatgccagtaaagccctggttagccttctgctccgcaatagcgaagacagcgagatacggcaaaagttaattcgttactgccatgtcaacttcgggacgggtaggttaaatgatcttacacgcgctcagctccagatggcactctcatggctggatcaacaaacacaaattaatccctcatcacaaggggactcaatatcctctcaattcagtttcaccacgttgttcaaatcttacccaaaagaattcattgctgtttttgtagtgggtctcctgttaggtgctcttattttctaa

SEQ ID NO: 221873 - DNA, 612 bp, Klebsiella pneumoniae
atgttcgccgctgtgcgagattccttgatagaaatctcttcgagatcggcgcgctcctcctcggtaagcggcaccgctacgcgggcgctgcccttagagccacgtggcaacctcgctcttggtaggtttttttcttgtgtcatagtggtatgttgtgatcatctaagtgttggtgaaaacattatgagatctatagatctcttttgtcaaggtggacatgtgagctttacatctcaatgcgtatcaagattgaagtctgaaagaaagcgtttatcccttaatcaagctgatgccgcagccctatgcggggtttctcgtgagacttggggaaaatatgagcgtgggtcgatggttccgggaggggatgttttgctctcttttgcgattaacggtgcgaacgttcaatacatattgactggtgaggaaagtggtggagtcgtgcttacgcgtgacgagttagagcttataagccatttcagggctgcgtctctttcaatcaaagcggcggccttggcggccctaaccgctggcaactccgcgtcaaactccattaacgtttcaggtcagggcaaccgtgtggctggaagggattacaacgaaaataagaagtaa

SEQ ID NO: 221874 - DNA, 204 bp, Klebsiella pneumoniae
atgtcaggcgtaactatcaatttaaacgttgccgcgccttatttatctctaaaggagtattcaaggattacgggtattccgtttgagacatgccggggcatggtgaaggacgggcggatcatcatccgaccaaaggagctttccggtggtaaggttgaagtaaatatgattgccatgctcaaggatgctatcgcgaatagctga

SEQ ID NO: 221875 - DNA, 264 bp, Klebsiella pneumoniae
atgaataaacgctactcacagcatggcaagtgtgcgggaaatattcgcatcacatcccacgatagcttgccgaaagtcgtctggataaataagcatgccgggatttgttgcggcttcaccatccgtgtattaccgcgcagggtgggtaagaaacgttatcaaattatgaaagatggtgactctttcggaattgactttgctttatcggaagcacgcaaaacgatagaccggattattaataacaaccgctttatcattcattaa

SEQ ID NO: 221876 - DNA, 273 bp, Klebsiella pneumoniae
atgttcaccgaagagaagacttcatgggaacgggaaatgctgatccgcgaggcagtggaaaacgccgaacagggatttacggttcacctgagaaacggtgcgcgtattgccgttagccctgacagcccgtcaatagatttaattatttacggtctggaaaaaacaattcgtggaaatcatgagcgtgcgcgaatgacatttattgattttctgtattactggcatgagagggtattcaagtcaattaaacgaaagccgcgctctaaccactaa

SEQ ID NO: 221877 - DNA, 228 bp, Klebsiella pneumoniae
atgcatccgcgtctctccgtcatttgcagcgccccgctgccggtctgcaacagggcgctagccgccctgaagtgcttcgcccgcggtcagcgcaatttctctcgcgtcatgccgcatgcctatctcgtgatccgcattggtcgccgctggcgcttgctcagcaagaacggcggccagcagtggcggcttatgacccacgaaacttacaaccaggaataccgcaaatga

SEQ ID NO: 221878 - DNA, 195 bp, Klebsiella pneumoniae
atgaagcgatcacctgaatacgcccagggtgcattggccgctctgcatgaagccaaaacactaaatctcgcaaacgcaacagcgctcggcgtgctggaaggcccggaagtcgcgaagaccctcgttaacctgatgaatctggtgcttgacccgctgatccagaaatacaacgcaatggaggtggaaagtgattaa

SEQ ID NO: 221879 - DNA, 1017 bp, Klebsiella pneumoniae
gtggttgcttattacaacgaaatagacccccacgcagcgcagcatctgcgcaaccttatcgacgccggtcatattgcgccgggcgtcgttgatacccgttcaattgaggatgtcccccccaatgaccttatcggattcaatcagtgccatttcttcgccgggatcggcggatggtcgcttgccctgcgtcgcgcaggatggccagacagccgccccgcatggacagcatcatgcccctgccaacctttcagcgcagcaggcaaaggaaaagggtttgctgacgagcggcacctatggccctccgcacattggcttgtcggccagcgccgccctgtcgtggtttttggcgaacaatctggcagcgctgacgcgaacgactggatcgaccttgtacaggctgacgtggaagccctgggctatgccttcggggcggttgcgtttccgtctgcgagcgtcggcgcgccgcaccagagagaccgcgcttattgggtggccgacgccgattgccagcaatgggaggggcgcggggaatttcaaccgacaggggggggtaaaccttcagacagcagcattattagcagcatggccgacaccgacggcaacggacggcaagggcggctatcagggcggacggatccgcaacgggaagttctccacggacaggttggatgtggctgcgcagcttgcgggctggccaacaccaaccacgagcaacgaccgctcaccctgtccgcaagaagctatgcggacgtatcgcgacaatggaacaaagattcagaagcggctgcaggatgtggcggcgctatgcggcccggcccggttaacggcttctggagagatgctgactggctctacggccgggatggatggtggaggccagttagacccggatcattcccgctggctgatgggattcccgccagagtgggaagagtgcgcacctacggaaacgctatcaacattgaagcggcggcagcgttcataaaatcttatatggcagcggtagatcatgtctga

SEQ ID NO: 221880 - DNA, 2595 bp, Klebsiella pneumoniae
atgtctgattcttccgctttagcatggagctggaacgccagtcggcaggctattaaccccggcgatatcgcagattctgcaattgaatatctcaccccaaaaggagagcggaggacgctcgcctatgcggatctggttgataccgtttatcgtgctccgatgcgcccgcgcgagggggctgcgcgggaagcattcgatcgcaaaggccgcgcccactacctgcgccgccgggttcagaccctgccggcatttatccgcaagcgattctctctgcgcctcgaatccctcgagcgccgcgacccaaaagaggccgtgcgctggctgttcaacacgtttgagcgccatgtgttacgccgagttgatgcggtaaacgctcaatacctgccacaaagcgcacttccggcaatcctcctgcccctgcgtgatgactttcatctgctgccctgggcggacaaaaagcgcctgaaacgactggcctataagctcgccaacctgatgaaaagcgagtttatgcgcgagtttgatttccagtacgagaaaaccgctgatgtggagttttccacgctctacgcctacggctacatcgccagcaaggcaacaatgctcaatatcgcaatccctggctggagtaagtattgcgaagaggatctggaggccgaagaggcgctgagagctgttgcgcgccttcagtcggaaaagtggtggttagggaaaatccgccggatccatgactgctggcgagagcatctcatgatagccgcgggctacgtcagtaaagtggcgtcgccatattgctctgatccctgcttcagggagtggatagcgcagaaaaaagcgaactttgaatacctccaggccatggagctggaagatcaggataccggcgagcgtacctcgctgcttgataaggtcatggggagcacatcgaatccgaagatcgcccgtcatgagctgatggtgcgcatgcgtggctttgaagatatggcgaatgacatggggctggtcggtatgttctacacgctgaccgcaccatctcgctatcactccactcatgtgcattccggcaagagaaacgataagtaccagaatgccagcccgcgcaagacgcagaaatacctctgcaaagtctgggcgcgtgttcgtgcaaaatggggccgagaggggatccgcacattcggttttcgcgttgccgagccgcatcacgacggaaccccgcactggcatctcttgctgtttctccacccggaagaggtggagtttgccactgatattttccatgaatacgcgctaaaggaagatggtcacgaaccgggcgccgaagagcaccgctttactgcaaaacctattgaggcggagcatggcagcgcaacgggctatatcgctaagtacatctcgaaaaacatcgacggctatggcatggatggtgagctagatggtgaatccggccagccagtcaaagagatggccaagcgcgtgcgcgcatgggcgtcacgctggaatatccgtcagtttcaacagatcggcggcgctccggtgaccacatggcgcgagctgcgccggttaggtaatcgcgagctggttctgcatccagagatcgaagaggcccgcgcagctgctgacgcgtcggactggccgggctacaaccacgcccagggcggcccattggtatctcgcgactgtgtgcgtgttcgcctcaattacgaatacaccgaggacggcaatgattatggtgacacggtcgccaaaatcaccggcgtctattgccccttcacaatccgtgaatctgtcatttttacccgcaccactgattacaaaattgtgccgaagcgtaagccgtcgccggtcgaaaaattgaccttagaaggccgcgcagcggcccctcggagttctgtcaataactgtacgggccgcgccggattggacgaaaaaccaccgtcagaaacggcggtgccagctgataaaaccgcgccagacgacagttcagtggcagaacttccgctgaatatcgatgttttgaggcgatattcacgccagcaaaggcaggagatcaccagcaggttaagaaaatccgcccgggaaagctcagaccaagccttcacacgcaccgcgcgcggcctgcgcacgtcgattgatgatgaatccgcgctggcgtgggggccaaaagtcactgctgcgaaagatatgagcctgacgtcggaagaggcggagcgccgctggcgggagcagctgcagatcgaggcggaacggcgcgcagataactacgcggcggcggttgcggaataccagaagaaaaaggccgaagccgcattgcgacaggcgcagaaacaggaagcgacgcaaagacacggcgtctctgaagagatgatcgccagcatcggcgcgcagctgcgcgactgccggattttcgtcagtgatgacgtcgtgcggtcagtcgccgacggcgcccgtgtccgccacggtggcggcctgctcgcggcggacaatggccggttgcgtgaagtgaaagtatggcgggcaggagagaaagataaaaaaatcagcgagtgcatttctgtatataatttagttactcgttggaagcgagcaatcaggtaa

SEQ ID NO: 221881 - DNA, 1002 bp, Klebsiella pneumoniae
atgaatgaagaatggaaaagggctgtaattaatttggaatgtgcgactgatagtgaacatgtaattgatcaactaaaaagaagtgaagagtggagactaaaatatagtaaaggtgagatttcatttgaagaatacactaaccaatcaaggattaaatctcgcgatgtaagaatcactgggacggctatttttattgttcataacgagagacgatatttattgactgcaaggcatgttctttttgatcaatactccgcagaccgagagtatcaagagatgattgcgacacacgaaagaatgcagattcctctgaataacgataagttagctatctatcatcaacaaaaacttttcagaatattcgacattatttttagagtgccttcattagatgaggtggcggcggagaatggttttagaagtcctgagtttttaatgaatcttcgcggtgaattgcctcatttctttccgtacacattctcaaatcctgatttagatttggctattatttcattagatcagagaaataaagatttcgctgagcaactaattgatttaggatatattcccatttcttctgaattaatcgtagatggtccgaccgaagaaggtgcagaagtttttacagtgggttttcctggcgcaacatcattaataggccagatgaatcaggatcctgcaaatgcccaatggtcatcaagttatgtgtctctgccagtgttcagttggggaagggtgtcgatgttgcatcagcaacttccattttattggtgtgatatgagtatctatccaggcaacagcggtggtccgttaattgagaatggaaaactggtagggattgtcagtgcacaagctatattgcctatagagggtgcaccacagttaagtactagaattccatttggcagaattattaaaactgagtttgttaagcagttacttaaagaacaagaggctaaggataaagcacgatataactttgtcgaactgggaggtgcataa

SEQ ID NO: 221882 - DNA, 396 bp, Klebsiella pneumoniae
atgaaagcgaccgccattcttgccatcgtgatgtttgtcctgctgattgccgccgttagtggctttgcgtggcaaagccataagcgcgaacaggctgagaaatcactgaccagcacccgggaagaactgaaacaaaccggcgacgtgctgaccgaggtcagggcgttacgccatgacgtcaaccaggtagaagcagggctgaagaagctaaaccagcagcgcaccgcaacgggagagcaccgacgtgaaaacatcaaaaccgcactggctggtaacggctgcgccgtggctcctgtgcctgttgctggcgctgacagcctgtaccagcgagccgaagaagtcaacgccgcagattattcaggagcccttacccgaaagcctgacggcaaaaactga

SEQ ID NO: 221883 - DNA, 459 bp, Klebsiella pneumoniae
gtgaaaaaagctgaactgctgcgcgctgcgctgatcgccggtaacacctggtgcaaagccaaccctgaactgatcaccgtctgggtggagaaggggcatattcagattgaagcgaccggcgaagcctcgttcatgtaccactacaccattcaggtactggcgatggattttcccggccagattgacgatctgatgctcccgttgctggcgtgggtatggcagcaacagccagacctgctgctgaacccggacaataaccgcaaggtggaatttgacgccgatatcgtcaatgacgacgtcgccgacattctgtttaaggtgccggcctgggagcgcgtcatggtgacaaacagcaatggcgggccgaaggcggagcatctggccgaacagcacccacgcttcaacggtggcgagtgggaaatggtctttgatccggaatccggaggcgagctggtatga

SEQ ID NO: 221884 - DNA, 642 bp, Klebsiella pneumoniae
atgagcaataacgacgcacttttcagccagcttgacgaggtatttgcagccatcctgtcgggtacgtcactggcagggcggcaacgcaccgcccgcagcgtcggcacgatgttgcgccggagccagagccagcgcatcggcagacaggaagcgccggacggatctaagtacccgcaacgcaagcaacggatactgcgcgcgcaggcgggaatgcgttttatctggcagggggaaacccgccagctgcgcaactggcgggccactcgcggacgccacgggcgcatgctgaccggctttgatatcgacagaggggatatgcgttcgttttatcgggaagatattgaacgctacctcgatatcagcttcagaccagccagccgcaatacaaccaaacgagagcagatgtttcgccgtctgcgtaccgctcgttttcttaaaaccagcgccaagcctgacggtgttgaagtggggtattccggcgtggctgcgcgtattgcccgcgtccatcagttcggcttgcgtgacaaagtcaacagcagcggcgcaatggcgacctatccccgccgcgagctgctgggcctgagtaaggctgaccgcatggcgatagctcgccatgtgatcgactcgctgggggggcgctga

SEQ ID NO: 221885 - DNA, 579 bp, Klebsiella pneumoniae
atggagattgccgagctgatccgcctgctggagaacatcgcccgcaccggcacggtgacggagatcgacgaggaaaaatggcgcgttcgcgtgcaaagcggcgagctggaaaccacttggctgcgctggaacgcacagcgcgccggagcgtttaaggtctgggtgccgccgtccatcggcgagcaggtctggttcctgtgcctgggtggcaataccgacgtcgcctttatcggcggcagcctgtacagcgacgacaacccggcaccaggcgcgtcgcgcaacgagatggtggtgacggcgccggacggcgcaaagttccgctatgacgcggacgcgggcgcattgcaggtgcggggcattaaatccgccgtggttgaggcgtcagtcaaaatcacgctggatacgccggaagtggagtgcgccaacctgctgaccaccaaaaaactgaacgtcacagaaggtggtgagatgcgcggtgatatcacccacagaggcggctcactctcttctaacggcaaggtactccactcccatagacaccctggcgacagcggtgggcagacgggggagccactatga

SEQ ID NO: 221886 - DNA, 369 bp, Klebsiella pneumoniae
atgacagagagctatcgcggtatgaatgccgcaggcaccggtacgctgactgacgaagatcatgtgtggcagtcggttaacgacattttgctgacgccggttggtagtcgcctgatgcgccgtaactacggctcactgtgccctgatcttatcgacagcccgcaaaacgacgtcacacgactacagctgatgagcgcggcagtgattgcactggcggcatgggagccgcgcattgtgctggataccatcaacgtgacttattcagccagcggtgctgtgactgctgcactgtccggcatgctgacggaaaccatggaaaaaagcacccgcgcggtgacattaaggggcgctaacaatgccaacgattga

SEQ ID NO: 221887 - DNA, 900 bp, Klebsiella pneumoniae
atgccaacgattgacctctcgcaactgccgaagccaaccattatcgaagaactcgacttcgagaccattctcgccgaggtgaaagtggtcatggtagcggcatttcccgccgatcagcggtcagccgttgctgctgcgctgggtctggagtccgagccactaaacatcattgctcaggcgatggcgtatcgcgaactgctcctgcgccagcgcatcaacgaaggtgcagcagcatgcatgctgagtcactcgacaggcgacgatctggacaatatcgcggccaatctggacacggagcgactcaccataacgccagcgaccgacacaaccgatgcggtgatggaaggtgatgaggcgctacgcctgcgtgcgcaggccgcatttgaggggatgagcgttgccgggccgtcggcggcctatgagtatttcgcccgcagcgccagcggcaaggtcgccgccgtccgcgcaacgagtccggcaccggccgacgtggtcattgccatcctgtccagcgacggtgacggaacgccatcagccgaactgatcgcgacggtgcaggcagcggtcaacgatgaagatacgcgcccgcttggcgatcgcgtgacggtacggggtgcggaaatcattgaatatgcgattgatgccaccctgtatctgtatccgggaccggaatcggaaccaatcattaacgccgccctggcctcgctgcgaaccttcctgaccagcgccgataaaaaaattggccgggacgtagtgcgctccgctatttcggcggctctgcatgttcagggggtgcagcgcgtggtgatcaactccccggcaatcgatctgcagatcgataacacgcaggtcgcgcgcaacacaggctacagcgtggaaaacggcggaacggatgagtaa

SEQ ID NO: 221888 - DNA, 597 bp, Klebsiella pneumoniae
atgagtaactctcttctgccgccatcttctggggcctggcttcgctataccgaggcaggcaccgccaggctgtcagcgatcactgttgcgctacgcacgctgtggacaccgacagcctgcccggaggatctactgccctatctggcatgggcattatccgtagaccggtgggacaagaactggccggcagcgcgaaaaattgccgccatccagaaatcgtactggctgcaccggcgtaagggcacacgcgccgcagtacgccgcgtcattgaagacatggggttttcggcgacatttgcggagtggtttgacgtcggcgacgagcctggaaccttccgacttgaggtcgatattaacgaggtcgggctgacacaaaaaacactggccgaactgaatcgcttgattgacgatgcgaagccggtcagcaggcatccgtctcagcttaatatcgcggcaaaggtagagggagatatctggatgggctcaacactgtgcagcggcgacattatcagtatttatccggccgattttgaggctgaggacaatattacgtacaacggcgtgatttttcacgacggcaattttaattacgggtaa

SEQ ID NO: 221889 - DNA, 351 bp, Klebsiella pneumoniae
atgcatcaattaactgtatttgaaatggaagaaatttctggcggcgcgctgacagatacactgtccgacgtcgcgacctgggttgctaaagaaattggtgctgtagcgctgggtgtttcaatcggtgcaatcatgggcactgcatttgcaggacgctggggtggcgtgagcggcggtatcttcggtatcggctcaatcggacagcttgtagggatgatttctggggttatccttggtggcgtttgctttggcgcagctgctggtattgttggctgggatatgactctggaatatgcgcagggcgcaatgaatgctatctatgatggcaccttaaacttctggagcaattaa

SEQ ID NO: 221890 - DNA, 435 bp, Klebsiella pneumoniae; identical to SEQ ID NO: 177759

SEQ ID NO: 221891 - DNA, 567 bp, Klebsiella pneumoniae
atgactcaggcgcgccgaccatcgccgctgcagcggcgggtgctgattgtgctggccgccctcgatgcgaaacggccgggcccggtggcgacgcgggatatcgagcgggtgctggagcagggcggggacgccccggtgtacgggccgaacctgcgcgcctcctgccggcgcatggaagccgcgggctggctgcgcaccctgcgcgccccgaacctgcagctggccgtcgagctgacggaggccggtcgcggcattgcagaaccgctcttccaggcagaacgcgaggctgaaacggcacgacaacgactgacagacgtccggcgtctgccgttacgccagacggctgccggtgacgcggtggagctgcagctggatgacggccattacaccatcagggaagcggcctacgtgatccgtctggacggtaccacctgtctgcagctgacggatgccggcggcatacgccggataaaagagggcgatcccctgcaggtggccagctggtatcagacctgttttgatgcaggcctgccggtcaccgtccaggtgaatgagagccgggactga

SEQ ID NO: 221892 - DNA, 495 bp, Klebsiella pneumoniae
atgaaagtcactgaacccgggctgaataagctgatcgataacctgaacaccctgatttgcgaggacagcctgctcacgcgccaggagcgtgaaacgctggtactggccgtcgccgctatcggcgccatgaaagcgcgcgtcggcttgaaaaaaggcgatgcgccgaccgttgccagacgggaaaaaagggagaaaaaagaccgccagcctgatccgcgttttccgcgagccggtcatccctggcaggaagacgaaaaaaccttactgagtgatgcgctcgattcggtaccggacgaagagattggcaagcatctgttctggctttccgagaaactgggcagaacgcctttcagtgttgctttccagatcgcggcaatcagggagctgcaggacgggtgggaggagcagttcagggagatttcggataacatacgcttgtccggtctgagcatcagtgattatcttacgcagaacggcacgggccataacgcctga

SEQ ID NO: 221893 - DNA, 126 bp, Klebsiella pneumoniae
atgctgcggttgatcaccggctggcggaaatggcaatggggaagttttatgacaaaatacctgcaggcgtctggaaatatgttaaataatacagccggcatcagtctgtttgaagtggtttactga

SEQ ID NO: 221894 - DNA, 1554 bp, Klebsiella pneumoniae
atgcaagaatatttaatgtttgctctggcactctctcctttgctgctgatggtatttttaatactgaaattaaaaatgcccatccattattccgtactgatctctttggtattcaccgctgcactatcggcaatattctgggaaatgcccgtacaaaatctgaaagccgcgatagggtatggcgcactgaagggactatggccgatcgtgattgtgatcctcggcgctattttcagttataacgtcatgcaggcgaccaaagcgctggatattttgcgcgatattctcgccagcattagcgaagataagcgtattcaggtgctgctgatttcatggtgttttggtggatttcttgaagccgcagcgggctatggcacggcggtcgctattccgatcggcattctcattgcgctgggattcaacccgttgaaggcggcgatttcctctctcgtggcaaatacagttcctaccgcattcggcgcggtcgggatcccggtttctattctggctgaacaggttaatctgccggtttataccttaggcggaaccattattttgcagctcgcgttgtttaatatcctgctgccgtttgtgattgtctgcattattggcggtggcctgaaagccattcgcggcgtatttctgatcacgttgatttgcggcatttccacgctgattccgcaatattttgtcgccatccatcttggcgcggaattacccgcttttgccggtagcctggtcagcctgtttgccgtggcgatggtcagtcgcctgcgcaaagggaaaaccgatccagagtggcgcattgaggtcagccatacccgcgaaaccacgccgcgctcggcaaaagtgttgttccgcgtgggctctatctatctgtttatttttgtgtttatcctgctgtgttcgccgctgttcccgacaataaaaggcgcggcgtcccaactggcttcggtgctgcatttcacgttggctgacggcaaaacgatggcactgaaagttgaatgggtgaccacaccagggatgctgattatctttgcgaccattatcggcggttttattcagggagcgtccgcacgcgggatgctggaagtatttatcaaaacgattttccagcttaaaaactctatcgtggcaattatggcgatcgtcgcgctggccacggtgatggatctcagcgggattatctccacactggcgcagtcgattgtcgatctgaccggcagctcgtacgtcttcctcgccccggtgattggcgcgctgggcacgttcgttaccggcagcgataccaactcgaacattctgtttggcaagctgcaaaccatagctgccagcaagttacatatcgatcccaactggctggcggcggccaatacctctggcgctacggggggcaaaatgatttcgccgcaaagcatcgccatcgcggtttctgccaccaaaatggacggtcaggccaatcagatcatgtctggcaccatgaaatactgctgtgcctacattgtgatccttggcctgaaagtcggtctcttttattactggtttatggcgtaa

SEQ ID NO: 221895 - DNA, 1698 bp, Klebsiella pneumoniae
atgaaacatactgataataagacctttttgacgactcttacccaattggttggccctgctcatatcctcaccgaaccgtcaaaaactgcgcgttaccgtaagggattccgctcgggtcagggtgatgctctggcggtggttatccccggctctttgcttgaactctggaaagtcctcagcgcctgcgttgaggctgataaaataatcctgatgcaggcgtcgaacacaggcctgaccgagggttcgacgccaaatggtaatgactacgaccgcgagatcgtcattatcagcacgctgcggctggacagtctgcatgtgctggatgagggcaagcaggtgctggcttatccgggcaccacgctgtactcgctggaaagggcgctgaagccgtttggccgtgagccgcattcggtgatcggctcttcgtgcatcggcgcgtcggttatcggcggtatctgtaataactcgggcggttctctggtccagcgaggcccggcttacaccgagatgtcgctgtttgcccgcattgatgaacagggacgcttgcagctggtcaatcaccttggcattgagctaggtcagacgccagagcaaatccttgcccggctggataacaatgtgattgaagccgcgctcgtcaaccatgacgggcgtcacgcgcacgatcacgactatgttagccgcgtgcgggacatcaatgccgacacgccagcacgttacaacgctgacccggatcgcctgtttgaatcctctggctgcgcgggcaagttagcggtgtttgccgtacgtctggatacctttgaagccgagaagaaccagcaggtcttttatatcggtaccaatcagactgatgtcctgactgagattcgccgccacatcctggcgaattttacaaacctgccggttgctggggagtatatgcaccgcgatatctatgatattgcagagaaatacagcaaagataccttcctgatgatcgacaaacttggcacggacaaaatgccgttcttcttcaacctgaaggggcgtaccgaggccatacttgagaaggtgaagatctttcgcccgcactttactgaccgcgcgatgcaggcttttagccatctgttcccgagccatctcccggcgcggatgaagacctggcgcgataactatgaacaccatctgatgttgaaaatgtccggcgagggtgtggccgaagcccaggcatggttaacggactattttaaatcggccgagggcgcgttctttacctgtaccgcggaagagggcagtaaggcgtttctgcatcgttttgccgccgcgggtgctgccattcgttatcaggccgttcattctgacgaggttgaggatattctcgcgctggatattgcattacgccgcaatgataccgaatggtatgagaatttaccggcggaaattgacagtcagttggtgcataaactctattacggccattttatgtgccatgtattccatcaggattatatcgttaaaaaaggcgtagatgcccacgcgttaaaagaacagatgctggaattactgcgccaacgcggagcgcaatatccggcggaacacaatgtcggccatctgtataaagcgccggaaaatttggcacgtttttatcaggaaaatgatccgaccaacactatgaacccaggtattggtaaaaccagcaaacataaaaactgggcatga

SEQ ID NO: 221896 - DNA, 720 bp, Klebsiella pneumoniae
gtgaatgtaaatttctttgttacctgtattggtgacgcactgaaatcacggatggcacgagactccgtattgctgctggaaaaactgggttgtcgcgttaatttccccgagaagcaagggtgttgcggtcagccagccatcaacagcggttacatcaaagaggcgatccccgggatgaaaaacctgatcgccgcgctggaagacaacgacgatccgattatctccccggcgggctcctgtacctacgcggttaaaagctacccgacgtatctggccgatgaaccggaatgggcgctacgtgctgagaaagtttccgcgcgtatgcaggatctcacctcctttatcgtcaacaaactgggcgtggtggacgttggcgccagcctgcaggggcgcgctgtgtatcatccttcctgtagcctgacccgcaaactgggggtgaaggaagagccgctcacgctgctgaaaaacgtgcgcggactggagctgctgacgtttgccgatcaggacacctgctgcggctttggcggaacgttctcggtcaagatggccgaaatatccggtgagatggtgaaagagaaagtcttacatctgatggatgcaaagccggaatatttgattggcgcagacgtcagctgcctgctgaacattggcggccgactgcaacgggaaggccagccggtcaaagtgatgcatattgctgaagtgctgatgagccgctga

SEQ ID NO: 221897 - DNA, 1428 bp, Klebsiella pneumoniae
atgtcgataaaaaccagcgatgtagaatttaaactgcgcattcgtcagcagatagaagatccgatcatgcgcaaagccgtggctaatgcgcaggagcgtatcggcgcaaatcggcaaaaaatggtcgatgagttaggccactgggaagactggcgcgatcgtgccagccagatccgcgatcacgttctgagcaacctcgacgcttacctgtatcaactctccgagaaagtgacggaaaacggcgggcacgtctatttcgccaaaaccaaagaagatgccactcgctacattttgcaggttgcgcaaagtaaaaatgcgcagaaggtggtgaagtccaagtcgatggtgaccgaagagatcggcgtcaaccatgtgctgcaggatgccggaatccaggtgatcgaaaccgatctcggggaatatatcctgcaactggatcaggatccgccttcgcacgtcgtggtcccggctattcataaagatcgctatcagatccgccgcgtgctgaacgaacgtctggggtatgacggcccggaaaccccggaagccatgaccttgttcattcgtcagaagatccgtgaggatttcctcagtgccgaaatcggtattaccggctgtaactttgccgtggcggaaaccggctcggtgtgtctggtaaccaacgaaggcaacgcgcgcatgtgcaccacgctgccgaaaacgcacattgcggtgatgggcatggagcgtatcgcgccgacctttgccgaggtggatgtgctgatcaccatgctggcgcgcagcgccgtgggtgcacgtctgacgggctacaacacctggctgaccggcccgcgcgaggcggataacgttgacggaccggaagagttccatctggtgattgtcgataacggtcgctcgcaggtgctgggctcagagtttcgcgatgtgctgcgctgcatccgctgcggagcctgtatgaacacctgtccggcgtaccgccacatcggcggacacggctatggctctatctatcctggacctatcggcgcggtgatttctccgctgctcggcggctataaagattttaaggatctgccgtacgcctgttctttatgcacggcctgtgacagcgtctgcccggtgcgcattccgttgtcaaaactgatcctgcgtcatcgccgggtgatggccgaggagggcattacgccgaaagccgagcgacgggcgatcaggatgttcgcttatgccaatagccatccggggctgtggaaagtcgggatgatggcgggcgcgcatgcggcgagctggtttatcaatggcggcaaaaccccgctcaaggttggcgcgattggtgactggatggaggcgcgcgatctgcctgatgctgacggcgagagcttccgcagctggtttaagaaacatcaggcgcaggagaaaaagaatggataa

SEQ ID NO: 221898 - DNA, 696 bp, Klebsiella pneumoniae
atggataaccgtaccgcgtttttaaacaccatcgcccaggcgctgggtcgcccgctgcgtttcgaaccgcaagcagatgccgcgccggttaacaactatgccaacgagcgcctgaccgaacttagcccgcagcagcgctgcgatgcgtttatccagtttgccagcgaagtgatgctggcccgctgcgaactgaccagcgaggaccaggccgcagacgcggcgctgcgcctgtgcgaagaattgggtcagcagccggtggtgctgagcggcgacagccggctggtggagctgggtatcaccgaacgcttgcagcaggaatgcaacgccgtggtttgggacccagcgcgaggtagcgaaaatattacccaggcagaacaggcgaaagtcggcgtggtgtatgccgaatatggcctgaccgagtccggcggcgtggtgctgttttccgcaccggagcgcgggcgttccctgagcctgttgccagagtcctcgattttcgtgctgcgtaaaagcaccatcctgccgcgcgtggcgcaactggcagaaaagctacatcagaaagcacaggccggtgagcgtatgccatcatgcattaatatcatcagtggacccagctcgacggcggatattgagcttatcaaggtggttggggtgcatggcccggtgaaagcggtgtatctgattattgaggattgttga

SEQ ID NO: 221899 - DNA, 438 bp, Klebsiella pneumoniae
atgggccgttttgatgaatggttagacgacacaaggccggtaacagtcgcaccggttaccggcatcggcgataccatcggcatgctgatgtcgcacggtaatatttctccctacatcatggcgtggttgataaccgtgctgattcgtctggcaacgggtcagggcgtggtctcagccatgacggcggcggggattattagcgcagcgatcctcgacccggcaaccggtcaactggtgggcgtcgacccggcgttgctggtgctggcaacagcggccggctccaacaccctgacccatatcaacgatgcttcgttctggctgttcaaaggctactttgacctgtcggtgaaggatacgctgaaaacctggggtctgctggagctggtaaactccgtggttggcctgataatcgtgttgatcatcagcatgattgcataa

SEQ ID NO: 221900 - DNA, 312 bp, Klebsiella pneumoniae
atgcacattgtatcgagagcacctttcgatacagccaccaggcaattccccaatcaggcagcggcactagacgacgtataccggactttgaagagagagaactacacttcaccggacgaaatgaaaaaacgatttgcctcgctggacagaatgaaatatcgggagaagtggtgggtgatcgatgttggcggtgggaatttaagggtgatgttttttgctgattttgaacgtgggaaaatctttataaagcacataaccacacacgccgaatacgacaagctgacagatttttaccggagaactaaagaatga

SEQ ID NO: 221901 - DNA, 420 bp, Klebsiella pneumoniae; identical to SEQ ID NO: 26685

SEQ ID NO: 221902 - DNA, 1203 bp, Klebsiella pneumoniae
gtggctgattttccccgcgccagtaacgggcgataccagacagaaggcctaagcgcgcgcgagttcgaacgcctattcaaccagattgagaaggataagcgaagcaagcgccgcgccgctcgccgcactctgacgccgttttcactgaagaacaaaacagccgaagatatcatctcgctgggcaagaagaaaaaaggcggtacgttcttcaccgtcgaagatctaaaggcatttgaaggtcgccgcaaggatattcgacagacgttcaattcaggcatagccgggatcacctatgcccagctcatagccggaagtgaggcgatcgacgttaaacgtgctaacaacgccgtagacgacggttccggcattaagcgcgccgtgccttcatcattgaaacataacgtcgtcacagtcagcgtggaggcttcagatcgctcagaagaccagcatcaccgcgtaaaagtgcgctttgaggaatgggattcactgattgatgagctgggggatgagactagcgcggtaaaagtgacgaaaaagctgtgtgccggtcgcgtatccttcgattgtgattgtggtcgtcatcaatactggtatcgctacatcgcgaccgccggtaactttgccctggcaccgccaaaagaatatgccttccccaaaatccgtaaccctaatctcaaagggatcgcctgtaagcacgtgatccacgcaatgacccgactccagtcggcaagctggcaattgcggatcggtcaggccatgctgcaggccgctaaacgtgtagggttcggtgacgacaaacgacgtactactaagcatttcactgaggaagaccggaaaagattcaacaagaaccgtaactcacagactaaccagggggcgatgcgtcaggagtgggataaataccagcgccgccagaaagcgctgggtaatcagattgcgcgagacagtacaaagctacgcaccctcagcgacaaactgttaaaagcccggaaaatgacgcaaaaacaacgggcaaaggcagaagaaagtcagcaaaagcttaaagccgagcaggataaaaacaaggtgctgctgcagcagctcgccgaccgtttcaaggtggaacgccaggcgtttattgatgcgatggtaatgactggtgtatcacgtcaggatgccgagaaacgcttcctggactacgtgaaaaacaaaggcaggggttaa

SEQ ID NO: 221903 - DNA, 330 bp, Klebsiella pneumoniae
atgagttacaaccgcctggatgaccgcacaattgacgatcctatcctgctggcattgtttcatcaggaagtcattgcacgggccaccagctacagcgccgacaacatctcttacaccatcaagccagatgaggtttaccgttctgatttgtcggcgtttcgctgttacggcaatgaagaattacgttgggtattccgcctgctggtggggcatgaatctgaaactgaagccatgccggttggcataacgttaaccgtgccgccggtggcctggatacgtgaccggatgcgagactatgcgtcgggaacagtggagttaatcagtggctga

SEQ ID NO: 221904 - DNA, 660 bp, Klebsiella pneumoniae
ttgagtcaaaaaatagctgttttcagtctctcaacatcaaacccgctctatgtcactgccatctatgacgatgacaacaacctgataatgagcatcccgaaatcactccccaactcattaaaacaacaacgagtaaaggtgatccccgccatcgagaagctgcttaaagctgactttaaggtactggtggatgaaaccagtgggaccattgctagtgaaagcggcgctcaccatgtttcactgaagacgcgacatacagactcgcgcgcagccgttctcgtcggcatcgagcgctacaacgaattgcgcctccagaaagccatttctcttcctgagaaaaaccccggcgcatatgagatcccgtcttctatcgtggacattgattacaacgccgccggtgacgaggtgtatcacatcaactggcaggatattcgacctgagcatctgctcacgatcatgtgctgttttgccacggtataccatcctgtcacctcagctgcgtacatcaaagccatgaccggcggcagcgaagaacgcgagcagcacccgctattacgcgttttcgggaacctcattaagcatcaggaagtgaccagcgcaagcgcagttccgccatcgctaaccgggcagcggatcagtgataacgaggtcattctatga

SEQ ID NO: 221905 - DNA, 231 bp, Klebsiella pneumoniae; identical to SEQ ID NO: 187618

SEQ ID NO: 221906 - DNA, 141 bp, Klebsiella pneumoniae; identical to SEQ ID NO: 187619

SEQ ID NO: 221907 - DNA, 1668 bp, Klebsiella pneumoniae
atgaggaacaggttgataaacgatgcaaccagtttggtaaagcaaccgccggggcagtcacgctaccggatagacgttcatggctgtacagaatttcttgatgtgctgaacttccgttctgtggagtccctcagtcatccctggcgatttgatatcgccgtgacctcctctacgccggatattgccagtgaagcggtgctgttaaaacctgcgtcatttacgttccagacaccgatatttaccggggcgccggctgttccggtgcgtaccgtctatggcgtagtggcatcgtttgaacggatatccatgtcaaaagaggattccgtttacgcgctggcgctggttccgcgcatcgcccttctggactatacgaaagggagcgaaatctatctcaatcagtcagtcactgaagttgtggaaaaggtactgcgtaaacacggtctggaagggcctgatttcgagttccggctttcccgcgaatatccgtcccgggagctcatcacccagtggcgggagactgaccttgagtttatccagcgcctgctggcggaggtgggtatttactggcgctatgaaatggacagccgacttgaacaggacgtggtgatttttcaggacagccagcagcagtatgaatttggcgtcacgctgccactgcgcaaccaggccgggatgagtgacagcggacaggagagtatctgggatattcagactgcatataacgtggtgagcggaagggtggccacccgggactacaactaccgggaagcgctgacgccgcaggacagcacggaaagtatcagcagtcaggaagggatcaccgccggtgaaatttaccactacgcggagcctttcctgacagcaggtgacgcggaaagtactgagagcggtgcgttctttgcccgtctgcgtcacgagcgcattctgaacacggaatatcatgtcaccgggcattcctccagccctcatctggcgccgggtcaggttctggaaacggacggctcgttacccgatgccgttaaggaaggtatcgtcatcaccacggtacgcgccagcggttcacgcaaaagtagctttacgctgacgtttgagggtatcccctacagcgaaaccgtctgttaccgtccggcgctgctcagtcgcccggtgatatccggctcgctgcctgcccgggtggaaagcacacagaaaggcgacacctgttcctggctcgaccaggaaggccgctatcgagtgaaactggactttgaccgcaacagtaccgaacagggttatgcgtatctgtggctgcggctggcgaaaccgtatgccggtgatacttacggcttccactcaccgcttctcgacggaacggaagtggccgtcgtatttgacggtggagacccggatcgtccctacatcgcttatgccctgcatgattcagagcatccggaccatgttaccagcgagaatcatacgcggaacgtgtggcgcacgccggcgaacaataagttgcgaatggaagacaagcgcggcgaggagcatatcaagctcgcaacggaatatggcaaaacgcagctgaacatggggcacctggtcaatggccagcgtgaaaaacgcgtggcgctggttttgagctgcgaacggatgagtttggcgcggtccgcgcagccaaaggcctctacctga

SEQ ID NO: 221908 - DNA, 897 bp, Klebsiella pneumoniae; identical to SEQ ID NO: 19852

SEQ ID NO: 221909 - DNA, 765 bp, Klebsiella pneumoniae
atgaagtttaaaactaattcatttttgtttatgatgctttgtgctactgctcttaattcttgggctggatattacaacacaattgatatcgatggtgtaagcatccatttagataaggataaagctggatatgtaaatgttcacgatgatcaattaaatacggattactcatgcaaaatagaaaattggaatgattcattaatctctggtgctggaggtatttctctaactagtgatcatttaggcgtgcttttagcatcaggaaataaatatcttgatgttaaggagcttatagattgcaaaggacagtcaattcgaattcattctattcattactttaataattcaatttcttctattatagatgttaattttgaaaaaaaattagttctggcattagttgtgattgatgctcactttaggtcatatcaggcgatagtatctaagtttaatgggaataaaaaccttttgtcaggcaaaggtttttggagtaattcctcatctgagccagatcagaatagcttgttttaccctggtggttcaatatatctagggaaaatatctgtcaatggagaatatattgcgccaaacgatttggattgtgcggttgattcattcccaggtgtgtgggatatagcaagaaaaatgaaaattatattcccaagagataaagatgatgctgtaattgacagtaaatgccgacagcttttctcgggagagaaaacacttgatgaattggggggagagcttatcaatatgaaatga

SEQ ID NO: 221910 - DNA, 1752 bp, Klebsiella pneumoniae
atggttgatggagtgaatgctttccatttccagattttctgcgatgatgacaacatcagcaagctaacgggcaggaaaacaggagagctggatatttcgaagaatggccgcaccgatgcggtttatggtgatattcacttttatctgccaccgcagacaaagttttatgacaaggctccagcagataacagcatttctaccaccggactttctgaactatataccagcaatgtgcctctgtatgccagcatgactctggcccaaggcaagtgcacgatggttactcgtcagaaaaatacgcagactgacggaaaatatgatctgctggttgaaccactggttaatgcagatggtgatgactacgaatacaatctctataaaaccgcgatgcggaattataaggagagcccaagtgccgggtttgaattacttcgctttgggcgagtgatcaacacggaccatgaaacactggtaccggcagacgcaccattatggatgacagtcaattacccgggtggtaaaggggtgatcaaccttgctgattccagtattaaaaagtttagtgacgctgatttccctcactggacgggctggcagatggtagatgacgatagtgacagcaacagccagtgtaattcagctattatcaagaaacttcacgaagttggtgacttcgataaccagtgcgggaagctaatctgtcatttcccatttgaatgggaaaaaagtacgatcgacatccgtttttcgtggctgaaaacgggaaatgaagagcatgaaccgatgacggaagccgattatgcaaagtttaaatcccatgcggaagcactatgctttgattctggagcgttgagttctgaccggttgtggcattttgagccaaaatcatttattcgacatttcaggaaatgtagttggctcgactctgaagtaattgaaaaagtaatgacggcgaatgctagtaaaaaaaataaaaatgcacttgaaggtattaaaaaaattacattagagtactatgcggacataaatacaatcatgcgaaagtataacttatctgatgcaaatagaatttgtcattttttagggcagggtgcagttgaatcaggttatttattgtccatgcaagaaactagccagcaacaaattattgttgatggtgttcagcaaggtggtgtgattgttgaagcatcaacatttaatgaaactactaagctaggtcattggtacggagctcttaaagccgagaaggataactatttctccgggaaaaaatacaattcccgtggagggtatatcacaggatcctatagctggattaacggtaactgtggagatgtagatgcacaaaaattcagaggtagagggtttaaaatgctaactggacttaacacatattcaagctactgggtatatcgaggttggttgtcaaaaaatgactttgataaatattggtgggatgacccggagtacaagaaaaaaaattcagccggtatgaagaaaaaaccaccaaaaataggaaaccctcagaaagtgacagaaaatgcatataactgtattgatacaggtggtttttttatagtttgttttaagtctaaagttctcaaaattatggatgaggacaaaattgggaaatctgatgatgacagcattattttgaaagtaactaaaaatataaatggtgcagataaaggaattgcagaaaggaaaatagctactaaaaaagcaaaagagatgattgatgatgaagtttaa

SEQ ID NO: 221911 - DNA, 1209 bp, Klebsiella pneumoniae
atgcctaaatataatatttatacaaagattgaatcgaatgtttcagcagtcgaccttttttacgatctgaatgtttacagaactgatgccagtaataaaaaacatatactactgtcagtggcgcaacaaccagtaacatcaaattatcaaactcagtctcatgaaacgaatgacacagaggatgggttatctgtaatctacataatggaaatgaacttatatcgcaagcacggaggtaagttgttttctgtgctttcctcgcctgcgaaaaagatgtacacacttggtgaaatggcatcagggcaagcatattctaaaaataagcgtgaaaatgtttgttattttgagacaaaggcgcagacaaaaccggttaatgataagggtgaggataatatacatactgtgcagattacctgtcagaaaagagcgtttattgcaaaagagtatcctgtaggtagtcctgatgatccatttgacagaagtaaatttgaagatcaagtttcatcaagagtaaattacagtagttttcctgatcagggaaggacaagtttatgtgggccagcctccttcttttactgcttgcaaatggacaggccggatgtatataaacaagctgcaattgaactatggatgcaaggaaaaacgaagataggaactttagatataacgcctggcgatggatgtaaacatccaaagggcagtttttattttagcggtagtgagagaatttcaggtttggactggataacacttgccagtttgagagactctgaaaactcaattatgagttatgatgatatagacgacgaagtcgccgggattacaatgtggggaaagattaccgagtggtttgaaaagagtggctatgtaaaaatttataccaatgttggcttgggtcggtgtagtattgaggatgttgcgcggctcagtgaatatgctgacaatggatttaaagttgtttgtctaatttctgctgggatgctgtttgattttggctctgacgatacttcctctaaaaatcattgggttgtttgggccggtgctttaaaaaatgctaatgggaaagctataacaaaaaactcaccgcctgatgaaatcgttaatttaaaattattctcatggggggcggtaaaaaatcaaattaagttaaacaaaaatttggaatatgtccgcaagcacatttttggggggtggtatttaaaccactaa

SEQ ID NO: 221912 - DNA, 876 bp, Klebsiella pneumoniae; identical to SEQ ID NO: 8076

SEQ ID NO: 221913 - DNA, 321 bp, Klebsiella pneumoniae; identical to SEQ ID NO: 83617

SEQ ID NO: 221914 - DNA, 2994 bp, Klebsiella pneumoniae
atgccggttggctttctgactccagagcaacgtgattactttggtcgttatgttggttcgcccagtcgtgaagaattggaacgttttttctatttgagtgatgaagaccgtgatgtcatccaaaccttgcgaggtgatcactcaagattaggttatgccatattattgacgacagtccgtttccttggcgttctgcccgataaaccgacgagtgtaccttccgaagtccaacaagtcttggttcgccaactctccattaccgatcctgattgtctactgcgctacagtgatcaccgccgctggatacatgcggctgacattcaaactcgctatggttatcgccactttaccgatcatgatgttggttttcgtttgtgtcggtggctgtatgccctctgctggacaggaacggatcggcctggcgtattatttgaacgagctaccgcctggttactgacacaaaaagttctattgcctggtgtttctcaattagagcgttttgtcgcccaattacggagtcgggtcgaagagcgtctttggctcacgcttggacgtagcgtcaccgaacaacaacgccaacgcctattgaaactattgacggttgaagacggtagtcgcggttcaaagctagacaaacttcgttctggccccgtgatgatcagtggccccgcattggttaaagcactgcatcgactggaggacgtgcgtagcttcgggatcaccttgcccgctgctgcacatattccacccagccgaattgccactctggcgcgatttgctaatacggcaaaagtgaccgctatcagtcggttaccaccggcaagacagttggccacactggttgcctttgcagtttgtcttgaagccaccgcgcatgatgacgcactggatgttttagaatccctgttacgcgacctttttagcaatgcagaaaaggcggataaaaaagctcgcctgcgaacactgaaagatctggatcgatctgctgcaacactggcagcggcttgccggatggttttggatgcatcaatcagtgatagcaccttgcgcacgcaattatttgccaacttgccgcgagtctatttagaaaacgcattgaaagaggtcgatgcgctgattcgtcccgcaaatgatgtatttatcaatgctctggaagagcgttatcgaagtgttcgtcgatttttgcctgacctgttagaacggttgcattttggtgcaaatcctacgggaaaagccgtggttgatggttttgaatggttgcgaaaaaatctgaagtgcaaacatcctgaaattgatgcgccacaaaatgtagtgggaaagtcatggcaaaagcacatcattggcaaagatggtacgctggatatgcgagcctatgtattttgcgtgcttgatgcgctacgaacggccattcggcgtcgggatgtgtttgtttcacccagttggcgttatgccgatccacgtattggcctgctggacggtcctgaatggatagctgctcgcccgattgtgtgtcgatctctgggcctgagcgttgaagcaaagccaactttggatgcatttattacagaactggatacaacttggctggcggtcgcaaaacgcttgccggagaatcctgcgattcagctgacagaaaccgatgagggtaaaactgagttatcactcgccgctttagagcgactggatgaacctgaatcgttattggcattgcgcacggcagtggctaatttgatgcctcgtgtcgatctgccggaaatattgctggaagttgcagcgcgttcaggcttcagcagcgccttcacgcatgtatctgaacgtaatgcccgtgcagataactttgccaccagtttatgcgctgtattactgggtgatgcttgtaatactggactggaaccgctgatccggttggatatccctgccttacgacgtgaccgcttatcatgggtcgctcaaaattacatccgtgatgataccttatccgctgctaatgtgattttggtgtcgatacaaagccagcttgaactagcgcaaatatggggtggtggcgaagtcgcatctgccgatggaatgcgttttgtcgttcctgtgcgctcagtacattcaggccccaatccaaaatattttggctccagccgtggggtaacctggtacaacttaatttcagatcagttttcagggttgaatgctatcaccgtgccaggcacgctccgggacagtctggtgttgctggccgttgtactggaacaacaaaccgaattacagcctacacaaatcatgaccgatactggcgcatacagcgatgtagtatttgggctattccgtctactgggttaccactttagtcctcgactggccgatgtggggggaacccgattctggcgatcaagccctgatgccgattatggccaactcaacggactggcaaaacaatcggttaaattggaattgatcacggaacattgggatgatttattacgtttagcaggttcactgaagcttggacgaatacctgcgaccggcattatgcgtactctgcaaaccggtgatcgcccaacccgattggcgcaagctttggctgaatttggccggatcgaaaaaacactgcacatgctgacctacattaatgatgaatcaaaaaggcgcgctacgctgacgcaattaaatcgaggagaaagtcggcatagtttggcgcgggcggtttttcatggcaaacgaggcgagcttcgccagcgttaccgtgaaggacaggaagatcaattaggtacgctgggtttggtggtcaatatgattgtcctgtggaacacgatctatatgacggaagccttgaaacaactcaaacgacaaggttaccaagtccttgatgacgatgtggccaggttatcccccttgggctgggaacatatcaatatgttaggaagatattcatttgctgtaccggaagaagttgcaagaggagagcttcgaccgctacgaaatccagccgaagatctataa

SEQ ID NO: 221915 - DNA, 966 bp, Klebsiella pneumoniae
atgacaacccaggctgtttctggtcgccgctatttcacaaaagcgtggctgatggagcaaaaatcgctgattgccctgctggtgctgatcgcggtggtatcgaccatgagccccaacttttttaccgtcaataacctgttcaatattctgcagcaaacctccgttaacgccattatggcggtagggatgacgctggtcatactgacctcggggatcgatctgtccgtcggctccctgctggcgctcaccggtgcggtggcagcgtcaatcgttggcattgaggttaatgcgctggtggcggtcgcggctgccctcgcattaggtgcggcgatcggcgcagtcaccggggtgattgtagcgagaggccgcgtgcaggccttcatcgccaccctggtgatgatgctgctgctgcgcggcgtaaccatggtgtacaccaacggcagcccgatcaataccggctttagcgataatgccgatctgtttggctggtttggcattgggcgtccgctggggatcccgacgccggtatggatcatggcgattgtcttcctggcggcctggtacatgctgcaccatactcgcctgggccgttatatttatgccctgggcggtaatgaagcggcgacgcgtctgtccgggattagcgtcaataaagttaaaattatcgtttacgccttgtgcggaatgctggcttcgctggccgggatcatcgaagtggcgcgtctctcctccgcgcagccgacagcagggacgggctatgagctggacgccattgcggcggtggtgctcggcggcaccagcctcgctggtggcaaaggacgcattgtcggcacgctgattggtgcgctgatccttggcttcctgaataatggtcttaatcttttaggcgtttcttcctattaccagatgatcgttaaagcggtggtgattttgctggcggtactggtagataacaaaaagcagtaa

SEQ ID NO: 221916 - DNA, 1506 bp, Klebsiella pneumoniae
atggaagccttattgcaactgaaagggatcgacaaagcgttccctggcgtcaaggcgctctccggcgcggcgttgaatgtctatgccggccgggtgatggcgctggtaggggaaaatggcgccggcaagtccactatgatgaaggtgttgaccgggatctacacccgtgatgccggctctttgctgtggttaggcaaagagacgacctttaacggcccaaaatcctcccaggaagccgggatcggcattatccatcaggaactgaacctgatccctcagttgacgatcgccgagaacatcttccttggccgcgagttcgttaaccgttttggcaaaatcgactggaagcagatgtatgccgaagccgacaagctgttggcaaagctgaatctccgctttaccagccagaaactggtgggcgatctatcgattggcgatcagcaaatggtggagatcgccaaagtgctgagcttcgaatcgaaagtcatcattatggatgaaccgaccgatgcgctgaccgataccgaaaccgaatcgctgttccgcgtcatccgcgaactgaagtcgcaggggcgcggtatcgtctatatctcccaccgtatgaaagagatcttcgagatttgcgacgacgtgacggtctttcgtgacgggcagtttatcgccgagcgcgaggtctcgtcgctggatgaggaccgacttatcgagatgatggtcggccgtaagctggaagaccaatatccccacctcgataaggcgcccggcgcggtgcgcctgaaggtcgacaacctctgcggcccgggggtggataacgtgacctttaccctgcgccagggggagatcctcggcgttgccgggctgatgggcgccgggcggacagaactgatgaaagtgctgtacggcgcgctgccgcgcagcagcggttccgtgacgctcgatggccgtgaagtggtgacccgttcgccgcaggatggtctggcgaacggcattgtctatatctccgaagaccgtaagcgcgatggtctggttctcgggatgtcggtaaaagaaaacatgtccctgacggcgttgcgctatttcagccgggcgggcggtagtcttaagcataaagatgaacagcaggcggtaagtgatttcatccgcctgtttaacgtgaaaacgccgtccatggagcaggcgatcggcctgctctccggcggcaaccagcaaaaggtcgccatcgcccgcgggctgatgacccggccgaaggtgctgatcctcgatgaaccgacccgcggcgtcgacgtcggggcgaagaaagagatctaccagctcatcaaccagttcaaagccgacggcctgagcatcattctggtctcctccgagatgccggaagtgttgggcatgagcgatcgcatcatagtgatgcatgaagggcatctcggcggtgaattcacacgcgagcaggccacccaggaagtattgatggctgccgctgtgggcaagcttaaccgtgtgaatcaggagtaa

SEQ ID NO: 221917 - DNA, 192 bp, Klebsiella pneumoniae
atgacgctcgatatgctgaatgtcatgctggcagtcagcgaagagggaatgatcgaggagatgctgctggcgctgttggcctctcctcagctggcggtgttctttgaaaaatttccccgcctgaaaaacatcatcgcggcggatattccgcgctggcgggaagccgttcgcgcccgcttaaaagaacgctga

SEQ ID NO: 221918 - DNA, 276 bp, Klebsiella pneumoniae; identical to SEQ ID NO: 5786

SEQ ID NO: 221919 - DNA, 1356 bp, Klebsiella pneumoniae; identical to SEQ ID NO: 147161

SEQ ID NO: 221920 - DNA, 594 bp, Klebsiella pneumoniae
atgcctcgggcatccaagcagcaagcgcgttacgccgtgggtcgatgtttgatgttatggagcagcaacgatgttacgcagcagggcagtcgccctaaaacaaagttatgcagccaaatcccaacaattaagggtcttaaaatggtaaaagattggattcccatctctcatgataattacaagcaggtgcaaggaccgttctatcatggaaccaaagccaatttggcgattggtgacttgctaaccacagggttcatctctcatttcgaggacggtcgtattcttaagcacatctacttttcagccttgatggagccagcagtttggggagctgaacttgctatgtcactgtctggcctcgagggtcgcggctacatatacatagttgagccaacaggaccgttcgaagacgatccgaatcttacgaacaaaaaatttcccggtaatccaacacagtcctatagaacctgcgaacccttgagaattgttggcgttgttgaagactgggaggggcatcctgttgaattaataaggggaatgttggattcgttagaggacttaaagcgccgtggtttacacgtcattgaagactag

SEQ ID NO: 221921 - DNA, 1014 bp, Klebsiella pneumoniae; identical to SEQ ID NO: 5004

SEQ ID NO: 221922 - DNA, 249 bp, Klebsiella pneumoniae
gtgcagtcgtctattgaacgaacagtatcaggagtccgctgcacgaatgatgacctcaagccggttctggtcgcgctggcgaccgatcagcccctggatgtgcgataccgcgaccacgatctttccggcgattgggcgggctaccgcgaatgccacatcaagcccgacctgctgctgatctaccgcaagtccgacgccgacaccctgcgactggcgcggcttggctcccatagcgagctgttcggctga

SEQ ID NO: 221923 - DNA, 576 bp, Klebsiella pneumoniae; identical to SEQ ID NO: 32318

SEQ ID NO: 221924 - DNA, 921 bp, Klebsiella pneumoniae
atgaaaattggctacgcacgagtgagcaccaaagaccaaaccgtagatctacaacttgatgcactcaaacaagcaggatgtgaacgcatctatcaagaggttgccagcggagcaaaaacggcaaggccggaattggatcgtttattagtggatattcgtgctggcgatacgatcgtgatctggaagctggatcggcttggccgttcgcttaaacacctggttgagctcgtgggcaaattggccgaacgaaaaattggcctgctcagtctgaatgatcctgttgatactacaaacgcccaaggccgtttggtctttaatctgtttgcatccttggcagagtttgagcgtgaattaattcaagaacgcacactcgcggggttatccgccgcacgagcaagaggtcgggtaggcggaaggcccaaaggtttatctgcaccggcggaaagtaccgcaatggcggctgaaacgttatatcgcgaagggcgactcagtgtcagcgcgattggtaaaaagctacatatatccaaaggcacgctctatcgttatttacggtcacgaggtgttgaaattggtaagcagaaaaagaaccagttaacggatacgttacaacccacagcaataaacggatctccgatcaccaaaacagccacagtaagcttgctgttcagcgttgagaacaatagcaaatttgtcagaggtaagaagcgcgcccaggcaaacatcgaacaatacagcttggctctctatgacaataaacagttagcgccaggaaaatatgagttgcgcattccctatgaaaatgaacatgaattgaatgaaacgatgcatcaacttctatcagatatgaaccgagaagctgatttatgtaattgcaatgttgatgcaaatgcatgggaagaagggactgaacggcgatggtag

SEQ ID NO: 221925 - DNA, 282 bp, Klebsiella pneumoniae; identical to SEQ ID NO: 61246

SEQ ID NO: 221926 - DNA, 612 bp, Klebsiella pneumoniae; identical to SEQ ID NO: 61245

SEQ ID NO: 221927 - DNA, 993 bp, Klebsiella pneumoniae
atgcctgttcaagacgttattcccccctatgagcagatgtacctgctaaatcagcagctgatctgcaacgctgatcagttcaaacatgccgttatcacagttggcggtcaggctgtgcaatactggatatcctattatcatgcacaatacggcgacagattgcctgatgagcgcctcaccacatctgttgactgcgactacagcgcccggaaagatgatattgcggctatagcaaaaacgctcaacgttaagacgtgggagaacaaagacggtcagcccccatcccttgcgcagtttatgcttatcgatcaggatacacacgatatcaaacgggatgatggacgcttatttgccgtaccggatgcgcctgacgagccaaatgtggtggatattatcgaccgccccggaggctttgaccgttctgattttcaggggaaaaagctttacctgtataccgccccgttttatgtagaagcaaccggccccggcatgcctgaaatgaatgaaaaggtaagggtattgaaccctgtcgcctgtatgcgctcgcgctttagcaatctgattgccttgcgccgtgatgctgaaattgaaattgcgcgtattaacgcgctcaagatcccgtgttatttctttctcatcgaacagtttgatgaacagccgttcaaagttgcacgaggaatctttatggatttatggaggctcgcgaatgacgaaagctgtctgcgccatcaggccttctggcatagctggcaggggccgcttcttgaagggcaacaaagtaacaacatcactctgattgatgtgttggaaggcgtacatgtatacctggaagggcatcttgatgactttgaaataccggaagcctttgtcaccaaagaagtaccgctaaagctcgcacagctgcgtgaacgctgggagcgttacgtggtactcaatgctgaatgggcagcaagagggcgcaggggatttgaacgtaatccccgtgatgattag

SEQ ID NO: 221928 - DNA, 156 bp, Klebsiella pneumoniae; identical to SEQ ID NO: 102291

SEQ ID NO: 221929 - DNA, 987 bp, Klebsiella pneumoniae
atgatatcaagagaaaataataaaaataacctattccgtgtaaagtctaaaaatggtgtccttcgttgccttaaggctggcatggatataaatatgtgcaatagtaaaggtcaaactgctctttttacctgtaatgtacctgaagctatacaggcaatgattgacgctgacattgacattcaccacttggataatgacggtaataatgcattattctatgctcaaaatgttgaaacagtggaacttcttgtcagcaatggtattaatgttaaccaccggaataagtcaggcacccttgcgattcaacatattgatgtttcaccagggttagtaaaatatcttatcaaagcaggactagatatccataccaaagatagctatggcaattcctttcttttcattccatttgaaggatatgtgtacgatgcactaattgaggctggttgcgacattaatcataaaaatataagtggacagacagcattcgatcactggcagtcagaaaataatagcatagttggtaaatatacgcactgggaatctaaaaatgataactacatgcgcttccttatccgtaatattcaccttacaaatagttcaaaaattgtattcaagaacattacatttaaatcaattgagctgttgtcattgcttataaaacaaaaaaatgaatttgagataagtgataaatgtatcataacaccaacaaatgccgacgctaaaaaattaattttacaactaaagaagctgacagacattagtcatgtttggttttacataagcagtacatatctactgacgcactatgcaggaagactgctaattaaatggttaatacgtaatgatataaaagttgatatagaatcgctaaaagaacgctacttttatgaagaaatcctccaggacaaattacagagagagcaaaaggttttacgaacaacgcttcaaccagttacctgtaaagcaattacaaaaaaaagattatga

SEQ ID NO: 221930 - DNA, 240 bp, Klebsiella pneumoniae
atgccgcgtttatacgaaatcgagacggcctgccgtaaggcaatagatatcctgcctaacggaaagcgcatcctcaccaccaggcgatttctgcaggaactggagagatataactggcactggtcgccacggcaggctaaccagtggatagagcactatgtgacgacattccgggatgtctcaacgcaggaaggtgacgatcgcacgttccagctttacaacccgaatggagggctgtaa

SEQ ID NO: 221931 - DNA, 1338 bp, Klebsiella pneumoniae
ttgaatggctcctatgttcgcctgcgcaacatcgctatccggcatatccgcggcatcgcaatctatggtggcgagctcttcgacagcccgtttgagaacgtcagcgttatgtattgcggaaatgctgacccaaacaattatgcaccttgtgtgctgtttgataatgctggtgggcatgatgccaccaacgcctgtaaattcgacagactgcatctggaggccaaccataccggaggtatatggaacaaatgccgccatatgatttttaactccatgaaggtggagcgtgacgaggggacgcatgttcttgccggatgcctgggaatgacgtttatggcgccgggtctgacgtttaaccgaaatgatatcccgcaatttctcattaaggattttgcgaaagatgacactacagaacaggctgcatcggatagcaggggggttatttttgagtctccaagctgtatatccagctctgctggtaacggctggtatttttatcacaccagtaatgcagcccccatggaaatatctaacctgttcgggaatggtacgggactgattttcaaaggtaagaacgccaccattcacggcggaacaacctatgactgcggaccggtattagtcgatgctgaaaaagatgtcgcagtatacctggtaaaatggcgcgccattaaaaaaacggccgtcggggatggaaccgacgatgcgattattctgagaggggccaactgcaaagtggtttcgtgtgactttaccggtcagccagttgacagcgcaagtctggctattccgaatggagctttcatcaatacggctgcgacagctgactctgtggtaacggataacaccgtcggagggtatcgccagtatgggatcagagcctcgttaaaccagaaggttcgcgacaataaaatcaataccgataataaccacatcaccagcctgacaaaccagacacgcacaaacagtaccctggtaaataaaaacaccatcgggtttggtctcggttctgccgacggagaagcaacgggcctgaccatagcggcgggcgcaacgttgtcttatgaaaaagttgttggtgcgtctctgttctggctgagatttatcgtaaatggtaccgccgctgccgctgccgggttaatctttgccgactcatcactgcccggaataggtgttgtggataacagaaatactgcgcttctttcttttgcagcaggatccgcgggggatggacttattcacgttaccaagcctttgtcaggaggggcgataaccatcgcaaattacacggcgtatcccgtaacatttgtcccgatgattatcagcggtcatggataa

SEQ ID NO: 221932 - DNA, 162 bp, Klebsiella pneumoniae
atgaaaatttactttgactataaaggttctcgttttatgaagatggcattgctatcctttttcacaatttacgtagaacgcaactttcacggttatgctgctttcatgatgctattcgcagcgtcaattctccttagctttaccgccagaattgacaggtaa

SEQ ID NO: 221933 - DNA, 288 bp, Klebsiella pneumoniae
atggtctcgaagagaaatattttaaccgtattctctatctatacattcacctcttataacatgaacaaaaaagagacaataaaaaatttcattcgatttctcaaaacgacgaatgaaagtacattccataatgctttttcatttcgcggtggtaacattttgtatgtaagcaacaaaaacatgttgaaagagatctcatggttttcactcgctcgaatttacgaagacataaaaaaaataaaggaatataaaaccaaccatgacaactatatcagattagtcgcttaa

SEQ ID NO: 221934 - DNA, 423 bp, Klebsiella pneumoniae
atgaataacaacgcaataaatacattactctcttgtaaaactccaaaagacattcaggcttgcattaatgcaggctccgatattaatacactggattcgtttggaagaaatatactgttttactgtaaaaacccaagaatgattgacactctggttaaagcaggaatagattttaaccatgctgacaactatggtcacaatgttttgtttaaccagcgaaatcctcacatactgaaaaaattgattgattccggcgtagatatacaccacaaaaatggtctcggccaaacctgtttatgctcgttagctgataatatatcctgttgcaaaaccctgatcaatgctggaattaatgtcaacaatgtggataaatgcggaagaacaatacttttttacgtaaaagtcactctatctttgatttga

SEQ ID NO: 221935 - DNA, 426 bp, Klebsiella pneumoniae
atgagtaatatttgtgtttcatctcaggaagaaaagtttatatttgttgttgataaatatataacacaccatcgcgacagtgttaataacaataatttttacagaaaactttatgtgcttttcgctggataccatctgaagtatttttattcacgggcgcaatatcgcaattcgtgttatcacgttgataatatcatgcagatgtttatgggtgtcgtttctaccctaaaggcccctctgctcaggcaactcgcaagcagtgacacattactgcattgcctgaattcgctcgtgaattatatttcaggcaatctggatgaagcagagcacatttatgctgatttactggcacagtatgaaaagaaacgcattgcacgttctctggcttatacaccaccaggatccgtggtcaggaaaaggctgtga

SEQ ID NO: 221936 - DNA, 513 bp, Klebsiella pneumoniae; identical to SEQ ID NO: 110059

SEQ ID NO: 221937 - DNA, 243 bp, Klebsiella pneumoniae; identical to SEQ ID NO: 110058

SEQ ID NO: 221938 - DNA, 2010 bp, Klebsiella pneumoniae
atgtccgtgaccgagtctaaagcaaaaacatctgtcaaaaccagcaaaaaaaacgtcaaacctgccgaagcagcggctctgaaagaggcgcttgaagcagcacagattgaactggtgccgctgtctgcgctgattaaatcgccactgaacgttcgcactatcccgtacccggttgagagtgtccgggaactggctgaatccattgagaccattggtctgattcagaatctggttgtgcatactctcccggaaggtatgtcaggggtggctgcaggtggtcggcgtcttgcagccctgcagttattactcactgaaaaccgcatcgatgccgggtatcaggtgatcgttaagcgggttagtgacgaactcgcggttgtggcctcaatggtggaaaacaaccagcgtgtggccatgcatccggcagaacaaattgccggattccgcaaactctccgaacaagggaaaagcccggcgcagattggtgaccagttggggtatggaagtcgccacgttcagcgcatgctgaaattggctcatctcgccccggaaatcctcgaactgctggcaaacaatacccttgatgtggagcagtgccaggcactgagtctggaaagtgatcaggcgcgtcaggtgcaggtatatgaacaggtgaaagctgcttacagcacggtttcggcacatctcatcaagcgggtaattacagaaacggaaatttccgttacacatcctcgctttgtcttcattggtcgagaaacctacgaagcagcaggtggtgtggttcgtgaagatttatttagccaggaggagaatgacggtactgcagatcgcgtgctcgtagaccgtctggttatggaaaaactggagactgctgcactggcaattgaactgaacgaagactggtcatggtcaatagggcgggaaaacccactgcagaactatggtgaagatcgtgaaaattaccttctgcttcctgtgccagaaccgcagtacacaccggacgaacagcaacgactcgacgagttgtacgctacacaggcggcaacggaaacctacgaggatgaagccgctattcaggttctgatcgacgaaatagaaagtcaggcggcacaccgtcaatggactgacgaacagaaggcaagctgtggcgtagtagcctgtcttcataatggtgagctttgcattttgcgcgggattcagaagaaggttaaaacgcccggggaggcggatgccgctacgcaggcgaccagccgtgatctgcatgtgatcgaccgtaaagagccggatgccgcagaagggatcagtctgcccttactcaaaaaaatgtcttccgaacgcacactggctgttcaggctgccctggtacaacagccacagaaagcagtggccctgatggtctggcggctgtgctcctgcgtatttgaatactgccttaccacccgtcacccctttgtaatgcggatggatgttcatcacagtgggttggtcagcgaagccccgaccggaaaagacggtctggcgtggcaaactcttatgcaggagaaaaaccgtcttgaaggcctgttaccgcaaggctggaagaaggacttttccacatttttcacactggacggtcagaccttgatggctctgatggcgttctgcacggcctgttccgttgatggggttcagacccgtgagcatgggcataccagccgtagcaaccttgatgaggtggagacggcgatcggattcaatttgcgtgactggtggcagcccactgctgaaaacttcctcggcctgctcagtaaaaaccagatagtggaggcgttacaggaagctgggctggattcagtcgccgtcgaagcggcgaagctgaaaaagggagatgcggcgatccttgcagagcgttctctgtcagacacccgctgggtaccaggctggatgcagccacgggatacgaaaaaatcgggttcgacaacgacgcccgataccgatgctgataacgaagacaacacggcttgcgccgcctga

SEQ ID NO: 221939 - DNA, 225 bp, Klebsiella pneumoniae
atgaaaactgtgctgaatcttgatgttctgaaaaccatgtctaccgaagaactggaagactatcgtaacgccggtgaggattttcgtcgtgaactgagccatgcagtcatgcgcgatttaacggtaccggatggctgggcagtaaatgcggaataccgggccgaatttgggggttctttcctgtccagctccggtttagcccgtctcatgaccatttcgatgtag

SEQ ID NO: 221940 - DNA, 723 bp, Klebsiella pneumoniae; identical to SEQ ID NO: 110055

SEQ ID NO: 221941 - DNA, 192 bp, Klebsiella pneumoniae; identical to SEQ ID NO: 110054

SEQ ID NO: 221942 - DNA, 357 bp, Klebsiella pneumoniae
atgaagtttatggtggtatttatttgtgtgattttagtgctttatggattttacgggcttaccgtgcgtgaatcgatagtgtttacatttttggggttcagcatttcagctatttttgctgcttttgctggaatgtggattatagctatggccgcaacagtgtctttattaggtggttctatgatgaacgcaaggataattgcatgccagttatttgccatagctatgtggatgttaattattgatgttgccggagtgactgaatcaacgcaattgttagccggcttttttttgttgattatgtatgacatctgtcatacagttgattgtgtaatgaacagcaatttttccacttaa

SEQ ID NO: 221943 - DNA, 273 bp, Klebsiella pneumoniae
atgaacttcacgataaaatcccgtaaaaccggcgaaattttcagtttttacgcacccgagagtggcggttatgtccacctggagtccccgggacactctggtaacacaggtgctcagatttgccgtgggggagggtttatgggcagtacgctgtactgtgacgcttctgaggacgatctggccagtgttgcccgtaaatggtatcgacagttcgtgagggagcggcgcaaattcttaatgatgtcgggccagtattctgaggataaccaatga

SEQ ID NO: 221944 - DNA, 351 bp, Klebsiella pneumoniae
atgaaaaaagagatctcccgcaacccctctttcacgccttcgcctaagctgcgagcacatctgaactcccacagggaaggggtgactgaaaggctgaataatatctttgatcgctatgcgcatctggttcgggcctgtgcccttcctctcgatgacgacgaaacacaggttctgcttaatgtgctgagtggctccgttgtggaacccgcctttattgaatatctggctcaggaaattcgggactcggatgattatctggaagggatacccgcagctaaatcactgtacgaaaagtgttactcagcgacctatccgcaattgctggccaccgtcgaacgcctggaacgttaa

SEQ ID NO: 221945 - DNA, 273 bp, Klebsiella pneumoniae
atggatgaacgagcgcaggcggcactggacgcgctgctttccgcgaagaatctgcgggacgtatgtcccgagacggtgcggcgcgtgtttatggagcttttgccgcgatacagaaaaccgaaggacgcggagaaggcggcgcgcacgcatctgcaccagatcaccggcgcgttcatgacggcggacgcgcaggaaaaggcgcgggcattgctttcgcgctggaacgagggcgacgaagccgcgcgtcgtatggagaatatacgcaatggatga

SEQ ID NO: 221946 - DNA, 780 bp, Klebsiella pneumoniae
atggatgaacgagcgcaggcggcactggacgcgctgctttccgcgaagaatctgcgggacgtatgtcccgagacggtgcggcgcgtgtttatggagcttttgccgcgatacagaaaaccgaaggacgcggagaaggcggcgcgcacgcatctgcaccagatcaccggcgcgttcatgacggcggacgcgcagaaaaaggcgcgggcattgcttgcgcgctggaacgagggcgacgaatcggcgctcgctgccgcgctgtccctgcacgcgtccacgcgcgagcgcctgccgggcgcggatgaatggatgcggcgcgtttcgccgtttctgggcgcggacgcgcgcgtgctcgatctggcctgcgggctgaacccgatcctactgggctccatgggcgtgacgaacgcgctgggcatggacattcatctgggctgcgtgcgacttgtgaacgaaacggcgcgggcgcgcggctggcatacgcgcgcgcgagcctgcgacctgctgagcgagattcccgcggaggaagccgacgcggcgcttctgatgaagctcctgcccgtgctggaagcccagaaaaccggccgcgccgccgagctgctcgcaagcctccgcgcccccaggctggtcgtgaccttccccacccgcaccctcggcggccgcggcgtgggcatggaaaagcactatgccgactggttcgagcgcatcctccccgataccctctccgtccgcgaccgatttacggtgtcggacgagctggtgtatctggtggagcggacgtaa

SEQ ID NO: 221947 - DNA, 1284 bp, Klebsiella pneumoniae
atgtgcgagcactgccgtgcagagaggctggtggccttctcctgcaagaagcgcgggttctgcccgagttgcggcgcgcgacgcatggccgagagtgcgcggcacctggtcgaggaggtgttcggcccgcggcctgtgcggcaatgggtgctgagctttccgtaccccttgcgtttcctgttcgccagcaagccagaagccattggcccggtgctgggcatcgtgcagcgcgtgatcgccggctggttggccgatcaagccggcatcgaccgcgccagcgcccagtgcggtgcggtgaccctgatccagcgcttcggcagcgcgctgaatctcaacatccacttccacatgctgtggctcgacggcgtgtacgaggacaccaccgagcgtccgcagcgcaagccgcgcctgcaccgcacccgtgcgcccacatcggcgcaactgacggaactggccaacaccatcgcgcatcgcgtgtgccggcacctgtcgcgccgcggctggctcgaaggcgaagacgaatccgtgttcctgtccgacagcgcgggtagcgacgacggcatggatgggctgcggatgagttcgatgacctaccgcatcgccaccggtcgcgacgctggccgcaaggtcgtcacgctgcaaacattgcccggtgacgcaggctcgctggagggcgacgccggcaaggtcggcggcttctcgctgcatgccggcgtggccgcggaagcacacgaaagccacaagctcgaaaagctgtgccgctacatcacgcgcccggcgatcagcgagcagcggctgtcgatctcaccgcagggtagggtgcggtatcagctcaagacgccgtggcgaaatgggaccacgcatgtcgaatgggatgcggtggacttcatcgccaagctggcggcactggtcccgccacctcgcgcgcatctcacccgcttccacggcgtattcgccccgaatgcaaacctgcgtgcgcagctgacgccctcggggcgcggcaagcggcctgcgggcgatgcggcgccagtggacgtcagcgcccacgacgagccgcgcagccccgagcagaagcgccgtgcgatgagctgggcgcaacggctcaagcgggtcttttccatcgacatcaccacctgcgcccactgcggcggcgcggtacggatcgtcgccagcatcgaggaacccaccgccatccgcgccatcctcgcccacttcgagaagcacggcgcgctggagcaagcgcactaccggcccgcagcgcgcgccccgccgccggccgcgtga

SEQ ID NO: 221948 - DNA, 633 bp, Klebsiella pneumoniae
atgaccaatttcttcgaaagcccgttcaagggcatcccgctcgatcagcaggtgacgcatcccaacatcgtcgtcgggcggcacagctattattcgggctattatcacgggcacggttttgacgactgcgcgcggtatgtgttgcccgatgccgatgccgaccggctgatcatcggcgcgttctgttcgatcggctcgggcgcggcgttcatcatggcgggcaatcaggggcaccgccatgaatgggtgagcacattccccttcttctatgcgaacgagagctggcagcaggcgcaggcggcggacggctatctgcccgccggagacacggtgatcggcaatgatgtgtggatcggcagcgaggcgatcatcatgcccggcgtgcgcgtgggcgacggcgcgatcatcggcacgcgtgcgctggtgacgcgcgatgtcgagccctatgcgattgtcggcggcaacccggcacgggtgctgcgcaagcggttcgacgaagaccggatcgcgctgctgctcgagatgcggtggtgggactggcccgatgccgcgatcgaggcgacgatgccgctgatgacgagcggcgatatcgaggggctgcacgccgcctggcagcgccagacgcggcggtga

SEQ ID NO: 221949 - DNA, 1041 bp, Klebsiella pneumoniae
atgagccacgatcgcgccacgctctacggcctgcccggctggggctccacccttgccgagatcatgctcgtcgccgcgtcgacgccctttgatttcgtcgcggtcgaggggttcgacgcccccggccccaatcggaaccgcatcctcgcgctcaacccgctcgggcagatcccggtgctcgtgctggcggacgggcaggtgatgaccgaaagcgccgcgatcgcgctccacctcgcggaaacacatcccggcgcagggctcgcccccgcccccggcgatccggcgcgcgcgcgcttcctgcggctgctcgtctggatcgtcgccaatatctatcccaccttcacctatggcgattatcccgaacgctgggccccgcgcgatgcggaagcgctcgtcgcccataccgatgcctatcgcatccgcctgtgggaatggctggagggggaggtcaccggcccctgggtgctggggaccatgcgcagcgcgctcgatctgttcgtcgcggtgatggtgcactggcgcccgcgcccaggggagcgaatggacagcgaggagcctccgaacgttcgggtcgcctgctcgggtgatatcgacgaggttgtgcggctgatgcacgacgctgcggcgtggatgtccgccaagggaacgcccgcctgggacgtcgcgcggatcgaccggacattcgcggagaccttcgtcctgagatccgagctcctagtcgcgagttgcagcgacggcatcgtcggctgttgcaccttgtcggccgaggatcccgagttctggcccgacgccctcaagggggaggccgcatatctgcacaagctcgcggtgcgacggacacatgcgggccggggtgtcagctccgcgctgatcgaggcttgccgccatgccgcgcgaacgcaggggtgcgccaagctgcggctcgactgccacccgaacctgcgtggcctatacgagcggctcggattcacccacgtcgacactttcaatcccggctgggatccaaccttcatcgcagaacgcctagaactcgaaatctaa

SEQ ID NO: 221950 - DNA, 174 bp, Klebsiella pneumoniae; identical to SEQ ID NO: 185435

SEQ ID NO: 221951 - DNA, 267 bp, Klebsiella pneumoniae
atgccgacgctggggcgttttatgagcctgctgtcaccctttgacgtggtgatatggatgacggatggctggccgctgtatgaatcccgcctgaagggaaagctgcacgtaatcagcaagcgatatacgcagcgaattgagcggcataacctgaatctgaggcagcacctggcacggctgggacggaagtcgctgtcgttctcaaaatcggtggagctgcatgacaaagtcatcgggcattatctgaacataaaacactatcaataa

SEQ ID NO: 221952 - DNA, 276 bp, Klebsiella pneumoniae; identical to SEQ ID NO: 149542

SEQ ID NO: 221953 - DNA, 750 bp, Klebsiella pneumoniae
atggcgattaacggagagaacggtgttagtgcagtcaccgtggatgaactactcaagcaaggccttcggataccgaactatcaacgcccatacagttgggatgtatcgactgctctacaactggtggatgatatcagcgaagctcttcgagataccgaacgaaaagatattccctatgttttgggtgcaatcattcttcacgatgatggtgagtatctcaatgtagtcgacgggcagcagcgcctgctgactttgcgaatgattcttgcggccttagatccgataaatcatcaaatttcgatgtctggtaacagcgacactcctgtctccctagtttggatagagcttcaaaggcgcctgtcgcagttggaagataaaaaagagtttttggattttatctgtcacaaatgtcagttggtgcgtattgtgacggacgatattgatgaggcatttcgtgtctttgattcccagaactatcgcggcaaaccgcttgcccctcacgacttgctcaaagcacaccacctgcgcgaaatgcacgatgagtccgctgctatgaaagtggctgtcgttgaggcttgggaagccgtaaacgatgaggatctggacaggcttttttctacttttttataccggatatccaagtggtcacgaggcgaaagctcgctcgaatttactattcgggacatcggcatgttcaagggcatttcatcacgatcccacaggtcattttcgcggcactgttgcaaatag

SEQ ID NO: 221954 - DNA, 564 bp, Klebsiella pneumoniae
atgtcaaacacaagtgttatgttaactaaagaacaaaaagcaattattgcagaagcattagatgttatgcccgaagatctggaagaaataaaagttaaagcaagtgcctgtaaaaagacatcctttcgtgacgatttttcgatggtctttaaagataatacggccacgctcgccagaatggatctgacaccaacggcattcagaattgttatttatctcttctcagtcattgattatggaaatattatccctgacttttcacagtcacgtaccgccagagagttaggactgaataaatcgaatgtttcacgtgcattcagggaattatttgagaggaaaatactgatccgtaatgctgaagatggtcaggtttacctgaattctaatttatgcgtaaaaggtattcctcatcgtttcaatgaagatctgatggataaattcagtaaatccagacttgagactgaagattttgccacttcattcaacttttatcgcgcagggcgcaaaacaaagcctgtaaaaaaatccagaaacagatatccaactgacggcattcccttttaa

SEQ ID NO: 221955 - DNA, 303 bp, Klebsiella pneumoniae; identical to SEQ ID NO: 150460

SEQ ID NO: 221956 - DNA, 309 bp, Klebsiella pneumoniae
atgaatataagtgattttgaggcgtatgaaggttattgggatattattgatgatgatcttttcgaagacatcttttatatggaatgtattgagaagttagagccaacagaaaaggttcttaaggcaatcgaattgctgagctacttctttgcggaagatatgcgtgaagtactgggtgaaatacgtgagatgaatatgcttgcccaggcagatatctttgatttgtggtttgaaataataaagtcacgagattaccttgagtctctggcaaaaacaattatttattacagtatcggtatgcctgtgtga

SEQ ID NO: 221957 - DNA, 207 bp, Klebsiella pneumoniae; identical to SEQ ID NO: 207783

SEQ ID NO: 221958 - DNA, 2724 bp, Klebsiella pneumoniae
atgctggacaagaatgtagcagttagtgttttaaatactcaagccctggccagagcgaaaattaacgctgaaaattttaaaaatggcatagataaaaagcttaaatatggcgagtcaaaatgtgcccgctatgttaaaaaagcattaatcgctggaggggcatctgcaaaaaattcaggaattgaatcaactaaaaattatggcccatggctgcttgaaaataactttaaagttgtgggtggcgctacaacagtgtgtactggcggtgtattcacaatttctggtcagcaagtgggggatgttgtcgtaatccaggcagcaccacaccatgtgcatggtcatatggcgatgtttaatggtacacactgggtatctgattttgtccaggaaagggggttctatcctgcccagatatatcgtgatcaaaacataccctatacactttatcgttatggcgataataccacatcagagcagtacgccacggctacccaaaaaggaaaaattaaaattgtctggccgatcccttctaataaccggggaagtgagttcaataatcaggaagagatcctctctcatgtcaggggggaatccaccgggcagtatatgattggccgtagcgggatgtggcatggcgggatccatatcaccgaagccacgacgccgtggtgtgcgcttagtggtaagtctccacttgaagcgatagatttcccggttccctttaaaggtgagcaggcaatccgatgcatggctgacggcgaagtggttgcttatcgtatctgcaaggattatcagacggttgcatgggaatctggtccgctgaatttttccggctcttttgttctggtgaaacactacattcaaccgggtgaaacgaaatccagcgggctgcatttctacaccctgtatatgcacctggctccgtattctgcttatgagtcagaatcggaaaatcagtggattacacaggatacgcttaaagcgttttccgaaatggactggctcacggcaaaactgacttctgaacaacttcagcctcagattgcagggtatatgcctgtgagggcacgcgttgaatgggactcctctgatgccagtcttaacgcggtggggtataaccagcgccggtatggtcttgtgacgttgaaaagtttacctgatgctgatggtcatacagatgctaagaaaaaggtcagtacctcacttatccccggtaaacgttactgggtggtagtggataataataatattaaacccgcccccggcgctggtccgtcatggtggcgcaggcttatgcctccggccaaagaggttatgaaatttgaccaggttgtgtgcccgacgccctgggccatcactgccggtgatcctgttggtcatatgggctactatcaggccccaaaggatgggggatatgaggcgagatatcaggtgcatattgaatgtaccagcatggatgataaccttgaaaaattcctgaccaacccggaaaaggtgggggagaaaaacccgctctggttgaagtattctcctgggctggcgctgtacaaaaaggatgttgcaaccggtacattcacgaaggatacgagagtgacgaccaggatcgggatcctgccactgaaacaggtgcaaacggaagtcgataagtcgaccagacaggaatactggcagctgcgaccagaaaatgcttacgtccctaaaggccaggcggaacctcaacttttgtcgcagtatgatctggcaaagctgggcttcagaactgaaaccgcagaaccagccagctttgattacctggatggaaaaaaccagcccactggattcttccgtaaccttatcgattcgctttaccaggccgcgaccaatgatccgcgaaccagtcatgctctcgtgaagcataattatcagcgcctgctggataaaattgacagcggaagtgaccgttattctccaatggagtactggagagcacttcataatcccgactatcgtgacgtcgttcagaaaacaatcgtaaaacatcccagcgactggtacttcaaaaaagacgatgttatctggcaaccattcctgaatgcgcttaagaaagacgctccggaatggaagaaatacagcgaagatttccttgataagatggcgtggatgccagacttaacaacggagaagcttggcccttcattatggcatatgcatccaataatgtttttagggacaatgattagcgtgaaaaagcgacaatcgggacttttcactgtacaggatgggaaagaagctttatgtaaaatatataataaatacggtaaaaacatgtctgtaatagttgaaagaatgtttcgtatcgagaccaaacactttacttctggtcaatatcaacattgtggtgctcctggtatggaggtacatggtgctccaccagcatacggatggagttctgactttttctcgcaacatccagaatatcaaccgactgggatttggagtaaaaaagaaggaagagggttaagtgggcagggagggaattcccaagtcacagataagccaaagcaatttgtagtattcgattctgttgagagttcgatggaatatattgtgtactatattaataagcacggcggaaactatgcccgatggtactcaacccaagactcagcacaaaaactatatagagaagaatgtggggcgatcaaacccagattcactaatgaattttctgaggtaaaatcatga

SEQ ID NO: 221959 - DNA, 426 bp, Klebsiella pneumoniae
atgatcaatgccggtcagcatcttgatatcggtgcgatgaaaaatgtttctgtaacggttgaaaaagccctgggtatgtttgtgcataaaggcggggcgaagctggtcgccaatcagggagacatcgagattcaggctcaacacaacacgatggccctgttttctgaaaaacagctgacggtgaccagcagtgaagatgaaattattatcagcaccccggaaacactgacgcttaatggtggcgggtcttacctgaggctgagtaagaacggcattgaacatggctcatcagttgagttcattatgaagacgtctgactatctggtaccaggatcgggcgcaaatctccccaacgaaacacccaatttcagcctgacggatatcactcaggaaagcaaaatcagcagcaaatctttcaatgactaa

SEQ ID NO: 221960 - DNA, 426 bp, Klebsiella pneumoniae
atgatcaatgccggtcagcatcttgatatcggtgcgatgaagaatctgtctgtaacggtggaaaaagccctgggtatgtttgtgcatgaagacggggcgaagctggtcgccaatcagggggatattgatattcaggcgcagcacaacacgatggcgcttctggcaaagcagcaggtgacgataaccagctgcgaggatgggattaccatcagcacgccggagacactgacgctgaatggcggcggatcgtatctgaagctgagtaaaaacgggattgagcatggtactgagggaatgatggtgatgaaggtagcgagctatttggtgccaggaagtggcagcagtctgccactggagacaccggactttaaaacgacggacgtgaaggtcataacaaaaaattccgccaaatggacaagtgaataa

SEQ ID NO: 221961 - DNA, 1035 bp, Klebsiella pneumoniae
gtgacgctgaataaggcttcggaaagttttgacctgattgatgggataaaacaaccgaacaacatggtgaaggggattctggaacagttgtataaagcggcacaggatgaaacgcgcaccactcacgcgctgaacaagtataactataaacggctgctggaattgatagacagtaaccaggacgggtattaccaggagcaggagtatcttcaggcggtacataatatctcttaccgcgaccgcctgtaccgtgtaattgcaaaacacgccagtgaatggtactacggcaaggatgccccgctctggaagacatacctcgatacgttaaccagggatgcgccattgtggaagacgtatctggaaacgtttcttgataagatgacgtggatgaagacggtatccgaaaagggcgttgcgctggggtcggagccgtggcatatgcatccggtggtgtttttggaggcgatccgtattaaagaaagatgtagagagctattttctaaaatttccagtgtaatacttcaacatgaagggggatatgttaacgatcctaatgatcgcggtggtgagactaatatggggatcactattgcgacctggagagcatatgcacctagtgatctcggaattgaagcaactaccaatactctcagaaatatgacaaaggaacaggcagagattatttattataatcattattgggagccaaaaggtttttgtaagcttgagactataaaaatagccttaatgttatatgactggacaattacatcaggtcgcgctgttacacaggtacgaaaaatgcttcataatgagtacaatataaacttagttgtgagtaacacaatggatgatgatatgattcattgtattaatgcaattgaagatcaggagcaattactgtcacgcatcgcagaggttagaaaagaatattatcgttctttaactataactaacggtgaacctaatactcaggttcgattcctcactggctggataaatagagtcaatgattgtttaagggttaatatatga

SEQ ID NO: 221962 - DNA, 177 bp, Klebsiella pneumoniae; identical to SEQ ID NO: 21678

SEQ ID NO: 221963 - DNA, 1005 bp, Klebsiella pneumoniae; identical to SEQ ID NO: 9478

SEQ ID NO: 221964 - DNA, 843 bp, Klebsiella pneumoniae
ttggttaactttatattattcattatattattcacatacacatgtattttttgtttcacccccccgaggagacaatataaatcaatatctctaatccctcaaaaaataaaagcaccattaaatagatatcgtttatacatatattcatctggtgcaatacgacaatcactaatgttaattgttatattatctctctattatacaattacagaaccatttaaatcagaattaattaaaaacttatcctattcattaatcgcaacttttatttttgacaccggcttaaacttcagcaaagaaaatataacaaaaagtatagtatccaggaaatggcacaattctttatactttgcatttgaaagattaagagcaatacatgaaatattcacagcacaaaacaaactagagatcacaaaagaactagccagcgacatggcgtcatccatactaatggaaaatggagctgttatatctaaaaaacacataaaaacaatgtggaacccttcttcaggagaaccacttacgtatcaagacatagtaataaaagaaggggataacttatactttgcgtctatgatgttcatcagagatgattatgaattcctacacagtatttattttgatgaaaatatatttctctccttccctcaactactaaaaccagcccaaaaatgttaccgatcactagcaatgatacagcataatataaacagcaaacaaaaatttaacgtcacaaaaaaatcattagaaagagatctaattaattatttagaactgagatctacattattaatgaaaatggaagatgttcttggccactatgaacaaagagcaccacaataa

SEQ ID NO: 221965 - DNA, 861 bp, Klebsiella pneumoniae; identical to SEQ ID NO: 5314

SEQ ID NO: 221966 - DNA, 558 bp, Klebsiella pneumoniae; identical to SEQ ID NO: 7707

SEQ ID NO: 221967 - DNA, 219 bp, Klebsiella pneumoniae
atgcccgttgactttctgaccactgagcagactgaaagctatggcagattcaccggtgaaccggatgagcttcagctggcacgatattttcaccttgatgaagcagacaaggaatttatcggaaaaagcagaggtgatcacaaccgtctgggcattgccctgcaaattggatgtgtccgttttctgggcaccttcctcaccgatatgaatcatacctag

SEQ ID NO: 221968 - DNA, 765 bp, Klebsiella pneumoniae
atgaaaaaaagcaaaataatagtacgtgggaatagttattgtgatggtatcataattttattccaaatggatggagagaaatattattatgaacctatctcttcatattatgcaaaaaactctatttacaaggtttcatgctcagatattgaagatgagtataaaccctatttagataaactaaatagcgatataaatctagaaagaaatggtggcagcattctacatgcagctaatgttttagaattcaaaaatgaaccatcatactctctgtgtaaaaaaatattaaaaaaatcaggggcaaatatacagtatttaaaaaaccctacacaggagttgtgtaaaatagcgattcaacatgatggttacaaccttaaatatgtcatcccatttattaagcaagaaagtttaaatgatttttataaaatcgctgtgaatagcaatggaatggctcttggtcagatacctaacccatcgtatgaattacagttaatggctgtaaagaactgtggcggtgccttaaaatacatcaccaaacccacaagggagatagctttagaggcagcgagaaattacgccgatattttttcattcgaaaacagaaagaaacttaaaaaatatttagatgatgattttatacgtgaagctgaagatattgaacttgttccacttatgatgtttagacaatccatccaattcttcagagagttaaagattcacatggtgatattcatggaatattttaaagctaaactattatcataa

SEQ ID NO: 221969 - DNA, 1269 bp, Klebsiella pneumoniae
atgaaagagagtacttgggaagagatatcaaaagtaaatgaaagattctataaggctaaagcagaagcgagcaacaaaatatttaatgcagataccggaatagataatgagtcattaagaaggattcaacaagaaattttaaaacagggaaatggagaacttgcggaagagctgcatacagctatgtttgagaatagagctgtaatgagagtaaaacatgcagagcgagtttcaagttctttaggagagtggtttaataaggatgcttttaatgaaaaaatagcagcagaagggagtgttaaagaaagagatgtagtggcctctaaatccgaagcattcaaagacgcaccttacttttctgttggtatgtatcaacataatatagatcagccagatgtaaaggatgcttatataaaaagggtagaacaattaaccaaagatatggaatatcaggttagttttgcggttagtagagaaagccatatgagcaataccattgaggccgctaaacagcttttaggtgttgaagttttcaataagctatatgctggggagtctttagacatagcaccaacaccagaacctgtagcgatagtgaaagaacaggcagaagtcgataacctagatgatataataagtgttaacgaacaattttaccaagttaaaagacaagctgatgaaaaaatattcaatattgatactggcattgataatgctgcattgaaaagagttcaggatgaaatactcaggcaaggcaatagaaatctttcagaagaagttcatacagctatgtttgataatagggctgtaatgagagttaaacatgctgagagagtatctagttctttaggtgtatggtttaacaaagaaggctttaatgaaaaaataaaaaatgaaggtgatgttaaagaaagggatgtagtcatttccagatctgaagcatttaaagatgcacctcatttttctgttggaatgcttcctgctgatataaatgatccagtagcaaaagatacttatataaatagagttcagacgctaactaaagagatggcttctcaagttgattttgctgttaaaagagaaaatcatatgaggaggacattagatgcagctagagagtttttgggtgttgaagtgtttaataaactttatactcagacgcatgaaaaggttataagctttaaagacaaattaaaaaatgtaaaacagtctttatctgaacctgtttctcaggatgtgagaagtaaaaatagaataaagtttaattaa

SEQ ID NO: 221970 - DNA, 996 bp, Klebsiella pneumoniae; identical to SEQ ID NO: 27262

SEQ ID NO: 221971 - DNA, 186 bp, Klebsiella pneumoniae; identical to SEQ ID NO: 27261

SEQ ID NO: 221972 - DNA, 645 bp, Klebsiella pneumoniae
atgttcagatatttcattctgcgccctgagcagcagttattctgttatttatacggctgcgcgctggcactggttcagatggttttattttctcctgtatcccgggcaagcggattttatctggttgcgttatctgtcgcgctgttctgggcaggccttgccctgtacacccggcacatcgaccggatgagaaagccagaggtctcaccgctggtcagtattcgcgacggtattcaggtggtggccgaggtgccgcgccatgaaaaggcccggctggaatgggaaatcctccgggatgatgagatgtttcgccagcaaaggtgtgagcttacaggcctgaccggacgggttatcagccgggggctgttgtatacgccggcggtgatgctggtcggtatcggtattctcgcctggggttccccacaggatgccatccggctgattaatgctcttcgtaatatgcctgctgcggaactggtgcatcagattggttttgtcctgtgccacttcctgcagattagcgtcatatcagttctgattgctgatgttgtagccgggagaggactgccgaatgtatttcgccgcgcgttgctcgacaggctgccggcagagttctgccttatcagaagagggacagaaagatga

SEQ ID NO: 221973 - DNA, 594 bp, Klebsiella pneumoniae
atgagtgaagaaaaacgccctgtactgagcctgaaacgaaaaccggcggagaacagtacgacctccgcagaggcgacccctgctcctggtgtggtgcgccgaaagaaggtcgtggtggtctcgtccccgccggcctggaaggcaaaaaaagagaaacttgagaaggttaaacaagcggccgaagccgccgcgcgcaacgctgcgccggtgccggttaaagcggtaaagacgccacctccggtgcattatcttcgcctgctgccgccggaacaggccatcatgaccctgaaggcattctggccacagctgttcgacggaaactcaccccgtctgctggcgacgggtatgcgcgaacagctgttcgccgacattgtgaaccgcgacctgccgctgtcgcataaacaggtcattaagtgcctgaagagtctgacccggtctgcgggctatctgtcccggatgaaggtgggggcctcccgctatgatctgcaggggaatgccgtcgcgaccgtcactgcagaggaagcgcagtacgccagtgagcgcatgatgaaggagctgctgcgggctgaacgaaagatgagtcagaccctttaa

SEQ ID NO: 221974 - DNA, 354 bp, Klebsiella pneumoniae
atgagcatacaaaacgtcaacgtaaaaccctccaccaaagaaagcacaaccctccggactgactgttttgtgcgcaacattcattcccgtaaccctttcgatgtgatccgcgctgatgtggtgctggctcgtatggaaaaacaggcaagtcgtgggtgtggtttgtactacgagatttatgcgtcccgtctgttgagtatggctatgatttacctggaaaagctgccgctgaaagatcgtccggtattcattggcgcggcggctcaacggggttacatgatgacgctggcggaagaagaacgtgctcatgatgaatgtgccgaccttatgagcgagctggcagctgattactga

SEQ ID NO: 221975 - DNA, 348 bp, Klebsiella pneumoniae
atgcacttactcctcaccgaatcctcagcccatccgggaatgctggctacagcagaagcagagcgcgaatactggttgagcctgcagaaagcagcggtaaaagccccctcagaaatcgacgttcacacattccatgacgcgctgggcctgatgtatccgctcaactggtcaacgagtgagaacggcgagtgggaaacgttcatgctgcaggagatggtttgcggtgacgtgacagagatctatgcccgctacggagccagatatttccggctgcgggatgtgtgtaacctgagccatgcgcagatcacaacgcgcattaaggagggatttaacctgaccgaaaaatga

SEQ ID NO: 221976 - DNA, 147 bp, Klebsiella pneumoniae
atgaatttcgacccgcaaatcgtcgcacaggcgaacgcgtttgtaaatgcccttcgcagtggtcagcgagcccgcgttcccgctttaaagctggagtactggcagcagttcatgaccgcggtttacgctggcctcggcctcgcgtga

SEQ ID NO: 221977 - DNA, 834 bp, Klebsiella pneumoniae
atgtcacaactgagttttgccgatgtgttcaatatggccagagaagccgctgataacagccctgtcattcaggcagggcagcagatcgcggaaatggtgcccacggttcagcgtatgatgagcgagcagtacagccggagccgttttatccgcgtatttaaggatacgggccgccatctggggcgctgggaagtgttcagtgattttctgtcgcttgccgccagcgagctggatatggcccggatacgaacgccggagagcatggagaactgccggaaaatctgcgcccggtacggggccaccgacatcgcgaacatgcaggaaatgttctgcctgatggtgtgtgcgctggaggcgaaatttcatgatttcctcggcgctatttttatggagctggagctgggcgataattttcgcgggcagtattttaccccgtattcagtgcagtgtctgatggcgcggatgctaatgccaggtgtcagagacactatccgccgggaagggattgccacagtcagcgatccggcgtgtggggctgccgggatgctgatcgcctatgcagagtgcctgcttgaagccgatatcaacccctcaatgcacatgttcggcagctgcattgacatcgatccggtagcggcagatatggccttcatccagctgtcactgctggggatagcggcggaagtggtgacgggcaacacgctcacgatgcagtaccggcgggtgaggtataccccggtttactacctgaatgcctttgaaaagcgactggcagatcttcgccggttcagggccatgcgggactttttgcgcggaatacaggaggccgcgtaa

SEQ ID NO: 221978 - DNA, 201 bp, Klebsiella pneumoniae; identical to SEQ ID NO: 101187

SEQ ID NO: 221979 - DNA, 921 bp, Klebsiella pneumoniae
atgtcaataagtgtaggtattgctctagccacctataatggtgaatcttttttaaatgagatgttaaattctattgaaaaacagacttatagtaatttcatgattcatatatgtgatgatggctcatcagataaaacgttagaaattattagagggcacaatctatttttaaaaaataaaatacagattcatttaacctccggtgggaatggagcaatgagaaatttcagaagaactttgagctattgtactgaagagtttattgccctttgtgatcaggatgattattgggtatctgataagcttgagaaaatgttgcaaaaatttgagggaaaggattccaatattcctattttagtattttccgacttgcaaattgttgatggttcgttaaatcaaatccacgcttctttttttacaagttctagtaaaagttcattaagtaaaaaacctcaggatttttttgttaataaccatattcccggttgtgctatgctttttaattctagtgcaaaaaaatgttttgagccaatccctgataatgtaaaaatgcatgattggtggattgcttatatggtttctttttttggtgaagtagtatatttggatgaacccttaattaaatatcgtcaacattctaataatacaattggcgctcctggtttttatcgccactcgatattgctttcggagattaattcaattaaacacgttccatatgcattgcataactcacgccacatgcttgctttgttaaaagaagcagttaatataaaaaaaactcaattcccattaaatcctgatggagaatatttttggcattgtgttaatggtggggtactttcaagatttaggctttttcggaaaagtcattctggggagcgatacttgatgtcattattaacttggtgtttattatga

SEQ ID NO: 221980 - DNA, 831 bp, Klebsiella pneumoniae; identical to SEQ ID NO: 97249

SEQ ID NO: 221981 - DNA, 498 bp, Klebsiella pneumoniae
gtgctatttattgatactgatatgcgtaagggttatacgcataatctatttaatgttgagaatacaaaaggcttatctgatatattatctggtaaaatgactgtagaaagagctattcaacctcttagcatggcaggatttgattttatagctaggggtgctgttcctcctaaccctgcagaacttttaatgcataagaatttcgacgcacttctttcgtgggctagccagaattatgagatcgttgtattagatacgccgccaatattagcggttacggatgccgcaatcataggtaattatgttggcactacgttacttgttgctaggtttgaacagaatacagcaaaagaaattgaagtgagcgtcagacgatttgaacaaagtggtgttattgttaagggatgtatcttgaacggtataataaagaaagcaagtagttattatagttatggctataatcattacggatatacctatactgataataaaaaataa

SEQ ID NO: 221982 - DNA, 756 bp, Klebsiella pneumoniae
atgagtgaggaagtgaagataaaaaaacttattaacgaacttactgatacaacctgttcggtgatattgatcccagatattttcacttttaatatccttcagtctcgtactgaggaaataaatggaattcctgttgtacctctgtttgatactcctttaaatggtatcaatatggttattaaaaggcttgaagatattgtcctttcagttgctatccttgttttaatatcacctattttattaattatatctgctgttataaaagcgacttcatccggccctattatatttaaacaaaaaaggtatgggattgatggtaaaccgataaaggtatggaaatttcgaaccatgacagttatggaagatggtggagatgttgttcaagcgacaaaaaaagatgctagaattacaccagttggtaaattcttacgtagtacgtctcttgatgaattgccccagtttattaatgcattgcgtggtgagatgtccatcgtaggccctcgtccgcatgctgttgctcataatgaacagtatcgaagccttattcaaggctatatgttacgtcataaagtcaaaccaggtatcactggatgggcgcagattaatggatggcgtggtgaaacggatactttagaaaaaatggaaaagcgaatcgaatatgatttggagtatatacgaaactggagtatctggtttgatctgaaaattatattcttgacaatcttcaaaggatttgtacataagtctgcttattga

SEQ ID NO: 221983 - DNA, 954 bp, Klebsiella pneumoniae
gtggcatctgcagatggaatgcgctttgttacgccagtcagaacaatcaatgccggaccgaaccgcaaatactttggtaataacagagggatcacctggtacaactttgtgtccgatcagtattccggctttcatggcatcgttataccggggacgctgagggactctatctttgtgctggaaggtcttctggaacaggagaccgggctgaatccaaccgaaattatgaccgatacagcaggtgccagcgaacttgtctttggccttttctggctgctgggataccagttttctccacgcctggctgatgccggtgcttcggttttctggcgaatggaccatgatgccgactatggcgtgctgaatgatattgccagagggcaatcagatccccgaaaaatagtccttcagtgggacgaaatgatccggaccgctggctccctgaagctgggcaaagtacaggtttcagtgctggtccgttcattgctgaaaagtgaacgtccttccggactgactcaggcaatcattgaagtggggcgcatcaacaaaacgctgtatctgcttaattatattgatgatgaagattaccgccggcgcattctgacccagcttaatcggggagaaagtcgccatgccgttgccagagccatctgtcacggtcaaaaaggtgagataagaaaacgatataccgacggtcaggaagatcaactgggcacactggggctggtcactaacgccgtcgtgttatggaacactatttatatgcaggcagccctggatcatctccgggcgcagggtgaaacactgaatgatgaagatatcgcacgcctctccccgctttgccacggacatatcaatatgctcggccattattccttcacgctggcagaactggtgaccaaaggacatctgagaccattaaaagaggcgtcagaggcagaaaacgttgcttaa

SEQ ID NO: 221984 - DNA, 849 bp, Klebsiella pneumoniae; identical to SEQ ID NO: 199678

SEQ ID NO: 221985 - DNA, 1020 bp, Klebsiella pneumoniae
  misc_feature (443)..(452): n is a, c, g, or t
atggataaagaattactgaaagagcaagagcgcttctatgagttcataaaaaactatgaatttataaataatagtggaaggctagatcttgaagctttttgtgtgaatttatctatgtgttttaattgtgatggtgtcttagaacaatcacctcaccctgatagtgtgtatgaacttcttatatatctgctttcaaattatgcaacgaaagatgaaatggatttatgggttcagacccaaaaaataattgattggaaaccgggtcacgcatacatgtatcctaataagtacagaacctgtattcacgttgccggaatggttcctgttctacaccactggatctataatatcggacatactctaatggaaataccagaaccagataagaccggtaagtatttcgaatgggtaagtcgtgattggaccttcgtatttacatttannnnnnnnnntataaatggtcttcatgagttcttttacaactatctgaaggcttttgataaaaatatatcgagaaaatcagggtgttctctgtttgagagtcttcatctcgcgagcaataatgatgtaaattttgacgatgcggcggagatggtaaaaaagagaaatgatgctcaaggaaaagctttggctagaatagagaaatcaatattatcaggcttctatcttgaagcaattgtcttatcagagtgtgtaattagcaatattctatacaattatttagaagctaaagacacaaagctacaaagccatagcttgaataaattgattaaacttatgcgagataaatatgaaggggatgtggaattactaaacgaactggatagatggagagttcaaaggaataaagcagttcatggatttgttgagtcatcaattgaagagatgggtatcaatcaagagcaatttcttgaattctccaagtctgcatcagaaaagggacttgaactttgcaaaatgacttttgactggtatttaagttgtgcggttaacttcattgaaacaaaatttgttccgtag

SEQ ID NO: 221986 - DNA, 1014 bp, Klebsiella pneumoniae
atgagtaatgcgcacaatccgcaacactggagtcagctggatatggatgaacagatccgtttctggcagggggtagaggacggccatgtggcatcttttctggtttccccggagaagaaatctacccgtcgccggcgcggcgagcactccacaaaacccaaatgtgaaaacccgacctggtttcgaccggagcattacaaaaaactgggtggccagctggggcacgcctataaccgtcttgttcaaaaagatcgcaccactggtgaggtgcgactgcgtatgcacgtatcgcttcatccgctgtacgtcagggaacgccgtcgggctggccgccggtatggcttccggccggaaaagcaacgtctgctggatgctatctggccagtgctgatcagcttctgtgatgccggcaagctgacggtcggtatgtgtatttctcgtctggcaaaagaactcagccagaaagacagtcatggaaaagttattccggaaacagaggtaacagtctcacgtctgtcccggttgattgacgaacaggtccgttttggtgtcctggctgtatctgaagaaaatagctgggacagggaatcccgtacctggcttcctaaatacgtctatatcaccgcgttagggtttcagatgctgggagtggatctggaaaaacttgatgcggaacaacaaaaaaagctccggcaaagcgaagagcgtcgtcgtcttatcgaggaggggattctgcgtgaagatgaggagatctccccgcgtgcagcacgtgagcgctggtaccgtcaaaaaactctcgatgcactgaagttccgtcggcagcgtggcgccgaacgtaaacgagctaaccgcctggccagatattctcgtgagcgccagattcacgaaatgtcgcttcatatcctgaagacaatgccggcagacgaggcttactggtgtacaacggagcggctgcagcagctggccattcagaacctgtatcagctggagctggccctggctccgccgtcctga

SEQ ID NO: 221987 - DNA, 288 bp, Klebsiella pneumoniae
atggaaaaacaggcggaacagactgcccgggaagtggccggggaggcgcgtaaagccggcgagccggcggaccgggtgaaagaggttatcggggacgtcattcgcggactggagcgtgaccggccgggtacggagaaaacgacgctaccggatgatcctcagttccggcgccaggaggaggcgattcagcaggtggcctcagaacgtctgcagcgtgagcgtctgcaggctgtggagcgtgacatggttcgtgaccttaaccgcgagaaaaccctcgggggcgactga

SEQ ID NO: 221988 - DNA, 987 bp, Klebsiella pneumoniae
atgcaaaaccctaaactccagaacctcacggattactccccctcagacgcgccctgggacgctcacaaaagcgtttctgacgacgtaggtgggatttaccttctcgcagccgaatatgagcgctacggggcgcgtatggcttcctgtggcggtttactgaggtttggttggtctaccctcaaagaaactggagaaactcgccttaggctacgtgaggcgcatttctgtcgtgtccggcactgtcctgtctgccagtggaggcgatccctgatgtggcaagcccgtttttatcagtccctgccgcgtattgttgcggattatccagatgcacgctggatgttcctgaccctcacagtgcgaaactgcgcgatcggggaattgggtgagacacttaaccgaatgaacatggccttccagcgacttaaggatcgcaaagagtttcgacctgttcagggctggattcgcaccacggaagttacacgtggaagtgacggtagtgcgcacccgcactttcacactctgatgatggttcctccctcaatgttcacgcgagattacgttaaacatgaccgctgggtagagctttggcgagagtgtttgcgtgtgaattacgatccgaatgttgatgttcgagcagtaaaaccccgcaagcctaaggacggagaatcattggcttctgcaactgcggaacttgtacggggcgcagtggctgaaaccctgaaatattccacgaagccggctgacatggttgctgatcctgaatggttcctcgaattgactaagcagacacataagcgccgatttgtggctaccggtggcgcactcaaagacatactgaaactcgatcaggaaactgatgccgatatggtaatcggggatgatattcccgaaggcgatgatgatggttcacgcattgcttttgagtggaaaaccgaatccaaaaagtaccgtcgctcaccgtcaaaagataaagctgaatcagactga

SEQ ID NO: 221989 - DNA, 441 bp, Klebsiella pneumoniae
atgagcattgattacaataaaataatgaccttaagcagtgaaggagtggaagattacatatacagaaataattttactgataagcaaaagctagagatatacggattccacaatagaaaccgaaaagataaagcaacagcaaatgtaaacaaagaacatagctctgatatacaacagagaatagtctatgttcacgcttttttagataatctggaaacgctcgggaagaacatgtcgggtgcagaatatacaataatgatccgtttatgtaagctcatgcagaatggaaatctgatcgccagtgtctcacaatctgctcttgcagaagagcttgccatgagtaaatctaatgtaagtaaatgctggcagaaacttattaataaaaatattctggtgcaagaaggaaaacatacaatgataaatgcgaatctctttctatag

SEQ ID NO: 221990 - DNA, 378 bp, Klebsiella pneumoniae
atgaaaaaactatttatcgctgctctggtgatcctgcctcttaccgcttgcaccacctacggcaacaaatcccttaaagacgaatcccaacaaaccgtaaaagccaaaatcattaaagggaaaactacccagcaagatgttattaatgcattcggtgagcctcagacgcgaggtactaatgatggtcaggaaatgtggtcttattccagcatgtcgggcgagactcagatttcaaactacattcccggtctggccctacttaagaacagcaacacggcgcatatgaactcccttgagatctggttcaaagggaatgttgttgagcgatataatttcagtcaaacgacgagtaaggtttcgaagggactgttggactaa

SEQ ID NO: 221991 - DNA, 366 bp, Klebsiella pneumoniae
atggttgttgatgatctgtctcacgtagagagctttgttactgttggtgagcgaggcgaagttattaatctcgatgcggatgggaacgaactacacacaccagacagttatcgtgaaaagttaaaaatagaacgcggtgaactccaggcttccttggagaaagccaaggaggaaatcaactcaatagataacgatataacttcgcaaaagattaagaaccagttgagtgctgcactatctcaaccaatggatgcagaaggtgagtggaacactaagagaatcctacaaggggttttagatttatctaaacaagtgggctgtggtgtactcacggctgcgatcacgcattatcttggagttagttaa

SEQ ID NO: 221992 - DNA, 270 bp, Klebsiella pneumoniae
atgtcacaggtcgttaaaggagttacttcctcatctaaacgtccctataggaagggcaaccctgtttctgcggcagaacgtcagcagaaagctgttgcccgaaaaaaagcgacgcacaaagaggtgagagtatttgtgcgggacaagcttaaaaaccagcttcaaatcatgtgtgagaatgaaggaattactcaggcagcaatgattgagaggctgattgaaagggaatctgcgaaactaggaatcgacgtaacgacgtcacattcttga

SEQ ID NO: 221993 - DNA, 366 bp, Klebsiella pneumoniae; identical to SEQ ID NO: 221991

SEQ ID NO: 221994 - DNA, 402 bp, Klebsiella pneumoniae
atggccagagtgtctattagtgaggctgcccgactgacgggtaagagtagaacaacactgcacaggttaattaaagcaggtgacctgtccacctgtagcggtgaacgcaatgcaaaaatggtagatacttcagagcttttacgtgtctttggtccctttgaacaaccgaagggtgaacaccattctggacaggtctctgaacagcgtgatacagcctctgctgaccagagtgaacaggtgattcgtcatctgaaacaggagattgaacacctgaacaccttacttttgtccaaggattcgcacattgacagcctgaaacaggccatgctccttcttgaaaatcaccaggcaaaattaactgaatccccggcgccatggtggaaattctggaaaaaatcctga

SEQ ID NO: 221995 - DNA, 267 bp, Klebsiella pneumoniae
atgaaaaagacccgctataccgaagaacagattgcgtttgctctgaaacaggccgaaaccggcacccgcgacggggaagtctgccgaaagatgggcatttctgaagccactttttataactggaagaagaaattcgccggtctgggcgtgaccgaaatgcggcgtctgcggcaactggaggatgaaaatctgcggctgaagaaactggtggctgacctgagtctggacaaggagatgctgcaggaggtgctgaaacaaaagttctga

SEQ ID NO: 221996 - DNA, 690 bp, Klebsiella pneumoniae
atggaaattcgttcgatatggctaagtgatatgaaacaaactctctccagtctcagcggagacacgataaaagcgattgttttggtctgccttgccgtcggggtggtgggcatgtcctatgggtcgctggcggtggcttacggcttccctttatgggtgccgctcttgctttcggtatccgtgctggcaggcgcttctgaattcatgtttatcggcattgtcgccagcggcggtagtccgctggccgccgccgccgccggcctgttagtcaatgcgcgtcatatcccgttcggggtgaccgtacgcgaactggttggtcggcgcgccttaagctttatcggatgccacattatgaacgacgagagcgtggtctttggcttgtcgcagcccacccccgcgcagcgcaaagcggcctactggctgtgcggcgctggcgtcgcgctgatctggcccctcggtacgctaaccggcgcggccgtcggcaaactgctgccagcgccggaaaccatcgggcttgatgcggtcttcccggcgatcctgctggcgctggtgatcccggcctttaaaaaccgcactacgctgatccgcgccgccagcggcgccgcgctggcgcttgccgccgtaccgtttgtgcccaccgggctgccagtgctgctttcgctgttcggtttactgtcgaggaaaaaataa

SEQ ID NO: 221997 - DNA, 1011 bp, Klebsiella pneumoniae
atggcatctattaaagacgtagcgaaaagagctggggtctcgacggcaaccgtatcgcgagtgctcaacaatcatcccagcgtcgtgccggaaacgcggcaggctgtgcgtgatgcgatggattatctctgctatgtccccagcaaaagttcgtttcagcttagcggtaaatgttcagggttgattggtgtggttttgcctaacctggtgaatcctcatttctgtgaactgctggcgacggtggaagaagaggcccggtatatcggcaaatcggtgatcgttaaaacgcatcagaatcagccgcagcaggataaacatattattctgaccttagtggggatgggcattgacagtttgctatgggtgccgacagaagcagaagccgaactttcagaatggttaagcattacccggatcccggtcgccgtcgtcacccaggtgtcccggttctttaactccgtatcgattaaccaggaccggggggcagaaagtattgcggaacattttattcatacaggccatctttcgtttggctttgttgcccaggaaggggttgataatcgtaaggtttcatcgtataccaaaaaaatagcgagtcatggtttaaaacttgctaaagataattcgttctggatagccaaaggagagggggaaaagatatcaggccatattagcattcttgatgatattattgcgaaactcagcgatccgaagcgaatctgtacatgtctgctagtgtataacgatattgcggcaaattatattatcgatgggctaaaagaaaaaggcatctccattcctgaagatgttgcgattgccagttttgacaataccttgctggcacaaactaaaaaaataactagcgttgcacagccggtaaatgaaattgctcacctcgcgtttcagatggtgaagcatcaacagcagccggacagtattgaaatgcacgaaattgtctctcggttaattgttcgtgagagcagcgtaaaaattaatattacttccctgtaa

SEQ ID NO: 221998 - DNA, 1389 bp, Klebsiella pneumoniae
atgtctgctaccgcaatggaaaagccaagtgcttatgaaaagctggggttgagggagaagatcggctacgggatgggggacgctggttcaggaatgatatggagtgtactggcgctctatctgacgtggttttataccgatgtctatggcctcaatgccggggtggtgggcacattattcctcgttattcgcatctttgacgcgtttagcgatccgctgatgggggcaatctgcgaccgcacggtgtcacgctggggaaaattccgtccatggctattatggatggcgcttccgtttggtctaggcgcggtactgatgttcactaccccagaactcagcatgaacggaaagattatctatgcctgggttacttatctggtcatgtcgctgatttataccgcgattaatattccctattgctccgtcggcggcgtcattaccctcaatcaaaaagagcgcatgggttgtctgtcatggcgctttttcctgaatggcttggcaacattaattatctcctcctctattctgccgttaaccgactggctgggtaacggcgaccgcgcctccggtttccagctgaccatggtcattatgggcggggcggcaacgctgatgttcctgttctgcttttccagcattaaagagcgggtggtatcggttaagcaaaacgagtcgttgaagaaagacctgcgggatattatcaaaaacgatcagtggctcttaatgatctctattactttcctgaacgtttttccggcatttatacgcggtggcgtcactatttattatgcgacttatgtcatgaaggcgtctgtcggatttattaccttctttatggcgctgggcgtggcctgtaatatgctgggcagcgtgcttgccaaaccgcttaccgatcgctttgataagctggcgctgttccgtattattaatattattctcgggtttctgtcattggcgctgtggtttatcgatccgcaatcgttgaccccgctgatggcgctatttatcgtcattaacgttctgcatttaattcaatctggccccattctgtgggcgatgatgtccgatgtcgatgactacggtgactggaagttcggtaaacgcctgaccggtatctctttcgcgggtaacctttttatgctcaaaatggggctggcggtggctggcgcaatcgtcgcctggattctggcgtttaccggctatatcgctaatgaaccacagcaaaattcccagaccattcaaggcattatcatgatgttctcactgctgccgatggtgagttatttcattagcgcgtatctggtgcgctacttcaagctgaataacgccttccttgaaaaaatcaaagccgatcttgcaaaacgtgaactggaaaaaggacgcggttaa

SEQ ID NO: 221999 - DNA, 1374 bp, Klebsiella pneumoniae
atgacgcataataattattatgacgtgacgcagtggcatatcggtaatccttataaggatattggggaggttattaacagtattatcctcgatattaaaaaacgacaaaccgcaactgatgttaataacggcgggaaacctggcgccgttatctatattccgcccggcgattatcatctcaagacgcaggtttttatcgatatcagttatttaaaaattatgggtgccggacacggttttgtctcctcaagtattcgtttcaatacgccggctgtcgagtgggcgtatttgcatgatatttggccgggtggtagccgcattctggtcgatatttgtgtgcatcccggcgatgaagaacatgctggcgctgcattttacgtgaaacgcagcggagcgccgcgaattagttcggtggcgtttgaaaacttctgtattgatggcctgcactttattgatgatggattgggaaacaacgatccggaaaatagctatattaacggcaaaacagggatttatatcgccagcgctcaggatgctttccggattacaggcatgggatttatctatcttgagcatggtctcacgatgtacaatagtgatgctatggctatccataataactttatcgccgaatgcggcaactgcatcgagcttcgtggcgccggacaggcttctaaaataaccgataatctgattggcgcaggctataaaggttattcgatttatgcccaaaacttcggtgggttattgatttccggtaacaatatctttccgcgtggcgccagcagcgttcatttatctggcgttgttcgttctagcgttactagtaatcgattgcactcattttatccaggaatgttggttcttgaaaataactgtgcggagaatctcatcgctgcaaatcattttttccgcgatcgcgaaccctggccgccgatgcagacctatgacaatggcctggatgatgcctatggtctgctgcatatcaatggtagtaataactcggttattgccaatcatatttccgaaactattgatatccagtatcttcggccacagggaataaagccggtcatcatccggctggttgccggtaaaggaaactaccttgcgaataatcatattgttgcgaccacggaagcgtcagtgcagcaggcgcacccttccgaagaggacgcttgctttgcggctcaggtcagcgctttgctgacgacggatagattaaaagcccttgatgcggtcgcggtgctggtagaaaaagcgtcgtctcaaaacacgatacttgattgcggcaatagccaacaggtgatgatggacagagcgacgaatgccttcagggctacgccagctcccggcaatatagagatggaataa

SEQ ID NO: 222000 - DNA, 252 bp, Klebsiella pneumoniae
atgactgacaatgccatcctgttaggcgaaggcttcaccctgatgtttctcggcatgggctttgtgctggtgttcctgctgctgctcattttcgccatccggggaatgtccctcgccgtcaaccgcctgtttcccgagccgcccgccgcccccaaaccggcgccggccgccgtcgcgcccgccgacgatttcgcccgcctgaagccggcgattgtcgccgccattcaccaccatcgccgtcttcacccttaa

SEQ ID NO: 222001 - DNA, 1770 bp, Klebsiella pneumoniae
atgaccgttgccattaccgatgtcgtcctgcgcgacgcccaccagtccctgttcgccacccgtctgcgtctcgacgatatgctgcccgttgccgctcagctggacgacgtcggctaccgctcgctggagtgctggggcggcgccacctttgacgcctgcatccgctttctcggcgaggacccgtgggtccgcctgcgcgagctgaaaaaggcgatgcccaagaccccgctgcagatgctgctccgcggccagaacctgctcggctaccgccactacgccgacgacgtggtggagcgcttcgtggagcgcgccgtcaaaaacggcatggacgtcttccgcgtcttcgatgccatgaacgacccgcgcaacatgcaggccgccctgcaggcggtccgccggcacggcgcccacgcccagggtacgctttcgtacaccaccagcccggcccacaccctgcagacctggctcgacctcaccgaacagctgctggagaccggcgttgactccgtcgccatcaaggacatgtccggcattctgacgccgcatgccgcctttgagctggtcagtgaaatcaagaagcgctacgacgtcaccctgcacctgcactgccacgccaccaccggcatggcggagatggcgctgctgaaggccattgaagccggggtcgacggcgtggatacggcgatttcgtccatgagcgccacctatggccacccggccaccgaggcgctggtggccaccctcgccggcacgcaatatgacaccgggctggatatccacaggctggagagcatcgccgcatacttccgcgaggtgcgcaaaaaataccatgccttcgaaggccagctgaaaggcaccgacagccgtatcctcgtcgcccaggtgccgggcgggatgctcaccaaccttgaaggccagctgaagcagcagagcgccgcccaccgtctggatgaggtactggcggaaatcccccgcgtgcgcgaggacctcggcttcatcccgctggtgaccccgacctcgcagattgtcggcacccaggcggtgctcaacgtcctgaccggcgagcgctacaaaaccattgcgaaggagaccgccggtatcctgaaaggcgagtacggtcgcaccccggcgccggtgaacgccgccctgcaggcgcgggtgctcgacggcgccgacgccgtcacctgccgcccggcggatttactcaagccggagctggccgcgctggaagccgacgtcagacgccaggcgcaggagaagggcatcacgcttgccgaaaacgccatcgacgacgtgctcaccgtggcgctgttcccgcaaatcggcctgaagttcctcgaaaaccgccacaacccggcggcctttgagccggtgccgcaggtggaagccgcgcagccagtggcaaaagcagaaaaacctgccgcctccggcgtctacaccgtggaagtggaaggcaaagccttcgtggtcaaagtcagcgacggcggcgacgtcagccagctgacggcggccaccccgtcttccgcaccggttcaggctgccgccccggccggcgccggtaccccggtgaccgccccgctggcgggcactatctggaaggtgctggccgcggaaggccagacggtggccgcaggcgaggtgctgctgattctggaagccatgaagatggaaaccgaaatccgtgccgcgcaggccgggaccgtgcgcggtatcgcggtgaaagccggcgacgcggtggcggtcggcgacaccctgatgactctggcgtaa

SEQ ID NO: 222002 - DNA, 1302 bp, Klebsiella pneumoniae
atggaaagtctgaacgccctgatccagggcatggggctgatgcacctcggcgccggccaggccatcatgctgctggtcagcctgctgctgctctggctggcgattgcgaagaagttcgagccgttactgctgctgccgattggcttcggcggcctgctctccaatatcccggaggccgggctggcgctcaccgccctggagagcctgctggctcaccacgacccggcgcagctggcggtgattgccgcgaagctccactgcgcgccggacgtccacgccatcaaagaggcactggcgctggccctgccgtcggtgcaggggcagatggagagcctcgcggtggacatgggctactccgccggggtgctggccatcttctataaggtggcgattggctcgggcatcgcgccgctggtgattttcatgggcgtcggggcgatgaccgacttcggcccgctgctggccaacccgcgcaccctgctgctgggggcggcggcgcagttcggtatcttcgccaccgtgctcggggcgctgacgctgaactacttcggcatcatcagcttcaccctgccgcaggcggcggccatcggcatcatcggcggcgccgacggcccgacggcgatttacctgtcgggcaagctggcgccggagctgctgggggccatcgcggtggcggcgtactcctatatggcgctggtgccgctgatccagccgccgatcatgaaggcgctgaccacggataaggagcggaagatccgtatggtgcagctgcgcacggtgagtaagcgggagaagatcctcttcccggcggagctgttgctgctggtggcgctcctgctgccggacgccgcgccgctgctggggatgttctgcttcggcaacctgatgcgcgagagcggcgtggtggagcggctgagcgatacggtgcagaacgcgctgatcaacatcgtcaccatcttcctcgggctgtcggtgggggccaagctggtggcggacaagttcctgcagccgcagacgctggggatcctggtgctgggggtgatcgccttctgcgtggggaccgccgccggggtgctgatggcgaagctgatgaacgtgttcagccggcacaaaatcaacccgctgatcggctcggcgggggtgtcggcggtgccgatggcggcgcgggtgtcgaacaaggtgggtctggaagcggacgggcagaacttcctgctgatgcacgcgatgggcccgaacgtggcgggggtgatcggctcggcgatcgccgccggggtgatgctcaagtacgtgctggcgatgtaa

SEQ ID NO: 222003 - DNA, 1233 bp, Klebsiella pneumoniae; identical to SEQ ID NO: 212934

SEQ ID NO: 222004 - DNA, 771 bp, Klebsiella pneumoniae; identical to SEQ ID NO: 210797

SEQ ID NO: 222005 - DNA, 1617 bp, Klebsiella pneumoniae
atgcgtatctctgtgattagcgcagcggtttgctgcgccctttttccgctcatcagcgtcagcgccgccggcttgagcgtggagcaacggctggcgcagctggaagcgcgcctcaatctcgctgaacagcaggccagcgaggccagccgccgcgcgcagcgggcagaacagcaaactgccgccgccgagcagcgcgccgcggcggcggagcagcaggtgcaggcgctcagccagcagaccacggctcgcgaacaaaaacagcaggccactaatcagcaactgagcgagcagctggcgaagcgcgtcccggacgatgggtttacctttaacgcctacgcccgttccgggatgttagtcaacagccatggtaaaggcgcccgcggcgggccgggcgtctccccggccagttcgctcaacggcgatgcccatgtcggtcgtctcggtaacgaaaaagataattacgccgagctgagctttggcaaaaagctcaccttcaacgatggctcatgggcgcgcttcaagaccatgctcgccgacggggccaccaacccggatccgtgggttcaggataacgacagccaccatctgaacattcgtcagctgtacgtcgagatgggtaactttgccgaattcaccggtccgttaaaacgcgcctcaatttgggccggcaagcgcttcgatcgggataacttcgatatccactttaccgatagcgacatcatgttcctcggcggtaccggcggcgggatcaatgatgtcgactggggaagcggcctgcgcggcgactattcggtgtatgcacgtaacttcggcgaccttggcagcgataattacgcggataatgacatccagaatctgctgttcaccgccaaccatttttacggcaactggcaactgatgaccacggtgatgaccgcccagggcaacgatgacctgaaagataatacctcgaccaccgggagctatgccctgcgcagcgataacaccgccaaaaacggctactacgcgatgctggccctgcacgacaaacagcagttctacggcctggcgccgggggtgtctgaaagcgccctgcaatacggcgtcgggctgggcgccgaagcgcgtcagccggggagcgatggcgatctgaccgagaacgcggcctccctgcgctttgcgtcgtatggcatcctgccgttggggaaaaactggcagctggcgccgtcggtgatagcccagcatagcgaagaccgctatcgcgacggcgaccgctacgactgggcgacgtttaacctgcgggtatcacaggggatctccgctcacttcgccctgctgtatgaggcctcgtggcaatatatggatctcaatccgaacgggcgcagctatcgctataatgacaacgtttatcagtatcaggcggtgcgcggtgatttctacaagctgaccttcgcccccacctttaaagtgggtgatgtgctggatatcaaggcgcggccggaaatccgcttctttgccacctggatgaactgggataaagcgctggatcgctacgcgataaatgacgatttcggcagcaaaggctttaccgccggcgggacatggaacttcggcgtgcagacggagatttggttttaa

SEQ ID NO: 222006 - DNA, 1569 bp, Klebsiella pneumoniae
atgtcacaagcaattcaatacaattccagcgtggcgatgatccgtcacccgcgctttttacagcgtgcggccgacctgacgcccgcgctgcaacgcctgcgccagacgccgcaggccatcgtcgaggccgtcgctgaaccaggagcgctgaacggctggcgggggaataccgtctgcacgccggagcagttttatcagcaaccgctcaacgtcggcgacagcatcattattgattttggcagccattttgttggctacctgcagttcagctgccgcagcgtcggcagcccgcccgatgccccggcccatctgcacttcaccttcggcgagacgctgagcgaagtctgtgagccgttcagcgaataccagggatggctgagcagcagctggttgcagcagcaggatctgtggcttgacgtcctgcccgcccgggtcgctctgccacgtcgctattgcctgcgctacctgaaggtggaggtcaaagcgctgtcgcgcaagttccgtctgcagttcgatgagatcgctctggaaaccgtcacctctgccggcagcccgcacccggcggtcatcgccgatccgcagttgaaagccattgatgacgttgccgttcgtaccctgaaaaactgcatgcaggaggtgtttgaagatgggccgaaacgcgaccgtcggctgtggctgggcgacctgcgcctgcaggcgcaggtgaatgacgtgaccttcggccaccacggtctggtccgccgctgcctgtatctctttgccggccatacccgggaagatggcatggtttccgccaatgtctttgttcagccagaggtacgcgccgatgacacctttctgtttgattactcattgttttttgtcgacgtgctttataactacctgcaaagcaccggcgacacggaaaccgtcggtgagctgtggcccacggcgcggcggcaaatcgagctggcgctgacccgctgcgattcgcaggggctggtgcgcgacagcgatgactggtgggtatttatcgactggcaggcggagctgaataaacaggcgtcggcgcagggggtgctcatctactgtctgcagcgcgccctctggctggcgcagcgttttgaaccgcagcgggtacccgactacactgccgcgctctggcagctgaaggaggccgccctccaccacctgtgggacaacgagcggcaggtgtttatcagcggcgccgtgcgtcaggtctcatgggcgtcgcagatctggctggtgctggcggaagttggcaccgccgggcagcgtcaggcgctgatgcgccgcttgcagcagcagccgcccgccattgccatgaataccccgtacctgcgtcatcatcacattgttgccctgctacagtccggcctgcgcgaggaggcggtggcagagatcaaagcctactggggggcgatggtcgcctatggcgccgacaccttctgggaaattttcgacccccaacatcctgacttttccccgtatggcagtaagcttatcaacagttactgccatgcgtggagctgtaccccggcctggtttattcgccagtacggactttaa

SEQ ID NO: 222007 - DNA, 1176 bp, Klebsiella pneumoniae
atgagcctgcaaaaaacctggggaaacattcacctgaccgcgctcggcgcgatgatgctctcctttctgctcgtcggctgcgacgacagcgtcgcacagaatgctgcgcctcccgccccgacggtcagcgccgctaaggtgctggtgaagtcgatcagtcagtgggatagttttaacggtcgcattgaagcggtggagagcgttcagcttcgccctcgcgtctcgggatacattgataaagtgaattacaccgacggccaggaggtgaaaaagggccaggtgctgttcacgatagatgacagaacctatcgcgccgcgctggagcaggcgcaggcggcgttggcaagagccaaaacgcaggccagcctggcgcaaagcgaggcgaaccgcaccgataaattagtccataccaacctcgtctcccgtgaagagtgggagcagcgccggtcagccgcggttcaggcgcaggccgacattcgcgccgcgcaggcggcggtggatgccgcgcagcttaacctcgacttcaccaaagtgaccgcccctattgacggccgcgccagccgggcgctgatcaccagcggtaacctggtcaccgcgggcgacaccgccagcgtgctcaccaccctggtctcgcaaaagacggtgtacgtctactttgacgtcgacgagtcaacctacctccactatcaaaacctcgcccgccgcgggcaaggcgcgtccagcgataatcaggcgctcccggtggagattggcctggtgggcgaggagggttactcccaccagggcaaagtggattttctcgataatcagttaacgccgagtaccggcaccatccgcatgcgtgcgctgctggataactcgcagcgtctgttcacgccggggctgtttgcccgcgtgcgtctgccgggcagcgcagagttcaaagccacgctgatcgacgacaaagcggtactgaccgatcaggatcgtaaatacgtctatatcgttgataaagatggtaaagcacagcgccgcgacattaccccagggcggctggcagacggtttacgcatcgttcagaaggggttgaatcctggggatagcgtcatcgtcgacggcttacaaaaagtgtttatgccgggtatgccggttaacgccaaaaccgttgccatgacctccagcgccacccttaactga

SEQ ID NO: 222008 - DNA, 771 bp, Klebsiella pneumoniae
atggaactatacacaggcagctccgatgaaaaagatgcaagttatctcctttcttatttggatgatgttttaaccccagcatctgaagagttttttacaatactaaacaacaatacactgaagcttcatcatgtattttcatttaacgcaatcttggctcacgttgttgattacatgatatttattgcaaaaaagaaaactgaaataaccagaactgattttattaaaagctttgataaacgatatgaagtggatgggagtaagcacattagcaataagttttctcttttggatgcgattaacaactcattcaagcatgttgaactggataaaaaaagatataaggaacttatagaaaaatatggagatttatcttttcacagtcttaaagctgataatggtaaggttttctttgaaatgcccttatacaaatttgattatgcgagggtagtccttagacctatatcaaatattttcaactgccagttaagaaatattagtgacattgacgacttcataaatggaagaatttatggcagtagtggttatggacatttcgactacgattatgaaccctgggatgccattgataggatgatagattactgtaatgctgaatgcatggactgcggcgaaagtgacagcaattgtgattgtcaaaatttcatttatgaaagtaaaaatggccaatttaatccagatacagatccaagattcaacttcgacgatgtgatgtctaacattagtggaacaagagaatggcgaaaatga

SEQ ID NO: 222009 - DNA, 903 bp, Klebsiella pneumoniae
gtgattctggccgcgctgtttatggtgctggcgaaccgttacgactggcagctctttcttgaggtgaccgggccgggtggcagtggcaaaagtattctggccgaaattgcgaccatgcttgccggggaagataacgccacgtcggccaccatcgaaacgctggaatcaccccgcgaacgcgctgcgctgattggcttctcgctaatccgtctgcctgaccaggaaaaatggagcggtgacggggcaggactcaaggccatcaccggcggggatgcggtctccgttgacccgaaatacaaggatgcgtactccacccatattcctgcggtgattctggccgtgaacaataacccgatgcgctttaccgaccgcagcggcggtgtttcccgtcgccgggtgattctgcatttcccggaacagattgccccggaagaacgcgacccgcagcttaagaataaaatcgcccgcgagctggccgtcattgtgcggcagcttatgcagaagttcagcgacccgatgaccgcgcgcgcactgctccagtcacagcagaactccgacgaggcgctcagtattaaacgcgacgccgacccgacatttgatttttgcggctatctggaagccctgccggagcctgaggggatgtatattggcaatgccaacattattccgcgtcagccgcggctgtatttgtaccatgcctatctggcgtatatggaagcccacggttacaggaatactctgagcctcaccatgttcggtaaggggttgccagccatgctgaaagagtacgggctgagttatgagaagcgccgaaaaaatcagggcatacaaaccaatctcgcgttaagagaggaaagcaatgccgactggctgccgaaatgtgatgaccccctagcgaaataa

SEQ ID NO: 222010 - DNA, 711 bp, Klebsiella pneumoniae
atgaaaacgaacgtaacagaaacggtaaaacaggcgtgcggccactggccgcgcattctcccggcgctgggtgtgaaggtgattaaaaaccgccatcagtcctgcccggtgtgcggcggctctgaccgttttcgctttgacgacaaagaggcgcgcgggacgtggttctgtaaccagtgcggcgcgggtgacgggcttaagctggttgagaaagtatttggcgtgtcggcctccgaggccgccggaaaggtgaaagccgtgaccggcaacctgacgccggttgccccggaagtgattgcggccgcagaagctaaaatggaggctgaccgcaaagcggcggccgcgctggccgtaaagctcatggagaaaacccaaccggccaccggcaacgcctacctcacccacaagggttttcacgcgctggaatgcctgacgctcgtcgccacacataaaaccggcggcgtgacgttccgcgccggtgatgtgcttgtccctctgtatgacgatgccggggcgctggttaacgttcagcttatcaattctgacggtctcaaacgcaccctgaaaggcggagcagtgaaaggggcatgtcatatcatcggggggcagaaacaggccggaaaacgtctgtggatagcggagggctatgcgaccgcgctcaccgtgcatcacctgaccggggaaaccgtcatggtggcgctgtctccgtga

SEQ ID NO: 222011 - DNA, 228 bp, Klebsiella pneumoniae
atgagacacaccaccattaccgcccgtgacctcgaatgtctggagcatatgcgcaacgtcggccagctcgtcagcgacctgatgcaggtgcaggactgcgccaccgttcgtcgtgacccggcgcagcagttacagctcacctccgtgatttacctcatgaccgcccagctcgacggcgtggtcgaacgctgcaatcagcactggctgaccggggagaacaacgtatga

SEQ ID NO: 222012 - DNA, 267 bp, Klebsiella pneumoniae
atgcacaccgctttttcttccccgtcttctgcccctgccgcgccgctgatgccggtttctgataccgttcaggagcgctttatccgcctacccgaagtgatgcatctgtgcggcctgtcccggtcgaccatttatgacctcatcagccgggaggcattcccgaaacaaatctccctcggtggtaaaaacgtggcgtgggcgcagtctgaaatcaccgcatggatggctgaccgtattgccgaacgcaaccggggttatgacgcatga

SEQ ID NO: 222013 - DNA, 738 bp, Klebsiella pneumoniae
atgactcagaccgctgttattcccgactatctgaaacccgcgatggaacgccttgaaacggccagagaggcacatctcgccagttgcagacgtatggacgaaaccacgacggccatcagccaggtgaaagcacaaaaaaaagaactggagcaggacaacggcaatgattccggcgcatggcgtactgcttttcgtgccggtggtgccgtcattaccgacgagctgaaacaacgccacattgcgcgagtggcacagcgggggctggcgcaggaatgtgacaatatggctgaggtgctgtcttttgagctggacagtcttaaagcagcctgtgaccggacggccagagcataccgtcaggcacatcatgacgtcctcagtcagtatgcagagcatgagcttgatgttgccctgcgcaaaacctgtgatgctctcgtcagggcaatgaaactcagcatactggtaaaagaaaatccgcttgccaataccatcggacatcagggctatgtcgagccagagcacgccgttatgcataaggtgagaacgtggcttgagcaggcagtgaagggctggaatatctgtctgactgatgaacctgtgctgtttaagacagggctgtcggcctccacgctgccgcatatggatcatgacgttgcggccacgcccggtcagcgaaaagtctggcatgaaaaaatgcgcgaacgtgaagccgacctgaaagcgcgggggatactgtcatga

SEQ ID NO: 222014 - DNA, 261 bp, Klebsiella pneumoniae
atgatgcgctgccctaattgcggtcaggccgcccacgtccggaccagcaaatatatgtccgagaacgttaaagagagctatctgcagtaccagaatgtgcattgctcaacgacgttcaaaacgcatgaatctatttttgagattatccgctctcctgcggaaaagaagaaagtcgaacctgctccgccgaaaaccataaccacccgcaaagtgaagggctgttacagctcgccgttcagccataatcaggagagacgataa

SEQ ID NO: 222015 - DNA, 564 bp, Klebsiella pneumoniae
atgactaccctgatcttacaaaatgcgttcgaagcctgtcagacgaacaaagcagcgtggatgaaccgtaaagctgaactggccgctgccgagctggaatatcgggatttattgctggacgacacaacggattcccgccggttacagacgttgcgtgatttcattgatataaaaaaatgggaagttaatcaggctgccgggcgctacatcttctcgcatgaggaagtacagcgcatttgcatccgtaaccggctgcatgattttatgcagcagaacggtgcagagctggccgccgcactggcaccagaactgaaggggattaagaaccagcctgcgctgttaaaaagtcgtgcgctcgaccgttcgatggcttaccttcgtgaagccctttccgtctggctggccgcaggaaatgaaattaattattcagcacaagataacgacattttaacggccatcggatacaggcctgacgcgccttcgcgggatgataatcgtgaaaaattcacccctgcacagaacatgatttacatccgtcggcgcgccgaactggccgcacggtag

SEQ ID NO: 222016 - DNA, 1770 bp, Klebsiella pneumoniae
atggacgaattaaacattggtaaagtcacacaagtaaaaggaaccactgtcaaggcaaaaataaaccatgacttgtaccaatctacatattttcacaatggaaaaatacttcgtggcatatctataaatgaatttgtgttagtccgaaaaggttatcaggatatagtaggcaagatcattggcgaggaaattgttgagaattttaatattagaatcgatgatattgaacaaaaaaaatatgaaagatttgttgatcttaatattctcggttatttttttgaagggaagtttttctctggcataaaataccttccaatgataaatgatagactgtatttgatttctgatgataaaatatctgagatatacagctttagcaaaagcactaaaaccccacttattaacattgggagatccatgttagaggaattaccaattaacatcccaataaatggagtttttaattctcatattgggatttttggaaatactgggagtggaaaatcaaatactttagcaaaattatatcaatcacttatcaatcgaattgacaacatagaactatttagtagcaaatcaaaatttgtcttaattgatttcaatggggaatatgggactcttgagagctcctttccagaactgtgtcaatcaataaagcttagtacaaaaaaagatggtggtaaaattcatttcggagaaaaagagttttgggatgatgaactattatcagtgctattctcagcaactgaaaaaacacaaaagccattcttaacccatctaataaagagcaagttaaaatatgatgatgaccttggtgagtatctaaaaagaactattaaaataatgtttggcactaaccctcacaaagagacagttaatttacttaaaagcctaataccttattttgaggaaggtgatcaacaaaaaataatagacgaactatctctatttacttggcattcaggtcaagataagtatacacaccctgatagctggctcgataacacagctgaagttctgcaacacactcaatctacatacaacagcaatttcaatatcactagtgtatttgatgaaattgctatacgtgcgacactacaactaataaactcagtctccagaaactatgtccaatatgatcatatatatccactaataaataaaataatagctatgagctcatctttggctaaagtcatagaaattaatgatgttcagcaaaataataaacccatatcaataatatcccttaaagaatgcaatcagtccataaaaaaaaccattccaatgatgattgcaaaatgttctttcttggaacacaagtcctctgacaataagatggaaagctttcatttgataatagatgaagctcacaacatcctatctgaaagctctgtaagagaagctgaaacgtggaaagactacagattagagttgtttgaggaaataataaaagaaggcagaaaatttggctattttgtcactatttcaagccagcgaccatttgatatatcgccaacgatcgtgtcacagttacacaattatttcatacatcgcttggtaaatgaaaatgatctttatcttcttaaaaacaccttaagtactttggatgcagcttccagaacgctcataccaacgcttcctcctggtgcatgcataatttcaggaacagctttccatactccgctgcttgtgcagatcgatagacttgctgaagagagtgccccacaaagtgacacgcttgatttagagaatttatgggatctttaa

SEQ ID NO: 222017 - DNA, 1116 bp, Klebsiella pneumoniae
atgagcacgagagaatttccatgcaaagcatcaaacatctatgacaagaatataaatttcctatttggctcaggagcatcagcatcgtatatacctactttgtggcttgctgaaaatactacttatgagactttattaactcatgaagattgcaaagacgttaaagatttcattttatgttcctattttaataaaattattagaaagacattttgcatagagccagctttagaaaacaaaaaatacacttcaacaatagctagctatacaaatttcctagatgaacttgttacgttattagaaaaaaaaggttccaaccaaattagaagggctaatattttcactactaactatgaccttttttttgagacagcagcggataatgcattatccaaaaaaacgttccattttaatgatggtgctataggttttaaaaatagaagattaaatattagtaattttcatattacaacctggcatcaaggcacgcatgacatgtacaaacatgaactaccaacggttaatttaattaaaatgcatggttcagtctcatggaaaagaaatgagcatgaaacgataagcattaactacccaattacttcaccagaaagaataaaattagagacagataaaaccatagatgacctggtggctactttaaacaacaccaatgataatcttgctaactacttagacttaaatattaatgatatgaatttacttgatgaattcagatcatattatgactcactcgcaatagttaatccaacaaaagagaaattttcagaaacagtttttcagcagcattattatcaaagcttgagattattaagttatgaattagagaagccacaaacagttttaatttgcttcgggttttcgtttcaagatgaacatatccttgaaataatcaaaagatctttaagcaatcctactttgaaagtctttgttttttgttacagcaataaaagcaagcacgatataaatacaacagtaaatgaccctagaataacctatatcttcccaaaagaagatgagcataaaatttcttttgatactttcattgatagaatattcaaatcagaaataggagactgggtcacatggacgaattaa

SEQ ID NO: 222018 - DNA, 1194 bp, Klebsiella pneumoniae
gtggcacggacaacacgcctcctgagcaacacccaagttttgcgcgctaaagcgttagagaaggatctaacattgcatgatggcgatggccttttcctgatagtgaaaaccagcaggaaaaagctctggcgtttccgttaccaacgtccggcgacaaaacagcggacaatgatggggctaggagctttccccgccctctcacttgctgacgcccgagggttaagagcggattaccttaccttgttagccaacggaattgacccacaaattcaggccgaagttgcagaggaacagcagcaaatcgctctggatagtattttttcaacggtcgccgctaactggttccagctcaaaagcaaaagcgttacccctgattacgcaaaagacatttggcgttcattggagaaatatgtattccctgccatcggcaatatccccgttcagcaaatcaaagcccgaactttggttgaagcgctagagccaattaaagctcgtggggcgcttgagactgtacatcgactggtgcagcgcattaacgagataatggtttatgccataaacactggtctgattgatgctaacccagcatcaggtattggaatggcctttgagaagcctaaaaaacaaaacatgcctacgctccggccagaagaactgccgaagttgatgcgttctttagtcatgtcaaatctgtctgtgccgactcgctgcctcattgaatggcagctattgaccctcgttcgaccttctgaggcttcaggtgcacgatgggtagaggtcgatttcgataaaaatctctggacgattccagccgaacggatgaaagcgaagcgtgaacacatcgtacctctatctcctcaggcattagaaattctggaggtcatgaagccaatcagcgctcatcgtgaacatgtttttccgagtcggaatgacccaaagcaaccaatgaatagccagacggcaaatgctgctttaaaaaggattggatatggaggtaaattagtagcacatggtttgcgcgcaatagcgagtactgcaatgaatgaagcaggtttgaattcagatgtgattgaagcagtacttgctcacattgagaaaaatgaggtccggagagcatacaatcgctcaacttaccttgaaaaaagaaaggaacttatgagttggtggggtaatttcatagtgaatagcaagtaa

SEQ ID NO: 222019 - DNA, 1323 bp, Klebsiella pneumoniae; identical to SEQ ID NO: 136997

SEQ ID NO: 222020 - DNA, 996 bp, Klebsiella pneumoniae
atgaagataaagaacctttgccttacgctttgcgccagctccctcctgctcgccagcatggcggggatggcgaaagaagtgaagattggcatggccatcgacgatctgcgtctggagcgctggcagaaagaccgtgatattttcgtcaataaagcggaatccttaggcgccaaagtttttgtccagtccgctaatggcaatgaagaaacgcagatgtcgcaaattgaaaacatgatcaaccgcggcgtcgatgtgttagtcattattccttataacggccaagtactcagtaacgttattaaagaagccaagcaggaaggtattaaagtcctggcctatgaccgtatgattaataatgccgacattgatttctatatatctttcgataatgaaaaagttggtgaaatgcaggcgcaaagtctggtcgacaaagtgccgcagggtaattatttcctgatgggcggttcgccggtggataataacgctaaactgttccgcgccggacagatgaaggttctcaagccgtatgtcgatgatggcaaaattaagattgtcggcgatcagtgggttgacggctggctgccggagaacgcgctgaaaataatggaaaacgcgctaacggcgaataataacaagatcgatgccgtggtcgcctccaatgacgccaccgccggcggcgccatccaggccttaaccgcccaggggctggccggcaaagtggcgatctccggtcaggatgccgacctggcgggcgtgaagcgcattatttccggtacccagacgatgaccgtctataaaccgattaccaccctggccaccaacgccgctgaaatcgccgttgagctgggtaacgataagcagccgaaggccgataccacgctgaataacggcttaaaagacgtcccttcgcgcctgttaacgccaattgaggtaaataaagagaatatcgacgccacggtgattaaagacggtttccataaaaagagtgaactgtaa

SEQ ID NO: 222021 - DNA, 2352 bp, Klebsiella pneumoniae
atgagcagtaaccccccgatcagattcagccacaaccaccacctgctttcggtgaagggatgtgaagccgggcttgatgtgctggccttcgagggcgatgaagccctgagccagccgttccgctaccgtattgaattcaccagcgcagaccatgccatcagcaaagagatgatgctgatgaaggcagcctccctgacgctgcaggcgccggtggctcagggcttcggcatcaatgttcagcaacccgtgcgggtgatccagggcgtggtgacggggtttgaacggctcagtacctccagggatgaaacgcactacgcgctgacgcttcagccgcgcctggcgctgcttaaccgctcgcaccagaacgccatttaccaggaccagtccgttccgcagattgtggaaaaaatcctccgcgagcgccacggcctgcgcggtcaggattttctgttctcgctgacaaaaacgtatccgcgacgcgagcaggtgatgcagtacggcgaggatgacctgcgctttatcacccggctgctgggtgaggtggggatctggtttcgctttaccgccgacacgcggctgcacatcgacgtcgctgagttctgcgacagtcagcagggctatgagaaggggctgacgttgccttcggttccgccgtcagggcagcagtcggccggggtggacgcggtgtgggagatggcatgccgccaccgcgtcgtggagcagcaggtcagtacccgcgactacaactaccgcgaggcgacggcggacatgaacgcgcaggtggatgtcacccgcggggagaccaccacctttggtgaggcttaccactggggagataactacctgaccgcggggaatgtccatgaccgccatccggcgccggagtccggggcgttttacgcccggcttcggcatgagcgttatcttaacggccagacccggatgcaggccaccaccagctgcccgacgctctgcccgggacaggtgctgaaggtcaccggcggagaggaggtggtcggggagtttgctgatggcgtgctcatcacggcgatgcacagccacgcccggcgcgatgccgactttgcggtggagtttgccggcataccggacagcccggacgtcggctaccggcctgagcccggcgcgcgtccggtgatggccgggacgctgccggcccgcgtgaccagcacccgggaaaacgacacctacgggcatatcgacaaacacggacgctaccgggtgaatatgttgtttgatcgggcgcgctgggaaaccgggttcgagagcctgtgggtccgtcagtcgcggccgtatgccggagacacttacggcctgcacctgccgctgctggcggggacggaggtggcgattggctttgaggatggtaaccctgaccggccgtatatcgcgggcgtgctgcacgactcggcgcacggcgaccacgtcaccattcgcaatgacaaacgtaacgtcctgcgcaccccggccaacaacaaaatccgcctcgacgatgagcgcgggaaagagcatatcaagctctcgacggagtatggcggcaagagccagctgaacctggggcacctggtggacagtgacaggcagccgcgcggcgaaggctttgagctgagaaccgacagccggggagctatccgggcacagaaagggatatttatcagcgcggacggacaggtgcaggcccggggacaggtgctggatatggagccggcggtcagcaatctggccgaagcccgggagcagatgatgtccatctccggtgacgcgcagaaggcgaccgcgaacccggccgatctccaggcgcaaattaccctgctggagcagcagctgacagacctcaaaaaatcggtactgctggtcagcgcgccggaggggatagcgctgaccagcggggagcatctgcaggtctcagccgggcataacctgattgccacggcaggaaagaatgcagacgtcagcgtggtgaaaaatctgttcatcggggtgggcagtgccctgagcgtgtttgtgcgaaagcttgggatcaggctgatagcgaaccagggaccggtacagatgcaggcgcagaatgacgtgatggcgctgcttgcccggaaggaaatcagcattgtcagcacggaagacagtatcgaaattattgcgaaaaaacgggtcacgataaacggcgggggaagctatatcacgctcaatgccagtggcattgaatcagcgacgcagggggaatacctgacaaaagccgggcactacgggcgaaaggaaaaggccagcaagcaggaagacttcccgaacttggcgcctgaaaccacagaaccttgcagtaagttcagattttcctga

SEQ ID NO: 222022 - DNA, 1935 bp, Klebsiella pneumoniae
atgattatcagtccacctcttctgaaagtgaaacaagacgatgaaactgatgcggcctggattgaaagaatcctgaccgtagttgaccgacgcggatacccggtcaacggttatggttcgtggcatggcggaatacatatacgtcagactgacgaaggaaggcctgctgagagcgtgcgggcgatagctgacggtaccgtcgtttcactccgcaaaagctcagacaagcgcgatctagcaccattcaacatcaacgccgataaacccaatacaaaggggagtaatgatggttatgtgctcataaagcatgaaaccgagatcggtagcggtgatgaaggaaaagtggctttctattccttatacatgcatctgaagtcgctggctgaaactgttaaagccggtgataaagtttaccgtaaggatcctataggccttccaggcatggttgatggagtgaatgctttccatttccagattttctgcgatgatgacaacatcagcaagctaacgggcaggaaaacaggagagctggatatttcgaagaatggccgcaccgatgcggtttatggtgatattcacttttatctgccaccgcagacaaagttttatgacaaggctccagcagataacagcatttctaccaccggactttctgaactatataccagcaatgtgcctctgtatgccagcatgactctggcccaaggcaagtgcacgatggttactcgtcagaaaaatacgcagactgacggaaaatatgatctgctgggtgaaccactggttaatgcagatggtgatgactacgaatacaatctctataaaaccgcgatgcggaattataaggagagcccaagtgccgggtttgaattacttcgctttgggcgagtgatcaacacggaccatgaaacactggtaccggcagacgcaccattatggatgacagtcaattacccgggtggtaaaggggtgatcaaccttgctgattccagtattaaaaagtttagtgacgctgatttccctcactggacgggctggcagatggtagatgacgatagtgatagcaacagccagtgtaattcagctattatcaagaaacttcatgaagttggtgacttcgataaccagtgcgggaagctaatctgtcatttcccatttgaatgggaaaaaagtacgatcgacatccgtttttcgtggctgaaaacgggaaatgaagagcatgaaccgatgacggaagccgattatgcaaagtttaaatcccatgcggaagcactatgctttgattctggagcgttgagttctgaccggttgtggcattttgagccaaaatcatttattcgacatttcaggaaatgtagttggctcgactctgaagtaattgaaaaagtaatgacggcgaatgctagtaaaaaaaataaaaatgcacttaaaggtattaaaaatattacattagagtactatgcggacataaatacaatcatgcgaaagtataacttatctgatgcaaatagaatttgtcattttttagggcagggtgcagttgaatcaggttatttattgtccatgcaagaaactagccagcaacaaattattgttgatggtgttcagcaaggtggtgtgattgttgaagcatcaacatttaatgaaactactaagctaggtcattggtacggagctcttaaagccgagaaggataactatttctccgggaaaaaatacaattcccgtggagggtatatcacaggatcctatagctggattaacggtaactgtggagatgtagatgcacaaaaattcagaggtagagggtttaaaatgctaactggacttaacacatattcaagctactgggtatatcgaggttggttgtcaaaaaatgactttgataaatattggtgggatgacccggagtacaagaaaaaaattcagccggtatga

SEQ ID NO: 222023 - DNA, 792 bp, Klebsiella pneumoniae
gtgaaggtggttctcgaccaggtcgccgccggccgcattcagattcccggcattcatccggagaccgttagcgccacccgtcggcttatctcggtggtcatctggttgtttgccctctccgccgcctacccgttccttcccggcgccaactctctcgccttcaaaggcattagcgtgttcttcggcctgatgctcaccctcgggtcaaccggagtgatgacccatgcgatgagcggcctggtgctgatctactctcgggcgctgcgcaaaggcgactggatccgcctcgccgataatgagggtcaggtcagcgagattggcgtgctggcgaccaaaattctcacccgcgaaaattacatcgttaccgtcccgaacgcggtggtggtgagcgggaaaattattaatctcagcgccgaaagcgccgacggtggagtcaacctcaccaccagcgtcaccatcggctacgatacgccgtggcgtcaggtccatgcgctgctggagctggcggcgagacgcaccccggggatcgatcagcaaattgcgccggtggtgcgtaagctgggattgcttgactggtacacctcgtatgagctgcaggtgcgcttactccccacaaccaagctgccggatggccgcaacgcattgcatagcagcattattgatgtgtttaacgaattcggcgtgcagattatgtcgccgaactttgtgatgcagccaaaggcggcggtagtggtgccgcaggaagcctggtacgccgccccggccgtcgcgccgcagaagccggagaaataa

SEQ ID NO: 222024 - DNA, 630 bp, Klebsiella pneumoniae
atgaactggcaactcatctcattttttggcgatagcactgttttgctgcccagcgcagcggcgctgtttattgtcctgatgctgcgtaaaacgtcgcggttgctggcgtggcaatggagtttgctgttcggcatcaccggcgctatcgtctgcgcctccaaactggcctttatgggctggggtctgggtattcgcgagctggattacaccggcttcagcggccactccgcgctctccgcggccttctggcctatcttcctgtggctgctcagcgcccgtatctccgtcggtctgcgtaaagtggccgttattaccggctatgttctggccgccgtggtgggctattcgcggctggtcatccatgcgcattccgtctcggaagtgattgccggcctgctgctgggcgctgctggcagcgctttgttcctggtgttgcaaaaacgtacctctgatccggaaagcgtgaatatctcatggggcggtgtcgcatgcctggtgatggttccacttatccttttacatagcggtagcaaagcgccgactcagtccctgctgggacaaatcgccaccgcggtggggccgctggataaaccctttacgcgtaccgatctgcacaagcaggcctggtaa

SEQ ID NO: 222025 - DNA, 1026 bp, Klebsiella pneumoniae
gtggtgtcgaccggcgatacgctcagcagtattctgaaccagtacggtatcgatatgggcgatatcgcccagctttcctccgccgataaagagctgcgcaacctgaagattggccagcagctctcctggaccctgaccgccgacggcgatctgcagagcctgacctgggagatgtcccgccgcgagacccgcacctatacccgtgtggataacggttttaaaatgagcagcgagctgcagaaaggcgattgggtcaacagcgtgctgaagggcaccgtcggcgccagctttgtctccagcgcgcgtgatgccgggctgaccagcacggaaatcaacgcggtgatcaaggccatgcagtggcagatggatttccgtaagctgaagaaaggcgacgaattctcggtattgatgtcgcgcgaaatgctcgacggcaaacgtgagcaaagccagttactcggcgtgcgtcttcgctctgacggtaaggattactatgccatccgcgccgaagacggcaaattctacgaccgcaacgggacgggtctggcgaagggctttatgcgcttcccaacggcgcgtcagttccgcgtctcctctaactttaatccgcgtcgtctgaacccggtcaccggccgcgtcgcgccgcaccgtggcgtcgatttcgcgatgccgcagggaacgccagtgctggcggtaggcgatggtgaagtagtcgtggccaaacgcagcggcgctgccgggtattacgtcgcgatccgccacggtcgcacctataccactcgctacatgcacctgcgtaagctgttagtgaagccggggcagaaagtgaagcgcggggatcgcattgcgctgtcggggaataccggacgctctaccgggccacatctgcactacgaagtgtggatcaaccagcaggcggtcaacccgctgacggctaagctgccgcgtaccgaagggctgagcggttccgaccggaccgactatctggcacaggtcaaagaggtcgttccgcagctgcggtttgactaa

SEQ ID NO: 222026 - DNA, 507 bp, Klebsiella pneumoniae
atgaatattgatgtcgaaacacttgtgaagcaattaggtaaaccttatcaggatatttatgatcaaggtttaattccctacaaaacaaaaccaacgggtactattagtgatgatatttccaggttgaatatgaggcgagaaggaatatttttatcttttatcaataaccaagaaaaaaatcttgaagaagtgactttgcggttagaagatgaaaataaaatggattggttatttcctaatccgctgccatttggtcttgaaccagtaatgacccagaaatgggtaagggccaaacttagtcatccaatgatttacactgatgcgcagataatcatgactatttatgttggtgtgaaggaattttatactttgcctgtccctcatcaatatatcgttgctgcatttacctataacaaagatttttttgtacaaaaagtcacattttactcaattgagcgagccaaagaaatacaagccgcgttagagataaaaaggttgggtgggtaa

SEQ ID NO: 222027 - DNA, 1158 bp, Klebsiella pneumoniae
atgggctgggtacgaacaaaagcattgaccatggagcagccatcggctccttcactgacccgatggctgtttgccggtgtactgatggcgattatcggtgtcctgctctttatcctccatgcttccggcaccgtaaaaattctctcagtgataaatatctggtgggtatccctgatgcctgcaggatgctggttgctgattttttgtctgcgttgctacctgtgggacagggatctgaaagcgcatcagttcttgctgaaagaggcggaatacggacagcagaggtgggaagactgggccgggcgctggctggccgttctgggcagtgcagtgctgttgccggatcatatttctgcggcgcattgggggagtgagcggcctcagcaatacggacttacccgcaggattaattaccttccggcagaagagcccgtgcagttgagtgcgatgcatgcgctgctgaccagtataggagagcgcgtgcagtgcctgccggaagagctaccgctgtatgtcaccctgatcacggataatccctcgcctgagctgaccagcagtttcagtaatctctggaaagaacacattcctggccgtgccgtgcctgatgatattaccgttaccggctcattctcactgtcggaagtggaggagcgcctgaagcagcctgtactgacggtcaatttactcctggtcatccagctcaacggtggtacagcatactccgacgggctggccgtgctgctgctgaccagcgatgatgtggcgcaaaaataccatctgccgcactcatcacggctgttacgtcctatgcccttagatatgacgaactttgaagacgatatcaccctgtttctggaaacccagactgtcgcctgccatacgccctccgttatcggggacgcaaaaaaatggacggaaagaagcgccgcgcttatcacgcagggcggcaaaatgcataccccatggaaagctgaagatatcgcgctgctggaaaaatggtgcggtattccgggacccgcagcgccctggctcctgaccgcgctggcagccgatctggtcagcctccgtaaacagcccctgctggcgttattttccagcgaacaggaacattttatcagtaccatcaccccagggagtgaagatgaatataccgggtaa

SEQ ID NO: 222028 - DNA, 960 bp, Klebsiella pneumoniae
atgctcagcaaacaggcgttattgcaggcttaccgcaagatgcgggagatcaggacctttgaagagcggttgcatcaggaaaataccagcggtgatattccgggcttcattcacctttataccggtgaggaggccatcgcggtgggggtctgcgaaaatttaacgagcgcagatttcattggttcaacacaccgtggacatggccactgtattgctaaaggttgtgacattcacggcatgatggccgaaatattcggtaaggacagcgggttatgtcgcggtaagggcgggtcgatgcacattgccgatctgtcgaaaggaatgctgggggcgaacgctatcgttgggggagcccctcccctggccatcggcgccgcgctaacggcaaagacgctaaaaaccggcaacgtcggtgtctcttttacgggcgatggtggttctaatcagggcctggtctttgaagccatcaatatggccgtcgtgctccagcttccagccgtctttattttcgagaataacggttacggcgaagggaccggccatgactacgccgtgggtgggcgtgatatcgcccggcgcgccgctggcttcggcctgccggcagtgaccgtcgatggcaccgatttctttgccgtttatgaggcaacctcagaggcggtcaagcgtgcgcgagaaggcggtggcccaagcgtcattgaggccaaagccttccgctggcatggtcattttgagggcgatcccgcgctataccgcgcggaaggtgaagtgcaacgcctgcgtgaacaacatgatccgctgaagattttcaccgctaaggtcaagcagcatatcacccaggaagaactggcggcgattgacgaggaagtagaagccctggtcaacgatgccgtattgaaggcccgcgccgctgcctacccggctccggaagacctgctgacagacgtgtacgtctcatactga

SEQ ID NO: 222029 - DNA, 321 bp, Klebsiella pneumoniae
atggccgagagcgatcagtgcccattaatacggatcagtttggatatggggaattttaagcttgttttgaacgtagcgtccttacagggtgagcgtcaccgctttgcggctccgatggttccatttggggaaaatttgtgcctcttgttcacgatcgtccgctttgtgctaagcagacaattcattaaattgcgcattgacaattttcaggccttgttatgcctaaacatgatcaaaaatcctgcgttacgtgaaaaaacgctgcaacatatagctacagcatttcttttagtcttttttggggcggtatttatacgctaa

SEQ ID NO: 222030 - DNA, 870 bp, Klebsiella pneumoniae
atgcacgttcgctattctctgctcgcctcgcaggcgacaacggccctttttgtgctgctgtggggcagcgcggccatcttcacccgctggggactggataacgcctcgccgatggcgctgctggtctttcgttttctggttgccctggtcgcgctggcgccgctggctatcgtccgtcggcgctggctgcccgcgccgggcacccgcctgcaaacagcggccaccggtctgatgctgattggcggctattcggtctgttacttcgaggcgatggccaacggcgtgacgccgggacttatcgccaccatcatggggatccagcccatccttacgctttgcgtggtggagcgccgcctgcaggggcggcggctgtcaggactgctgcttgccctggcggggctggtgctgctggtgtggcgcagcctggcggcctcgccgatggcgacggcggggatcctgtttgcgctggcggcgctgctgctgatgacctttggcgcgctgtggcaaaagcgcagccgtcaggcgccggcggatgtcctgccgctgcagtatgccgttagtctggggctgtgcctgctgattgccccggtcagcggcttccagtttaccgttaacgccgggttgattattccggtgctgtttctcggactgctgatttcggtggtcgcccagctactgctgtaccgtctgctgagcgcgggaaatatcgtcaatgtcaccagcctcttttatctggtgccagcgatcacggcgctgctggattatctgctgctgggcaaccggctgccggcggcggcgatgatcggtatgatggcgatcgtcggcgggatcgtgctggtgttccgcaccgcgaaggtccgcgccggctga

SEQ ID NO: 222031 - DNA, 912 bp, Klebsiella pneumoniae
atgaaagtaaccgtactgggatgcggtgcgctgggacaactatggctgaccgcgttgtacaaacagggacatgaagtccagggctggctgcgcgtaccgcagccattctgtagcgtcaacgtcattgaaaccgatggctcagtgttcaacgaatcgctgacggccaacgaccccgattttctcgccagcagcgagctgctgatcgtcaccttaaaggcctggcaggtgtcgaatgcggtaaagcacctggccgggatcctgccggacaccacgccaattgtgctggtacataacggcatgggcaccgtcgaggagctgcgcggcgtgaaacagccgttgctgctggcctccacgacccaggcggctcggcgcgatgggaatgtcatcatccacgttgcccagggcaccacgcatatcggaccggcaaaaagctacgagggggactacagctatctcgcagaagttctgcagagcgtgctgccggatgtcgcctggcataacaatatccactcggccatctggcgcaagctggcggttaactgcgtcattaaccctctgaccgcgctcaaagggtgtaaaaacggcgatctgcgcgactatacgcaggaagttgcggccatttgtcgcgaggtggcggcggtgatggagcgcgaaggtattcatacctcggcggaaaacctgctattttatgtcgaacaggtaattgaaagtacggcagaaaatatctcttccatgctgcaggacgttcgcgcccagcggcatacagagatcgactacatcaccggttttctgctcaaccgcgcccgcgcccacggcgtcgccgtaccggaaaacgcccgcttatttgaattgatcaagcgtaaggagaatgaatatgagcgcgtcggcactgatttgcctcgcccctggtag

SEQ ID NO: 222032 - DNA, 474 bp, Klebsiella pneumoniae
atgcagcaatataccaacgaaatcacacccgaaattaatgaggcccaatcacaaccgccttacgacgaagagcttttgtcactctgcgatgacaaaacccggaaagaacttgaggaaattaaaaaacagcatctaagccgcccgttagctcacattttccggtttgcagtcgttggaagtctgacccgtcgcggtggagtcattcgccatgcttcaggcggtgcgactaccggaggattacaagttgctcgggtaggtgacaaggttgtatatgctgatggcagcgagtccactattatttccggtgctggcaaggcccgaatcatgcagggcgcatccgctgcactcgttggcagtatgcttgataatggtgatgaaataatctctaccccacaatcgtgcagcaaactggtttttcgtgaaggccgcgaactcccggaaggattcttgaccgtgtcagggagtaagcactga

SEQ ID NO: 222033 - DNA, 1377 bp, Klebsiella pneumoniae
atgggcgttaagggatactatttattcagaggtgataagacacgatgtggtggcgttatcactgaaggatggagcgaccaccagcattttgacagagatatgtcctgtgaagggcataaagtaacttgtggtaaacatccagggctttaccgtatttgtggtgggcttgatgatgacatacacggcaaaaggattgccggaacactacacagttatagctcctgcccctgtaaatccaaattcatcaattcaaactgggatgatgattacgaacttggtggagaagcaacggtaacgcacactgatctacctcacctcgtcaagatgcctgaacttccagggccgattgagtcagaaccggaacagaacgcccaaacagcaaaaaagaaaacaggtatagatgcaggttttgccgttatcacttatggcggtactacggaagcgtggcaacgcctgttattcactgaaaacccaccagcaggggcaaaagagctattctctattctgaacggcccggatgaaagatacaaagctggttcgattatgcttctggttgatccagagaaacaggacgacgagcagattgcccacatgaaagccgcgaaagcgcgagttgatgcggcgttagaaccgctgacaatccaggaagctaacttgctgcacaaacactacgcaaccatagctaatttcaccagctacgctgatacaggaattggccttgctgctgatcctgttggaaaatactttgagagtatcgaaaaaatactcagagagattcaagaaacgtataagaatacctacataacgagaggctcgttgataggagaacaattttacgttcaacgtagccagttgtttaaagagcttgaatcaatacttaaagtcagattcctgaataaggctatgaaattcggagagtatacaaaaataaaaaaagcacttggcctatccagcagttctattacccacaaatggaatgaaacggggatcagtgacattgaaggctatgctacccacatcgaacgggcagctaaatacgtaaaagcaatgcgttacactggttatttaggcattggtattagcggactgcattcactaaatgaaataaatgaggcttgttctgttggtcgcgaagctgaatgtaccaagaaaaagtatactgagattggtagctttgctgtaggtacgggggttggtgttgctggtggctatttagcaatacctctttgtatcgctatcggtgttggtactgctggtgtcggagggcttgcttgctctgtgattgctggggctggtttaggctatgtcggtagtagtgcaggtggcgcattcggtgaatggggtggagagcagctgtatgaaactttcggtaattaa

SEQ ID NO: 222034 - DNA, 864 bp, Klebsiella pneumoniae; identical to SEQ ID NO: 212010

SEQ ID NO: 222035 - DNA, 1563 bp, Klebsiella pneumoniae
atgcaaacatccaaaccggcactcgagcttctcaccagcgacgccatctaccgggagaacccgacggcgttattccaccaactgtgcggcgcccgtccggcgacgctgctgctggaatccgctgacatcgacagcaaagatgacttaaaaagcctgctgctggtcgatagcgcgctgcgcattacggcccttggtgacactgtcactattcaggccctctcagccaacggcgcggcgctgctggaattactggacggcgcgctgccctccgggatcaacaatcagcgccagcccaacggccgcatcctgaccttcccggccgtgagcgccctgctcgatgaagacgcccgtctctgctcactgtcggtgtttgacgccttccgtctcctgcaggagctggtgagcgttccggacaacgagcgcgaagcgatgttcttcggcggcctgttcgcctatgacctggtggccggttttgaagatcttccccagttgcaaagcgacaccacctgcccggactactgcttctatctggcggaaaccctgctggtcatcgaccatcagaccaagcatacccgcattcaggccagcctgttcaccccgctggagagtgaaaaacagcgcctggagcagcgcctgagccagctgcgtcagcagctgaacgagccgccggcgccgctaccggttaccaccgtggccgaaatgcgctgcgacgttgaccagagcgatgaagagtacggcgcggtggtgcgcaaaatgcagcgcgcgatccgcgccggggaaatcttccaggtggttccttcccgccgcttctcgctgccctgcccatcgccgctggccgcttatgatgtgctgaagaagagcaaccccagcccgtacatgttctttatgcaggacaatgatttcaccctgttcggcgcctcgccggaaagctcgctgaagtatgatgccgtcagccgtcagattgagatctaccccatcgccggcacccggccacgcggccgccgcgccgacggctcgctggatcgcgacctcgacagccgcatcgagctggaaatgcgcaccgatcataaagagctttccgaacacctgatgctggtggacctggcgcgtaatgacctggcgcgcatctgcaccccgggcagccgctatgtcgctgatttaaccaaggttgaccgctactccttcgtgatgcatctggtctcccgtgtagtaggcgaattgcgtcaggatctcgacgtcctccacgcctatcgcgcctgcatgaatatgggcaccctcagcggcgcgccgaaggtccgcgccatgcagctgattgccgccgccgaaggtaaacgccgcggcagctacggcggcgcggtgggctatttcaccgcccacggcgacctcgacacctgcatcgtcatccgttccgcctacgtgcaggaaggtatcgctaccgtccaggccggagccggcattgtgctcgactcggttccccagtcggaagcggatgagacccgaaataaagcccgcgcggtgctgcgcgccattgcccaggcccatcacgcgaaggagattttctga

SEQ ID NO: 222036 - DNA, 1359 bp, Klebsiella pneumoniae
atgcaaaccgttttagcaaaaatcgttgccgacaaagcgatttgggtggaagcccgcaaacaacaacaaccgttagccagttttcaaaatgagatcgttccgacgcagcgcaatttctatgacgcactggccggcacccgcaccgcgtttattctcgagtgcaagaaggcctcgccgtcgaaggggttgattcgcgaggatttcgatccggcagcgatcgccagcatctacaagcactacgcctcggcgatctcggtgctgtgtgatgagaaatatttccagggcagcttcgatttcctgccgatcgtcagccaggtcgcgccgcagccgatcctgtgtaaggacttcaccatcgacccttaccagatctacctggcgcgctactatcaggccgacgcctgcctgctgatgctctcggtgctcgacgatgaacagtatcgtcagctctcggcggtggctcacagcctgaatatgggcgtgctgaccgaagtcagcaatgaagaggaactggagcgcgccatcgccctgaaggcgaaggtggtgggcattaacaaccgcgacctgcgcgatatgtcgattgaccttaaccgcacccgtcagctggcggcgcgtctcggcccggatgtcacggtgatcagcgaatccggcatccatacctatgccgaagtgcgcgagctgagccacttcgccaacggcttcctgatcggctccgccctgatggagcaggcggatctggaagcggcggttaaacgcgtgctgctcggcgagaacaaagtgtgcggcctgacgcgcccgcaggatgcccaggtggcctgggagtccggcgccatctacggtgggctgatcttcgtcccgacctcgccgcgagcggtaaatgacgcccaggccaaagcggtgatcgccgctgcgccgctgcagtacgtcggcgtcttccgcaatgcgccgctggaggaggtggccgcccgcgcgcaggctctggggctggccgccgtgcagctgcacggtgatgaagaccaggcctatatcgacgcgctgcgcgacgccctcgcggacaacgtccgcatctggaaagcgctgagcgtcggcgaaaccttcccggcccgtacgctccgccatgtcgacaagtacctgctcgacaacggccagggcggcagcggccagcgctttgactggagcctgctgcagggccaggatctgcgcaacgtcatgctggcgggcggcctcggtgccgataactgtgtggaagcggccaaaagcggctgtgccggactcgatttcaattcaggcgtagagtcgcaacccgggattaaagacgccagcaagctggcctccgtattccagacgctgcgcgcatattaa

SEQ ID NO: 222037 - DNA, 786 bp, Klebsiella pneumoniae
atgttatcattattaaaaaaaggcccgtcggcgaataaagttcctgctgagaaaattcaggcaacctatggtcgataccgtatgcaggcgctgctaagcgtatttctgggatacctggcgtactatatcgtgcgcaataacttcaccttatccacgccctatctgaaagaacagttagacctcagcgccacgcagatcggtttgctcagcagctgtatgctcatcgcctacgggatcagtaaaggcgtaatgagcagcctcgcggataaagccagcccgaaagtctttatggcctgtggcctggtgctgtgcgccatcgtcaacgtcggattaggattcagtaccgcattctgggtcttcgctgcgctggttgtcctgaacggcctgtttcagggtatgggggtcggcccctcttttattactattgcgaactggttcccgcgccgtgagcgtggccgcgtaggggcgttctggaacatttcccataacgtcggcggcggaattgtcgccccgatcgtcggcgccgcattcgccattctcggcaccgagcactggcagagcgccagctacattgtaccggcctgcgtggcggtggtattcgccattagcgtactggtgctgggtaagggttcgccgcgcgaggaaggtctgccttcgctggcagagatgatgccggaagagaaagtggtgctgaagaccaaacacggccagaaagcgccggagcacatgagcgcatttcagatcttctgtacctacgtactgcgtaacaaaaacgcctggtactga

SEQ ID NO: 222038 - DNA, 234 bp, Klebsiella pneumoniae
atgttcgcgctgctgctgctgagcgcatggctgagaccctgtgcggcgcaaggcaatgagctggtgatggcgacgacattttctcccagcgccaccgtgtggattatcgatcgctggcagcaagagatgataaggacgctcaaccgaatcagcgcctcgctgatacagctacttgatttgcttttgctacatatggaggctttgttgaataaatcagagctagcgcgagcatga

SEQ ID NO: 222039 - DNA, 546 bp, Klebsiella pneumoniae
atgaaaattagcaaaattgcatctgctgttgttcttaccatgggtgttgcctctttcgcagctcaagccgatcagggaagcggaaaggtcaccttctggggttcgattattgatgctccatgctcaattaaaaatggctacggcgatcagcgtatcgaactgggacagatttccaatacgcttttagataacggcggtatctctactcctcgaccgttcaatattgagctggaaaactgctccttcgagaaggatgcaagcggcaacccgctgtataacaccgtaactgtcacctttgctggcggtaacgtgcctaacgacatgtctatgttggctattaccggtcaggctgctggcgctggtgttcgtattcaggacacatccggtcagcctgtaactttgttagttccaacctcaggccgcattcttggcattggtgacaactctctgaaatttgccgcttacctggaaaaaatcgcttcagttactaacgtaactccgggtgattttgaagcggttactaactttaccctggcttatcaataa

SEQ ID NO: 222040 - DNA, 534 bp, Klebsiella pneumoniae
atggtaaaaattacgcgtttcctgatatcgagtcttttattgggaatatcttctgtttctatggcatccgagcagggcaagggactcgtcacaatgaatggtcagattcaggaatcagcctgctctattcatactgatgatatctggcaggaaataccatttggggtgatttcttataatgaccttgaccaggaaggaaaagcaattatcaaacccttcgctgttcgtctggtgaactgttcactagaaagaagtcatgacggtttatggcaaagtgtgaatatcacttttagtggggaaacagacgtatttcgccgtgatatttttaaagtttatggcgatgctcaggggcttggcctacgtattcacaaccaggtcggcgatgtggcgcaagacggcattccgatgccggccgtcatgttaagaaatgataataatgaattgcgttatttattatcgctagtgcgtggcggaaaatcgttgtcggaaggtaactggtacgggattattcgctttatggttacttatcagtag

SEQ ID NO: 222041 - DNA, 2502 bp, Klebsiella pneumoniae
atgaaaaaaagcaaaccaccagcttattacctgcggcgtctgggtgtttacattgctattgccatttttggttctacatcaccagttgtggcggtggagtttaatgtggatattctggattctgaggatcgtgagaatatcgatttatcccgcttttctcgggccggatatattatgcccggaacctacacgctaagcatgcgtcttaacgatcacggcatttccgatcaggatatcacctttgttgaaagaacacgcgacgatcaactggttgtcgaagcctgcctgacgcctgagcaagtcgatttactcgggctgcgtgaagatgcgctcaaaatgattcagtggcttgacggcggtcgttgtgccgatttctccgcgcttgaaggtatggtcttgcgcggcgatctgtccgaatcctcattacaggtttccgttccacaagcgtggctggagtatcaggatgcttcctggttgcctatttcccgctgggaagatggtattcctggtctgctgtttgattacaacctcaacaccaacgtcacgtttcctcggcgcgggaatcagagccagagtgccagcgttagcggcaccaccggggttaaccttggcccatggcgtttaagaggggattatcagggaagctattacaacaccactggacgcccgaacagcactactcgtgagtttgactggagccggttctacgcctaccgcgcgctgccaggcattatgtcaaagcttactgtcggtgaggattatcttacttctgatcttttcgattcgtggcgctataccgggttatcgctggtcagcgatgaaagccagctgccgccaaaattgcgtggctacgctcctgaagtttcggggatcgcgcggacgaacgctaaggttacggtcacccagcaggggcgagtgatctatgaaagtaccgttgcggcggggccgttccgcattcaggaactgagcagcgccctgactggaagactggatgtgcgggttgaagaacaggatggttcggttcaaacattttccgtggatacggcccaggttccttatctgacgcgtcccggccagcttcgttacaagctaaccaccggacgaccaagggactataaccacaatacacagggaccttattttgcaaccggtgaactctcctggggcctaacgaatgcctggtcggtgtacggtgggggtattttctcgcaggactacaacagcgtggcgctcggggcaggtcgtgatatgaacatctacggcacattgtccgctgacgttactcatgccagcgcccgtttcccgggcgacaaaaaccgtagcggaagatcctggcgactcagctattccaaacgctttgatgaacttagtagtgaagtcacgtttgcaggctatcgcttctccgagcgcgattatctcaccatgggtgaatatttagatattcgctaccgggaaggttacatcggtaacagtaaagagctgtataccatccaggcgaccaagaatttcgaagatttgcgcctctctaccagtattaactggtcgcatcagacttactggaaccgcccggcgaccgatcgctacagcatttctcttaataagtattttgatctcggcgactggcggcacctgtcattatcgctcaacgcggcgcgtagcgaatttaacggacgtaaagacgatactgcctatctttcgctcacgatgccatttggttcgggtacggttggctataacggaagcataaaccgcgaccgctatacgcaaaacgccagctggagcgatcgtcttgaaaacaatgactattatcgcatcaacgccgggaacagtatgggcggtggacaggcaacgcgtagccaaatgggcggctattactcgcaccttggcagtatggccgatgtcactaccaattttaactgggcacaaggccagtacacctcatttggtatttctgccagcggggggatgaccgcaacggctgaaggcgtggcgctgcattctggtggtgtacaaggcgggacccgcctgatggtcagcacagatggggtgagcggggtgcctgtaggctatcagggttatagcaacgcgtttggtattgcggtgatcccgggagtgccgaactatttccgcactagtgccgaaattgatgttaaccgtttaccagacgacgtagagacttccggttcaccgattgctgaactggcgctcaccgaaggcgccatcggattccgccgtttcgatgtgttaaagggctcgaaagtggtggctattctcagccaggaagatggtcgtcatccaccgtttggcgcgacggttcataacgccaaagagcgagaactgggaatggttagcgacggcggactggcctggttgagcggtgttaatccggatgaacatttaaccgtgcactggggcggttcagcccggtgtgaagtcgtactgccgcgagtaatccctgcgcagcagctgttgctgccatgcaaaccgatatctcgcggctga

SEQ ID NO: 222042 - DNA, 735 bp, Klebsiella pneumoniae
atgaaagtaaataaaactgcgatggctattctgctgggaacgctgacatcaggtctgctgaatgatgctgcagcggcgattgccctggacagaacgcgggcgatttttcctggctcggataagagtattaccctgaatataactaacgacagtacctccatgccgtacctggcccaaggatggattgaggatgcgcaggggaacaaaataagcggtccattggttgtggtgccaccgctgcagcgtcttgagccaaagagcaaaagcgttatgcgtatcaatgcaatgccggatgcggcaatgttacctcaggataaagagagcttattttattttaacgtacgcgaagttccgccgaaaagcgagcggccgaatgtgatgcagttggcgctgcacaccaaaataaagttgttctatcggcctaaagccattctgccggagaagtatagccgctgggataaccaactggtactgcagaaggtgaacggtggatatcgggtggagaatccgacgccctattacgtgacggtgattggtattactccagcgccgaacatggccgtggcgaagggatttgagtcggtaatggtggcgccaaaatcgacggcgatggtgaatagttcacactttacgacgcctcacgtcaccacaattaacgatttcggcggtaaacccactttgccgtttagctgcaacggtaatgtctgccgtgcggcagccaaaccagcatcctga

SEQ ID NO: 222043 - DNA, 594 bp, Klebsiella pneumoniae
atgaaacatggattcggtcgtaccacattgattctttggctattagcagccggggtcgtttctgtggctagcgccacagactgggacaccgacggcctcaatggtgggattcgcgccacgggcacgctggttgcgtctccgtgtgtactgttgccggaatcggcggaacaagagatcgatttgggcagtaccgtcgcctggggactggagcagcctggttcagttacgacgccggtagcaatatatatcaaattagatcgctgtcccggagagtatcagtttatgcgagaccgtcagttgatgcggggttcgctgatgcttaatgggcagtccgccgtaagaatgactatttacggagaagtagaacctactgatggtcggttcttcagggttcaaggaggcgtgaaaggggtagcgctgagattgagtgaccaacggggcgagctcctgcgtcctgggatgtcaagccggccgcagatccttactcccggacgcaacgatctggtgtttcaggcgcagctatggcgtcttcctgctccgctgatggccaacgaatggcgcagcgtagtgaatgtcgggttggagtacgaataa

SEQ ID NO: 222044 - DNA, 525 bp, Klebsiella pneumoniae
atgaaaagacacatagcgcaagcgctaagccaggtggtcattctcatgctgctgctggtcagtatatcggccactcatgctgatacagatgtctacttcaccggtaatctggtggctgacccgtgtgaactgcacgtggattcagaagatcagatcgttgatttcaggaacataccgtcgaaaacgtttattaaatatcacctcagtgaacgtgagcgcttcaccatcaggctcattaactgcgacctctctttggggagctcggttaaggtcactttcatggggaccgaggatgtcgatcagcccggactattcgcggttacgggaacggctggcgggatcgccatcgccattgaggatgccgatggcactccggtgttgcctaataccacaatgcggccgaccgctttgacaacgggtgacaccaatttaaatttccaggcttttatctccgcgccagtccatagccgggtgggcgaaggggatttcgaatgcgtaacaacatttttgcttgagtacgactag

SEQ ID NO: 222045 - DNA, 753 bp, Klebsiella pneumoniae
atgaaaaaaacactcgtttttgccacggttgcagtgttatcggcgagttctttgttacccgctgaggcggcattaactgttagccgttcacgggtgatcgttaatgaaggggacaaaagtgtcagtatgagcgtgacgaatcgaaatactcaggcaccctatttggcgcaaacctggatagaggatgaaaaagaggccaaagttacgagcccattaatggtattgccgccggtgcagcgcattgaagcaggttccaaaagcgcggtgcgggttcaggtgctaccagatatcggtaagctgccgaaagacagggagagcgttttctggttcaacctgcgtgaaattccgccgcgcagcgataagccaaacgtcttaacgctggcgctgcagacccggctgaaaattttctggcgtccggcctctataaaggtagattcgaaatccgattcctttcccggcattcagaacgtgacgctggctaaacaaggcaatagctacacactgaataacccgacgccgtaccatctgacgtttgttgaaggtcgtagcagcgtgaagggaaagggcctggaaggatttgaaccgattatggtggcgccaaaggcccagacggcgctgaatgtgagcgcagctgacctgggcgcaacgccagtactggtttttgttaatgattacggtagcttacgtttgctgccattccagtgtaccggttccgcctgtaaggcacagccggttatcacgcctgaaaactga

SEQ ID NO: 222046 - DNA, 507 bp, Klebsiella pneumoniae
gtgaaaacatggaaattagggcgccttgccgttctttgctgcctaatagtcgcatcaccatacggcctggcatcagacggtggaacaaccacattgaatatcaccggcaatattgtcgaacctgagtgtgaaatcaataacaatcaacagattgtggtcaattttggtgaagtactgaccacccgaattgatggtgcgaactacgaaacgccaattgtctatacgctgaaatgcacaaacctacttcgtaatacgttgaaaattaatcttaaaggtaacggcgcgtcatttaacgggcagctgtttaccaccgatgtaacgggccttgggataaaagtgtacgacgcgagtaaagcgacaatcgctcccaataccggagtgctgagttttacctatgccgataataaccctccagctctgtatgcggttccggtcaggcagaccaacgcctcgttaccggacggggcgtttaacggttcagcgactatggtgtttagctatcaatga

SEQ ID NO: 222047 - DNA, 516 bp, Klebsiella pneumoniae
atgcgtcagctaacaacagccacgcttttactcaacattcttttcgttggcgttagtccgacgatggccgccaatgaagccgacgtcatctttaaagggatgctggtcaatccgccgccgtgctcgatagacaatgataaaaccattcatgtgccgtttggagatcgcctgtcgatcaaaaaggtaagtgacggtgtttatcgtcaggatgtgccgtacaacctggtgtgcgacagcactgccggtaaagactggaaactgatgcttagcgtacggggaactctggcggcatttgatactatcgatcgcgcgacagttgccacatcgatgggcaatattggaaatcttggggtcaagatcctgcgtgacggccagcctttcaagtttgatacacaggtagaaattagcctctcggcgatacccaaaattgaagcattgctggtgcaaaggccgaatattgagttggctgaagggccgttcgaggcgacggtgaccttgaaggcggaatatttataa

SEQ ID NO: 222048 - DNA, 966 bp, Klebsiella pneumoniae
atggaaaagagtaagttaaaaagattgatactgacagcggggatcatactgggcaatgctctgctatggtctgagtctgcatctgcggcgaattgtaatgcctttggcaatcaagggggaggttgcccgacggtacagtctctcacggtaaacggtgggtccgtcgcggtcaactgggctacagatttaaatgcacagactttcgcctcgatagaaactaccagggccgcaacctgggggctatatatgatttatggctggacaacgtcgatgaacggtcactggtttggcgggggaaccaggcaaccaattatgaccgtaagcaataccgatcctgtccgtaaagctgatggcagcacgacaacagataattgtactgataatccgttttattgcacgcatcagatgatggccgctcgcttctatcagaaatatggtttctccggtaccgctagcgtcgcattgcccccatcgtcatcgtacccagctcacgcaccgccatgcctgatttttggggcaatgaacccggggaccggtgatttctacaccgtttttgctccaggactagcggagccttgccagccaggatttcctgggaccgttgagcctgaacccgatccggagtggtgcggcatgagtaccggcgcgctggattttaaatttggcgatatggcacctggggcagtatcagggcaatcgattacaggaagcgcaaccatggcctgcagcgatgcaggggtgacatacagtttatatctgagtaacgtttctaccatcggtagggacaccgttgatttagggcgtggtgttaccgcgaaggttactgttaataatcaggcgctacaaacaaatagagtttcaaccggtaaaacgaataacttaaatgttacggtaaccctgaatggtacgccgaccagtaccggcccaattggcggaacaggaatactggctgtaaattatttataa

SEQ ID NO: 222049 - DNA, 495 bp, Klebsiella pneumoniae
atgaacggtatatccatcatcatcgcaaccttcttaaatattcattgtcacgctgacgatgaagaaatagtgatgaatattaattctggagttaagaaaataatgattaaatcaggcgttgtcgcagttatcattgcgggattttttttaaccggctgtgttcctaaaaaagcaccttcgctggtgacttcctcaagggaagcggttgagccgccgacaaatccggaaggagaagtcgatatggttcagtgcgaaaaagagttaaatgcattgggaactgttaatcaactcaaatatgccgaattaaaggctcgatttgagcgtgtcatgcacggcgcttccggatatacctccgtgcgtaactccgtaaatccagaaactcgcaatgccattgatgctttgtataagtttcaggcggtaaaactatgttcagagatccgtggggaaatgcttaatagtctggcagtcaaaccaacaggagataaggtcgaatga

SEQ ID NO: 222050 - DNA, 1323 bp, Klebsiella pneumoniae
atgaatcatcgggcagggaatgctatagtcttcattctcagtatcacgatgattccatgcgttcaggccgacgttttaaaatatgccagggattggacgcagcgcgaagaggaaaataaagccgtcgagcagccgcagcctcaagcgcaggaaaagaaacgtcctgcgccgcgtccaaaatccgagacgcagataaaagtgcttgctaaagaaaaaattagcgccagaccatcagccgaagtaaaggccaaaacggttccagcgaaaattaaaacgcctgataaaaagcccaaaacaacacccgataccaaacctgctgaacctaaaagcgtctcgggcgtgacgacggtgccaaaaataggcagtgaggcaaaagttgagacaggcattgaggctaaaagggaggtatcgcttcctgatgcacgtattttaggtcgctggatgaagtcgttgatacaacatatttctgccactccttcagagaaggaaataaaggatatgtacctcagacaaaaagaagaaataaaaagcattaatgataagctaacccagcatgaaaacgaggtggcgagcttgaaaaataatgataaagagcgtcttttacttatttctaaggttagtcgacttgaggaaaagaatgcacagtggcaactattgatacagaaaatgcagaaaaaaatgaaggaggtgcaatatccttcactgcctacaaatgaacatgatttagaggatttcgctgctggcatggcaattggtgtggatattattgaactgcttgagcagcgtaataaacaaggtgttaaaattgaccgaaaaatttttcttgcggggataaccgaaatgttacgcggcgaacgccgactgtctcaggatgagtttgaacgccatctttccagggcaaatcagcgggttaatgacgctattcagcaagcccttgaaaataagacggctcgcgatagtgaatggctgaaaaactttattaaacaagagggtacgctagctgccgggaaagaagcctggtatcggattatatataccggtaatgagttattaccagaagatgactcgaaaaccgagttaacaatttcgctggtacgtcgtcacactgacggaacgctgattgctgattccgatctatctggcctggtgctgcaagaaaaaattatcgatctgccggtctggttgcaggtggtggtgcaaaaaattcgcctgaatggagaggcagaattagctgtaaaagtaaatgaatatggagatccctgggaacagggaacatatgtcgaacattggaaaattcgagtgattaaacaacaatcaatgtaa

SEQ ID NO: 222051 - DNA, 981 bp, Klebsiella pneumoniae
atggtatccgctgttaaaaacatatacttgccagtgcatattgcaactgagaataattatctttccatggggctgatatttcttttaaaggagctgttagaagaggagtatcagagcggagtgatcatttataaggttagcgagcctatggatgctgatctgattgtaaaattccactctccgggtgaacaagtttttgattgggttgggtgccatgagttccaaacacaaaatgagtataagttcaaaatgttaggtaaaaaatggctaagcgtttatccacgtaccgaacattacgatcgcaatatcaattgcccggttgtgaactcggttatcacgatgagaaactcggtggccacgattcgccgaaaattgttttcgttatttttcgccgattcgatgagtggccctccggacttgcgtaagccaagttgttcaaaatgcccagggccatacaagctgacagggcgagaacagttgatgttagggtatttaagtcagggattagggcattatgcaatttcgcaaaaaatggggtgtacaatcaaagtcttgagcagttaccggcgttcaattatgcgaaaaatcaagataaaaaagtatagcgacttcattctctggttaggaaccaagtcagttttggaaaaatatgtggaaatcgctaagcatcacgatgagaagtacgcttacgaccgggtcatatggaaaacaaaacttgttagcgaggttgacggtgagtcagatgataaataccgtgtattacaaagtatgaaacgcctgaccagcagtcgcttagatttaagtacgcctgaaaatgaaatttggctgactacgagagaaatcgcaaacgaaatggatatcagtatttatagtatgcgctacttattatgccagatggaaagcacgggtgccgtaatatgtattaaaaccggaagcgggagaggtaatactctgcgatggaaactagcaagtttgttgtaa

SEQ ID NO: 222052 - DNA, 804 bp, Klebsiella pneumoniae
atggatatgcgtaaacgacttttgctggtgctgttgatctttgcgagcgccggcgcttttctggttccgctatcccatgtgcatgtcaatgaggtaattgctcgcccgcaggaggtcagttggctaccgtgggcaatgctgtatcatttttctttcagcgtaaccgcctgcgccacactgtttgcctccgccctccactggagcaaaaggaccctcccgcaacgcaaggacgtggcgctgctaattgccccgctcttcgcaatagtcgcactgctggcgctcctggtggagtcgcgtcaacccaccagcatctggcagttgtatacccatcccgcaccgccgtcatggatgaccttgggagcgttgtttttgccgttattcgcccggttcttaaacctgtggggagcagcacaatgggcaacgcgcttttttaataaacgttacgccgtcactaaatggctggctgtgatttgcgctattttagtgcctggcatgctgatctatagtggaccggaggttttcctgccgcagtcgcatccggtcgggtttagctatgcctttacgccgatgatgtacttgagcgcgctaatcttttttgcgctgatgcttgcctctacgcgcattacactgccccagcagcgtagaatgtcgcaatggcagttcctgaagttgatcctcaacggtgtgggtaagccgcgactcatcacccggcccggcgattcgtcagtggctggaaacgtcatcttcggtacgctattacgtcatcggcctgttgatgttctggttcattttccatctacttaa

SEQ ID NO: 222053 - DNA, 1758 bp, Klebsiella pneumoniae
gtggggcggctggcgctgctgatatcaacaatgctgcttatttgtccagtacgggcggattcatggtatatcggtattttgtcgattcgcggcgatttttttgctcgcagcagctggaagccgttagaatcatttcttaatcagcagttgcccgatcagcagtttcatattcgtccgctggatttgcatcagatgcaagaagcggttaaaaacggtagcgtgcagtttgtcgtgactcatccggggcagtttgttcaactaaataaccatttacccctacgctggctggcttcattgcgcgcttcccatggcataaaaaacgttattggtagcgtgatcctgacccgtcgcgacagcgagattaagacgcctgcggatctgattggaaaaacggtcggggccgtcgatccgatggcatttggcggttatctgctggggtacaaagcgctgagtgatgcgggattgatgccagaccgcgatcttcatctgcgcttcactggatttcccgccgatgcgcttatatatctgctgcgcgaaaatgccgtgcaggcagcgattgtaccggtttgtctgctggagatgatggatgaagagggactgattcataaagacgactttgttgcgctattaaagcgtcctgcacccataccctgcgtaaccagtactcgtctttaccatggctggtcctttgccgcgctgcctgctgtcagcgatgagctcgccgatcgcgtaactcgggcgttatttaatgcgcctgctgacgctgtctttcactggggggcgccagcctccaccaaccaggttgagatgctgatgcgtgagctgaaacagcatcctcagcagcgacagttgtggatggatgttacgagctggtttgtgcagaatcgcctggcgatggccgcaggcgggctggcgctgatgctgctgatacttaactatatctgggtcatgatgcaggttcagcggcgcggaaaactgcttgagcgaaatgccatgcagttgcgtaagcaggagcaggacctgcaaactgctcggcaaataagcgtactgggagaaatgacttcaggcttcgcccatgaacttaaccagccgctagcggcaatccgccactatgcccagggatgcgcgatccgtctgcgcaagcaggatccgcagcatcctctactacctgccctggagaatatcgatcttcaggcacagcttggggcggagacattacgtaatctgcggctatgggtgaatcaggcgcagggaaaacacgttacggcagaaaagtgggaaagtattagcattgcccaggccattgaaaatgtctggcagtggctgcacgtaccgcgacagtttcctgagctacacattattggcagtattgaccatacacttaccgttatattgccgccggttctacttgagcaggtgttggctaatttaattctcaatgcggctcaggcaggggcgaacaggctatggatagatgcttgtcgtgcagacggaaaggttgagattacgctgcaggacaacggagggggaattgatgacgccataatgaagcaggcattcgagccttttaaaagtggtcgaaaggatggcatgggcctgggactggttatctgccgaaggctggtgcgctacgccagaggtgatataagcatcgcaaataaaacggcgcctgacggcaaaaaaggattaactgtgatcataaatttttcgcaacaggaggataacagcgctcatggcaattattcacctgctagatga

SEQ ID NO: 222054 - DNA, 591 bp, Klebsiella pneumoniae
atggcaattattcacctgctagatgatgacctgcgagtaaccagggcgtgtgcctttttactggaaagtctgggctatgaagtgatgtgttgggcagagggagaaatgtttctggcccaggctaatctctatcaggctggtgtggttttactggatatgcgtatgccagggttggacggccggggcgttcatgaggcgttgcgtcagagcgggagtactctgggagtagtgttcttgaccgggcatggcgatgtgccaatggcggtcgagcagatgaagcaaggggccgttgattttctgcaaaagccggtttctgtcgagccgttgcaggcggcgctggaacgtgctctggagctctccatggaggcggtttcacggcaaataattcttgggaactatcagcagctgacgccaaaagagcgagagctggctctactggtggtacaaggattgatgaaccgtgagattgcgcaggtgatgaatattgcggtacgtacggtagaggtccatcgggcacgggtaatggagaaaatgcacgccgggagcttggctgaactggtgtggatactacagcaggttatccagtcttaa

SEQ ID NO: 222055 - DNA, 234 bp, Klebsiella pneumoniae
atgtgcattaacctcgatatcagcgacatattactggcggagaaaacgctaaataaaatggccggtagtgctgatatcgctcccgccaaaaaagaaaatgttactcaagtcttcgtcaaagatgttaatgaactgcttgattgcttaataattgccatgtcctccggaatgttgtgcaataatgttcagcactggccgtatattaaaacccacatattaaaacccacatattaa

SEQ ID NO: 222056 - DNA, 183 bp, Klebsiella pneumoniae
atggcagtcggaggaattacctcaattttgctggcttacccgctgattggcgacgataaatgtcagcgttacgccgagctggcccgcccaatcaatatgcacacccttgtcgatagcctgaccggcgcgcaggggctgtcgcgggcggcggtgagacaaagtctgccccaaattgtgaaataa

SEQ ID NO: 222057 - DNA, 1038 bp, Klebsiella pneumoniae
atgaagtatgtgaatctgggtcgtagcgggttgaaagtctcccgtctttgtctcggttgtatgagttatggcgaacctgaacgtttgcctcaaccctggtccctggatgaaaaggcgtcacgaccgctcattcgtcaggcgcttgaagccggcattaatttttttgataccgcgaatacctactcggacggtagttcagaagaaattacaggaaaagcgctgagagagatggccagacgcgacgagatcgttgtagcgacaaagaccttctttccgtggcgcaactcacccaataccgggtttctttcccgcaaggccatttttcagtctattgacgatagcctgatgcgcttaggcatggattatgtggatctctttcagattcatcgctttgactactccacgcctgttgaagagaccatggaggctctgcatgacgtcgttaaagcaggaaaagcacgttatatcggcgcatcttctatggaagcctggcgctttgcaaaaatgcagcataccgctgagcgtaacggttggacccgatttatcacgatgcaaccgcaatacaacctgctttaccgggaagaagagcgcgagatgctgcccctgtgtgaagaccagggcgttggggtgatcccctggagtccgatggcacgcggcaggctcacgcgcgactggagtgtcacgtcccgacgaacgcaaaacgatgcctttgcgttaaaaatgtatgagaacgcagcccttctggataagcccgtgattgatgttgttgccagcattgccgaaaagcacgcggtgccaagagctcatgttgcaattgcctggctgttatcaaaatccgtcatcacagcaccgatcattggcgcaacgaaaccagaacatctttccacggctatcagcgcgctggacttttcacttagcgatgccgaaatcacggaactggaagttcgctatctgccgcaccccgttgacgggatcattcccccgcttccggatacgccgccttccctcacgccgccttcagcgatccagaactattaa

SEQ ID NO: 222058 - DNA, 372 bp, Klebsiella pneumoniae
atgtattataggaatttcatcattacctcaatcgaggcggagcgtattctggccatgaaatttgatgaagcatttgctggagtaaaaaagaatgttattgatacactgaatcaaatgggaaatggtataacccgtgcttcgtattatacttcctgcttaatggataattatcaggatgtttgttctaagttaaagcaagaggacacaagatttattgcagggctggcgcagttagttaaaagccgtgatatcattttccaaatgattaaaatatatatagaaacctactttcaaaataaaaaagaagaaaagctcaatatattctcaagaagcttgtcggcgcgggagtttacatatcatcttcaggattaa

SEQ ID NO: 222059 - DNA, 1197 bp, Klebsiella pneumoniae
atgatcaccactctccggcgctccaccatcgcgctgctggcatcgtcgttactgttgactatcggccgcggggccacactgccgtttatgaccatctatctcacccgacgctttcagctggaggtggatgtgattggctatgccctgtcgctggcgctggtggttggggtgttgttcagcatgggttttggcatcctcgctgacaggttcgataaaaagcgctatatggtgtggtcagtgctggtgtttattctcggcttcagcgcaataccgctggtcaataacgccctcctggtggtgatcttctttgcgctgatcaactgcgcctactcggtcttttccaccgtcctgaaagcctggttcgccgatcggctgacggcagagaaaaaagcgcgcatcttctcgctgaactacaccatcctcaacatcggctggaccgttgggccgcccatcggcaccctgctggtaatgcacagtatcaatttgccgttctggctggcggccgcctgcgccgcctttccgctggtgtttattcagctgtttcttcagcgggatggcgccgccgcggcccagccgggcgccgcgccctggtcgccttcggtgttgctgcgcgaccgggcgctgctgtggtttacctgctccgggctgctggcctccttcgtcggcggcgccttcgcctcctgtctctcgcagtatgtgctggtggtcgccagcagcgatttcgccgagaaagtggtggccgtggtgctgccggtcaacgccgcggtggtggttgctctgcagtacgcggttggccggcggctgagcgcgagaaatatccgcccgctgatgaccttcggcaccgtctgctttgtgatcggccttgtgggctttatgttctctggcgccagcctgtgggcgtgggggatctcggcggcgatcttcaccctcggggaagtgatttatgcccccggggagtatatgctgattgaccatattgccccgccggggatgaaggccagctacttctccgcccagtcgctggggtggctgggggcggcattcaacccgatgctgacggggttgatcctcacccatctgccgcactggtcgctttttgtcattcttatcgtggcgattgtcgccgcctggctgatgattttccgcgggatcaatgcccgcccctggcaaccggattctccgctggccaacgcctga

SEQ ID NO: 222060 - DNA, 699 bp, Klebsiella pneumoniae
atgttacaggtgagtcagctacatcaatactacggcggcagccatattttacgcggggtggagttttccgcccgccagggcgaagtcacctgcctgctggggcgcaatggcgtcggtaagactacgctgctgaaatgcctgatggggctgatcccggcgcgcagcggtgaggtacgctggcaggatcagaacatcacccatcgcaaaccgcaccagcgggtgcaggccggggtcgcctacgtcccccaggggcgcgagatatttccgcgcctgacggtggaagaaaacctgctgatggggctgtcgcgctttcccgcccgcgaagcgcagcaggtgccggaggagatctaccagcttttcccggtgctcaggaccatgaagcagcggcgaggcggtgacttatccggcggccagcagcagcagctggcgattggccgcgcgctggccagccgcccacagctgctgatccttgatgaacccaccgaggggatccagccctcggtcatcaaagagattggcgaggtgatccgccagctggcgagccgcggagacatggcgatcctgctggtggagcagttctatgactttgccgccgggctggcggaccactacctggtgatgtcgcgcggcgccatcgtccagcaaggcaagggtggtgatatggagagcgacggcgtgcgcgccatggtgaccatctga

SEQ ID NO: 222061 - DNA, 798 bp, Klebsiella pneumoniae
atgcaaccggatgaaggactatttacccgccagctgcccggcgatcgctttcgcgaacaaaccgatccggtgctgcagctggagaacatcaacgtcagctttgacggtttccgggcgctgacggatctgtcgctggcgataggcgtcggcgaactgcgctgtgtgataggccccaacggggcgggcaagaccaccctgatggacgtgatcaccggcaagacccggccgcaaagcggcaaagcgctctatgaccagtcggtggatctgaccactcttgacccggtggccatcgcccgccagggcatcgggcgcaagtttcagaagccgacggtcttcgaagcgctgacggtggcggaaaatctcgccctggcgatgaagggggataaatcggtgtgggccagcctgcgcgcccggatgagcagcgaacaggacgatcggctgaatgaggtgctgcgcctgttgcgtcttgacggcgagcgctaccgccaggccggtctgctgtcccatggtcagaaacagtttcttgagatcggcatgctgctggtgcaggagccgcatctgctgctgcttgatgagccggcggccggcatgaccgatgcggaaacggagtatacggcggagctgtttcgcacgctggccggacagcactccctgatggtggtggagcacgacatgggatttgtcgagaccatcgccgaccgggtgacggtcctgcatcagggccaggtgctggcggagggatcgctgcgggaggtacaggccaatgagcaggtcattgaagtttatctgggacgttaa

SEQ ID NO: 222062 - DNA, 1575 bp, Klebsiella pneumoniae
atgaacgcattgcgtctcatgaatgtgttggcgctactgctgatcctgctgccatggcgggcgcaggccgcggaggcggacgacttcgttgccgccagtcgcagccagcaggcgcagctgttgacccagtgggcggcagcgccgcaggcggatcgtctgccgctgctgcgggcgttgaccaccgagagcctggtgatggacgacggaaaacatgctttccgcacccgacagggcggattacagccattgggcgctgtcgccgcgccgcagggcgaaacccgaccggtccgtctgaccaacaggctgcgcaatctggctgccggcgcgctggccagccaccttattttaagtgacaacgtcacagagcgagcttccgccgcacgaacgctacagcgggaagcgaccccggccatggccgcgctgctgcaacagcggctgcaggcggaaaccgatgatactgtgcggggtctgctggaggtggcgctggcgcgcctgcagctcgctcagcctgaggccagcgcgcggctggccgccgtgacgctgctcggccattccgcggacccggaaacccaggcgctgctgatcccctttaccgatgcccagcatgagccggatgcggcggtgcgcgaggcggccagcgacagcctgcaaaagatcaaacatcgtctgctgctcggcgatctgctgggccaggcctttatgggactgtcgctgggatcggtgctgttgctggccgcgctggggctggcgatcacctatggcctgctgggggtgattaacatggcccacggcgagatgttaatgatcggcgcctacagctgctggctggtacagctggcgctggcgcagctcgcgccgcaatggctggccttttatccgctggtcgcgctgccggtggcgtttctggtgaccgccgggatcggcatggcgctggagcgcaccattattcgtcatctgtatggtcggccgctggaaacgctgctcgccacctgggggatcagcctgatgctaatccagctggtgaggatgctgtttggcgcgcagaacgtggaggtggcaaacccggcctggctctccggcggcgtgcaggtcctgccgaacctgatcctgccgtggaaccggctggcggtgctggcgttcgtcctgctggtgctgtgctttacctggctcatcctgaaccgtacccgtctggggatgaacgtccgcgccgtgacgcagaaccgggcgatggccgcctgctgcggcgtgcctaccgggcgggtggatatgctggcttttggcctcggctccggtattgccgggctgggcggcgtggcgctgtcgcagcttggcaacgtcgggcctgaactgggtcagggatacatcatcgactcgtttctggtggtggtgctgggcggcgtcggccagctggccggcagcgtggcggcggcctttgggctgggcattttcaacaaaattctcgaaccgcaaatgggcgcggtgctgggcaagatcctgatcctggtgatgattattctgtttattcagaaacgaccgcagggtctgttcgcgctgaaagggagggttatcgactaa

SEQ ID NO: 222063 - DNA, 2034 bp, Klebsiella pneumoniae
atgaaactcgctgcgcttgccacgttattcgtgcctgggatggcctttgccgcctggactaccaccgactttcctgcttttaccgaagaagggaccggccgattcatcagccagaaagtggttgagaagggtacacgtcccctgcagctaaattttgaccagcagtgctggcagccttccggcggcattaagctcaaccagatgctgtccatggagccctgtcgcggcacaccgccgcaatggcgcatcttccgccagggtctgtataccctggaggtggatacccgttccggcacgccaacgatgatgatttcgctggaggaaaaagagaccagcgccgcggcgccgcagatccgccagtgtccgaagtgggacggaaaacctctgaccatcgacgtcagcaaaaccttcgccgagggcagcaaggtccgcgatttctacagcggcaatgtcgcgaccgtcagcggcggcaaaatcaccctgcagcccgccttcggcagcaatggtctgctgctgcttgagcgcgccgagacggccgccccggcgccgtttgactggcacaatgccaccgtctacttcgtcctgaccgatcgcttcgtaaacggtaacccggccaacgacaacagctatggtcgccataaagacggcatgcaggagatcggcaccttccacggcggcgacctgcagggattaaccagcaagctggattatctgcagcagatgggagttaacgccctgtggatcagctccccgctcgagcagatccacggctgggtcggcggcggcacgaagggcgatttccctcactacgcctaccacggctattacacccaggactggtcgaaactggacgccaacatggggaccgaagcggatctccgccgactggtggatgaagcgcataagcgcggaatacgtattctgttcgacgtggtgatgaaccatgccggctacgccaccctggccgacatgcaggagttccagttcggctccctgtatctgcaaggagatgagctgaaaaaaactctcggcgagcgctggacggactggaagccgggcgcgggacagacctggcacagctttaacgactatatcaacttcagcgacaaagccgggtgggagaaatggtggggtaagaagtggatccgcaccgatatcggcgattacgacaatccgggctatgacgatctcaccatgtcgctggccttcctgccggacctgaaaaccgaatcgaaggaggtctcaggcctgccgaacttctataaccataaaccagacaccgcagcgaaagcgatcccgggctatacgccgcgcgactatctgacacactggctgagccagtgggtacgtgactacggcatcgatggcttccgcgtcgataccgccaaacatgtggagatggacgcctggcagcagttaaaaacccaggccaccgccgcgctggcggagtggaagaaagccaatccggataaagcgctggatgcggcgccgttctggatgaccggcgaagcgtggggacatggagtgatgcagagcgattattatcgccacggttttgatgcgatgatcaatttcgactaccaggaccaggcggcgaaagcggcgacctgtatggccaatattgacctcacctggcagcaaatggcggacaagctgcagagctttaacgtcctgagctacctctcctcgcacgatacgcggctgttccgcgaaggcggcaccaccgcggcggagctactgctgctggcccctggcgccgtgcagattttctatggcgacgaatcatcgcgcccgttcggccccaccggctcggacccgctgcagggtacccgctcggagatgaactggcaggatgtcaacggcaaggcggcccgcagcgttacccactggcagaagatcggccagttccgcgctcgccatccggcaatcggcatgggcaaacagacaacgctgtcgatgccacgtggttacgggttcgtgcgtgagagcggtgaagacaaagtgatggtcatctgggccgggcagcagcagtaa

SEQ ID NO: 222064 - DNA, 261 bp, Klebsiella pneumoniae
atgagtattccaatgaaagggctgtcaaagcgtggtagttataatcatcttactgactcaatggaattcaaatacttcaacggtcaaacagaaatcagtgaatcaacctataagctacttgcttcaggtaataagcctaaaccaactgtgaagccagctaaagcggtcaccacgtataaggtgaagcctaagccaacgattgaacagcaaagagatgcagccttgaaagaggctattaaacagatggtaagcgggggctga

SEQ ID NO: 222065 - DNA, 564 bp, Klebsiella pneumoniae
atgaatactttaaatcaagctgtaaaaattgaatcaccagttgcaagtatcagccacctgttaccgtgcgaacagaaacagcacattgaaaagttgtatttcccgaaagtacagcaagccactgaccgaatgaataaagctgagtctgaatatcaggatgctgtagaatctcgttcagtgttgattaatcagaaagtcgctgaatatctggctaacccgtctgaaagacacggatttattgttaagcaggtttacccaaccaaccaacaagcaattattcaatcaatggctgatgctggctatatggtacaccgtgtaggaatgggcttaatctatttcatctcatctaaaaagaatgccctgaaagatgcaaccgataaggccactgctgaggctgaattagccattgaaaaaatgattgaacgtctgaaggtaaaagcctctgaagctgtccaccagcgaaacaaaattgttattgaagcccgtaaatctctggatgctgtaaaagactttaccgattacctgaacgtgattgtaaccgattctgaagaggtaacagaataa

SEQ ID NO: 222066 - DNA, 2088 bp, Klebsiella pneumoniae
atggctaactatacagtcgatgaattcatcatccaattaggttttaacgagaacgtttcaaagaatcttcaacgcctcgaaagcagaacattaaaagtcgctgaacgaattgaaaagaaccttaaccgtgcatttaccccaaagggtaatttcaatagtgtgattcaatccgctaatatcgcttcaaaaaacatcaataaagcattctcaaagagcatgaattttgatgaagctggtaaatcctctgtgaagtctgtagagagtgcggctaaggcttctgcaaagcgcattaaagactacatgaatgacgcttacgggactaaaggaaaaggccgctcaaatccagcagccggaaagccacaaggcagaggctcagatttaacagccgctaattcaatccgcaatttgtccaatactcagttctattcgaatctgaccagacgcttagaggctatgggttcaactggacaagcaagggcgatgaaattacgccagcagattcatggactccgtgatgatgctttagtcaatccttcagccagtttgaatcaattccggttggctcttcgtgcagccactgacatcgcggctaaatgggcttcacagcagcgtaagcaggtatctaatgcagatggattagcctctgccttcggtcgtctggtgagcgtttcagcggccttatacgggacatttgaagccgtccgcaaggtggttgaaacaggtgtggcacgtcagggtgtgaatctctctgctgaagctgtctttaaagcccaatcgaaagacgctaagacatttgccgctcagttctctgaccagattggacagggtgtcactgagaccttgaagcagtacactggctttgctgctggtgctcagaattcgttaggttatcagggtacacaggacttctataagaacgctgctgtattcggtcgtatcagggggcttgatgctgaacagcttaaaggcatcatgacagcattcacacagatggcatctaagggacgtgtacaggctgaagaacttcgtggacagttgggtgaccgtttgcccggtgctgaacagatgttcgctgatgctttaggtgtaaacactcagcagcttgataaactgatgcagaacggcaagttactgtctaaagacgttcttccccgtgtatctgctcagatgaagaaaatggctgatgaagcgggtggccttgaccgtgtttcacagatggctgtaactggtatcgggcgtgttaaagcagctttagaaaacgatttaaacaaggctttcaccagctctgaaaagggcttaggccagttcaatgcttctgtagctaacatgctcaacgatgcttccccaatcgcagaggctttaggtcacatcctcggaaaggtcgcctctatgacctctggagcggttgaccatgtagatgagtggagccgtaaactctcagccctgattctacgcacatcagcgtggtatgacgacttgtcagacggtcaaaagaaactggttgattctgctgaacagttcgctatcggtgctgctggtgtattggtactggtgaaatcaattgctggagtagccaataagctgaaatggttaagtgctctgttgggtggtggtgctgaagctggtgcggctgctggtgcaggtggattactcaagggtgcatcccgtttagctggccctgttggtgtcgctctggttgctcatgatgctgtagacgcttcaggagttgaacagaagtacccaaccgctttaggtgtcgataaccctattgcaaaggctcttaactggctttcaagcccttctaaggtgttaggtgctcaggatggtgactcaatcactaacagcccgttcacacgtgctatgggttcattgggtgactggcttcagggtaacaatgcgctgtccggtcaggctaatacatttgctgtaccgtctatgtataatcctgctcagacaactatccgtaatgaccagagaattaatattagcgttaacatggattctcagaaaattggaacattccagacacaggttttaactggtggctttgaagacctgaatattaacgctgaacatttaagtgattag

SEQ ID NO: 222067 - DNA, 276 bp, Klebsiella pneumoniae
atgaaaaaccgatttttgaatatgctaaacaatcctgtaccgcatcctgatttaactgatgcaatctttaattcagtgagtgaaccggagttatgcttaacagtccttaaaactcttcctgaaattaatcaggtcactattgctacattctttagcggtcaagggttatcactgatgggggcagcactaatctatgaaatggtgctgaaagcacacgatgcgcttgttgatttaatctggaatgaatacgaggtaaccaatatgactaatggctaa

SEQ ID NO: 222068 - DNA, 147 bp, Klebsiella pneumoniae
atgaacaagacaaaagctgtacgaatcaagaagacagataatcaacttgtgaagctgacagccgtcaccgcacaggcaacaatcagaaagactctggaagggatgattcttaaatcctatgtgaaacacattgaggtggctaaatga

SEQ ID NO: 222069 - DNA, 585 bp, Klebsiella pneumoniae
atgtacaaagctaaagtattcaatggagtcaagactccggctggaaagccaatcacaggtaaaggcttcttctcagatgaccacgatttaatagatacccccgaataccgcgaatctcttaaaaacaccctcatcgaattaggttacaccagcttcaataaaccattacctgcaagcactaaaccttaccgcagaagaggaacaccccgtaaggctatggagaatacacttcagcaatattttattgataaagactcagtaagtaaccttccttcaaaagttgaggatgtattcacaggttgcgttaatagctgtccagataaactatccccatttttctgctttaatttaatgaagcgattaggcgttattacagcagccgctgtagaggatgaaacaggctttagtaaaagctggtgtaatgatattactcaggcattacagttagcaatcataatgattgaacattgccatgataaaggcgaaattcaggtaatgtttaacagtgactatgaaaacgatgaattagattctgacagggaattagaagacatccttgatttacacattcaaaaggcagcataa

SEQ ID NO: 222070 - DNA, 555 bp, Klebsiella pneumoniae
atgtcatctgtaatcgcttatgtccgtgtatcaacttctgaccagactattgagaaccagaagaaacaaatcaatgaggctggttatcaggttggcaagtggttctctgatgaggctgtatcgggtggcattaaggctacagagcgtaaaggattcggtgacctgctgaactatgtccgtgaaggtgacacactgattgtcatcgggattgaccgcttaggccgtaacactattgatgttctctcaacagttgagactttacaggccaaaggtgtgaaggttatcagtctccgtgaaggattcgacctgtctacaccagtgggtaaggctatgcttactatgatggctggattggcttctttagagaaagacttgatagcagagcgtagaacagcagggattaaacgtgctcagtctgaaggtgtccattgtggcagaccgattaaagcaaccgctgaacaggttcaggaactaattggacaggggatgtcgccaaagcaggtacaggatgagttacagattagtaaggcaactttctatcgactgaacaagtaa

SEQ ID NO: 222071 - DNA, 906 bp, Klebsiella pneumoniae
ttgttgcattcacccgttattgagcttcagtctcttgcaggtgacccggatgcggacatcatcgcagtactaatgaaagccaaaatgattgctgtaaagctagacctcacagaccttgtcgaatggatagagttagagcttaacggttacccgaacattgcatcagtgcctgaatatcgttcggggcaggggcagttgaaagcattcaacccattcagggggtggatacctgttgatttgggggtttctgacccgaaaattactacaccatttacaacgtttaaacttactgagtcgatagcttcaatgaagaggctaaaagataaaaaattaggggcggtaagtcttcctattcctgctggttacgctgatatgctttattctggacactcggacaggtatgaaattcgctggttcttcagtgccgggaaaattgaccatgttataaccaccgtccgaaacaagattcttgactggtcattagaattagagaaaaagggaatactcggggaaggattaatatttactagagaagaaaaagaggttgcaccaatgacggttaataatacgaatatctttcatggctcagtgaataacgccggagctatcggggcaggtaacaccggaaacatcaatcaacaaaactctatctcagttggtgacattgcatcccttgagcgtgagctaaagagtcacggtcttgatgataatgatgttgctgaattgaaacagcttgttgagcaatcacctaaaccagcttcaaaagaagaagttgaaaaaggttttggctcatggattggtaagatgacaggcaaggcttttacaggtgctttaaaaatcgctggtgcagccgctcctgctgttcttactaatgcactttgcggttacttcgggatccctgtttaa

SEQ ID NO: 222072 - DNA, 903 bp, Klebsiella pneumoniae
atgactaactcaccagttcttgagcttcaggctttagccaaaaatcgcgatagcgacattatcgaggttcttttaacagctaaaatgatagctgtgaaattaggattgaaagaccttagtgaatggatggaatatgaaattgatggttatccaggtggtgtggatgttcctgattatcgaaaaggacagggcattataaggttctggaatccctatcatggttggcaaaatcttcagtttagaaatgttcccgccgatgtcattactactatacagactttcactattgatgagtctatatcctcgatgcaagggattgaaactgaagacggaatgttacgtttagttatccccccgaatttggtcgaactgctttttacacgccaagaaatccctacggaaatttgctggtttttcagcgcaaacaagctcaaacacattgtaactacagtaagaaataaaattcttaactggtctttagagcttgagtcacaggggatttttggcgatgggttgctttttactcagaaagaaagggatgtcgcgccattaaccgtttataacacaaatatattcaatgaagctgttaataacaatggggcaattggagcgggtaactcaggtaacattcagcagcaaaataccatcaagtcgggtgattttaattctctgggacgtgacctcaaaaagtatggtatcgatgatgaggatttgggggatttaaagcatattattgatgattcacctgcaccagctacccaagacgaggtagagcgatactttagtcactggattggcagtatgacagtcaaagcactgagtggtgggcttaacatcgctggtacggttgctccaaatgttctgactaaagctctgtgtgattactttaaaattcaagcttag

SEQ ID NO: 222073 - DNA, 1626 bp, Klebsiella pneumoniae
atgccaaaagcaatctcatacatacgattttctacaaagattcaatcagttggtgattctactaagcgtcaaagcaagtacattaacgattggttaaaaaggaatcccgattactatttagacgaatcattacgctttcaggatttaggtataagcggcttctcaggagcgaatgctaagtctggtgcgttcggtgaattcttagccgctgttgaatctggatatattgaatcggggtcagtcctacttgtcgaatctttggacagagtttcacgacaggacatcgacacagcaggagagcagcttagaaagattctcaggtctggtgttgaagtggtgacccttgtcgataacgagtggtacacgaaagaaagtctgaaagattcactgtccatgattaaagcgatgctggtgatggaaagagcacatgaagaatcagcgatgaaatctacccgcttgcgctctatgtgggctgctaaaagggaaagggctgcaaacggtgaaataatgtcaaagcgttgtgcagcatggttaaaggtctctgatgaccgttcacactttgaattcatccctgagaatgtgaaagctgttcaacgtgtctttcagctacggttagagggcttgtctcacgtcaagatagccaaacaaatgaatgatgaaggtttttcaaccctgaaccagttcaaatccgttacaggtggctggtctcaatcgtcggtcacagagttgctttcaaaccgttcagtgattggtttcaaagtcccttctaaatcaatggctgtaaagggggtatctgagattcctaactattacccctcaataatcaccgatgagcaattctacgctgtacagcagcttaaacaggggtcagggcgtaaaccttcatctgacctacccttactgactaatctcttcaaaggggttctcaggtgctctgagtgtggctttattgtcgttgttgcgggtgtctctgctaagaggtctggtatatacaaatgctcgatgaagagtgaagggcgttgtaacagtgttgggttcagcagattgcagactgaccgcgcattggttcaggggctgctttacaatactaaccgtcttgccctaaatcgtgataatggctctgctataggctctcttcaaagtgagttagaacagcttcagaaacagcgtgagaggctcattaagctggctatgctggcagatgataccgaatcaatggcaaaggatttgaaagccctgaatagtcaaattaaggacgctgaaaaggctgtctcagaggttcaccagcgagagcaatcaagccagcttgagacaatcagtcatcttgatttgactgtgaagaaagaccggatagaggcgcaaattatcattaagcggatagtgaaagaaatccgacttaacacggctagaaagaaatgtgatgtcttcttacataacggcttaaagctgctgaatttcccattggatagggtggttgatggcgctcagtggctggaggttttaccgctgattgatggtgatgagttcgactttgaagggttcaccactaagccacaacacatagccttagaagaggctccagagtgggtgaaagagatggaagagcaacctaatcagccgttgtga

SEQ ID NO: 222074 - DNA, 393 bp, Klebsiella pneumoniae
atgatgagttatgaagagattgaacaagtgtatcataagaaaggtgtaatcctcgacagccgcccggtccatagcgctgcggccaccagtccggcgatgatcgatgcccaacaaaagaaaccgaaggtgccggtacatgcggtgatgaccgcccgacagccaatggtgcggtttatcggcggtgacgatatggtccataaccgggaactgtttcgcgtctggcttcagaccctggcgaagtggcatcagtcggggaccccgtggttgttcctgcataccccggacattgctttcgccccggcgctggtggataccctgtggggtgacctgcgcgctgccctgccggcggcaggaaatgcgccgtcgattccgcagcaatcttctcttttctga

SEQ ID NO: 222075 - DNA, 396 bp, Klebsiella pneumoniae
atggtcagcgcgctgtatgccgttttaggtgcgttattgttagtgaagttctcatttgacgtggtgcgtctgcgcacccaataccatgtaggctacggtgatggcggctttagcgagctgcaggttgccatccgcgttcacggcaatgccgtcgaatatgtgccgattggcctcattttgctgttatttatggagatgaacggcgctcagacctggatggtgcacgtttgcgggattttattgattgtcgggcgactgatgcactcctggggttttcatcaccgcgtctactactggcgccgctccggcatgagcgccacctggtgcgcgttgttgctaatggtgctggccaatctttggtatatgccctgggagttggttttctccctccgttag

SEQ ID NO: 222076 - DNA, 744 bp, Klebsiella pneumoniae
atggcggtactggaagtgtgttgctacagcgtggcgtgcgcccgggaggctgagcgctacggcgccgatcgtattgagctctgcgccgcgccgcaggaagggggattaaccccctcttatggggtgctggtctcggcccgcgaggcgattaccctcccggtgcatccgatcgttcgcccgcgcggcggcgatttctgctacaccgaggaagagttcgccgcgatgcttaacgatattcgcatggtgcgggatctgggctttcccgggctggtgaccggcgtgctggatgctgatggccaggtcgatatcccgcggatgaaaaaaataatggccgcggcggggccgctggcggtgacctttcatcgcgcgttcgatctgtgcgctgacccgcgtcaggcctggaaaacgctggggacgctgggggttaaacgtatcctgacttccggtcagcaatcctcggcggagaaaggtatttcattaattacggaacttattgccgcaggggatactccaatcattatggccggtgcgggagtccgcgccgcgaacctgccgctgtttctgcaggcgggggtgaaagaggtccatagctcggctggccactggttgccgtcggaaatgcgctttcgtcatccgggcgtttcgatgtcagccgatcccgatgccgatgaatacagacgctacgccgtgaatggcgcagcggtggcggagatgaaaaggattatctccgcctggagaagttaa

SEQ ID NO: 222077 - DNA, 1146 bp, Klebsiella pneumoniae
atgaggatagtgtattttgtcaatgcagcgtggtacttcgaactgcattggttggaccggtcagaagcggcaattagcaaagggtatgaagttcatcttgtaagtaattttgctgatgacgccatcaaaaataacctggaaaaaaaaggtataaaatgttgggatattgagcttaacagattttctaaaaatgtgtttaaaaacatttcaatattcactgcatttagaaagatctgtaagcaaattaaacccgatcttattcatctaattactataaaaccaatcctttttggtggattgtatgcccgggttgcaggcatcccttttgtcgtgagctttgtgggattagggagattgtttggcaataaacgaggttggttgaataaattcattttcaactcagtactgtcaatttatagtcttttgctatcagcaaaaagcccagcgcaagtaatatttgagcataatgctgactttgctgagctgaataaatatattaaatttgatgaaaataacatccatatcattgaaggagccggggtagacaggtttcgctttagttatcagccagaaccaactcagaataatttctcggtattatttgccagccgtttgctatggtcaaaggggctcggtgaagtagtcgaggccatcggtaaggttaaacaaaatgaaaataacacaaccttatacgttgcgggaattctcgatgacaaagatccggatagaattgaattagatcaaattttgcaatgggaaaaagaaggaaaaatcatttggttaggtcgaagagatgacatccaaaatttaatcagaaatagccatgtcgtgattttgccaactaaatattcagaaggcgtgccaagaataatcattgaagcgtgtgctatgggccgaagttgcattgtcggaaatgtacccggctgtaaagctataattaaagataatttcaatggatgtgtactaaaaacacatagcgctagtgagatcgcggagaaaattgaatatcttagagataacatggaaataagaaaaaaattcggcctacgctcagccgaaattgtaaaagaaagattcagcaaagaaattgttatagataaaacgttatgtgtttacaataaaatactaagtacaacaaagcggtaa

SEQ ID NO: 222078 - DNA, 369 bp, Klebsiella pneumoniae
atgttaacaaataagcgagagcgcgcctggcagcagcgagccgcgttgtgggccaccagagataatgtccagcgccatgcgctgtccatgagtatgccctggctggcctttgtcaatatcgcttttgcgttaatgattttcttccgcaattttatctttacctattttgataagaggctactgacgcaccgggcggttattccttatatcgaagcggcgttgattgcggttattatcatttcggccattttagtgattattgccctcacgccgcgactggcgcagggacgatatacgttgaatatcatcaccgggctgctgctggcgctcagtcctgagagatcccctcataatttccccaaagcgtaa

SEQ ID NO: 222079 - DNA, 3075 bp, Klebsiella pneumoniae
atgacaatgattacggattcactggccgtcgtattacaacgtcgtgactgggaaaaccctggcgttacccaacttaatcgccttgcggcacatccccctttcgccagctggcgtaatagcgaagaggctcgcaccgatcgcccttcccaagagtcgcgcagcctgaatggtgaatggcgctttgcctggtttccggcaccagaagcggtaccagaaagctggctggagcgcgatcttcctgacgccgatactgtcatcgtcccctcaaactggcagatgcacggttacgatgcgcctatctacaccaacgtgacctatcctattgcggtcaatccgccgtatgttcccacggagaatccgacgggttgttactcgctcacatttaatattgatgaaagctggctacaggaaggccagacgcgaattatttttgatggtgttaactcggcgtttcatttgtggtgcaacgggcgctgggtcggttacggacaggacagtcgtttgccgtctgaatttgacctgagcgcatttttacacgccggagaaaaccgcctcgcggtgatggtgctgcgctggagtgacggcagttatctggaagatcaggatatgtggcggatgagcggcattttccgtgacgtctcgttgctgcataaaccgagcacgcaaatcagcgatttccatgtagccactcactttaatgatgatttcagccgcgctgtactggaggcagacgttcagatgtacggcgagctgcgcgatgagctgcgggtgacggtttctttgtggcagggtgaaacgcaggtcgccagcggcaccgcgcctttcggcggtgaaattatcgatgagcgtggtggttatgccgatcacgtcaccctacgtctgaacgtcgaaaacccgaaactgtggagcgccgaaatcccgaatctctatcgtgcggtggttgaactgcacaccgccgacggcacgctgattgaagcagaagcctgcgatgtcggtttccgcgaggtgcggattgaaaatggtctgctgctgctgaacggcaagccgttgctgattcgcggcgttaaccgtcacgagcatcatcctctgcatggtcaggtcatggatgagcagacgatggtgcaggatatcctgctgatgaagcagaacaactttaacgccgtgcgctgttcgcattatccgaaccatccgctgtggtacacgctgtgcgaccactacggcctgtatgtggtggatgaagccaacattgaaacccacggcatggtgccaatgaatcgtctgaccgatgatccgcgctggctacccgcgatgagcgaacgcgtaacgcgaatggtgcagcgcgatcgtaatcacccgagtgtgatcatctggtcgctggggaatgaatcaggccacggcgctaatcacgacgcactctatcgctggatcaaatctgtcgatccttcccgcccggtacagtatgaaggcggcggagccgacaccctcgcaaccgatattatttgcccgatgtacgcgcgcgtggatgaagaccagcccttcccggctgtgccgaaatggtccatcaaaaaatggctttcgttgcctggagagacgcgcccgctgatcctttgcgaatacgcccacgcgatgggtaacagtcttggcggcttcgctaaatactggcaggcgtttcgtcagtacccccgtttacagggcggcttcgtctgggactgggtggatcagtcgctgattaaatatgatgaaaatggcaatccgtggtcggcttacggcggtgattttggcgatacgccgaatgatcgccagttctgcatgaacggtctggtctttgccgaccgcacgccgcatccggcgctgacggaagcaaaacaccagcagcagtttttccagttcagtttatccgggcgaaccatcgaagtgaccagcgaatacctgtttcgtcatagcgataacgagctcctgcactggatggtggcgctggatggcaagccgctggcaagcggtgaagtgcctctggatgtcgctccacaaggtaaacagttgattgaactgcctggactaccgcagccgaagagcgccggacaactctggctaacggttcacgtagtgcaaccgaacgcgaccacatggtcagcagccggacacatcagcgcctggcagcagtggcgtctggcggaaaacctcagcgtgacactcccctccgcgccccacgccatcccgcaactgaccaccagcgaaacggatttttgcatcgagctggataataagcgttggcaatttaaccgccagtcaggctttctttcacagatgtggattggcgataaaaaacaactgctgacgccgctgcgcgatcagttcacccgcgcaccgctggataacgacattggcgtaagtgaagcgacccgcattgaccctaacgcctgggtcgaacgctggaaggcggcgggccattaccaggccgaagcagcgttgttgcagtgcacggcagatacgcttgccgacgcggtgctgattaccacggtccacgcgtggcagcatcaggggaaaaccttatttatcagccggaaaacctaccggattgatggaagtggtcaaatggcgattaccgttgatgttgaagtggcgagcaatacgccacatccggcgcggattggcctgacctgccagctggcgcaggtagcagagcgggtaaactggctcggattagggccgcaagaaaactatcccgaccgccttactgcggcctgttttgaccgctgggatctgccattgtcagacatgtataccccgtacgtcttcccgagcgaaaacggtctgcgctgcgggacgcgcgaattgaattatggcccacaccagtggcgcggcgacttccagttcaacatcagccgctacagtcaacagcaactgatggaaaccagccatcgccatctgctgcacgcggaagaaggcacatggctgaatatcgacggtttccatatggggattggtggcgacgactcctggagcccgtcagtgtcggcggaattccagcttagcgccggtagctaccattaccagttgctctggtgtcaaaaataa

SEQ ID NO: 222080 - DNA, 168 bp, Klebsiella pneumoniae; identical to SEQ ID NO: 111884

SEQ ID NO: 222081 - DNA, 255 bp, Klebsiella pneumoniae; identical to SEQ ID NO: 180692

SEQ ID NO: 222082 - DNA, 360 bp, Klebsiella pneumoniae; identical to SEQ ID NO: 111885

SEQ ID NO: 222083 - DNA, 924 bp, Klebsiella pneumoniae
gtggcaaagcaaaagttcaaaatcaccaactggcccacctacaacaaagccctcatcaaccgtggctccctcactttctggctggacgatgaagcgattcatgcctggtatgagtcggcaacgccttcatcacggggaagacctcagcgctattctgaccttgccatcaccaccgtcctgatgattaaacgcctgttccggctgaccctgcgggctgcgcagggttttattgattccatttttgccctgatgaacgttccgttgtgctgcccggattacagcagtgtcagcaagcgggcaaagtcggttaatgtctgtttcaaaacacccacccggggtgaaatcgcacacctggtgattgattccaccgggctgaaggtttttggtgaaggcaaatggaaagtcaaaaatcacggcaaagagcgccgtcgtacctggcggaagctgcatctggccgttgacagcagaacacatgaagtcatctgcgcggacctgtctctgaacaacgtcacggactcagaagctttcccgggtcttatccggcagacacacagaaaaatcagggcagccgcagcagacggcgcttacgacacccgactctgtcacgatgaactgcggcgcaagaaaatcagtgccctcatcccgccccgaaaaggagcgggttactggcccgtagagtacgcagaccgtaaccgtgcagtagcgaatcagcggctgaccgggagtaatgcccggtggaaatggacaacagattacaaccgtcgctcgatagcggagacggccatgtacagggtaaagcaactgttcggaggttcactgacgctgtgtgattacgatggtcaggtagtagaggctttgggcatggtgcgtgcgctgaataaaataacgaaggctggtatgccagaaagcgtgcgtattgcctga

SEQ ID NO: 222084 - DNA, 426 bp, Klebsiella pneumoniae; identical to SEQ ID NO: 111887

SEQ ID NO: 222085 - DNA, 921 bp, Klebsiella pneumoniae; identical to SEQ ID NO: 111888

SEQ ID NO: 222086 - DNA, 3381 bp, Klebsiella pneumoniae; identical to SEQ ID NO: 111889

SEQ ID NO: 222087 - DNA, 1281 bp, Klebsiella pneumoniae; identical to SEQ ID NO: 111890

SEQ ID NO: 222088 - DNA, 927 bp, Klebsiella pneumoniae; identical to SEQ ID NO: 111891

SEQ ID NO: 222089 - DNA, 1116 bp, Klebsiella pneumoniae; identical to SEQ ID NO: 111892

SEQ ID NO: 222090 - DNA, 750 bp, Klebsiella pneumoniae; identical to SEQ ID NO: 111893

SEQ ID NO: 222091 - DNA, 690 bp, Klebsiella pneumoniae; identical to SEQ ID NO: 111894

SEQ ID NO: 222092 - DNA, 1008 bp, Klebsiella pneumoniae; identical to SEQ ID NO: 111895

SEQ ID NO: 222093 - DNA, 2796 bp, Klebsiella pneumoniae
atggccagaaaacaatgccaggtctgcggccaacccgccaccgtgcgggtggaagccaatctcaacggtcgtcacagcaccatgctgttgtgcgacgaccattaccggcaattagtgcgccagcaaaagcgcaccgtttcgccgctggaagccttgttcggctcgcgcagcggcctgttcgaggacttcctcggcagtgacttcttccgcatcggcgacgacgcgacgccagttgccgccgataccgatgacgtggtcgatgcctcgtttggcgagcccgccgccgcaggttcgggtgcgccgcgccgtcgcggcagtgggctggccagccgcatcagcgaacagtcggaagccttgctgcaggaggccgccaaacacgctgccgaatttggccgctccgaggtggataccgaacatctgctgctggcgctggccgacagcgacgtggtcaagaccatcctgggtcagttcaagatcaaggtcgatgacctcaagcggcagatcgagtctgaggccaagcgcggggacaagcccttcgagggcgagatcggcgtgtcgccgcgcgtgaaggatgcgctcagccgcgccttcgtggcctccaatgaactcggccattcttatgtcggtccagagcatttcctgatcggtctggctgaggaaggcgaagggctggccgccaacctgctgcgccgctacggcctgacgccgcaggcgctgcgccaacaggtcagcaaggtggtcggcaagggcgccgaggatggccgcgctgagacgccgaccaacacgccagaactcgacaagtactcgcgcgacctgaccaagatggcgcgcgacggcaagctcgacccggtgatcggccgcgcgcaggagatcgaaaccaccatcgaggtgctggcccggcgcaagaagaacaacccggtgctgatcggcgagccgggtgtgggcaagaccgccatcgtcgaagggctggcgcagcgcatggtggcgggtgaagtgcccgagaccttgcgcgacaagcgcctggtggaactcaacatcaacgccatggtggccggcgccaaatatcgcggcgagttcgaggagcgcgtgcagaaggtgctgaaggaggtgaccgagcaccagggcgagctgattttgttcatcgacgaggtgcacaccatcgtcggtgccggccagggcggtggcgaaggcgggctggacgtggccaacgtgttcaaaccgatgatggcgcgcggtgaactcaacctgatcggcgccacgacgctgaacgagtaccagaaatacatcgagaaggatgccgcactggagcggcgcttccagccggtgacggtacccgagccgacggtggcccaggccatcatgattctgcgcggcctgcgcgacaccttcgaggcgcaccacaaggtcagcatctccgaggacgcgatcatcgcggcggccgagttgtccgaccgctacatcacggcgcgcttcctgccggacaaggcaatcgacttgctcgaccaggcggccgcgcgcgtgaagctgtcggccacggcccggccggtggccgtgcaggagctggagtccgaactgcaccagctgcggcgtgaacaggattacgtggccgcgcgcaagcagtacgaccaggccgccgagctcgggaagcgcatcgaagccaaggaggccgagctcaagaagctcgtcgaggactgggagcgggagcgggcctccggcagtgccgaggtcaaggcggaacacgtggcgcagatcgtctcgcgcctgaccggcatcccggtcaacgagttgacggtggaagagcgcgaaaagctgctgcacttggaacaacggctgcacgagcgcctggtgggacaagacgaggcggtccgtgccgtggccgatgccgtgcggctgtcccgcgccggcctgcgtgaaggcagcaaaccggtggctaccttcctgtttctgggcccgaccggggtgggcaagaccgagctcgccaaggcattggccgaatcgatctacggcgatgagcacgccctgttgcgcatcgacatgtcggaatatggcgaacgccataccgtggcgcgattggtgggcgcgcctccgggctatgtcggttacgacgaaggcggtcagctcaccgagaaggtgcggcgcaagccctacagcgtgctgctgctcgacgagatcgagaaggcacaccctgacgtatacaacatcctgctgcaagtgttcgacgacggtcgcctcaccgacggcaagggccgggtggtggatttcaccaacaccatcatcatcgccacgtccaacctgggttcggacatcatccagcgacggctgaaggcgcgcggggcggccggcgaggagtacgaaaagaccaaggccggagtcatggacgtgctgcgcggccatttccggcccgagttcctcaaccgcatcgacgagatcatcgtcttccatgcgctgggcaaggaggagatccgccacatcgtcggcctgcagctcgatcgcgtggcgcgcagcgccgccagccagggcgtgacgctcactttcgatcagacgctgatcgaccatttcgcggaagaaggctacaagcccgagttcggtgcgcgtgaactcaagcgcctgatccgcagcgagctggaaactgcgctggcgcgcgagatgctcggcggcggcatcggcaagggcgatcacgccagcgcacgctgggacgacaaggccgaacgcgtggtgttcgaacgcaaagagccaccgcagaccccggccgagccggagcagccggatgccgcgaaggcgagcgacgcatcttga

SEQ ID NO: 222094 - DNA, 489 bp, Klebsiella pneumoniae; identical to SEQ ID NO: 136038

SEQ ID NO: 222095 - DNA, 726 bp, Klebsiella pneumoniae; identical to SEQ ID NO: 221192

SEQ ID NO: 222096 - DNA, 705 bp, Klebsiella pneumoniae; identical to SEQ ID NO: 101494

SEQ ID NO: 222097 - DNA, 657 bp, Klebsiella pneumoniae
atgctgatgtgtgatgcgaccggtatgtcgcaacgtcgtgcctgcaggcttacaggtttatccctgtcgacctgccgctatgaggctcaccgtccggctgctgatgcgcatttatcagggcgcatcactgagctggcactggagcgcaggcgttttggctaccgtcgtatttggcagttgctgcgccgtgaagggcttcatgttaatcataagcgcgtgtaccggctttatcacctcagtggcctgggcgtaaaacgcagaagacgtcgtaaagtgctggcaacagaacgtctgccgctgctccgtccggcggcgcccaatctgacctggtcgatggattccgtcatggacgcactttccaccggtcgcaggatcaagtgtcttacctgcgtcgatgatttcacaaaggaatgcctgacggtcactgttgcctttgggatttcaggcgttcaggtctcgcgtattctggacagcattgcactgtttcgaggctatccggcgacgataagaactgaccaggggccggagttcacttgccgtgcactggatcaatgggcctttgagcatggtgttgagttgcgcttaatccagccgggaagccaacgcagaacggatttattgagagctttaacggacgatttcgcgatgaatgcctga

SEQ ID NO: 222098 - DNA, 174 bp, Klebsiella pneumoniae; identical to SEQ ID NO: 185435

SEQ ID NO: 222099 - DNA, 1185 bp, Klebsiella pneumoniae
atgaaacggcataagaacttcaatttgttgttgatgctggtactgctggtggccgtcggccagatggcgcagaccatttatattccggccatcgccgacatggcggtcgcgctgaacgtccgcgaaggggcggtacaaagcgtgatggcggcctacctgctgacctacggtatttcacagctattctacggcccgctctctgaccgcgtcggtcgccgcccggtgatcctcgtcgggatgtcgatttttatgctggcgacgctggtagctattaccacccatagcctgccggtgctgatcgccgccagcgccatgcaggggatgggcaccggggtcggcggcgtgatggcgcgcaccctgccccgcgacctgtacgaaggcgctcagctgcgtcatgccaatagcctgttaaatatgggtattctggtcagcccgctgattgcgccgctgctcggcggcatcctcgacaccctgtggagctggcgcgcctgctacgctttcctgctggtcctgtgcgccggggtgaccttcagcatggcgaagtggatgccggaaacgcgcccggaaggggcgccgcgcaccaaacttctggccagctacaaaacgctgttcggcaccggcgcctttaactgctatctgctgatgctgatcggcggcctggcggggattgcggtattcgaagcctgctccggggtgctgatgggcgcggtgctcggcctgagcagcatggcggtgagtattctgtttattctgccgatcccggcggcgttcttcggggcgtggtttgccggccggccgaacaagcgtttcccgaccctgatgtggcagtcggtgatctgctgcctgctggcaggtctgatgatgtggatcccagggctgctgggcatcatgaccgtctggaccctgctggtgcctgcggcgctgttcttcttcggcgccgggatgttgttcccgctggccaccagcggcgcgatggagccgttcccgttcctcgccggaaccgccggggcgctggtgggcggcttgcagaatatcggctccggcgtgctggcctggctgtcggcgatgatgccgcaaaccggtcagggcagcctcggcctgctgatgatgctgatgggcctgttgattctgctgtgctggctgccgctggcctcgcgcttcacccaccatcagcagccggtataa

SEQ ID NO: 222100 - DNA, 189 bp, Klebsiella pneumoniae
atgaatcatgtcggggtagctatggggcgtaaacggctggtgcagaagcggctggagagtggagagttgatcgccccgttcggcgatatgacgctgaaatgccatcagcattattacgtgaccaccctgccgggccgtcagtggccgaaaatcgacgcctttatcgagtggctgcatagcctgacctga

SEQ ID NO: 222101 - DNA, 2256 bp, Klebsiella pneumoniae
atgataataagcccgccatttatacgtccccggaatgaaggagaatgtgatgcatcatgggtggaaagaatgatacccactgatttaaaccgggattttcctgtaaacagatccggatcatggcatggcggtgtacatgttctccacaccgacaatcctgatgaaggttataatcgcatcgaatttgtacgtgcgattgcagatggagaagttgtctctttcagggcgccgtcaaacacagaaagacgggatgcattcccgctgaatattaatggcagaactgatgatggatatattctgctaaagcataaaaccgagatcggggaaagttgtagcgtcgtctattactccctgtatatgcacctcagagaccgactgagtcccgcaataagggagggaggcaaagtctggcgcaaggatcgcataggacagaatgggatggtggatgaaaataatgcctttcactttcagattttctgtgacaatgaaaacatgttgaaactaaccggacgcatgctacccgaactcgatgtcacccgcgatggcagaaccgatacggtttatggtgatattcatttttatctgcccgctgggacacggttttacgaatctgtagctgacgcagcctcagcagataccgaccgcctaaatctcgttcataccagtgccgaagcactgtttgtcagtatgaccttcgaaaaaggtgactgttcgatgattactcgtaggcagaatatcaccatcggggcacacttcgatacggtgggagagcctctagtaaacatagatgctaaccaaattgacgacataagaagattaggtctgaaatatgaatacaatctatactggacagccaaacgtctgtacccgcagaatccctctgcgggctttgaactactccgctttggtcggattattagtactgaatatgaaactctcatccctgccatcgccccgttgtggcgtactgtcaacttccccggaggctcagggcttgtaaatctggcctcttctgacatcaaaaaattcagtgatgccgacttcccgcactggacgggctggcgaatggtggacgatgacatggacaataacagccagtgtaattccgcctttatcacgggattacaggagagtgggaaccttagcgatctgagcagccgtctggtttgtcattttccactcgaatggaacgccgacacttttgaacagcgttattcctggctaaaaaacaataacgacgatactcaagctatgtctgatgaggactatgagcggttgaaaagtcatgttttagcactgtgctttgatacgggcacgcttggcacaggtcgactatggcattttcatccagtggccttcattacccattttcgcaggtgctgctggcttagcaaatcagaattgaagcaaattgttccgcgcaatctgttaagaatggcgggacagaatgattatcgatgggaagccatcatctaccgggatggcgtcggaagccttgcggataatatccgcacgcacattaacagagcaatgcagaaacacctgataaccaccccactccgactcgcttgctttctgggaaacgggattcaggagacggggtggctgggaacaatggaggaaggttatcgctatacggaaagggatccacgcacgcatcagatcgttcgtcgctataatatttggtactacccgtggtatggacgaggcctgttacagctaaccagcccactaaattatttcgaatattttagcttcagaggacgagtatatcctgtaaacatcaaagatactctgataaatgaatataatcgtctttattcacaccggggcattcgctacaccgacaatcacctatctgatacagaaaaccacattcctgagaacattattagctggagggataatgtcagcagcgataaccatgaggcgactagcagtgcaggattttactgggcgtcaagaaatatggcatattacgctgataacgaacatatactcgagcgatgtagcgtcaataccagaagaaacggggtgaaaatttactatcgtagtcaggccttctggcaagccagtgccgccgttaatttacccgcacaaattgataatgaacaatatcaaggattaaatggttttaatgaacgctgctgcgcatacggtagtgcgatagccgtacttactgagcaaaaattcccggacagcaataactttttggttaatgaagaacccgaatcagaacagttaaggagaggatga

SEQ ID NO: 222102 - DNA, 669 bp, Klebsiella pneumoniae
atgaggggggttataattttactaatattgatatttttatcacaaaaagccgtaagctccatcacaccggcaatacatgtaccctctgacttcaataaaaacaggtttgttaattataataacgccatatctaatggtagcgggaataacacatgtgataaagttgcatttaaaaactattatccgagtgaatacacatcattaaaaataaaaaacccaccgtttaacacttggttttgttggttttctgtcgatgtcatccatgatggatacggcccaaacaggttgcttcctgaaaaagtctactttgatgaaaaaacaggaatatggaaaaagaaaaaatacactttgagtaaagaaagtatccagcgctctaaggatgtctatggcattgttaaccttagcgagttgcagcctgtacatctgtataatattcagacaattaatgcgcatggatatgcagtcattgataacaacgtttccttacaagaacaaaagaaaggagtgaagaaaaaattgtcattctgtcttatacgtgacgaagctgcattctgtggttcagggtcgatgatcaatcttatcgatggaaaagaagtcgactttaccccctatatgctcatttcccttgagacagtcgaattgggtgttgcagagcatagccagaagtga

SEQ ID NO: 222103 - DNA, 660 bp, Klebsiella pneumoniae
atggaaataattcgtgcggcctgtctgcttccattattggcgctggctgcctgtcagggaaaacctttgcccaacaccgccatgcatagtgatgcgccaacagagtggagttttaactttttcacacccaaagcgttacccgccgtggtgacgtttgccgctattcttgacgttgatggaaatgactatcgctttaacacgctgaatagcacacccgatctgcctggcgtgatcggcgagtggaacgacaaagatcgtgcgccggtaggatactggaatcacgtaaagcgccctccacgacatattattttttgctgggactcgattattgataaaaaagtgtatgaaacccatttgacgatccctaaatcggtactggaacagatgcttatgccgagtaaatataaggattatcggggacgtattgcctggtacgacagaatgcaaattggtctggctccagaaggaaaagtggccgtctggttacagggaagtggatctgaatctaattaccgcgtcactccgtcagtcctgaaaaccgtatcaggtaataaattagatatttgtaaagatataacaaggagcgatttttcttatggatatgacaaagatattatagattttatcaaagggaagcactacccttacggtaactggtaa

SEQ ID NO: 222104 - DNA, 1875 bp, Klebsiella pneumoniae
atggcgaagggattctttctgtatcacctggataaaaccacctgtgggggacgcatactttcgggtgcgcctgatgacacttaccacattggcggcattgagcggcaacaggtcagggtgggcgatccggtgacctgcggtaagcacgaggggcgatttcgcgtctgtgggggaatgggtgacacctacgatgtcggtggatccctgaaagaatgggctggctcactggacagctacagctcttgcccgtgtcgtgctcggttcgttccgaccgtcttttctcactcctacgatagggactgcaatgccgggcgggtagctgaacgggcggaaacggcgaagaaaaaaaaccaacagcctgagcctgaacagcgtgcgcaggccgcaaagaaaaaacgggaaatcacactaaccatcggtgtgttttttgatggaaccggaaacaatgcgaataatagcggtgaccgtcaggccgcctgttccggcgaacatttcgggatgaatgacgccgatgcggtaacggcgtactctcagtgcgtgcgactaaagcatggctatagtggtactgccgcagggagctatattggctattatagcaatgtgcactggttgtatatattgtacaggcaggatatccgacccgatagcggagcaggccagcacgccatttatgttgaaggtattggcacggaagacggagctggcgacaatacttacggaatgggtactggtcgaggcgataccggtgtggtgagaaaaaccgataaggcagttgcagctctgactgtcggtattcaggaatatttacttcagcatgcaagcgatggttcctgcaccatcaaagagatacaatttgatatattcggtttcagtcgcggggctggtgcggcacggcactttgccaatcgggtattcagtcaggaccgtgacattatcacggcgattagagccggtttgaatggtattgaattctccggtgcaccgggtggtaaaacccgctttctgggcatatttgataccgtggcggcgatcggcaccccggttaacggctttaacccgcacagcgcagacacaggagatgtcaatctggcgctacgtccaggtgtagcggagaaggtttttcacatcaccgcgcagcatgaatgtcgttttaactttgcattgaacagcgtaaagccagcgtggccggagctggcgctacccggtgcgcactccgacattggtggcggctataatcccaacgagaatgaagcttatttccttacccgaccagagtttgaaaccgtccccttttccatcccggatacggaaacgcgtatttaccggcagacctgtgcaaaacttaaaaccatggacggctatccggcaatagctctactgctaaatgcggtagaggtgagcgtcgatacctggcatgacgacagaatgccagctgaccgttacggcacgctacagaaacgcagtggagcagctctggttatcaaccgtccgactttcaacgactggtcaaaagtggtattgcgggtgatgctcgatgcggcccaggatgccggggcggtgtttgaacctattcgagatacaaatgcacacttaaagcttaggcaagaactgaacggtttgtgtgaaaaagcgattgcgatgggccgagccataaggagtggtaagtctgccccaggctttaccacaccggaattgcggatgttggccgaaaaatatatccactgctcggccaactggaacagcgttatacgagacagtcggggtattatcagcggtgcggtcaaaccggcgaagctggtgacattcaccaaccggcctgatgaccgctggcagcgtaccgtttacgatatggacggaaataaaatatggaaataa

SEQ ID NO: 222105 - DNA, 1110 bp, Klebsiella pneumoniae
atggaactaatcactcgtcttgtttacatcgatacctctgcttatgaacgaaagcattttcaatttggtctatacattctcgaaaaactacaatctttcgcatcgaatggtaaggttcatgtgcttataactgacataacgcgaaaagaaatcgaagcacacatccggaaaaaggttgaagaggctctaagagagctagaaaagtacaaaaaacaatacgcacctatattgaggacatcaaaaggaagtattggagacggtttgtttatcaagcctaacttagaagaagtcacaatcgaagctcttgaaagtttttcaaatttcttagcaagtgaaggtgttgaggaaataaccgtaaataacgttagtccattattggttttcgaaaaatacttttctaatgctccaccatttgatcaaccaggcaaaaaaaaagagttccctgatgcattcactctagaagcggtaaacaatatagctgtcaaacgtaatcataaagtttatattgtaagcgaagacaatgatttaatttcagcatgtgagcacaacccaaatttcctacatctcattagtattcaaagtcttatcgacatgcttattcgcaatgatgaacagttagatgatgtggtttctttcgctgatgggatctttaataaactgcacccaaccattattgactccattcgacagtatatcaatgaaatagaatttatagctgaaggttcggaataccaagaaattgaaattgatcaagttgaaataaaagatataaagttaacatcctctaatcttacagatgtatcacaagaatctgcaatttacgacttatctgcaatggttacaattgaagcagtgtttcgttttcctgattacgaacgttcaccttgggaccctgaagataaagcttatgctttcgtatttgaatcaacagctctctttagctttaatgaatcaataagcttaaatgttgaaatagggtttcatgatggaataagagagaatgcagaaattcaaagtttaatcttggatgaagattatattattttagacacagaaaatggaacattaattagtcaggctgataattattttgatgacgaccatgaataa

SEQ ID NO: 222106 - DNA, 507 bp, Klebsiella pneumoniae
atgaaaactaaaactgggaagagtatgaagcgccaagatatcattaaatggattcattctgagtcacctaacgttgaatcacagattcaacgttggcttacagaaattttacagaaaggagataagtctgatgaattcatgcgcggtttagagattatcgataatgaaatagttgttctactcaggccatacactaatagatatccaggaaattgcttaaccatttgcacagtaaatcttcctccagaactccaaaggaaaggatggtttaaaagctttctaaatctttgttgtagagttaacccatggaacgatgttgtaattgaagacgttggcaatgagcatcttttcgatttttgtgcacgtaataacttttcaattctacacccttgttataaaacaacatttattgttaatcaggatatagttagggaaatgaatattctgcctttggaagattactcctactatctgaccttaagtaagtcagaaaaccgcgtcgtatag

SEQ ID NO: 222107 - DNA, 420 bp, Klebsiella pneumoniae
atgcagttttacacgcccgttgagttacgtgagatcatgctgatctcgttgtacagtgacattgtgcaatgtggttttccaagccctgcacaggattacgttgagcaacgcatagacctgaatgagttactgatcaatcaccccagtgcgacgtattttgtcaaagccgccggtgacagcatgaaagacgccggtataggggaaggggatcttctggttgtggatagctcaaggacagcagttcatggcgatatcgttattgctgctgtggatggggaatttaccgttaagaagctgcagctgcatccacgggttcagcttaacccaatgaaccctgcatattcgccgatagtcgtgggtagcgaggatactctcgatgtgttcggggtcgtaacttacatcatcaaatcggctggctga

SEQ ID NO: 222108 - DNA, 123 bp, Klebsiella pneumoniae
atgactgaagatgtggtggagcagtgccgcagaatgctggagaacggcgctacccggcagcaggtggctgatgtgacaggcgtggacgtgaaaacaatctacaagtacctcccggcgacttga

SEQ ID NO: 222109 - DNA, 240 bp, Klebsiella pneumoniae; identical to SEQ ID NO: 218363

SEQ ID NO: 222110 - DNA, 870 bp, Klebsiella pneumoniae
atgactacagtaacaggtccatttgaagtacgtaaaaatctgaccctgggcgcgggtgtaaaactgtaccgcgaccagacaattactcctgaaacgaaagccgtctttgattttgcatcggactgggcgggcggtaacaaggcacagtacaaaaatctgaacacgttaaaaaacctgaactatgtcgatgatgcgataacgattaacgccaacgattcaaattcaaacgcgcaaaactacggcagtgggggcggtatttattctgcgactggtcagaacttaggggtaaaactcccggcgtcggcatacccaacaccggatatgacccgatttatgtttactgtgtgggcaaaatggccggcggacaaactgataaaccccgcaaatactaactgggctctgctctacgcgggctcaggcaccggcgcattgtcagatgacgcaagcacggcgtttaaaatcggcggcgtgcggcaggtgaacgatggttcggacgttccaattcaggtcctgtacgtatatggcgtgcgcgttacgtatcccgcagaggcgcaaacaaaaattaaatccgtcgttggtcagagtcagccattccagtacggggtagaagtggttcgagataaaaatctgaacaatttctactgcaatttctacctcaatggtgagctgatcgggacgtcaccagcatttactcccctggctgtcccgacggtgacaaacgcgtttgtgctgggaaatctggctaacggctactgcatggcgaacactgttttctatcgtgtacgccttgacgacctgaccggctccactcggctgactgcagatctcatcgctgacgattacacaaaaaataaggggtactttagttaa

SEQ ID NO: 222111 - DNA, 483 bp, Klebsiella pneumoniae
atgctgattgttaccccgaaaattgatttaaatggcgagcgctggttttatccctacaaaaagccagaaggcagcaaaaaggaattctcgccggaagaagaatcgctgttcaaacttcgcctgctggtggccagcagcgagaatccgcaatatcgctctcgtaacgcgctggtgcgtcgccacatcgataagatggacgcaggttataaggtggggacaacggattttaatctcgccagcgtggacgatatcgactctgttgatgacctgctgatcgataacgccgctcggttcctgctgaaaggctgggagggagtaggtcagttagtcgacggcatagaggttgctctcgactacaccccagaacttggggccgccatgctgaaacagtacccggcgctatactggctgatactggctgaggcggcaaacattgctcagggtaaggagcagcagactcaggaaaccgtaaaaaagctatag

SEQ ID NO: 222112 - DNA, 1113 bp, Klebsiella pneumoniae
atggcaacggcgaatgacaagcttcaggatgaatcgatagcgcatgcgatatggatagcgcggtacagcaccagcgttgcaaacaggatgataaaaatcctgaatgacagcgatgcggaactgacagccagattgctggtagcgatggatagcctggatgctgacagctttaccgtgtcgcgactggaagcgctgctcgttagtgtcagagctctcaatcgcgaggctgtgcagtcaatgtacgcgggactatctgatgagctgctgcaactcgctcagcacgaaacaggctttcagctgagcctgttccagtttgcgatccccgatgatgtgctatcgcttcacccgctggtgggcatttcaccggatgccgtttacgcaactgcgatggcacagccatttcaggggcgcctgctttcggagtgggcagataaccttgaagctgacaggatggcaagaatttccaatacagtgcggcagggttttctcctgggcgatacgcatgagcaaatcgccagaaaggtccgtggtcatgctaaccgtggctatcaggatggcgcgctgcagatgagccgcaccaatgccggcagtatcgcaaaaacggctgtggggcatcttgcttctacggccaggaaaagctttgcagatgcgaacgatgacattttgaagggtaagcagtggttatccactttggataaccgtacatcaaaagactgtcggattcgcgaccgcctcaagtacacactggataacaagccgatcggccataaggtgccgtatctgcagggacccgggaaaatccatttctgctgtcgcagcgtcgaaacctacatcctgaaatcgtctgatgagctgggtattgctgttgggcaaatatcagatagctcacgtgccagcatggacgggcaggtgccttcggataccgattatcagggctggttctcgcgccagtcgttcacgcgacagtcccagatcgttggcgtaacccgggcccggctgattcgtgacggcggcatgtcgcccgatgatttctacaacgacaagggcgaatggctgactctggagcaacttcgtaacctggatgctcaagcgttcagcaacgccagactttaa

SEQ ID NO: 222113 - DNA, 1305 bp, Klebsiella pneumoniae
atggcgatagcaccgacgcttaacatccctcaggccaaattccttgcgatgcagtacaaatttaaggcctatgtcgccggcttcggttccggtaagacgtgggtcggttgtggtggtatctgcaaagggatgtgggaacaccccaaaatcaaccagggttactttgcgccaacgtatccgcagatccgtgacatcttttatcccactgttgaggaggtggcccacgactgggggctgaatgtcaaaatcaacgagggaaacaaagaggttcacttctacgccgggcgccagtaccgaggaacgacgatttgccgctcgatggagaaaccgcaaaccattgttggttttaaaatcggtaatgcgctgattgatgagctggacgtaatgcccgccaaaaaggcgcagttagcctggcgaaaaatcattgctcgtatgcgttacaacgtggccggtcttcgtaacgggatcgacgtcaccacgacgccggaagggtttaaattcgtttatcagcagttcgcaaaggctgtacgcgataagccttcgctctcaacgctgtacggcctggtgcaggcctcgacgttcgacaatgaaaagaatctgccaccggactatatcccgtcgctgatggagtcatacccgccggaactgatcaaggcttatctgcgtggccagttcaccaaccttaccagcgggacgatttaccatcagtttgaccgtaagctgaataactgccgggaggaagaacaacccggtgagccgctgtatatcggtatggatttcaacgtcgggaagatggccggggttgttcatgtgttacgtctggggcttccgtttgcggtgaatgaaattgtgaaggcttacgacacccctgacatgatccgcatcatcaaagaacggttctggctgtacgacggcaacgattatcgcaaggtgcgggaaatctatatttacccggacgcttccggcgattcccgcaaatccagcaatgccagcgccacggatatcgctcagcttaagcaggctggcttcaatgtggttgttaatgcatcaaacccgccagtgaaagaccgcatcaacgcgatgaatgccatgttctgcaatggtaacggtgaacgtcgctacaaagtgaatgtaaagcggtgcccggtgtacaccgagtcgcttgagcaacaggtttggggtgaaaacggtgagccggataaaacggcggataacgatcatcccaacgatgctggtgggtatttcattgtgaagcaattcccgattatcaaaccgactggaaaagtcacccaactgcggatgtaa

SEQ ID NO: 222114 - DNA, 273 bp, Klebsiella pneumoniae
atgaaacagaaaattacagatgcatttgttaattttacgcatagctggaacgacgtgcttcacgcttccattgaaaggaaaatctctgacggttacgacctggcatatcctaataagaatgattttgaacaccgcgagtccactacaaaagccatgcgagagttttactaccagcggatgatgaatacggcctcgttgctgctcactggtgtgtcactactggtggcattggttgcactgatcgttgcgatagtggccattaaatattcttag

SEQ ID NO: 222115 - DNA, 183 bp, Klebsiella pneumoniae
atgaaacagatactatttacatggtttgcttttacaaatacctatgcctgcatcaccgccagcattaatgtgaacaactcgctaatgcttaattcagctgtgccgtggattgttggggtttctcttggagtaatcaccaattacttattggctaaaaaactgaaggaaagcggctttctgtag

SEQ ID NO: 222116 - DNA, 177 bp, Klebsiella pneumoniae
atgaactatctcattaatcgactgaaagagccgtcaacctggcgcggcatcatcctggtcattgccggtgtcttcggctatcagatgcctccgggcattcaggaaaccgtcatcgctggcggcgtagcgctggctggcgttgttggtgcggtgatgccggacagcgttaagaagtaa

SEQ ID NO: 222117 - DNA, 627 bp, Klebsiella pneumoniae
atggcgttaaaagatatttttgtgcgaaccgaacctcgcagacggcattatggcgttgcattgtttatcgggctaatttctggggtggtttcagcatttgttaaatggggtgctgaagtaccactaccaccgcgtagtcctgtcgatatgtttaccagtgcctgtggaccagagtcattaattcgagctgccgggcaaattgattgctccagaaacttccttaaccctccttatatttttctgcgtgattggttagggctggccgatccaaatgcggctgtctataccttcgccggacatgtgtttaactgggtgggcgtaacacatatcatattctccatcgtgttcgcggttgggtattgtgtagttgccgaggtgtttccaaaaattaagctgtggcaaggtttgcttgcaggtgcactcgcacaactgtttgtccatatgatttcgtttccgcttatgggcctaacccctccgttgattgagcttccatggtatgaaaacgtttctgaaatatttggtcacctggtgtggttctggtcaattgagattattcgccgggatctgagaaacagaattacgcacgaaccggatgctgaagtttctctgaattcagcattcagataa

SEQ ID NO: 222118 - DNA, 816 bp, Klebsiella pneumoniae
atgaaactcgaagcatccttaaaacatttcagccctcagggcatgcacatcagcgacgacgtgaaaagcacatcaccaaatcacctgaccggaacagatgttatggcggccatcggtaccaccagcagccgtgcgcgcttcggcctggctgctttcttcggaaaggctggcattagtaggacagatgagcaattggccgtccaggccctagcgcggtatgcgattgaaactgcaccgaagaacgtacgcaaaacggcgggtaaagagctgggtcactgctgcctgattttggcgcagtttgcttttgcggattattcccggtccgcggaaacaacgggagcctgcagtgtatgcaatggcaccggacagattgaaacaaccactacggaacgcaaagtttctaatccgtggggcaaagcaccatattgggctaaaaaatcccgtgctgtctgtccttccgactgggataagtggactgaagtaacagccgtcttcagcgctaagtgtgaagcctgtgacggtaaggggaaaataaacgctcgctgccgctgtggtggttctggccgggttctggaccgcaaagcgactaaagagcagggagcaccagtatataaaatctgtgaacgctgttcggggaatggcttttcaacgatgccgtctactgctgcttataaagcgattctgacgcttatcccagacctgcacatcagaacatggacacgcaactggaaacctttctgcgatgcgctggtggacctgtgctggaaggaagaggagagggcagataaagagtttcaacgagcaacagctgattga

SEQ ID NO: 222119 - DNA, 297 bp, Klebsiella pneumoniae
atggcgaacctacgcaaagaggcacgtggccgcgaatgtaccgtgcggatccccgggcactgcaacagcaacccggaaaccagcgtgctggcgcattaccgtctggcgggaacctgcggaactggatgcaagccggacgatacccagggagcaattgcctgcagtgcttgccacgatctcattgatggcaggaagaaaaccaccgattacacccgcgacgaactgcgcctgatgcatgcggaaggcgtgctcagaactttagctttatggaaaaaagaggggttactgaaagcatga

SEQ ID NO: 222120 - DNA, 219 bp, Klebsiella pneumoniae
atgaaagcaagtgaattcatgaagttgactgaagaagagagagcaaaaatttttgagcagaccgatgatttgcattttgtgattacaccacttacagaaaaatttcttaccactcttttggatgaaatcaaaaatgggaaagaggtcatagaaggtcagattgttgtgcaaaaggagcatcctgaacttactacttacgtaattacagttaaagcataa

SEQ ID NO: 222121 - DNA, 261 bp, Klebsiella pneumoniae
atgaaagacaagctgctgcttatcagaaaccagctgaagatgggtcacaggctgtcattcgctgaagcaatgctccttctgcgagctatcgacatggttgtgaataaggctggcaactctccggcaatcggcattgacctgggattagatccagatcgtactgtcgaggttcgctacgttgcacctcccggttacgtaatggtgccgaaaagccgacagacgaaattcttaagaaaatctcttattgtaagggtatattga

SEQ ID NO: 222122 - DNA, 627 bp, Klebsiella pneumoniae
atgttttatccaaaattaactcggaggaaaaattactcaataaagaaaggaggggggtattatagatattcatattacaaggatgaaatactaactgattgtcaaaaacgatgcgtatactgtgatctactgcttgaggaacatgcgtatgaaggaatgcacttggatcattttagacctcaagtttatttcaaagcaataattaacgatcctaataatcttgttatcagttgccctaaatgtaatatattaaaatctaatcactggccttgtgataaattgctaacttcaacgccgagccataatggaaaagttgggtttgtagatccgtttatggaaagtttttctgattattttttagtaggtgatgatggtgtgttggaaccattaaaagatccagctgcttatatgttaacagtttttgatttaaatcgtcaggctcgtgtcttatctcggaaaaaaagaatacagctaaatatcattttgagtttatttaaaaaacttgatgataaaaccgatgagttattccagcttatggtgaaaaaggaaattactgaagatttggctgaagaaaaatataaggcccttattacaataagggaaagcttacgggagttacttaagtaa

SEQ ID NO: 222123 - DNA, 633 bp, Klebsiella pneumoniae
atgagaacagtaatttatatagatgatgattttgaagcgagggcaacatatcaagagccgttgcagcgattattcggggatgatttcgatttaatagcgatagaacccgaatttgaaattacagatatgatgaatagtttacaacaatataataacgttgtagcttatatacttgatgagaaaatgaatcaacttggaaaagcaaagtacctaggccggaatgtggccgaacaattaagagtcattaacaccaagattcctatttacatatttactgcatttaatgatgagtttgatagtttatatggtccagcggatgttgagtacattattgcaaaggaaagcttatcagatcgagaaaaaagaaattcaatttccgctaaaataagaagacaccaagatatattttcagatattaaaacacatagagcagagagactagatgaattactgttaaaatctatgactgatgaacttaatgatgaggagttacaagaatttagaacacttaactatttgaggactaagagtattaatcttcaggatgctgatattattgatgctctggccgagaaaataaaagagaatgagaataaaatttctgaaatagaaaaattatttagggggctgtga

SEQ ID NO: 222124 - DNA, 2199 bp, Klebsiella pneumoniae
atgaagaaactaataagtagctatgcttttgatttgtctccgagagttccattacaacttgggagggaaagtattgctaattccacaacagctgttactgaattggttaaaaactcttatgatgcagatgcttcaaaagtaagcattaaaaccttcaaattggataaacctatatctgtaatggtgattgaagatgatggaaatggaatggacccagaaacattgatatcatcttggttgaagattggcaccgataataaagtttatgataaaaaatcgtttaatggtcgagtactaactggtgcaaaagggcttgggagacttggtattgaccgattatgtagaagattgattttacaaacaaaaacaactaaatctgatcatttgttgcagctggatattgactggaaaaaatatgaagtaagagataaaagtttttttgatattaagcataatgtttttaccgttgattatccttctgaagataaatatggtcaaattttgcctaggggacacggtactagaatgatcttgctcggtttaaaagatgactgggctgggtatttatataaggatttggttaaagaattaaggcttttggtatcaccatttttcgcgaatgatgaatttaaaatagaaatggcaactgattttgataagtcacagaatctaaattcatcggaaattctagattactcaagatggtctgcggaagccagtgtaaatgaagatggaagtattagcgcagagtatcgatataaaaatgagttggtcgattcgtttacccttccatggaatgaatggattaataatagaaataacatcccatcatgtgggccattggacgttaaattatattatataccgcgagaatccgtgtctgatatagacttaaaaatcaaacagataagatcgtttcttgatgcgaatcaaggtgttcgaatatatagggataattttagagttagaccatatggcgagccttctggtaaaggtgattggttagatttaggtttaaggaaagttagaaacccagagggtatgaggcaaggtaactggaaagtaggtcctaaccaaatagttggtgcggtgtttattaatcgtgataaaaatagcactttaaatgaccaagcgaatagggaagggattgttgaaaatgaatcgttctatgatctccgaacattcattttaaaagtaatagagaaatttgaaagcctcgcagtgcttcagtcgagaaaagagtctgcaccagagaaaaagatagtaattgaagagttgaaggaaaaaaataacaaaacaaatgatgttattttagaaatacaaaaaagacttaacattaacataaaaaataaaaatactaagaagagcgatttaaaacatatagccaagaatatgttgaaagttgttgaacaacaaaaattggaaactgagaaggttgatcaattattagtggaggttgagcagttaaaagacactatggccaacctagcatcgttgggtattttaactgtatgtttagggcatgaaacaaagcaacatacaagcatgtcggcaactaatatttcaatgttaagagaaatgattgaagaagatatagaaaaacttgacactgaaaaagcattaacaagaatcaatctgctagagaatagtataaaatatatttctgattttgctgggtttgctttaagtaatgttagacctgataaaagaaacatgaacaaagttcaacttaataacgttattaatgatgttattaagatttttaaccagtccttggttaaaagtaatgtggaggttacaaaagaatgggattctaaaataggatttccaattcgaggttataggattcattgggaaagcataattataaatttccttacaaactcgctatgggcccttgaatcaactaaggaaggaaagcgagaaattaaaataaaattatcgttggataccgaattaaatagagttgaaatgcgttttcttgacagtggtcgaggaattgaattcggaacagaaaacagagtgtttgatacaggttttagtacaaaaactgatgagaaaggagatcagtcaggtacaggaatggggctatctattgtgaaaaattttgttgtggataatcataaaggtgatttaaccgttattcctaaaggtgagcttggtggtgctgaatttgttatcacggtacctgtatattga

SEQ ID NO: 222125 - DNA, 1305 bp, Klebsiella pneumoniae
atgaatagttttattaaatacaacgaacaattaaggaatttatattcatcatatattaatgaagtcgatttggactcatttaatcatctattcaaagaggatgatccacatgagtatttgagattaaatgaaaacatcaactccctccgggatttcggggttttttttacaggagagaaactttctgcagaatgcgcacagattatagcaaaaacgttgcgtgaggattcacgagttattgatccgtgctgcggcgcaggtaatttattagtggcgttaactaagtatttaccagtttctaaaactctgactgaaactctcattgaatggaatttatcgatccatggctttgacttaatggatgattttgttgaggccgcaaaaataagaataatttttcaggcattaaatcgaggcgttctcattgatgaaaaagatctgcaaaaaaatatggatcgcctcaataatataaaatgtaagaacggtttggatgatgatgttgacctgaatgattatacgcatgtgattattaacccaccttataatcaatcacttttgaacgaatataaatattggagtggtggaaaagtcaatcttgcagcggtatttattgataaatacattactgatgccgataaaggtatgcatattgtagcgatattgcctgatgttcttagaagtggttcgcgttatgaaaaatggcgcggtgctattgaacaaatattatctggtgaaataatattaaaaggtaggtttgataagaaaactgatgtagatgtatttgtattaaatggtgttgtagatagtgttaatacaggattaaagtggactctagagaaaactgaaggtcttaaattatcagactacttctcagtttcaattgggaaggttgtcccatatagagatccgcaaaagggagaattacacgcttatatttatccagggttgttaaagtcttgggataaaatcgatagtagagatattaagtcaattagaaggcatgcaagtattcctatatcaccaccttttattaccataaaacgaacctcgtcaccaaaggataaaaatcgagcaggtgctcatttgatttatggtacagcccctgtttttgttgaaaatcacttaattgttgtaaaaccttttgatgataatctagataaatgtaagaaactattagaatatttgaaatcatcggatgttaatattttcctgaatgatgtcattcggtgtagacatcttaccgtaaaagttgtaaaggacattccctttaagttagaggaacaagatgaagaaactaataagtag

SEQ ID NO: 222126 - DNA, 231 bp, Klebsiella pneumoniae
atgaacgagcaacttaaaaacaaagttaaatcaatcactacacaaaccgcgcttggtgaggcaatgggtctttcatctcaggcagtaagtcgctggatgaattccggaaaagttcccacatcacgggtgcgcgcgctttgtaagtttcttaattggcaggttacacctcatgaaattgatcctgaggcgtacccaaacccaactgacggcctgccgaaacaggaaggctga

SEQ ID NO: 222127 - DNA, 423 bp, Klebsiella pneumoniae
atggaaagtatgactaccgaaaccaatcaagtttttgcttacaggtttaaccaagccattactgagcatggttggaacctttccgatttagcccgccgcgttggtgtaacgccgcaggcggttcagaagtgggcgaaaggaatctctataccgcggggtaagaagatgaagttgcttgctgaagtaactggaaagcccgagcactggtatttcatgcagcctgatacagatgatcccgaattggttgctcaactaggtcttcccaaaaaacttgatgttactgaagaggcgctccttagcatctttaaccagcttcccgaagcggaaaaactacgtttaatccttcacgcaaagggcgttttgagagaccttcaagcactaaaagatgatgttggtgatttgataaaagaccttaaccgctaa

SEQ ID NO: 222128 - DNA, 192 bp, Klebsiella pneumoniae
atgagcacgatgtttgccctggttctcaccgtcagcatgctgacgggcggtaatcaggatgtcctgctcggcgtttacgacacggagaatgactgcaaggcagctgcagaagagcaacacgtgaaagctgaatgttatccgctgaaaggtgtactggacgagcatccggcagggttcacggtgcaaatgtag

SEQ ID NO: 222129 - DNA, 354 bp, Klebsiella pneumoniae
atgagcaaatcacttaacgcacgatgcatacgccgctggaaagttgaattcaaagggcgctgcgattcgaaatatagcccctactggcacaagcgggatctccgcggttacatccgtgaggcggcactgactacggcgtattgcatggttgaaaacttggcctacaacaacgcaatgcacgattttttcactgatgtgggtgacaggaatggctggtcgccagagttctcagcatggtacgacgggcgtcgagagcattatctcaaagaagcgcgtgattacctggacgaagaagccacaaatgacgagatcgatgaagaaatccagaacgagctggaggcctggaatgactga

SEQ ID NO: 222130 - DNA, 645 bp, Klebsiella pneumoniae
gtgaaccctattgagagccttaggcgctctgacgtaggtctcacagcatccgtaaaagatcgcagattgagtgatgaggaaatcaaaacggtttggaatatccttcctgaattgaagtacagacaacagctgataatgaagtttctcatcatgactggctgcaggagtacagagatcaggacagcaagatgggagtggttcgatttccatgagcaaacgtggaccattccggcaagcgattataaaaccgggaaatcggtcagaagggcacttcccgaggcagtagtaagaatgatgttagcagagaaggaaacgtcagtttcaaaacacgttgtgacactgtcacgctacagggggccagaatatgacagaccgccactacaaccaaacgtcgctctgttttctgctcagattatagctaaaacaggcatgaaaccctggtctctccatgacctcaggcgaacagtggcgacacgcctttctgaattaggtgcgccgccacatgttgtggaaaaactgcttggccatcatatggcaggtgtcatggcacgttataacctgcatgattatctggatgatcagcgtcactggcttgctgtttggcaggatcaccttgagaagctggttggtcagcctctggtttaa

SEQ ID NO: 222131 - DNA, 1365 bp, Klebsiella pneumoniae
atgacacagactcaacgcctggatgtcagagagttaataaatcgtaacccgctgagccgatttcagaagctaattatatttctcggcttttgcgtcatcgctctcgatggttttgatatcgcgatcatgggctttatcgccccgacgctaaagctggaatggggggtaagcaaccaccagctgggtctggtgatcagcgccgcgctgatcggcctcgcgctgggggcgattttctccggcccgctcgccgactggctgggacgtaagaaaatcatcatcaacagcgttttcttcttcggtttctggaccatcgccaccgccttctcgcacaacgtagaacagatgatgttctttcgctttatgactggcctcgggctgggcgccgcgatgccgaatatcgggacgctggtgtcggaatacgccccggaacgccagcgttcatttattatcaccgtcatcttttgcggcttcaccttcggcgcggcggcgggaggattttcggcatcgtggctgatcccccagtttggctggcactcgctgatggcgctcggcggtattctgccgctgctgtttgcccccctgctcatctggctgctgccggaatcggttcgttttctggtgatcaaacaagcgcccgcggcgcgcatacgcgccattcttaaccgtctctatcccggacaaatcagcgacaatgtgaggtttatcctgccggcgcagccagcggccggcaacgcgatgcgcattgtcctctcccgccagtacggtttcggctcgctgatgctatggctggtctactttatggggctgttcctggtctatatcctcggcagctggctgccaacgctggttaaagcggtaggaatgaccgttagccaggcggccatcatgacggcgatttaccaggcgggcggcaccctcggctcgttgtttgccggctggctgatggacaggatcaacccccatcgcgcgctggggataatctacgccgttggcggcctgttcaccatggcgatgggctacgccgcgggcagctttgccttgctctgtatgctggcgtttatcagcggcgcctgcctgaacggcgcgaataccggcatgaacgccctctccgcccgctactaccctacacaggcgcgggcgacgggatccagctggatgcacggcgtcgggcgcatcggcgccattctcagcgcctttgccggcgccgagatgatggcgctcaacctgccctttgaaagcgtctttttgatcctcggtatcccggcagccctcaccgtcgcaggcctggcggcgaagggcatctttgcggccggtcatcctcccgtcgcttcaacttcccccgcgtctgtgcgcggagcgtcatag

SEQ ID NO: 222132 - DNA, 819 bp, Klebsiella pneumoniae
atgaacaagcgtaccctatcgctcgccgcgctgaccctgctcgatgtccctccccccgaacaggtgcggattgcggccagaaccggttttacccacgttgggctgcgactgctccccgccacaccgaccgacccggactacgacatgctgggcgataccccggccgtccgggcgacgctcgccgcgttgatggaaactggcatccgcgtgtcggacgtggagatcgtccgcctgacccccgggtttaccctcgacgatcggctgcagcgttttatggagaccgccgcgcgtcttggcgccggacaggtgttagtcgccggcaatgatgacaaccttcagcgcagcgctgacaacctcgccatcctcgccgcggccggtcgtccatttgggctgaccatgaatcttgagccgatgccctggacccagttgcgcaacatcgccgcagcgcaagcactaatcgccgccagcgggcgggaagacatcggcattctggtggacgctctccatttctggcgcgcgggagaatcgctcgccgccctctccagcctgcccgcgcatcatctcaactatatgcaactctgcgatggcgcggcgcagaggccggagagcgagcaggaacttatccgccaggcccgctcggcgcgcaacgtgccgggggaaggcggtctggatctgcatggtctaatgtcggccctgccggcgacgctgccggtctctctcgaagtgccgcttgacggcgagcaaggcgccctgccgcctcttcagcgggcgcagttactgttcgatgccgcgcagccctacctgcgcgcctgcgcataa

SEQ ID NO: 222133 - DNA, 171 bp, Klebsiella pneumoniae
atgtcgcatcttatgctttcccgtgacgggatctggtgctaccgtagggtcaacctgacacctcggaaacgccgtgaaattcgtatttctcttcgcacatgttccaagcgtgaagccttgctccgtgtggagaaatatctcacctcacaacctttccattgcgttctgtag

SEQ ID NO: 222134 - DNA, 819 bp, Klebsiella pneumoniae
atgaaatttgttcttaccgagatcatcttggttgcaatagctcgtcttgttggagatgcacaggcggatgcccctaggtcaccttctcattcagatttgagttatgcttttgaaagacattgcttatcacatgttgatccaaaaaatcagcaagttgtaggtaaggctaaacgagttcgtgctgtcctctcttgggcattggataacgatcctgaagctggatataaactggcattgacgcttttgcaggatgttaaggtatctggaggttttagaccagagtcgaccaactatgcgggacgcgatgccatccaaggggcaattgaagcctttagagaacaaggtctaattttgacagaagagggctctttagttcgtcaaagtattgaaggtcttcgagggcgtgaattaactgaagcattgagaaaatatgctgatagagcgaggcgcggtgctgaagatgcagcacttctctctggaaccagtaaggatcttttggaagcaacagcagcacatgttatcacccaaaaatttgggacctatcctcaacaagctaattttgctgccttgcttggacaggcattcatcgctcttggattagccacaccagaagataagaacgaaaattttgaagctcctcatcgtacaatggagcgggggatgtttaacactgccattggtatcaataaattgagaaataagcagggaactggacatgggaggccttggttaccaacgataaaagaaagtgaggcaaaagctgccattgagatggcgggggttatatctagctatgtgattgataaacttagtaattaa

SEQ ID NO: 222135 - DNA, 534 bp, Klebsiella pneumoniae
atgaatgttgaaaaggcacaagcgattgaaaatagtatgatgtgcttaacgatattttcacgatccatccatacttttttcgcgctggctaacgttctagaacacttggatcgtgggactggtgatttattcccgttcagaggggtttgcaatgccttgattggtgatgccgcgatacactggtgcaaagtttttggatctgatgctgaggctactcactggaaatgtgtaatcgatgatcacgatgggtttcgaaagtttttattcgatgaactgcgaacgacgccaaccgaatttcatgcttattggaagaaaatgactgaattcagaagcaatgtaatcgcgcatttcaacgctgaacatttttcgaacggttcaacacctgagtttgatacggcgattgcagcagcggcaacggcgcataaatacatgtaccgaaccttccctccaaatgtgaattacatcgggcctatggatttagtcagttatggtaaaactgcgtctgaagcagtaatgaatcgaatgttagtttaa

SEQ ID NO: 222136 - DNA, 429 bp, Klebsiella pneumoniae
atgtctggaatgttagcaagtacagctgccgctgttggcattattgataaagctgtcggtatcgcaaagaaacttgcagatgatggcggtgagcttgataaggcgacgcttaaacttgagcttgcaaacctcatgacagagcttgcaagtgttaagatggaagttatcaccacccaagcgctactttttgatgcagaacaaaagaacaagcaattggaggagcagttaaaggataagcaagccttcatgttccaaaacggtatttggtggaaagagggtgataaaatagcattttgccctaaatgctatgaaagtgagaatattaaattccacatggaagcaagggagaaggtcgtcggtatgatgggatcatacgactataagcattggcattgccgccgctgcaattctgattttgacagaatttaa

SEQ ID NO: 222137 - DNA, 135 bp, Klebsiella pneumoniae
atgcaactgacagaacagacccagactgccaacgggacgctgtgtcgttattccaattcaatgtacgattttatgtacaaaacgaacagtaagcattgtccaaacgtgaaaacattctctacagaggacaagtaa

SEQ ID NO: 222138 - DNA, 810 bp, Klebsiella pneumoniae
atggcgttgagacacctgccgatggtgtacttaatctatttagctatggaggctgttttgaaaaagattcttgcattacctcttatgttcttttccttctcctccttctctgaaggcgttctgtctacatatgtacaaccataccctgactatctggcggcctatgtcaaaacgttgattactgttggatgtgaacaaacattgaaaggcggttctgaggacctattgatcaaacgggcaacgaagggtatgaagaaggacacggcgagttacgatattgtacacaatactatcgttttgggggctggtttcggtaacggactgaaggaaaaaggtaaacttatcaccaaagaaaaaatcgcgattgatagttgtggtggtgcagcggcctataccatgatgcaaaaagaatttataaaaacggttgttgctagtatgactaatccggaacaatcgcaggttgccgatagtaaacccaaagtgccagcttctgatgatggaatttaccgtacaacggcaaaagctctggctgaattgtacagcgccaatgaagttgcagctgatgacaaaattgatggtcgtaacgttgaaatcaccggaactgttcaggatataacaaaaaatttcgcgaacgatgtagtacttaaacttgaaagcgataatcggttcatgcctgtcagcttgagcatggaagacactgagaagtcgaaagcgtcaaaattgaagaaggggcagaagatcaccattacgtgcgaaaagatgcagttattcattggtgcgccatcgggtcgcaactgcacgtttaattaa

SEQ ID NO: 222139 - DNA, 204 bp, Klebsiella pneumoniae
atgaaaattcaattccagacgaacaacgagttcccgttgctcactgttgcagacgagcgcgttttagattttctgaacgttagcgccgtgtgtcggttcctgaaggttccgctatcctcgttcatgatggacgttgagcaaaacgggtttgtgaaggcaatcagcgaagcgctgttgaagttgagaaagaagaaaacaatctga

SEQ ID NO: 222140 - DNA, 1428 bp, Klebsiella pneumoniae
atgtcagcccgacgctttggaacccaatcgctggtacgcctgctcggcaactggcaggagaccagctcacgcacgccgctatggcgccagctggcggaagcgctccgcctgctgatccttgatggtcgcctgacgctgcaaacgcgcctgcccggcgagcgcgagctggcggcggccctgaacgtcagccggaccaccatcgccagcgccctcggccagttgcgggaggagggctttctctacagccgccaggggagcgggtcacgcattgttttgccggaacgccccgccgatcttcctctgcctgccggcatctcatctacgcttaatctatctaccgccgccctcagcgccgggccggaggtccatcaggccttccagcacgctatgaccctgctgccgccctatctcgcacagactggctatgaccagcaggggctgccggtgctgcgggaggcgattgcccggcgctacagcgaacgcggtctgccgacgcggcccgatgaggtgatggtggtcaacggcgccctcagcgccttcgcgctgatcctgcgcctgttcaccgggccgggcgatcgggtggttattgacgcccccacctatccgatggccatcagcgccattcagggcgcctcctgccgccccgtcggggttgcgcttccgcagcagggatgggactgcgatggactggcggcgactattgcgcagactgcgccgcggctggcgtggctgatgccggattttcacaaccccaccggacgctgtatggatgcccccacccgccagcgggttgcggacatcgccgccaggacgcgaacaacgctggtaatcgacgagaccatggccgacctttggtataacgcgccgccgcccccgccgctggccagcttcaatcccgatgccgcggtgctcaccattggttcggccgggaaaagcttctgggggggactacgtatcggctggatccgcgccagcgcgcggaccatcgcctcgcttattcaggcccgcgattcgctggatttgggtacgccgctgctggagcaactggcttgctgctggctactggaaaatgccgccacactgctgccgccgcggcgggatatgctcaaggcgcgccgggacatgtgcgaaacgctgatggcggaatattttccccgctggcggttttcgccaccggaaggtgggctctctttttgggtggaacttcctgacatgctggccaccctgttctctgcgcgtgcggaaagccaggggatccatatcggcaccggtacgcggtttgggctggaaggggcgttcgatcgctatttacgtctgccgtttacgctgccggatgaagcattgcgccgggccttctccacgctacaaccgctgtggcaaagccttgctgaacagaaggaaaatacacgtttgcgaaaaataatataa

SEQ ID NO: 222141 - DNA, 435 bp, Klebsiella pneumoniae
atgtccaggaccccctatacacggttacgcattgagggcttccgcaaagcagaggcttccctgagacttgaaggaatggaccccagtggtacgccactgtacgagtccattaaggcacgtattatttcaggtgagcttacgtatgagcaggggcgttcagagattcttgcatactacacaaaagcagataccgccgggcctgtgacagtgggagaaatgttggcagaggaatttttgaaaccgctgaacatgtctaatgatgaactggcggaagctatgggtagctgcaagcagtatattgacgatattctctgtggcttgcgtcgtcttacaaatgacgatgctcgcattcttgctgccatatttgggactgatgaagacttctggagtaacctgcaggagatgcaagttcaccgagagcaacagcataagtaa

SEQ ID NO: 222142 - DNA, 981 bp, Klebsiella pneumoniae
atgaaatttgcatacgaagatctaagcgatggtcagttcgagaccttgatcgttcttctgtgccagcggttgcttggagccgccgtacagggatttgcaaagggtcctgatggtgggcgcgatgccaagtttatgggaacagctgaactgcacccaagtaagaacgcgccatgggtaggtacaaccatagttcaggcaaagcacaccaatgggtataaccgaaatttctccgaatctgacttcttcagtgttacgtctgcgaacaccgtgctgggtaaagaaattcctcgtataaaaaaacttcgtgatgccaagcagttagatcattacatgctattcgctaatcgtcgcctatctggtaatgctgaaacggagatacgtgattacctctcgtctcaatgtaacatttccagttcatcactttatctttgtgggctagaacaactggagatctggcttaagcgtttccccgatgtagcgagggaagcagaccttgatccagttgattcgccgctgattgttagtcccgatgacttgtctgatgttgtacaggctctggctcaaaataaagagagcttggtcgaaatgcttgatgatccgccaactgcgcgagtgacatacgagcaaaaaaatacactcaacaatatgagtgttgagtatgctagggcactgcggaagagatacttgaaggaaacagctcaaattcgggctttcttggctgctccggaaaacctcgaattattacgtatgtacgagtcggtagtcgatgagttccaactcaagatcattgcaaagcgtaaggactatcaaacttttgatgaggtaatggaatatctggttgacatgttgttcagccgtgatcctatcttgcggcagcacgctcacaagcgcttgacgcgtgctgtactgttttacatgtactggaattgtgatattggggaggtagacgatgctacggccaacgaagcactctcatcctga

SEQ ID NO: 222143 - DNA, 249 bp, Klebsiella pneumoniae
atgctacggccaacgaagcactctcatcctgatcgaacagtcatcaatgtctcactgttactattggctcgcttgaaaactcggcgtattgatgattatgacgctctacgtaaatttgcgaaaaaaagcgttatcggtggagaagtgctgttcttacctgctcttaattttctttatctcatgggattgattgagtatcgccccaaaaccgatgctctagaatatgtggggccaaatgaagttatctag

SEQ ID NO: 222144 - DNA, 1806 bp, Klebsiella pneumoniae
atgtggggccaaatgaagttatctagactctattctaacaagcctgacttgttcgatcccgtggagtttgtccagggcctgaatgtcgttatggctgaaatccgcttgccggagaacagaagtaaggacacgcataatctcggcaagactacgctagggcgcttgctcgactttggtttcttagccaaacgtgaccctaagttctttcttttcaagcactccgatttgttcaaagaatttatattcttccttgagattgagttggaagatgcatcgttcgtaacgattcggcgtagtgttaaagaagccactaaaattagttttaagcgtcatcaagcaggccatcaagacttgtcggggttagcactgactgagtgggatcatgtgaacatgcctttcgagcgtgcacgtgagctgttggatggggtattggattggcgagcaatcaaaccttgggcatatcgcaaaggcttaggatatctactacgctcgcaggacgatttccgagatgtattccatctacgcaaatttgcggcagcacattcagattggaagcctttcttggctcacgtccttggttttgacgctcaactcatcgttgaacattatgaaaaagaagagcaactctccaagaaacaagccattgcacagactatcaaaaatgaattgggtggctctattgaggatatcagcaagatcgagggcattctgttacttaagcagaaagaggctgagaaaaaacagacattgctcgatgcctttgatttccgtactcaggatagggatagtactaagcagttggtcgatgacatcgacgtaaaaattgcgtctttaaatgctgaacgttactcatacaatcagaccaaaaagaaaataatatcctcgttggaagaagatcagattctctttaatcccgatgaggcgcagcgtctatttgaggaggctggaatcctgtttaaaggacagattaaaaaggatttccaacagctaatcgacttcaatcgggctattacagatgagcgtcgtggctatctgcaggaagagcgggaagaagtcgaagttgagctaaaacgcatcaatgcagaattgaattttctaggaaaaaaacgctcggagatgctttcatttctaagtgaaactgacatttttggtaaatataaacaagtctcggacgagatggtgatattgcgtgctgatattacgtcgttagagcgtcagcgaggcttcttacatcgtttgcaggaacttcgaaaagaaattagggctttgacagaagagcgtggaaatctacaggcccagattgaagctaatgtcgagatgcaaaactctgatcaggacagcttattttctgcaataagagtgttctttaacgaaatagttgaagaggtcattgatcgcaaagctctgctgagcgtatcgcccaatcaactaggacatctagagtttaaggcagaaatacttgacgagtcaggtaatgctactagtgccgatcttgggcatacataccgcaaactgctttgtattgccttcgatttggctgtattgcgtgctcacttggacgaaaaatatcctcgttttgtttatcatgatggtgtgtttgagtctttggatgatcgaaagaaagaaaaccttttggctatcattcgtcgttatgcggagttggggctacagccaatcattactcttatagattcagacttgcctgtgcgtgatgctgagcagccagtattttcgtctgatgagattgtgattacgttacacgatgagggagagaaaggtcgaatcttcaaaatgagggcttggtaa

SEQ ID NO: 222145 - DNA, 2079 bp, Klebsiella pneumoniae
atggtctttgatccaaaacgcgcgttacaacttcttcaaatcggctccggacgcggggatgcaagttttcgtgatggccaagaagatgccatacgtcatattgtcgaaggcaaggggcgtttgctggtcgtgcaaaagactggttggggtaagagctttgtctactttatcgcgactaaaatattgcgagaaaatggaaatggcccagcgttattgatttctccactgttggctctcatgcgaaaccagatagctgctgcacagcggatgggtgttcgtgccgcgacaataaactctgataatatggatgaatgggctgtaattgaaggtgaattggccaagggtaaaatcgatatactactgatctcacctgagcgtttggcgaatgagcgcttcagaacacaggttctgtcccgtatcgcagcacaaatttcgatgctggtcattgatgaagctcattgcatttcagactggggccacgactttcggccacactatcgcctgcttgagagaatcgtcaaaactctcccgccaaacctgcggttgctcgccaccactgcgacggcgaacaaccgagtgatggaagatcttgcttctgtcctaggtccgaatcttcacgtttcacgtggagacttaaacagaacctccctctccctgcaaactatccgcttaccaagtcaggccgagcgtctagcttggctggccgaacagctaggtacgctaaaaggtaatggcatcatttatacgttgactgtacgtgatgctaatcaagtggcacaatggttgaaagctcaaggctacaatgttgaagcctatacaggtgaaaccggtgctcagcgcgagcagttggaagaggcgttgctcaacaatgaagtcaaagctctggttgcaacaactgcattaggtatgggttatgacaaaccagatttggcgtttgttattcacttccagatgccgggctcggttgtcgcctactatcagcaagtggggcgtgcagggcgagcaatggagtccgcttatggtatcctcctaagtggtcaggaagagtcagatatcactgactggtttatccgtagcgccttcccgacacgccatgaggttagagacgtattggaagcgcttgaagacgagcccgaggggttatcagttcccgagttgttgaaccgtatcaatctcagtaaagggcgtgtagataaggcgattgcacttctttctcttgagtcaccggcccccattgcaaaacatggcactaaatggcagctcaccgctgcaacgctgagcgaatcgttctgggagcgggctgaacgcctcacagcactccgtcaggaagagcatcaacagatgcagcattacgcgagcctacagtacggtgatcatatggggttcctaattggagctctagatggcgatccatcaagtgttacagcacctaccttacccccactgccctcaaccgttaatgaagcactggtcaaagcagccatagaatttctatgtcgcactagcttgcctattgaaccccgcaagaagtggcctgatggcggaatgcctaagtatgacgttagaggagtcatcgctcctgcatatcgagctaattcgggtaaagcactttgtgtatggggggatgctgggtggggacgtattgtaagagaaaatcgctataaagatgaatatttttctgaacaattggttcaggcatgtgctgagatgtttcatcaatgggggcccacaccagcccctgaatgggtcacagctatcccatctttgaagcatccagatattgttccgagttttgctaaaagacttgccgctgccgtagggctgccttttcatcaagtgctcgtaaaaactgaagataggccagagcaaaagactatggcgaactcctctcagcaggcacgtaaccttgatggctctcttgcattagccaatgagcctattcctagtggaccagtgttacttgttgatgacattgttaattctcgatggacgctaacagtggcagcatggctcctccgaaaggctgggagcggtgaggtttggccaatagctctttcacaaactgggcacgatgactga

SEQ ID NO: 222146 - DNA, 1323 bp, Klebsiella pneumoniae
atgccgccagctgagcttttaactccgggagaatacaagcgtcttgctcgtcatttgcgtgagattcaccgtcaaccagcagaccttttaaccccagacgctgatgagattttacgcgcttgtcaaaccgtgattgatcagagtcgtatgcaacgtctattggctcgtggttttctattaagtcaggtgctggaacgctggcaagcgagagctatttgggttgtaagtcgtgcagatcctggatatccacgccgccttaaagctcgtctgcgtgaagacgctccagcaatactttatggctgtggcgatattaggctacttgacgcaggtgggctagcagtagttggatcacgcaatgtgagtgagccattaattgactataccatgtccattggacggttagccgcctgtgctggacgggccattgtgtcggggggggcaagaggcattgatcaagctgccatgcgtggtgcattggagtcaggcggaaagagtattggtgtgcttgctgaacaccttgaaaaggccgtaatgaatcgtgaagaaagaaatcgtttacgtgacggtaacctcacactagtttctgcctacgatccaaacgctggtttcaacattgggcatgccatgcagcgcaataagttgatttatgcattggcggatacatcgttggtggtgaattccgaccttaataaaggggggacatgggctggtgccattgaacaactggagacactaaggttcgtccctgtttttattcgatcgacgggcgcagcttccgaaggtttaatcggattacaaaagaaaggcgcacttccttggcccaacccgcaaagcgttgaatccttcaaagacgtattcaatatagcgatgccaatgcctgcagcctctccacagttagatctttctctgtcgtcgaaagagggcacattggtggctgacgtcgaaacagcagagcaagtctcatgcagatcggattcgcagaccgagattgagctgtcagaacctgctgacattgttcttgaagaacagccaaaagctgaggcatcggaagaattatccccattaacaaaagagtctttagcatccacaaaggacattaaaaaatttgagcatgctgaagcaacgccggccgaggtgctcttcacagctgtacgcgcagcgatccagcaacttttgagcactccgatgaatgacgccgaagtagcggttgcgttgaatgtgtcgaacttacaggccaaggcatggttacaacgtctgattgatgagggagttttggagaagcagagtaggcccttgcgttacgttgttaagaaaaaaggataa

SEQ ID NO: 222147 - DNA, 516 bp, Klebsiella pneumoniae
atgtcgagtacacctctcactgaaaatgcgctttcccggcccgccgggctggtggtgtccctgcgtttgctggcggcgatcgtgatttttgccgctattgcgccgggtattctgatgaccgcgccggcggtagcggcgcagctggccagcgaatggcagctaaaacctgggcagatcggctggctgttctcagcggagctgggggcgatgagcctggcgacgctcccggcgtggtggtggatgagccgcctcgactggcggcgggttgccctgacggccggggtggtgtttctggccgccaacctcgcctcggcggtggtcacccagtacgagacgctgctggcggcgcgctttatcgcctcgctggcgggcggcacgttgatgattttgtgcatcagctgcgcggccggaacgccgaacccgtcgcgggtctacgccttctgggtgctcgggcaactgctgttagggatgcttggccctgatgaatcccctaatgattttggtaaaaatcattaa

SEQ ID NO: 222148 - DNA, 4950 bp, Klebsiella pneumoniae
atgaaaccatttcgtttagcggcgctatcactggcgctccttaccgcattttcattaaccgggtgtgatgacagcggtacaccgcaggcctcggccccggcgccagccgcggatagcaacccaggcgcgacggcaaaaccggaccgcgcccagctggcggcgctggcggaaaaaagccagggtaaagcgctgacgctcctcgacgcctcggaggtgcaactggatggcgccgcgaccctggtgctgacgttttccgtcccgctgcagccggaccaggatttctcgcgcagcgtgcatctggtcgacaagaaaagcggtaaggtggacggtgcctgggagctggcgccgaatctgaaagagctgcgtctgcgtcaccttgagccaaagcgcgagctgattgtctcggtcgacccgacgctgaccgccctgaacaaggcgacgcttgataaaccgtttgagaagaccctgaccacccgcgatatcgcgccgagcgttgggtttgccagccgcggctcgctgctgccgggcaacgtggtcgccgggctgccggtgatggcgctgaacgtcgataatgtcgacgttaatttcttccgcattaagccggaatcgctctccgcctttgtcagtcagtgggaataccgtaactcgttaagcaactgggaatctgatgaactgctgaagatggcggatctggtctacagcggccgcttcgatctcaacccggcgcgtaatactcgcgaaaagctgctgctgccgctgagcgacatcaagccgctccagcagcctggcgtctacgtggcggtcatgaacccggcgggccgttatagctacagcaacgcggcgacgctgtttaccctcagcgatatcggcgtctcggcgcatcgctaccataaccggctggacgtttttacccagagtctggaaaacggcgccgcccagtcgggtattgaggtgcagttgctcaatgccaaagggcagaccctggcggaagcgaaaagcgacagccagggccacgtcaccctgcaaaccgataaagaagccgcgctgctgctggcgcgcaaagaggggcagaccacgctcctcgacctcaagctgccggcgctggatctggcggaattctctatcgcaggcgcgcccggctttagcaaacagttctttatgtttggcccgcgcgatctctatcgtcccggcgaaacggtgatccttaatgcgctgttgcgcgatagcgacggcaagccgctggcggagcagccggtgaaactggaggtggttcagccagacggccaggtgatccgctcggtgatgagcaaaccagtgaatggcctgtatcagtttacttatccgctcgacagcggcgcggctaccggcatgtggcacattcgcgccagcgccggcgacaatcaaccgcgcgaatgggatttccacgttgaagactttatgccggaacgcatggccctgaacctgacgccgcaggccgcgccagtcgcgccggatgccgacgtcacctttggcgttagcggcgcttatctctacggcgcgccggccagcggcaaccagctgcagggcaagttgttcctgcgcccgctgcgcgacgccgtcgctgcgctgccgggcttccagttcggcgatattgcggaagaaaacctctcccgtagtctggatgaagtccagctgacgctggacgaaaaaggccatggcgaagtgactacctcaagccagtggcaggatagccattcgccgctgcaggtggtgctgcaggccagcctgctggaatccggcggtcgcccggtgacccgtacggttaagcagccgatctggcccgccgaggcgctgccggggatccgcccgcaatttacgctgaaggacgtttacgattaccgcaccgataccaccgtcaaacagccggtggtggatgaaaacagtaacgccgcgtttgatatcgtctatgccgacgtcaaaggcgagaaaaaagcgatctccggtctccaggtgcggctgatccgcgagcggcgcgactactactggaactggtccgacagcgaaggctggcagtcgcagttcgatcaaaaagatctgcaggagggcgaggagtcgctggacctgcaggccggccagatcggcaaagtgagcttcccggtggagtggggatcctatcgcctggaggtgaaaggaccggacgacgtggtcagcagcgtgcgcttctgggcgggctacagctggcaggataacagcgaaggcgccggcgcggcgcgtcctgaccgggtcaccatgaagctggataaaccgagctataaaccgggcgacaccatcaggctgcacatcgccgccccggcggcgggtaaaggctacgcaatggtggaatccagcgaagggccgctgtggtggcaggaaattgacgtcccggcggaggggatggacctgtcgatcccggtggataaaacctggaatcgccacgacctctacctcagcacgctggtggttcgtcccggcgataaatcgcgctcggcaacgccgaaacgcgcggtgggcctgctgcatctgccgctgggcgatgaaaaccgtcgcctgacgctggcgctggaggccccggacaaaatgcgccccaaccagccgctgacggtgaaagtgaaagccagcgtcaaagagggcgaggcgccgaaacaggtcaatgtcctgctctcggcggtggatagcggggtactgaatatcaccgattacgctaccccggatccgtggaacgccttctttggccagaagcgttacggcgcagatatctatgacatctacggccaggtgatcgaagggcaggggcgggtggccagcctgcgcttcggcggcgatggcgacgagttaaaacgcggcggcaaaccgccggtcaaccacgtgacgatcgtcgcccagcaggcgcagccggtggtattgaacgatcagggcgaaggcacggtgacgttacccattggcgattttaacggcgagctgcgggtgatggcccaggcgtggacggcggatgactttggcagcagcgaagataaagtggtggtggccgccccggtcatcgccgaactgaacaccccgcgcttcctcgccagcggcgataccacacggctggcgctggatctcagcaatctgaccgacaaaccgcaaaccctgcaggtacatcttaccgccagcgggctggtgaccttgaccgatggccaactgccgccggtacagctggcgccgggggcgcgcagcacgctgtttataccagtgagcgcgctggcgggcttcggcgatggtcaggttaatgccaccatcagcggcctgagcctgccgggcgaaaccttcgccccgctgcaaaaacagtggaaaatcggcgtgcgtccggcgtacccggcacagaccgtcaacagcggtgcagtgctgcagccaggtgaaagctggcaaccgccggcggcgcagagccagggctttgccccgcaaacgctgcagggccaactgctgctcagcggtaaaccaccgttgaatctcgcccgctatatccgcgagctgaaagcctatccttacggctgccttgagcagaccgccagcggcctgttcccgtccctgtataccagcgcggcgcagctaaaggcgctgggcattagcggggacagcgacgaaaaacgccgcgcggccatcgatgtcggtatttcacgcctgctgcagatgcagctggaaaacggcggctttgcgctatgggatagagaggggccggaagagtactggctgaccgcctacgccatggacttcctcgtgcgcgccagcgagcagggctatagcgtaccggtcaacgccattaataaaggtaacgagcgcctgctgcgctatctgcaggagccgggcctgatgaccgtgcgctacagcgacgacgcccaggccagccgctttgccgcccaggcatacgccgcgctggtgctggcgcgtcagcaaaaagcgccgctcggcgccttgcgtgaaatctggagccgtcacgaccaggcgcgatccggcttgccgctgctgcagctcggcattgcgctgaaaaccatgggcgatgcgccgcgcggcgacgccgccctgaagctggcggttgccaccccgcgccaggatgagaatcgttggctgggcgattacggtagcccgctgcgcgataacgccctgaagctggcgctgctggaagagaataagctgctgccggaggtgcaaaatcagctgttgagcacgctgtcggaagaggcctatggccagcgctggctgtcgacccaggaaaccaacgccttgttccttgccggacgtacgctggcggacctgccgggcagctggcaggcgcaaacctcgctgcaggcggagccgctggccggcgacaaagcgcaaacccgcaatctcgacggcgatcggctggcggcgctgcaggtgagtaataccggcagtcagccgctgtggctgcgtctcgacagcagcggctatccgcaaagcgcgccgcagccgggcggtaacgtcctggggattgaacgcactattttcgatacccaggggcagcagaaatcgctgtcttcactgcgcagcggcgaactggtgctcgtcaagctggaggtgaccgccaaacgcaacgtgcctgacgcgctggtggttgatctgttgccagccggtctggagctggaaaaccagaatctggccaacagcagcgccagcctgcaggagaatggcgacgcggtgcaaaacctgcttaaccagatgcagcaggcggatattcagcatatcgagttccgcgatgaccgtttcgtcgctgccgtcgctgtcaatgaaggccagccggtgacgctggtctatctggcgcgggcggtgacgccgggcacttatcaggtcccgcagccgcaggtggaatcgatgtatgcgccgcagtggcgggcgacaggagcggccagcggtccgctcaccgtgacgccgtaa

SEQ ID NO: 222149 - DNA, 2325 bp, Klebsiella pneumoniae
atgcgcgtattgcctcgggtaaaacgccgctggcgctggctggcggcgtttattttcctgctgtggctggcggtgctggcggccgatcgcctgtggccgctgccgctgcatgacgtcacgcctgcccgtgtggtggtggcggaagacgggacgccgttgtggcggtttgccgacgcgcagggcgtctggcgttatccggtcacgctcgccgacgtgtcgccgcgctatctgcaggcgctcatccactatgaagaccgctggttctggcgccatccgggggtcaatcccttcgcggtgctgcgcgccgcctggcaggatcttacttccgggcgagttatctcgggcggcagcacgcttaccatgcaggtggcacgcctgcttgatccccattcacgcaccttcggcggcaagctgcgccagctgtggcgagcgctgcagctggagtggcatctgtcaaaaagcgacattctaaccctctatttgaaccgcgcgccgtttggcggcaccctgcaggggatcggcgcggccagctgggcctatctcggtaagccgcctgcccggcttagctacggcgaggcggcgctgctggcggtacttccccaggcgcccagtcgtttacgtccggaccgctggccgcagcgggcccaggcggcgcgtgataaagtgcttacgcgaatggtcagccagggcgtctggccggagcaggcggtaaaggaagcgatggaggagccagtatggctgtttccgcgccagatgccgcagctggcgccgcttttttcacgccgggcgctggcgaccagtcgtgatgaaaaggtggtgacgactctggatgccggactgcagcggcaactggaagatctggcgctgaactggaaatcgcgcctgccgccgcgcagttcgctggcgatggtcgtcgtcgaccacacggatatgaaagttcgcggctgggtaggctcggcggatatcaccgacgacagccgcttcggccatattgatatggtctcggcggtacgctcgccggggtcggtgctgaaaccctttatctacgcgatggcgatggatgaggggctgattcacccggcatcgctattacaggatgtgccacggcgttttagcgattatcgccccggtaatttcgacagcgggtttcatggcccggtgagcgccagcgaggctctggtgcgttcgttgaatctgcctgcggtgcaggtgctcgaagcctatggaccaaaacgctttgcggctaatttacgcaacgccgggctgcccctgacgctgcccgctggcgcagagccgaatctgtcgctaatcctcggcggcgccggggcgcggctggaagatattgtcgcggcgtacagcgccttcgcccgccatggcaaggcggcgcggctgcgcctgaagccgagcgacccattgaccgagcgcgcgctgatgtcgcccggggcggcatggatcgtccggcgtattttggccggcgaagcgcaaccggttcccgatgcctcgctgccgcaggcggtgccgctggcgtggaaaaccggcaccagctacggctatcgcgacgcgtgggcggtcggcctcaatgcgcgatatctgataggcatctggaccgggcgcccggacggtacgccggtggtgggccagtttggcttcgccagcgccgtaccgctgctcaaccaggtcaataatctgctgctggcccgcccggcgatgagccgcggcgggctgccgagcgatccgcgcccggcaacggtcagccaggggacaatctgctggcctggcgggcaggatctgccggcgggcgacagcaactgtcgtcgtcgcctggccagctggcttttgaatgccagccagccgccgactctgctgctgccggggcaggagagcgtacgcgggatccgcttcccggtgtggcgcaatgaacacggcgaacgggtggcggcggattgtcccggcgctcgggaaagccaggtcgaagtctggccgctgccgctggatccctggctgccggccagcgaaaggcggctcgcgcgcctgggaccggcatcggagtcatgcccgccgttacagactcaggataccgcgccgctggtgctgtccggcatccgtgatggggcggtgataaaacgtctcccgggtgaggcgcgggtgatgttgccgctacaaaccagcggtggggaggggcggcgctggtggtttattaatggcgaaccgttagaggccgccggcgcaagaaccacgctaatgctggataaacccggcgagtggcagttggtagtgatggatgaagcgggtcagacggcggccgccagctttaccctgcaataa

SEQ ID NO: 222150 - DNA, 723 bp, Klebsiella pneumoniae; identical to SEQ ID NO: 121749

SEQ ID NO: 222151 - DNA, 525 bp, Klebsiella pneumoniae; identical to SEQ ID NO: 188273

SEQ ID NO: 222152 - DNA, 1392 bp, Klebsiella pneumoniae
atgctgtgcgtaatggaggacaggatgcgaattaaacttctgtcactcttctgcggtgccgcgcttggcctgtcatttagtgccgccgccgacgtgaatggcgacatgaaccaattcttcaataagcttggctttgcgtccaataccagccagccgcaggtctggcagggacaggcggcgggttacgcctccggcggttcgctgtatgccagaacgcaggtgaaaacgatccagctggtcagcatgaccctgccggatattaacgccggctgcggcggcatcgatgcgtacctggggtcgttctcatttatcaacagcgagcagctgcagcgcttcggcaaacaaattatgtccaacgccgcgggctacttctttgaccttgccctgcagaccacggttccggagatcaaaactgccaaagacttcctgcagaagatggccagcgacatcaacagcatgaacctcagctcctgccaggccgctcagggcattgtgggcggtctgtttccacggacccaggtggcgcagcaaaaggtctgccaggacattgccggcgagagcaacatttttgcggactgggcggcttcccgtcagggctgttcggtgggggggcagatggacaaagtgcaggataaagccagcgataaggacaaggagcgtgtgatgaagaacatcaacattatgtgggatgccctgtccaaaaaccggctctttgacggcaataaggagctgaaggagtttgtgatgaccctgaccgggacgctgatttttggtgagaacagtgagatcacgccgctgccagcacgcaccactgaccaggacctgattaaagccatgatggagggcggcacggctaaaatctaccactgcaatgattcggataagtgtcttaaggtcgttgctgatgcgaccgtgaccatcacctccagtaaggcgctgaaaagccagatttccgctttgttaagcagtatccagaataaagcagtggctgatgaaaaactgacggatcaggagaaagggtttatctccagcaccaccatcccggtgttcaaatacctggtcgacccgcagatgctcggggtgtctaactcacttatttaccagctgacagactatatcggctacgacatcctgctgcagtacattcaggaacttatccagcaggcccgggcgatgatctcaaccggtaattatccccagtcgacaatggatatgatcatggaaaacctcaaccaggcgagtgtgcagattgccgctttccagtcccgtgttcaggtccagcaggacgccttgctcgtggtggacagacaaatgagttacatgcgccagcaggtctctgcccgcatgatgacccgctaccagaataactatcattttggggggaatcagtaa

SEQ ID NO: 222153 - DNA, 444 bp, Klebsiella pneumoniae
atgaacaaatatatacgttcgacgggactgtatgcgtttttatttccagccagtttaaaagcacccggacagacagcagcagaaaaaatagaaaaactgaagccggaatttatccaccgggaaaggcgtctggaaatctatctggaattattcattgtgtttctcactgcaggtgctttgctgttttggataatgagatttttatttaatctctgcgtggctgactggatagccagcggtgacctgcgagtaaaagacctgtggaatattatgatgtacgccatcccttatgcgctgatggctgttggggtggggttctttgttaccggagtgacattagcgatccgcaattttttcagttatcaccttaagaccctttttattctgagaaatgacagagttaaaaaaaatgctgtgcgtaatggaggacaggatgcgaattaa

SEQ ID NO: 222154 - DNA, 558 bp, Klebsiella pneumoniae
gtgaaaagcagcctgaagaacatcgctaagacgccgctggcggcgctggctctttcccttgctctggccggactggcacaggcgggcacgctcgatgaggtgaagtcgctctgggatccgcggggaatctccggtactgaaacggcttccccgcagagcgacactccccaggcggtgagcggggcatctcagccacgctggttacgactcagcaacggaaagcaggtggacctgcgcgactggaaagtggtgctgttcatgcagggacactgtccctactgtcataagtttgacccggtactgaagcagctggccggacagtatggcttctccgtgttctcttacaccattgacggacagggtgatgacgcgtttcctgaggcgctgccggcgcctcctgacgtgatgcagacctttttccccaatatcccggtggccaccccgaccacgtttctggtcaacgtgaacaccctggcagcgtacccgatcctgcagggcgccacggatgcacagggctttatggccagagtggatacggtatttcagatgatgcactga

SEQ ID NO: 222155 - DNA, 285 bp, Klebsiella pneumoniae; identical to SEQ ID NO: 139471

SEQ ID NO: 222156 - DNA, 411 bp, Klebsiella pneumoniae; identical to SEQ ID NO: 139470

SEQ ID NO: 222157 - DNA, 570 bp, Klebsiella pneumoniae
atgaaggaattaatgctgttaattcctctgggcagcgctttgctcttaaccgggtgtgcgggcacagagaccgaatttcaatgtaatgccacgacgtcggatacctgtatgacgatggaacaggcaaatgaaaaagcgaagctgaaagaggaacgcagtgatgcaaagccggctgcggccgggttgccacaactggctgagggtaatttcagaacaacgtcagttaattcgtacccgttgccgccacagccaaatttaatgcagtcaagaacaacgacaacggtaccgactaatacagtaacgtcaggattgctgacgaataacagaatagtcagtgcgccggtatatcggcccgtggctgtaacgccagctgttcggccggtgagtgtatcaacttatacatcaccggtgacggctcctggtaactatccccggccattaagaaaaggggaggagacaacgtcattgtggatagcgccgtatgtggatgcagatgatgtatatcatcagccggcaacggttctttttgtcgtaaaaccatcggcgtggggacaacctcgccttaattga

SEQ ID NO: 222158 - DNA, 1425 bp, Klebsiella pneumoniae
atggccaacttcaacacgctgatcaaacgtaagcaatatatctggctgggactcattctggcgggcggcgcggcagccgtcggaggcgggctgtatctgtcagatctgaacatgagctctgatgaggaagccccggctcaggacgaacccgcaccggatatgaccggggtggtcgacagcagcttcaacagtaaggtggagcagcacgcgacaacagaaatgcaggcgactgccgctgatctcaacaagcgttttgactccctgcagggggaagtggacctactgagtaaggcgcgaaccgctgaccagatacgtatcgacaagctcagcagtgacaatgaagccatgcagaatcagctgaaggcgctgggcgtgaaaccggctgtctctggtggcgagcccgcgccgactcctccgtcaccgccacccggtccggaaggggagccgcagccagccagttatccgccgcaaaccggcgccgcggtaccgcctccgatggcattctatccggggaatggtatgacaccgccgccgcaggtcagctaccagtctgtaccggtaccaaaccagatacagcgtaaaacgttcagttacgacaaaggaaaaaaaacgaagtcattgccgtacattccgtcggggagctttgcaaaaagcatgcttatcgagggggcagatgccaacgcgtctgttaccgggaatgaatccactgtaccgatgcagctgcgtatcaccggtcgcgtggaaatgccaaacagcaaaacctacgacctgacagggtgttttgtggggcttgaagcctggggcgacgtatcgagtgagcgcgccattgtccggacccgcaatatcagctgtatcaaaggtgataaaaccatcgatcagcccattaacggccacgtgtcatttatggggaaaaacggggttaagggagaggtggtgatgcgtaacggaaaaatcctcggctgggcatggggggccggttttgttgacgggattggtcagggcatggaacgggcttcacagccggcagttggcctgggggcaaccgcatctgttggcgccggtgatgttctgaaaatgggcgtaggcggtggtgcatctaaagctgcgcagacgctgagcgagtactacatcaaaagggccgagcagtatcacccggtcattccgattggtgccggtaacgaagtgaccgtcgtgttccaggatggttttcagctgaaaaccattgatgaactggaagcggaaaagaacgggcaacagcaggctcagaatcaggaggcggagccggcaccgcaggctgatgcacatcgtcagtcaggcggcggtatgaacggattcaatactgacgagatgctgaagaagctgggcaaacttgatccgcgtgagttctctccgggcgcagcgccgcagggggaaaataatggctaa

SEQ ID NO: 222159 - DNA, 705 bp, Klebsiella pneumoniae
gtgcttggcctgctggcgctgcccggcctgttcgcgacctttggcctgaaggtggtgtatctgatcctcgccgccatcatgctctgctgtttgccgctggtatccgctttccctccgcgctttcaaccgctttcagtctcccgccagcagccgtcgacggcgctgtggcgtcaggcgctggcggtgctggcggtgctcactttctatatcagcctcagcgccgtgtggacctttatcggcaccatcggcagcgcggcggggctgagcccgacgcaggtcggtctggtgctggcggcggcgacggtttgcggcattatcggcgccggcggcgcggccctgcgcggcacccggcgggccgatcgtttaccggtgtggctgggctacggcctgttgatcgtcagcgttgggctgctgatcggccagccgctgctggtgcgttacgccatcgcggcgctgctgtttaagttcacctggaccttcgtgctgccctttattctcgcccgcgtggccgggctcgataacagcggtcggctgatgaacagcatcaatctggtgatcggcggcggcatggcggctggcccggcgcttgcgggggccttactgcaacacttcgccagcgccgacccgctgctggcggcggcaggcgtctgcgcgctgctgtcactgattttaattgtggcggcgtccgccgccgggaaggcttag

SEQ ID NO: 222160 - DNA, 186 bp, Klebsiella pneumoniae
atgaccccgaaaaccggggccatccgtcttgccacgttgcgcctgtttctgccggatggcggctgcgccttatccggcctacggtccgtgcggcctgcctttaatttagcctcaaccccccccgtgggcgctgccgcttaccggggctacagcgctgtgcgatttggtagcccggagaaggcgtaa

SEQ ID NO: 222161 - DNA, 1428 bp, Klebsiella pneumoniae
atgaatacgtctgctgtttcacccggccgcgccggtctgttgctgctgctgagcggccagatgctgccgcttattgatacctcgatcaccaatgtggcgctggacgccatcacccacaccctggcggccagcgccacgcagctggagcttatcgtcgcgctgtacggcgtcgcctttgccgtctgcctggcgatgggcagtaagcttggcgataactatggccgccggcgcctgtttatgtggggcgtcgccctctttggcatcgcttccctgctgtgcgggatggcgaacagcatcggcgccctgctggcggcccgcaccctgcagggcgccggggcggcgctgattgtgccgcagatcctcgcgaccctgcacgtcaccctcaaaggccccgcccacgcccgggccatcagcctgtatggcggaatcggcgggatcgcctttatcgtcggtcagatgggcggcggctggctggtgtcggcggacatcgccgggctgggctggcgcaacgccttttttatcaatgtgccgatctgcctgctggtgctggctctgagccgccgctatgtgccggaaacccgtcgcgagacgccgtcgcggattgactggcagggtacgctgtacctcgcgctgatcctctgctgcctgctgttcccgatggccctcggtccggagctgcactggccgctgtggctgcagctgatgctggtggcggtcctgccgctgctgttcgccatgcgtcagagcgccctgcgccagcagcagcgtggcgaccatcctctgctgccgccgcgtctgctgcagttgaccagcatccgcttcgggatggccatcgccctgttgtttttcagcgcctggtccggctttatgttctgcatggcgctgaccatgcaggagggcctggggatggcgccgtggcagtccggcaatagctttatcgccctcggcgtggcctattttatttcggcgctgtatgccccgcggcttatcgcccgctacagcatggggcggatcctgctgaccggtctggcggtgcagatcgccggtctcctgctgctgtgcgccaccttctcccgcttcggcgtcgccaccaacgccctgacgctggttcccgccacggcgctgatcggctatggccaggcgctgatcgtcaacagcttttatcggattggtatgcgcgatatcagcgccagcgacgccggggccgggagcgcaatcctcagcaccctgcagcaggcgaccctcggtctcggaccggctatccttggttcgctgttcctggcgctggcccgtcgcggcggcggcaactatccgcaggcgctgattgattttctgctggtcgaggtggccatgatgctgttgctgggggcgatagcgctgtggctacgccatcatctcaatcgacagccggcgacggtggcctcgtaa

SEQ ID NO: 222162 - DNA, 1044 bp, Klebsiella pneumoniae
atgaacgtaacccgaaaagagcagcgcattattcagcgcgcgctgaatgcctggcaggccagcggggagttaaccccctcggacagccagcggctggcgcaaacgatgcgcgtctcccccttcgactggcggcgcctgagtcgctatgccttctggaccgcgctggcctgtgtgctgatttccctgggcagtctgttcgccgacagcgagctggtggcgtggctgctgagcctgttcagccactcggcgctgatgcggatcctgctgcctgcgctgctggcagtcgtctgctacggctggggttttcgtcgccagcggcgggagacgcagtggcactacagcaccgaggcgattttgtttctgggcgtcgtctttaccgccgtggcgctatggcagcttggcgaacggctggataacggcagcggccatatcgcaccgctgtttctggccggatgcgtgatttacggcgccatcggctatattgcccgctccgggctggtgtggctcttttttctgctggcgctgggcaactggttcggcgcggaaaccggctacgtctcggggtggggcgcctactggctgggcatgaactacccgattcgcttcgtcctgttcggcggcgcgctgctggcgctctgctacggcgcgcaatccctgcttcgccagcggcagctgtttaccgtcagcaaggcgatgggcctcacgtacctgtttattgcgctatggatcatgtcgattttcggcaattacgacgcagacaactggtaccaggtgagccaggcgcgactcctgccgtgggggctgctgtttgccgtagcggccggcgtctgcatttttatcagcctgaaaaccgatgacggaatgctgcgcggcttcggactaaccttcctggcgatcaatctctatacccgtttctttgagtttttctggaacgggatgcacaaagtgctgtttttcctgatccttgccgtctcgctggcggtgattggccgctatgccgagcgcatctggcatgccggcgaagggcaggtggagaaaaaataa

SEQ ID NO: 222163 - DNA, 1128 bp, Klebsiella pneumoniae
atggtagattatcaagaaaccgagcttgatgaagaattggttgcgccaggtacggaagatgaagagccggaactgcttgatgaggtgatgcacccgttcaacccgaccgatattgatatcgtcgttgaaccgaagtcgctggatgccttgattaagcgaattcagcacaatgagatcgacatgaataccgattttcagcgtcatgcggagttatgggataaccgcaagatgagccggttaatcgaatccattttgattcgcttcccgttaccggctttctactttgatgcgtccgatgaaaataattggctaattgtggatggtttacagcggttatctacgattcgcaagtttgtgttagataaaaagcttcgtctcaatgggctggaattcttaacagacctcaatggtaaaaccttcgataaattgcatcgtcaatatcagcgccgtattgaagaatgccctgttactgtgtacatgattaagccgggtacgcctgaggatgttaagtattcggtgtttcgccgcatcaatacaggcggcttaactctaaataatcaagagatccgtaatgcgctcgctaagccacgagacagagaattgctcgaagagttagccaattcagcatgctcgaaagccatgctaggtgacctttccaaacgtatgaaggatcaggaactggtattacgattctgggcattccatcgctttgattatttagaccctaaaaacaaaaaggaaatttcctcgtttttagataaagccatggaagacatcaaaaaaggcgatgatgtctaccgtgcagagtttaaagctaggtattcaactgcaatagagcgttgttaccagctgctaggagaaaaggggtttgaaaaaaatcctgcatcaagaagacggtcaaaaaatgcaacactatttgaagtctggatggttatgttggtgaaattaactgaaaacgagtttagccgcttggtttataaccaacccaagtttcaagaaaaggtacagacgttattggaagatgccgagtttattaatgttattagctattctactcagcgaaaagagcatgtggaaatacgctatgaaaaagtcaacgcgttgattaaagagatgcttaatgattga

SEQ ID NO: 222164 - DNA, 648 bp, Klebsiella pneumoniae
atggttgtccctaatgagcgaggagtggaagttctgatcagaaaaggactggggctctctggacttgccatggcaattctgacctcctccccgtttctgaaagctgatgagatacccgattttctgcgcgcattagacagttacactgggagtcggctttttcagagcgctacaaaattactgatgattacgggtgtaagaaccattgaactacgtgcggcattgtggtcagagtttgatctggataacgctatttgggaaatttctgctgaaaggatgaaaatgcgcagatcacatcttgtgcccctatcacatcaggcgttagatttacttagtgaactcaagataatgacagggaactatcgttatgtttttccaaggcggaatgatccgaacaagcctatgagtgaagcaagtatcaatcaggttatcaagaggaccggctattgtgggagtctcactggacatggggttaggcacacaatgtcgacaatcctccatgagcaaggtttcaacagtacgtggattgaaaaccaattggctcatgtggatgaaaatactatccgcggtgcctataatcatgcattatatttgtcaatgctgaaaaatatgctggcgtggcattccgattttatatttaaccattag

SEQ ID NO: 222165 - DNA, 1335 bp, Klebsiella pneumoniae
atgaataattcaattgaggcagtattatttgatcttgataacactctggtcaatacaaattctttaaaagaatacagagaggggccaaaagaaaagcggcttactcaggatgaattgaatacaacaaaattataccctaaaacaaaaacagttttagaattctttaaaaactcgaatgttttgatggcagtcgtaacaaattctcctaagcagtatgcgttagatatacttaattatcatgatatccattgttattttaaaaccatcgttacttataatgatgttggtcctgggggagctaagccatcaccgcaaggtataaacatagccttgagtaacttaaatttaacaaataaaaataacattctatttatcggtgatgatgcaaaagacattaatgcatcctatgcagcaggagtaaagcctattacacctgcttgggcttccaaggcttttattggacaaatgccagctgcaatgattagtactaggtgcctcagtgaggaagttgataatttcaaccatattgatttaattgctgacagatgtgctaactttaattcgtttgatattgataaaaaatggctttttttcatccccatggataaagatggaaatatcggggctgtaaagaaaagcgaaataaacttcctttgcttagggcggtattttagtcaaaaaaatacactcacagcaaagatccatgaaaatcatactctttctaaagagatttatagaaaagagcttgagccgaaatacgtcgctcctgagtattgggttgatcttctttcatattttgtagataaaacccctgcgtatttttttgaagatgattcagtttttgatattgttacagtcataccagcgaagaaaggtaaaaatagacgattggaaaatctccttaatcgaatgagtcgaaattcaaagaataaccatactcaatatatctcggacttgttttatttttcggaagaagctaaaagtttaaaaacaatgggtcgtgatgaaagggcaactgaaatacaaaataatctgcactttaatccaaagtatacaaataaaattcaggcatcaaagatattaataattgatgatgtgataactactggagcaactttaaaaggggctcaatctctactggatacaatgaatccagagagggtgctatcaatatcattggctaaaactgttagcattagcgaagatatgcatatttgtggtgattgtgggaagttaatgcgtgttatgcgtaataaaaaatctggacagcactttttaggttgcaccggtttctttgatactccacagtgtaaaaatactatgagcatagattaa

SEQ ID NO: 222166 - DNA, 1008 bp, Klebsiella pneumoniae
atgaaaactgtatctcctgatacacaaaagcttttagcgattaaatatttaaaaggtattggtgaaaaaacaatatcatctcttcatgcgattaaagaattttcagatctttccattgaagatatattaaatttgtctttaaataagaaaggtagttatagcgattcagatattcatcaagcgatggaattggctcagaaacagagtgacattgctcgtgataaaggtcatttcataatatcattttttgatgatgaatatccttcaaatctaaaaaatgcaagttatgctgcaccaatattattttgcagtggtgatgtaagttgccttaaaaataataacctgacagtaatcggaacaagggagcctactgaacatggtgtagtaattgccaagagggttactgaatggtttgtcaggaaaggctgggttatagttagtgggttagctttaggtattgatagcatagcacactccacttgtttagataatggagggagaacgatcgcagtattagctcatggtcttgagaaaatatatcctgcaaaaaataaagaacttgcaagaaaaattataaataatggtggtttgttaatatctgaatacccttacaactcattcgtcgggaaatctaatttcgttgagcgggatgctattcaggcagctgtatcatcaggagtcgttttgatccaaagtggggtttctgggggaagtttacatgcatccagagcttcgcttttattgaatcgaccgttgattgttgcggggcagtcaaaaacagatataaaaaattgtgcgcaaaaagctagtggtaacatagcattattaaaatcagattatgatgagataaagaaaatattgcggctgaacagatatgacaaaaatatgttattacatctgtatgatagtaaccaatatgaaattattaatgccaagttacttgagttgttagggaattcagataataacaatgagttaattaatgggaccataggtttggatttttaa

SEQ ID NO: 222167 - DNA, 324 bp, Klebsiella pneumoniae
atgcaggtgcataaagcgcttcaggccgcgccagtgctggtgcgggggggggggggagttcaggattttgcatgcaaagccatgcagcgtaagcatgcatggctatttttcttaaaaagacaggtattttcggggcgttatatgcggtttttttttgcgggtctgcgcggcctatcggcacatgaaaatctgactctgttcaggtgtatattttgtccggttctcttctctggatgctctgtcaggccggaacctgatgttagtcaggatatcccggtcatcctctgcataatgaaaatttcttccgctgcccagatgaactga

SEQ ID NO: 222168 - DNA, 366 bp, Klebsiella pneumoniae
atgaagcatgtctttgtggatggtaaaataccgtgcgaggaattcgacaagcggctgagcccaaccttccaacgaaatactggcaactgccgattgattctcgaagtcaatatttacgaacaagatgctctccctttccccgtagctggcaccgacgacctttgccatggtggtctgcatattctcaataagtctaccgtagccaaaacgcaggcggttaaggaaccgcccttatacaacaacagacattatagaattccgttgatctttttattacttctaaataaaaaatttgctaattaccgatccactttagccagtccatgcttgacctattcccagttaattgacacacggcattgttag

SEQ ID NO: 222169 - DNA, 1914 bp, Klebsiella pneumoniae
atgagcgaattcgaggatgcggcacagcaggggcagatagcgctgaccttaaaaattctcggacacggagccacggggatcgagaagtcgtcctctatcttggaccaaaattcttaccggcatgctcaggttaccttctgggatggcatacttaatggcgatccgccgggcttacgtaaaatgattttggcggaaatcgagccacgtgcgatttgggtgaactggttgctcgctgaccgttcatatactcggcataaatatttggacgatcagcagatcatgaaggcgttggtggtcaatacgtccgagaaagattgcatcgatgttcttcaactagtcgatcctcatcaggctgcgaataattgggctttcgatcaactggtccagcagcattggcagtgtgtacgcgaatacttggaaaaacatatcaacaagtcgtcgggctatccaagctatagaatgcctgagctcgtcctctctctttttgcaaattcgcagacagtgcagacgtcccggtgggcttgcgaacaggttttggaacgagcagatccgtcagtctttcctgagctaatccaacatagcagcatgatattgccggaggatgtacgtaatctgttcctgagctggaacatctattcgcagaaagagaagaaagacaatttaaaggggtgcgttgccaaagccttctcgaggcttgctacattgtgcgtggacaccataccctcggacctcgcgcttgcggcggcttggcacgagtttggagaccctgcgcggtctagccaacaaagcgtcgcagccagtctcagagaattgccatccctgacgaggggtcgagaaacgctgtggacacaactaggcccggccgcccgcgaggcttggcgacaggatctgttcgatcaagtgaatgaggaacctgaattagctcaggggctcctcaattttgcttgcctttggctcgagcagacggcatttgccgaagtcgagccagtgcttttgcgattgatggatgacgagcaacatctggcgtttgcgaatcggcttgtcggcactgatgtaaggcaactgcaactgaggtgcaagggactactgcggtccaagcagggtgcactggacctagatgggccggtaggcctgggagagggagacactgcgttgcctagcgtaggagccaaaacttggctgagcgatccttccgtggagcaagtcatctttagggcgcttagccagattgagcaagaattttgtcgcaaatattcgaagacctggggagaggacgaggaggcccatacggcgcgcctcctgactatgacgaaggaggcgattggcaacgtgagcagccagttgcgccaactctcggttatgacgcgggcgaggtatccgagcctgacagtaaatgtgcgtcaacccagcaagcgggaggaaggggcgaacacaccagccggtgctccgctgggggcagacgtgctgttcctgagccgtatcgtggaaaaggggaaaacagtgattcagcgtgcgacccttatgcaagtgaaaaagcgcagaggcactgattcggggcggggtttcagttcgagggtaaacattgacctgaagcagtgcgaggacatactcacgcagtcagaacacgcctactatcttttcgcgactccggcctcgcctcgcccggttctctgggttgccccagctcggctcgttaggaatttgacccagttgcacacgagcaaaacttcggtttcggcgatgcaggtgcgggacgccagctgctcctacgcggagttttttctgcacgagcttgttggcctgtgggctggcgacgagcatgaggatatcatcgctgtcgctaacggcgatgctaagattgggcgaacacctcgccacattgttgaaatcgaggttcgccgccaatctgattaa

SEQ ID NO: 222170 - DNA, 1239 bp, Klebsiella pneumoniae
atgactgcgaaagatcagtttgctgctcatgttggtttggactgggcggataaaaaacacaatgtctgcgttcagtttaaaaacggtgatcgcatatttcatgtgattgaacatacgcctgaggcacttgatatctggctcaatgagttacaccagagggcgaaaggcaggattgctattgccgttgagctgaagaaaggcccggtggtgtatgccctccagaagtacccatttgtcactgtttttccagtacacgcgttgtcactggcccgctaccgacaggctttctggcccagcggtgcgaaggatgatccgcaggatgctgagttggcattagacctgatgctacgttatccccgcaagataaaagccattgaagccgacaatccggatatccgattactccagcaattagttgagcagcgccgactgctggtcgaagacaagcgtcgctttgttaatcggctcatcaatacgcttaagcagtattacccccagtccctggaatggttctcccatcgggacagctcactgttctgcgagttaatcattcgatggccgagtctgcaacaactcaaacgggctcgcagtgatactgtccgtcattttatgaatgctaaaggtggtcctgctgttgcatataccgaacagcgggttgcaagtattgccagcgctattcccctgaccacagataaaactgtcatcgaggcaaatgcattgatggcaacagcacttgcatcccaaatcaaactgacaggcgacctaatcagaacctacgatgaacgaattgaatccttattcgatacgcttccggatgcagaactgttcaaatcacttcctggaatgggaccgtgtatgggcccacggatgcttgcagcactgggtgataaccgcaaccgcttcaacagcgccgaagaaattcaaaactacgctggcatcgcaccagtaaccgagcgaagtggtcaaaaatcctgggtacactggcgttggcagtgcgcgaagttcgtccggcagacattcgtggaatggactgcgaagacggttaactcatcgtactgggccagactttattaccagggccagcgagaaaaagggaaatctcatcagtcagcaatccgggctctggcatttaaatggataaggatcatttaccgctgctggaagaccagaacccggtacgacgaagcgaaatatttgctggcactggaagcgcgaaagtcgcccttactgaagccataa

SEQ ID NO: 222171 - DNA, 573 bp, Klebsiella pneumoniae
atgaacaattgcgctgaaaatgaagtgttaaagacgaactctgatggtaacaatgtcatgcttattagtagagtgttgcagcaggcgactgatcattacccacgactgtctgcgctggggtttactctacagtatgcgaattgccacttctgcgacaacgtacaacaaggtaatgcccagttgctacgttttcacgctgaagcctattacagaataggcgaatattcaaagatacgtattgaagcgggtaaaccgtcgcagcctactcttcttcgctggctgtgggaggcagaaagtacctcgacatgtcggatgatgatgctattcaatttgggtgtttgcagtcatccccgatatggctcttctgcatcggatggaattcaggaagtaatgtcgttgctggcggctgtatggcgtgaagtagaaccgaacggggagttaacggaaataaaggtacatcgggtagagagaactaagcctgtatttttcgataaaccttatctagagttacgagatgcagcattgaaaatgacctcacctgttgcttttgccaaaagttgttcgacagtgtaa

SEQ ID NO: 222172 - DNA, 579 bp, Klebsiella pneumoniae
atgctcaaaaattcagatagaaattttaatgaagactggtttcttgcttcagttcttaatgcacacatcgatgaaatgataaacagatattcatgccttttggcattacgtatggattttttctacaaaaaggacagtgccaggtattcaagcttacatcaccaaacacttgaacatgatttgcgtggactgatggagaaaatgataaaagagaaaggtgtggtgggctatttctgggttatagaatggactgaacgacatggataccatgcgcatgtcgtattctggctggacagacaaaaaacacagcactcttatccctttgcccttacagcaaatacactttgggaggaaataacgcaccgggacggcgtatcgcaccgatgtgaatatcggccgcagtattctgtaaatatcaatatacctgttcggtataacgatccggaaagcattaacaatatccgtcatgttctgagctatctggctaaggaagaacaaaaagaaggtttgtgtgcatacggctgcaatgatgttcctcctcgccctgcatcagggcgtccgcgtaagtcaggccactga

SEQ ID NO: 222173 - DNA, 1152 bp, Klebsiella pneumoniae
atggctaaatgtgtacgaaaaaactgcaagcgtttagtgtccccattacctgaagcaaaacgtaaaaggctctgtaaaaaacattatttacgcttctgcgagctgagtgaacgcaagaaaaaagaccttgtttatcagattaataaatatatccctcgtaaaataaaacgattaaagaaggggcgaatttactattgcgcattcaatagcaggaggggatatgtcagaaagatatcttcaattgaaaatgctggattaataagacaggccagagagaagcttgtattaatacgaaaaacaccggcctggagaaacacagaaagctatgtacgccgtataagaatcgggtcagaactccctgtctcattaaatgaagtaacggaactgtatagtatctactcctggattgatttttgtaaaaacagcacgctttatgcaaaaaattatcttggtggcggcgaaggaaatttaaaattgcaactttataaacttcctttcccaggtaagacagaagattcctcatcccaacaaaacattattatacctattactttaaaaaacaaagtaattaatcaactcgcaaaaaaccgcaacatccgggatactgctaacgtaaaaaaaccactcagcctgtataaatctttaattgcgttagaggatgaacggtctgtggcattaaaattactccaattaacaattgagacacctttacaccctcaccaatatagtaataacctaccatatcttagccctggtgatgctcctccattatttggtctcttattaaatgaactgaaaagattgaatgtcattggtgtgaatgactcgatgttaaaacttgctaaaaaatataaaaatgaatcctttacgttagagttgatagcaattcatattatttttaacatagcaagaaatggcacccctgaggttcattcatttttatcaaataagtttgatgaaaatggttatttgtacaggtccgtaatgattaccttcatgatgcttgagttggatttggattcttattctgaattagtagggttttacaactctttctttagtacggatgtaatcaaaatcaaagataatatatttctatgggcgtcaggtaagaaagaaaagctcccttttgaataccgaactggaatttaa

SEQ ID NO: 222174 - DNA, 894 bp, Klebsiella pneumoniae
atgcctcaaatccccgatccgcaggataccagtgatgcggtgcgtacctgcctcaatctcttaccccggcaggctactgaacgtattctgtctcgcctccaggaggcgattaactatgaacccgtgataggcatcatgggcaaaagtggtgcgggcaagagttcattatgcaacgcgctttttcagcaacccgtttgtctgaccagtgatttgctaggctgcacccgcgaaccccagcgtctgttactcaccgttggtgagcgcagcatgacactggtggatttaccgggtgtgggtgagacaccggaatacgacgaggaatatctggcgctctataaggcgttgctgggagagctggatttgattatttgggtactgcgtgccgatgaccgtgcccgggcaacggatatcacggcatacagggcactgatggaagccggtgctgacccttcacgtttcctgtttgtactgactcaggccgaccgtattccacccctcagggatggtgagccctggcaggcatcaccttcttctgagcaatgcttttcactggctgcagtcagtgcgcaggttgccggtcagttgccgtcctctttcccggtcatggctgtctctgcacataccggctataacctgcccgccctggtggagttgattgtgcatgccttgcccgtacaggccagcagtaccgtgtattgccagctgaaaccagagcatcagactccggacactgatgccgctgtacggcagcagtttggtgaggcagcgggtaaggcttttgacacggtgattaatcctgaccacctgccttctgtctggaatgctctgttaaggagtatccgacaaaagttagtgcaacttgccacggcattatgggaccgaatatttggctga

SEQ ID NO: 222175 - DNA, 678 bp, Klebsiella pneumoniae
atgaaaattcagactgtgattgcacttgttttgtcagccgtttcggtttctgctcaggcgggtaactgggctgtgaaaaacggctggtgtcagacgctgaccgataatggtcaggcactggtgatgctgaaaaacaataccattggcatctttggtcagttgcagggctgccccaatggcccgcaggagctgatggggagtcgcatcaatgtaaacggcaatctggtacccacgtctcagttgtgcaaccagcaaacaggatttaaggctgttgaggttgaaggtgggcaggcacctgcagccgccagaaaggtaattgcttcgattgcaggtcaggaaacatcgacccttcaggtctttggtgcgcaactgacattcacccgcggggacatgatgacggtctgcccgaaatacgtatctggccttgctgccagtgccggtagtcgagcgccagagattaacaaaggctcagtcatgaaagcggccaaagaagcgtacacgaaagagtatgaccgtgacacggctgaggccgctgattttggcagctacaaagtggagggaaatactgtggtttatgaggtctacaatgccgggtatcgtacctacgataaggtggtggtgaccgttggtgctgatggtaaggccaccggtgccagggttgaatacatggggcaataa

SEQ ID NO: 222176 - DNA, 231 bp, Klebsiella pneumoniae
gtgcataccgaacctactttatccctccccgacggtccgtttacccgccaccaggcaacatccatcacagagctgtatgagaacgtcactatcgaagacgaccaggggacacattttcgtctggtcgtacgccatcacggcacgatggtctggcgggcatggaacttcgagccagaagccggacggttacttaaccgttacatcacttcttacggtattcgtaaatcctga

SEQ ID NO: 222177 - DNA, 441 bp, Klebsiella pneumoniae
atgaatattgcactccctgatacttctcttgtccctgcccccataaccgccacgctcatccctgatgagcaacgtctcagcttctggccccagcatttcagcacggttcctcagtggatattactggagccacgtgtctttagccggatggacgcgttatgcgcggactacaccggtggcatctggaatttcttcacgctcagtaacggtggagcctttattgccccggacggtgacgaaacatggtcgttgtttaacgtccttaacggtaatagcgccatcctcggtaatgaagcggcaggcatcgcggtttgtctgctggcctggaaccaccacgcctggcatacgggtagtgacgtgatgtgtgaccacttttaccgcctgcgtaattacgcccttcagcatcctgaatgcagcgccattttgcagattattgactga

SEQ ID NO: 222178 - DNA, 477 bp, Klebsiella pneumoniae
atgactttcgaattaacagcgtcacctgtactgccgatgacgacccgtcgtacggttcagagagcactctcattactggagaaacatcttcgtgagccgggtgcattgtttacgtccactgcggcggttcgtgactggctgcgtttgaaaatgaccggcctggagcgcgaggtatttatggtgctgtacctggataaccagcaccgtctgctggagtgcgaaacactgttcagcggcaccatcaacagtacggaggtgcatccacgtgaagtggtgaagtcggccctgcgccataacgcggctgccgtacttctggcacacaaccatccttccggcgaagcggagcccagcctggctgacaggcaaaccaccgacaggctgttgaaggcactttcgctggttgaggtcagagtgctggaccactgtattgtcgggggtatgactgtgagttcgtttgcagaacgtggctggctataa

SEQ ID NO: 222179 - DNA, 327 bp, Klebsiella pneumoniae
atgtcatcaaatgacttacagcaatggggattatgtcgcagcatctcaccgtgctttggcgcaaggctcgtacaggagagaaaccgcctgcactttctagctgaccgcgccggttttaacggtcagtttaccgaagagcaggcgctgcgactcgatcaggcatttcctctgattatgaagcaactcgagcttatgctctccaccggtgagctaaatccgcgccactcgcattgtgtcaccctttaccacaatgggctgacctgcgaagccgatacccttggcagttacggctacgtatacatcgccgtttaccccactcatcgttaa

SEQ ID NO: 222180 - DNA, 342 bp, Klebsiella pneumoniae
atgaaaactctacctgcaacaactccgcaggcggcgaagctatatctgtcccccgtggcagtgtggcaaatgctgcttgcacgcctgctggaacaacattatggcctgacactcaacgacacaccattcagtgatgaaacggtaattcaggaacatatcgatgccggtatatctttggccgatgccgttaattttctggtggaaaagtacgggctggttcgtattgatcgcaggggattcaactggcaagaacagtccccatatctgcgggcggtcgatattctgcgggcgcgacaggcaactggtttattgaaaagaaatcgtattagcgcggcacggtga

SEQ ID NO: 222181 - DNA, 1008 bp, Klebsiella pneumoniae
atgggcaacagaatgtggatgatccgcggtgacggcggcaagctctatgacgattttcgcgataagcaaattgtaggcatcggttggtctcagctggctccattagtcaaacccggcctatcccgagcccagttactcgccttataccaagaggctgatcccttaacaaagctcggaacagcccgttctggcgcatcgcaggtctggcgttttgtgaatgagatccaaaagggtgattgggttattacctattcgccagccaaccgtacttatttgctaggcaaagttacttcagacttccagtatcatcctgaatgggtggaagaggggatgggtatcgctcggcaggttaaatggaatactcaagaaatcgaccgcgatagactgtctgttgctaccaaaaacacattgggttctacgctgacggttttccagcttccagaatatgcgctagaagagcttttgcaggataagaaacccactgtagacgctattactcataatctaacagcgacagatgaagatgaggtcgtttctgatccgcttcgcgatgtggagtcgttggcgcgtgaaggtattaaagatcgagttaatgggctcgatccgaaggagatggagtatctggttgcaggagttttacgcagcatgggatataaaacacaggtgtctcctgtgggtccagatcgtgggaaggatatcatcgcatcacctgatggatttggatttgagaatccacgtatcgtcgttgaggtaaaacatcgcagggagcaaatggggagtcagcagattcgcagctttattggcggccgtcatccagaagatcgtgggctttatgtcagtacggggggctttacgaaagatgctcgctatgaagccgaccgctcacagatacctctgacgctctggacgctagacgatcttgtcagagccctcattgaaaactatgagcaggttgatatcgaaaccaaacttttggtgcctctgaagaaaactttcctgcctgcctga

SEQ ID NO: 222182 - DNA, 204 bp, Klebsiella pneumoniae
atggcactcaaaaccttgtcagcactcccggtatttgctgattctctttttgccgatcgctttaatcgtattgaccgtcttttcagccagttaacgggcgatacgccggtgggcactttaccggcttatgatttacagaaagtcgacgacagcaatttcctgctcagcgctgagagatcccctcataatttccccaaagcgtaa

SEQ ID NO: 222183 - DNA, 1182 bp, Klebsiella pneumoniae
atgcctgaacaatatcgatactcattgccggtcaaagccggcgatcagcgccagcttggcgagttgaccggcgcagcctgcgccaccctggtggcggagatggccgaacgccacagcggcccggtggtgctggtggcgcctgacatgcaaaacgcgctgcgtctgaacgacgagatcaggcagtttaccgacagcatggtgatggggctggcggactgggaaacgctcccttacgacagcttctcgccgcatcaggacatcatctcctcccgtcttgccaccctttaccagttacccaccatgcagcgcggcgtactgatcgtcccggtcagcaccctgatgcagcgcgtctgtccgcacagcttccttcacggccacgcgctggtgatgaaaaagggccagcgcctgtcgcgcgatgcgctgcgcgatcagctggagggggccggctaccgccatgtcgatcaggtgatggagcacggcgaatatgctacccgcggcgcgctgctcgacctgttcccgatgggtagcgatcagccctaccgccttgatttctttgacgatgaaatcgacagcctgcgcctgttcgacgttgacagccagcgcacgctggaggaagtggcggccattaacctgctgccggcgcacgagttccccaccgaccagaccgctattgagctgttccgcagccagtggcgcgaccgctttgaggtgaagcgcgatgccgagcatatctatcagcaggtcagtaaagggacgctacctgccggtatcgaatactggcaaccgctgttcttcagcgagccgctgccgccgttattcagctatttcccggccagcacgctgatcgtcaacaccggcgatctcgaggccagcgcggagcgattccagaatgaagcccgcgcccgctttgaaaaccgcggcgtcgacccaatgcgcccgctcctgccgcctgagctgctgtggctgcgcagcgatgagctattcagcgaactgaaaaaatggccgcgcgtgcagctgaaaaccgaacgtctggcggacaaagcggcaaatactaatctgggctaccagacgctgccggacctcgccgtccaggcgcagaacaaagcgccgctggataatctgcgccgcttcctcgagtcctttaccggccagttggcgaaacgatcgcggaaattgtcatag

SEQ ID NO: 222184 - DNA, 978 bp, Klebsiella pneumoniae
atgaataatggaattgtgttgaaccatcactctttgccatttgccagcaaagaggatgcagatgaaggactattggctttctttactgttcttaagatttgccgaactgctgggctgaaaattttgctagtcgatgaagatcaagacaagtcgctaatggggctggagctggctaacggatactttgtgcgcaattggcttgcctctgcaagcaaagtagcagaacttgcggattggtgccgatttctaaagtctcttgaaacgaaacagcctctctttgaaaccgtagatattgaaagttttggtgatgtattagaagttggcttgccaggggaatattcaggtaaaccggtgctattagcagcgttttattttgaaacttttcttgccagttttacggctttggctgcttggacaaatagccattttaaagtatgggttttcgagcttgatgcaataccagatcaaagggatgaaacgattttaaatctgagtgattctgcgagcttgagtgtgcatggtgatgaactcaaacaacgtcgtaatgcgttgttaagttccgctaaggatatctggctgaaaagagcagatttgtttcctcatctcactttattgtcaaatcaaattggtacaagtctacaaggttggtccgctaggcaagatgtcttgttcaaggcgcgagatgcgctaaatgtgctggagtcgtttagtgagaaatggctttcaggtgagtatgtagagtaccgtcatgagtatttaagggatttgggtttggcagctgaagttagcggtgaatcggacagtgtaaataatgctcccaaaaagaagaaagagcgcatattttggttagatgatggacggcaggtctattgcgagaatcatgtaaaactacctgacggttaccgcctacatttttatgctgacgcagtaaatcagcggatatatgtggcgtatttagggccgcatttaactttgtga

SEQ ID NO: 222185 - DNA, 183 bp, Klebsiella pneumoniae
atggtccagctcaatctggtaaaagtactgcttttgtgcccgacttttggccagcaatcaaggcaaccctgtatcgcctatgaccagtgtttaagattgccgttgctgtcgctgcagtacgcacaatatttatcactggaactttgtgcatcggttgaatacatcgccattccgcaggcctga

SEQ ID NO: 222186 - DNA, 972 bp, Klebsiella pneumoniae
atggctaccctcgttttttcctattctcatgcagatgaagccttgcgtaacgagctcgaaacgcatctctcaccgttaaaacgcatgggaacaatcagcgcgtggcatgaccgacgtattgctcctgggcaagaatttgagcatgaaatagatcgctatttcgccgaagccaatattattctgctgttagttagtagcgacttcattgcatcggattattgctggaatattgaaattaagaatgcaatggcgcggcatgaacgaggggaagcgatagtcatcccggtgattttgcgcaattgtgcctggcacaatcttccttttggtaagctactggccgcaaccaaagatgggaaaccgattactcagtttcccagtcatgatgacgggtttgtgcaggttgttgatgcagtatcaaaggctgctgcccgtattgataccaacaattcaacccaagtgccccacgcatcaacttcatcaaatgctcaactatcaccgtcggtaaatacagttttacagccccgatccggcaacctctcgcttccaaaaacattcagcgatctcgataaagatcgggctagccgtgaaggttttgagtatgttgcacgctatttcgaaaactctctcttcgagctaaaacaacgcaacccaggtatagaagtggaatttcaaccggttgattccagcgcgttcacctgcgcgatttatttacacggtacccggactgggcagtgtggagtctggcgtggtgacagactccatggggtaggctcagtctgtttcagtcatgacggcatggttcgaaacagctacaacgaaagtctaagtttggcggataacggtcagtctctgggttttcgcacgatgatggggttcaccggaaacagtcataacacattactgactaatgaaggtatggctgaacatttgtgggatatgttcttcaaatccgtaaaacaacgtatgtcctga

SEQ ID NO: 222187 - DNA, 516 bp, Klebsiella pneumoniae; identical to SEQ ID NO: 143753

SEQ ID NO: 222188 - DNA, 918 bp, Klebsiella pneumoniae
atgccagaatttcatgacgttcatttggaactgcttgttgaagcctattcacttcctcaggcagagcgactggcgtacatcgatttgtgtatacgctacctcggcagcatatcgagggccgaaattatggctgagttcaaagttgcacaggctgcagcctcaaaagatcttgctttatatcgggaactcaaaccaggtaactgtagtattgatacggcaaccaaaaggacggttatttctcatggtacctatactccattggtgcagattagtgttcatacggcgctgaatctgatccagtatggtttctctcgttcggagctgatgcaaaaacgtccgatgctgccgattgatgagatagacccgctttatctacccgagcgtttgaaagaagaacaggtctatgttgtcaccagggcaataaaaggccgctatgcgatcaaatgcacatatggctcagaaagtggcgagcatggcaaacggatactatttccatcagcattatttgtagatcggaaaaactggtacttcagagcttatgatcgaaacgattcggatccaaaactaagtgggtttaaaaactttaagttatcgagaatttttgatgttgagcaagaggaatcgatactgccgacggttgcagagttgacggacagagaatggaatgaggaggttacctttatcattgcattcaaaaaggatcttcgacctgagattgtagataaaatctctcgcgagttttcgatcagcggtaatgtacattctgttacatgtcgcgctgctttggcctggtacgtaaagaccaactggaaaatagatctgactggaaataacaataatggttggttgtactttgatgtcctgaataaagaagctttacaagaagttaaatgcctggagaagttgtttgaagagtaa

SEQ ID NO: 222189 - DNA, 3087 bp, Klebsiella pneumoniae
atgaaattcaccgaagacacccgggtaaaaatccccgtcatcctccacctgatacggctgggctaccgctacctgtctctgaaagaacaacactgggacaaagaaaccaacatctttcctgaccttttcaccgctgcagttggcagaattaaccccggaattgcgcccgacgacatcgggcgcctgttaaaagacctcacgctgcttctcgacaacgacgacctgggccgcgccttcttcgaaaaactcagcgaccgttccggcatcaaactgatagacttcgataacttcaacaacaacagcttccatgtcgtcaccgaactaagctgcgaaaacggcgatgaagagttccgcccggacatcacgctactgatcaatggtatgccactgatctttatcgaagtaaaaaaacccaacaaccgcgaaggtatagtcgcagaacgcaaccgcatcaacgaacgcttcaagaacccaaaattcaaacgcttcgccaatatcacccagttcatgatcttctccaacaacatggagtatgacgacagcgacccggagccgattcagggggctttctacgccagcagctcttacagcaacccggtattcaactactttcgcgaagaagaactcttcaacttgacggcgttactgaaaccactgtcagaagaaaccgaaatcgccatcctgaaagacaacaacctggaagtaatccgcaccaacccagaatttcagaccaataaagatcacaaccgcccgaccaaccgcctctgcaccgcgctgttaagccgcgatcggctggcatttatcctgcgctatgcgctggtgtacgtcgccgaacccggcggcatccagaaacacatcatgcgctacccgcagctcttcgccaccaaagcgattgagcgcaaactgaacgcgggtgtgaaaaaaggcatcatctggcacactcagggcagcgggaaaaccgcactggcttactacaacgtgcgcttcctgacggattacttccagaaccagcaggtgatcccgaaattctactttattgtcgatcgtcttgatctgctccagcaggcgcagcgcgagttcaccgcccgtggcttaatcgttcaccttatcgactcccgcgaagctttcactcgcgatatcaaagcgacgcaggcgctgcacaatcaccacggcaaagcggaaattaccgtcatcaacatccagaaatttcgcgatgacccggacgtcgtcaccaccaaagactacgacatcagcatccagcgcgtgtacttcctcgatgaagtccaccgcagctataaccctaaagggagcttcctggcgaacttaagccagtcggataccaacgccatcaaaattggcctgaccggcacgccgctgctgggaacggactacaactcccgtgatatcttcggcgactacatccacaaatactactacaacgcctccattgccgatggctacacgctgcgcctgatccgagaagagatcgccaccaactaccggatgatcctgcaacaggcgctaaaagaggtggaagtcagaatgggcgatgttgatcgcaaatacatttacgcccaccccagcttcgtcaaaccgatgctgaactacatcgtcaccgactttgccaaaagccggggcgcgctgaatgatgacaccatcggcggcatggtgatatgtgacagttctgaacaggccaaacagatgtttgaattgttcaacgccgactacgccgaatcgcccaccgtgaccgacgaaatgcctgtattacaggccgcagaacccgctgccgtttatcagatccacgccaaagaaacacggaaaatcaaacgcgccgccctaatcctgcacgacattggcagcaagcaggaacgtaaagagtgggtggagcaattcaaagccggcgagattgacctgctattcgtctacaacatgctgctcaccgggtttgatgccaaacggctgaaaaaactctacctcggtcgggtgatcagaaaacataacctgctccaggcgctgacccgcgtcaaccgaacctacaaccacttccgctacggctatgtggtggacttcgccgatatccgccaggaatttgacgccaccaacaaagcctacttcgaggaactacaagccgaactgggcgacgaaatggagcactactcccgcctgttcaaatcggcggaagagatccgtgaagaaatagagcatatcaaagacgttctattcagcttcgatacagagaacgcagaaatcttcacggaccagataaaccaggttcaggatcgggaaaccgcgctggcgttgaaaaacgcgctggccgacgcccgcagcctgtacaacctgatccgcctccaggacaacacggagtttctccaggcgctggacttcaataaactcaacatcctctatcgcgaagcctgccaccgcctcgacttactcaacctgaaagcagatctggaacagggtgttgatttatccggcctgcttaaccgggcgctggaagaggttgtctttgaattccacaaagtgggtgaagaagagctggtgctggctgacgaactgaaagagacgctgcgacgtacccgtgaggcgctggctgctaacttcgaccagcaggacccgcagttcgtcagcctaaaagatgaactggagcgcctgttcaagaaaaagaagcttagtgaagtcacccaagaagaaatggttgcgaatatcggcacactcaataaaattcatgaccgcataaaagagctgaaccgccagaacaacctgctacgccagaaatacaggggcgatgtgaaatacgcgcgtacccacaaacgcctgcgcgagcgcggcggcctgagcgagccggagcgtaaaatctttgaagcactgctcggcgttaagctggatgcggatgaaaaagtgctgaacaacagccagatactgaacaatgaaagctattttgagcgccagattgtgtcatctgtgcttgaccactttgaacaacagcagcacatcaccctcagcgcaaaagcggctggcgacatcaaccgcctgattgtggcggaatacctgaacgaatttaataccggagcacgtacgtggtag

SEQ ID NO: 222190 - DNA, 1638 bp, Klebsiella pneumoniae
gtggtagaactggaatttagagacaaaaccaaaacccttatcgacagcctgaaaagcatctgtgcgaactacggtctgggtaacgacggtaatgaattcaaaatcatcactcaggcattcctgtacaaattcctgaacgacaaattcgcctttgaagctaaaaaggtggataaaagcatcgccagcgccgaaaaatgggaagtcgcgctcaatcagatgagcgaagaacagcgggataaactgcaactgaaaatgagcgccgacaccgcccgtctgaaaccgcatcacttcattcagtatttatacaaccgtcaaaatgaggccaatttcgccaccacctttgacgacaccctgatggacatcgccgccaccaacaacgacgtcttcgcggtcaaaaccgacggcggcgcgaaagtggtgctgtttgaacgcctcagccagtacatcgccgacgaatcaaagcgcgacgacttctgccgcgccattatcaacaaactggccgatttcagctttgaacgcatcttcacgcagaaattcgacttctacgccaccatctttgaatacctgatcaaagactacaacagcaactccggcggcaaatacgcggaatactacaccccccacgccgtggcgtgcatcatggcggaaattctggtaccgaaagcacagcagggcgtcgtgcgtaacgtaagctgttacgacccgtccgccggttccggcacgctgttgatgaacgtggcgcacgccatcggggaagatcgttgcagcatcttcgcgcaggacatctcgcagaaatcctccagcctgctgcgcctgaacctgatcctcaacaatctggtgcattcgatccccaacgttatccagggcaacaccattttgcacccgttccatagagacggcagcgcgctgaaacgctttgactacatcgtatccaacccgccgttcaagatggatttcagcgacttccgcgacgcgctggacagcaaggaaaaccagcaacgcttctttgccgggataccaaaagtacccaaagccgccaaagacaaaatggcgatttaccagttgttcctgcaacacatcattttctcgctgaaaccgggtggcaaggcggcggtcgtggtcccaactggttttatcaccgcgcagtcgggtattgataaagggattcgcgaacatctggtgaaaaacaggatgctggcgggcgtggtttccatgccgtcgaatatcttcgccactaccggaaccaacgtgtcgatcctgtttattgatgccagcaacaaagagaaagtggtgctgatcgacgcctcgaatttaggtgaaaaagtcaaagacggcaaaaaccagaaaacggtactgacggaagaagaagagcagcgtatctgtgaagtgtttaacaacaagtggagcgaagaggatttctcggtggtggtcagctatgacgatatcactgcgaaaaattactcattcagcgccgggcagtattttgatgtgaaaattgaatacaccgatatgacaccggaacagtttgccgcgaagatgaaagggtttacggaaaatctggagagtttgtttagccagtcgcgcgagctggaagaagaaattaagaagcagatggctgggctaaattaccatggttaa

SEQ ID NO: 222191 - DNA, 1152 bp, Klebsiella pneumoniae
atggttaaaactattggcgatgcctgtaatattagaacaggtaaacttgatgcaaatcgggcagtgaaagatggtgattatccattttttacgtgcgctgagttcccagaaaaaatcgatcactatgcatttgatggtgatgtggtacttattgctggtaataatgcaagaggtaattttcacgtaagcaggtatcaaggaaagtttaatgcatatcagcgaacctacgtgcttacagctaaacctggttatgatattgattatatttattatgctttaaagcttgaactaaagcggctgcgagaaaaagcgcaggggtcgcaaacaaagtttctgactatgccgattttgaccagcatttcattacgagatcttgttgaatctgaacagtcgacagtttcaaaaatattaaagatactggataaaaaaatcgcacttaacaaccgaatcaacgccgaactggaagcgatggcgaagatgctgtacgactactggtttgtgcagtttgatttccctgatggcaacggaaagccttataaaggttccggcggtaagatggagtataatgcaaagctgaaacgagaaatccccgcgggatggacagtccaaacgctgtcccaaatagcgaatatcacaatggggcagtctccagcaggggagtcttataacgaagatggaatcggaacgctatttttccagggttcaacggactttggttggcttttcccaacgccacggcagtacacaatatcacctgccagaatggcgaaaaaaggtgacattttactcagcgttcgtgcgccggttggtgatatgaatattgccaatgccgattgttgtattgggcgagggcttgcggcattaaacagcaaaagcggctcagatggatttttattctacgtgatgaagtatttcaaacaggtatttgatcgtcgaaatgcggagggaacaacatttggctccatgacgaaagatgatttacattcactgcaagtcgtttgcccagaacccaaattactgaaacagtatgacggtattgtttcagaatataataaaatgatttttacacgtagccttgaaaatcaggatttaatcaaactccgagactggctcctccccctacttatgaacggacaggtcacggtcaaataa

SEQ ID NO: 222192 - DNA, 1266 bp, Klebsiella pneumoniae
atggctctgagtgatgtgaaggttcgttcggctaagcctgaagcaaaagcctataaacttactgacggtgaaggcatggtgttgctggttcaccctaacggctcaaaatactggcggcttcgttatcgcttcggtggcaaagaaaagatgctggcgttggggaaataccccgaagtctcgctggcggatgcccgggcacgccgggatgaagcccgtaagctgttagcgaatggtgtcgatcccagtgagaacaagaaagctgttaaggtagagcaggagcaagaggcgataacgtttgaagtggtcgccagagactggcatgccagcaatcaaaagtggtctgagtcgcacagtgctcgtgtattgaaaagcctggaagataatctcttttcagccatcggtaagcggaacattgctgaattgaagacacgggatctgcttgtccccatcaaagccgtcgagtcatccgggcggctcgaagttgccgcccgtttacagcagcgtactactgcgattatgcgctttgctgttcagagcggcttaatcgattacaacccagcacaagagattgccggtgcagttgctacggcaaaaagacagcaccgtgctgctctggagcttaaccgtattcctgaattacttcatcgcatagatcactattctggcagacccttaactcgactggctgtcgaacttaccttgttagtctttatccgctcaagcgaactgcgttttgcccgctggtcagaagtcgattttgaaacggctatgtggacgattcctggtgagcgtgaaccgctggaaggtgttaagcattctcaacgtggttcgaagatgagaactcctcatctcgttcctttgtcgcgacaagctctcgctatctttgaaaagatcaaaagcatgaatgggaatcgagagctgatcttcgtaggagatcacgatccgcgtaaacccatgagtgagaacacggtgaacaaggctctacgagtgatgggctatgacacgaaaacggaagtctgtgggcatggtttcaggacaatggcgtgtagttctttgattgagtcaggattgtggtccagggatgcggtggagcggcagatgagtcatcaggagcgtagctctgttcgggcggcttatatccataaagcggaacacctgggggagaggaggttgatgttgcagtggtgggcggattatctggatgcgaataggcaagaagttatctctccctttgactatgccaaaactaacaacccattgagataa

SEQ ID NO: 222193 - DNA, 1302 bp, Klebsiella pneumoniae
atgtttggtgcagaactggttattgtcctgctggcgatttatctcggcgcccggcttggcggcatcggtatcggctttgccggtggccttggcgtccttgtcctgacgcttatttttcaaattaaaccgggtgcgatccccttcgacgttattgaaatcattatggcggtgattgccgctatcgccgccatgcaggtcgccggcgggatggattacctggtcagcctcgccgaacggatgctgcgccgccacccgaagtacattaccttccttgccccgctggtgacctggtttatgaccgtgctcgctggcaccggccataccgccttctccacgctgccggtgatcaccgaagttgccaaggagcaaggcattcgtccgtctcgtccactgtcgattgcggtggtggcctcccagatagcgatcaccgcctcgcccatttccgccgcagtggtctttttcgctggtatccttgaaccgctgggcgttagctatttgacgctgctggccatctgtattccggtcacgctgctggcggtgatgctcaccgctatcgtctgcaacttcctcggctgcgaactgaaagacgatccggtttaccaggagcggctggccaagggggaagtcagactgcgcggcagccaggtatttgagctgcagccgcacgccaaacgttccgttctgctgtttttgatcggcatcgtggcggtaatgttctacgccacggccatcagcgataccgtcggcctgattaagaacccggtgctgccgcgtaacgaggcgatcgtggtatttatgctgaccatcgccaccctgattagcatcacctgtaaaatcgacaccggcgaagtgctcaacgccagcacctttaagtccgggatgagcgcctgcgtctgcgtcctaggcgtcgcctggctgggagataccttcgttaaagcgcatatcagcgacatccaggccgtggccggcgatctgctgcataattacccatggctgctggcggtggtactgtttttcgccgccacgctgctctactcgcaggcagccaccaccaaggcgttgatgcctgccgcgctgctgctgggcgttagcccgctgacggctatcgcctcgtttgccgcggtctcggcgctgttcgttctaccgacctacccaaccctgctggcggcggtagagatggacgacaccggctcaacccgcattggtaaatatgtctttaaccacgccttcctgatccccggcgttatcgctatcacgctgtgcgtgatccttggctttatctttggcgggattatgctgtaa

SEQ ID NO: 222194 - DNA, 858 bp, Klebsiella pneumoniae; identical to SEQ ID NO: 113278

SEQ ID NO: 222195 - DNA, 276 bp, Klebsiella pneumoniae; identical to SEQ ID NO: 19894

SEQ ID NO: 222196 - DNA, 624 bp, Klebsiella pneumoniae
atgctgatcggatatgcccgcgtctccaaagccgatggctcgcagtctctcgacctgcagcacgacgccttgcgcgccgcaggtgtcgaacgggacaatatctatgatgatcttgcttccggcggtcgtgatgatcgccctggcttgactgcctgcctcaagtcattgcgtgacggcgatgtgctggtggtctggaagctcgatcgcctcggacgatcgcttgcccatctggtcaacacggtgaaggagctgtcagaccgcaagatcggcctgcgggttctgactggaaagggcgctcagatcgacaccacgactgcgtccggtcgcatggtgttcggaatcttcgccaccttggccgagttcgagcgggatctgatccgagagcgcaccatggcgggtctcgcctccgcgagagcgcgcggtcgcaagggcggacgaaaattcgcgctcaccaaagctcaggtgcgtctcgcgcaagccgccatggcccagcgcgatacttcagtttccgatctctgcaaggaactcggcatcgagcgcgtcactctctaccgatatgtcggtcccaaaggcgagctcagagaccatggtggtcttgcctcggtttcgttccggtctttttga

SEQ ID NO: 222197 - DNA, 2886 bp, Klebsiella pneumoniae; identical to SEQ ID NO: 25667

SEQ ID NO: 222198 - DNA, 603 bp, Klebsiella pneumoniae
gtgcaaagcaaggatccacaaaatgtcattatcgctgacgttaccgaccgtatcgttgaccatagcgatgaaagcttcatcgacgcgctgaaggatttttatctggcgtgcagtgatgattattttttgaatgacaaggttggtgaatggatagatatcagcgataccgaggcggttaataaaaaaatacttgatgacattattaaccgacacccatggtcgaaggtctatgaggccaaacactctgtgtataaagctaacatcgctgacaaggaaaataaggcgtggaagagtcaactcaccgggttattgacttctgtattacagcctcatttcaaaccacatgaatttgccgttgatattgtctccgactgcgcctttaaagacctggataaaaccgaagttaagcttttggtgaaagatcttaagaaccgctacgaaataaaaccgttaattgaatgtggtgataagttaaatcagtatcaaatcatcaaatattgcattcgggtatttgttgaccgcgatatcaaagaacgcgtaactcctgaaataatctataaaatcaatgaaatagtggtcaagcagatcgcgttgctgaattga

SEQ ID NO: 222199 - DNA, 567 bp, Klebsiella pneumoniae
atgagcaagaaaatcctaatgctggtcggcgattatgccgaagattacgaaacgatggttccttttcaggcactgcagatgattggccaccaggtcgatgccgtctgcccggataaagccgctggcgactatgtcatgaccgcaatccatgactttgacggcgcccagacttatagcgaaaagccgggccatcgcttcacgctgaacgctgacttcgccgcagtaaaggccgagaactacgatgcgctagtgatccccggcggccgggcgccggagtatctgcgcctgaacgaggaggttattaaactggtacaggcattcgacgccgcgcgtaaacctatcgccgccgtctgccacggcccgcagctgctggccgccgccggtattctgcagggccgcacctgcagcgcctatcccgcctgcgccccggaagtgcgtttgagcggcgggcactatgcggatattggtatcgaccaggcgcatgtggacggtaacctggttaccgcccccgcctggccggctcatccacagtggctggcgaaattcgccgccctgctggcggaataa

SEQ ID NO: 222200 - DNA, 369 bp, Klebsiella pneumoniae
atgcataagcgcgaagacggttttgtggtggtcaacgaagaggtatgcattggctgccgctactgccatatggcctgcccgtacggcgccccgcagtacaatgccgacaaaggccatatgaccaagtgcgatggctgtcacgagcgcgtcgccgaggggaaaaagccgatctgcgtcgagtcctgcccgctgcgggcgttggatttcgggccaattgccgaactgcgcgctaagcacggccagctggccgcggtagcgccgctgccgtcggcgcactttacccggccgagtatcgttatcaaacctaacgccaatgcccggccgtgtggcgataccaccggttacctggcgaacccgaaggaggtgtga

SEQ ID NO: 222201 - DNA, 252 bp, Klebsiella pneumoniae
atggtcttaattgaaagtaaaaattttggtttaccagtaattgcgtttgattgtaaaaccggacctgcagaaataatatctaatgatggctacttagttgattattcaaacgattgtgaattcttaattaaattagaaaaactaatgtttaatcatgagttaagaaaagaactttctttaaatgctattaaaaattcaaaaaactactcttgtgaaaatatttatttacaatggctgtctgtattaaaatga

SEQ ID NO: 222202 - DNA, 1161 bp, Klebsiella pneumoniae
atgtccatcttccgcagaggtgaaatatggtacgcctcgtactcgctcccgggcgggaagcgaattaaggaatctcttgggacagcggacaagcggcaagctcaggagttgcacgataaaagaaaggccgaactctggcgagtagacaggctcggcgactttcctgaggtgacttttgaagaagcatgcctccgctggctggaagagaaagcagacaagaaatcgctcgataccgataaaggccggatgggattctggcttgagcatttcgaaggcgtgacgctaaaggatattaccgaggcaaagatttatgccgcggttagcaggatgcagaacaggaaagcaagggagacctggcagaaaagagttgaagcggcaaagaggaagggtaaggagatcccagtgtttgagccaaagcctgtcactacatcgacaaaggctaagcacctggcgctgatgaaagctatcctgcgcgcagcggagcgcgactggaaatggctggagaaagcgccagttatcaagataccgtcagtgagaaataagcgcgttcggtggcttgagcatgaagaggcgaaaaggctgattgatgaatgtccggagccgctgaagtcggtcgttaagtttgcgctggcgaccggcctcagaaggtcgaacatcatcaatctggaatggcagcaaatcgacatgcagcgtcgggttgcctgggttaaccctgaggacagcaaatcaaaccgcgctattggcgtagcgcttaatgatactgcctgtaaggttctgcgcgatcagatagggaaccatcataaatgggtgttcgtccatacgaaagcatggcatcgcccggatcgctcattaaccccatctgtaaggaagatgcgcgttgatgacaatcgggcgtggaactcggcatgcaaacgggcaggaattgaggatttccgtttccatgacctgagacacacctgggcaagctggttaattcagtctggcgttccgctttccgtacttcaggaaatgggtggttgggaaagcatcgaaatggtccgtcgatatgctcacctggcacctaaccatttaactgagcacgcacgtcaaattgactcgatttttgcagaagatgtcccaaatatgtcccacaaggaaaattcagtggctggaggaatttga

SEQ ID NO: 222203 - DNA, 486 bp, Klebsiella pneumoniae
atgaaattctccaaattcactgagttggtagcccgcatctggtcaaacacaactacgcagcgtcgcgacccggagattaccatcgtcgtccactcacctggcagcatcgggccgtcgccatccgtcgaggtcgaggctattcacgcaggcttcgactgggatgcgggacaggtgatgatctacccggctcaacctctgacggtgctaactcctgagcaggtagcggaaatcagcgagagcgttcgaaaaggccagagctggcacgcatacgaggcttacaagaagcacaaatcgcaactggaaaacgctgcgcttgagcatgcgaaagtcgccgggcagcgcgacgagctgctggcagcactcgaagaaatgaccgatatcgttagcaaacatacctacccacaaccagataaacctaactctacgtggggtcgattagaggctgccaaagaagttatttcccggacaaaaggcggtgaagtatga

SEQ ID NO: 222204 - DNA, 225 bp, Klebsiella pneumoniae
atgaagctgaaaatgtataccccatccgggtctgtaatcgtcgaaaccaacgacgtcgcgcagttttaccccgacgttgaaagcggcggagagctgaccacaatcgaactggtttcgccaacaggcgaccatgggaaggtggcagtaaaacatagcttccaccaggtgactagcgctcttgccacggcctggaaaatggatgaagacaaggcaggtgcagcatga

SEQ ID NO: 222205 - DNA, 771 bp, Klebsiella pneumoniae
atgagcaaaggaaccattatatgcctgtgcgatatcactggcgtcatggctgagccatgggtcgatgcaggttatcgcgccgtcctggtggacccgcagcaccctgaaacttcgatagacggtcctgttgagcgcatatcggcaaccatccttgaggcgatgccgcggctatctcagatcatctgctctgagaacgtcatcatcgtcatcggcttcccaccatgcacggacgtggctgtttccgggtcccgctggttcgagtccaagcgcgccaaagacccgcatttccaagccaaggcagcgctggtcgctgagcaatgccggatggttggcttggcggccggctgcccgtgggcattcgaaaacccggtgagcgtgttcagtagcatcttcggctcggcagattacacgttccatccgtaccagttcactgggctgtgcgcggatgacaactacacgaagcagacatgcctctggacgggtaacggcttcaaggcgccggcagagaatatgcacccgatggttgaagcggctatcgacgcagtgaagctggcctgcggccgcatggtgccgaagaaaaaggcgatcgaagccatatccggaacgtcctttgccggattggtggctgactggtatccggacaaccgaattcacgaatgtccgcccagcgacgagcgcgccaacattcgcagtgctactccccttggcttcgcaagggccgttttcctttcgaatgcgccccacctcaacaggaaacgggaggcagcatga

SEQ ID NO: 222206 - DNA, 657 bp, Klebsiella pneumoniae
atgaaccgctactcacttatctatgctgacccggcctggtcttacgggaacacgatcagcaacggtgccgccgtcgaccactaccccaccatgagcttgctcgatatgaaacggctcccggtgtgggagctctccgcggataacgccgtattggcgatgtggtacaccggcacccacaaccaggaggcgatcgagctggccgaggcctggggatttacggtgcgcacgatgaagggcttcacctgggtgaagttgaaccagctggccgaactgcgcattaccaaggctctggcagagggagatgtgaccgacttttacgacttcctcgacctgctgaatgcagagacgcgcatgaacggcggcaatcatacccgcgccaataccgaagacgtgctgatcgccacccgcggcgccggtctggaacgcaagcacgctggcattaagcaggtggtctacagccctctcggagcgcacagcgagaaaccgtgggaagttcgccaccgtctggagctgctctacggcgacgtgccgcggattgagctgttcagtcgcagcgcagcgaaaggctggagtcactggggcaaccagtgcgccgccgcttccgttgagctgatccccggctgcgccatcgacgttgtgaagacggaggcagcatga

SEQ ID NO: 222207 - DNA, 207 bp, Klebsiella pneumoniae
atggttagtcatcattacgggacacagaccgttaaccgcggcgccgttctgccagggatgctcgttaagcatcgggaaagcacctggaccgcatcagcaaataaacgcggccgcctgtacctgcatcgcgggattgagcggacctacacaaccgacttgctggttgaagtttatctgaacgggttgggacaaggtctcagccggtaa

SEQ ID NO: 222208 - DNA, 507 bp, Klebsiella pneumoniae
atgaaatctaaaatcatccactttgttcttatgcttgcttcctttttcattggttattttataatcaaaatatcattgagctttatagttgatggtgttgttattgcggcaccatgggctgtagtaggtttgatgcagctgccattgtcgtattgtatacaggcagtctttaaaacaaacgaagttaatgatcactcttcgctaacccgttctgagttgcgaaggcttttgcctcgggttaaatacaaaaggcgagtaatggtatcccttttagcattctatgttttctcgacgctatttgtagtattaggcctgatggttagtgctggaaatcaagaattattatacaaagtactgaaactatcaggtggattgctcttcgtatcgctctatacgagtcttttcgttcatagaatgatgatcgagcttcagagtttcaaggcccttctaaatagaagagattccgataaaaaagaaagagaatccttacttgataaactgaaataa

SEQ ID NO: 222209 - DNA, 1023 bp, Klebsiella pneumoniae
atgaaagatagcagaccgaaaatagttcattataaaaaagcagtcatcccaagcggggcgtcatcattgcaaagcattttacttggaatcataggggatggtggctccgctgaaaacgttttgcttcgtcaagaaaaaacctcaccctcagatgataattctggtataaggtttttaaataaaagcaatacatacaaaacaattctttttggacagctggttctttttgagaaggacaagagtcaatctctattagaaataagtgaaaatgtcagattttatgacattaactcaatcacttcgcatgatattattattaatggcgataacgcacaagataaaaaaagggagtttgttgactccattttatatttcggtgttttaaacaaccatgtgttaattgttcagtctacatccctacgttccagagaatttgagtctcatcttaactggcttataaatagctttactgatttagaggattttgtcttactcctgcaagataagccatcggaagcgacaatgcagaagatggaaaaatcaccagccaaaagcattagaattggcagtttgccaataacttctgaagtgaaaaatgatgacgcaccttccacaccaaaaaccacaggttcagttaaaacgataaagtacaggcctactggtaagggcggatcgttgcttaaggcttttttaggtgataactgggccgacgatatcaatttgaaggattccttagatgatgccaatctacaggtaagtcttgaaattacatatttcagaaaaacaaatgatggaggacaggccgttattgacagcatagcgacatcactgagacatatagatggggatgattacagcataaaacttcaaggcggaggggaaattactggtaaagaaattaaactttcaggaaatatcagtgtcgaatataacaatggcattatcgatgaaaatgatttattcttaaagatgcacaaatggttgttctccaagcttgaggctggagagctgaatgtaaagtaa

SEQ ID NO: 222210 - DNA, 603 bp, Klebsiella pneumoniae
atgaagttgacccctaaggccgtaagcaaatggttcaatggagagtcgattccaagacgcggaacgctgaaagcactggcgtctcacattggtacgtcagcgtcgtatctgctcggtgatgtcgatgaggacggaatcgatacagaggcaacccaaacccttaaggatgtctttcgcattgacctattggatataacggttagcgctggaccaggcattatcaatcaggagttcgtggagattctccactccgttgagtatgcgccagcggaagcccggcacatgttcgatgggcgtaaggctgagaacatccggatcatcaacgtccggggtgacagcatgtccggcacgattgagccgggtgatctgctgttcgtcgacatcagcgttaagagcttcgacggcgacgggatatacgccttcctgtacgacgacactgctcacgtcaagcgcctgcagaagatgaaggacaagctgttggtaatctcagataacaagagctatgcagcctgggacccgatcgaaaaagacgagatgaaccgggtgttcgtgttcggcaaggtgatcggcagcatgccgcagacgtacaggaagcatgggtaa

SEQ ID NO: 222211 - DNA, 222 bp, Klebsiella pneumoniae
atggagagttcaacgacacgcaacaaagtggaggctcgcaggatagaaagctggttacacagccagatagctgaactgggaaccacgaatatcgccaaagtggccggagtgaataagtcgacggtgagtcgctggcgggaaagcctgctgccgaacatgtcgctattgctggccatcctgatttctaacaggacgggagagaaaggtgactttgaagcatga

SEQ ID NO: 222212 - DNA, 645 bp, Klebsiella pneumoniae
atgagcaaccgtttttacatgctttgcacgcgagaaactgtggggagcaacgcctcgtttcattgccataacggaaacggatacagctccaatatcgaccgcgcgcacgtttatacgcaggaagaggcgcagagatgctgggactacgggagagagattgaccagccgatttgcgctgatgctgttgatgccctggctgtatggcatgtggattgccagtacatcccatgcgatagcgtggttgagcaaggttgcagcgcatacgttgcgtataaaaaaggtgactggaacgggaacgatgtttactggttacaaagcggagggttgccaaccgatgatttcagcaaggcattcgtttttgtatccgccaacacggatgagccaggcgttgtgtggctgcccttccatatggcagatgcagtaaagcgccgcacgttcaatatcaatgatttcaaccgccgaactatggttcaaggtgccggactggtgatgcctgaatggctaaaaaaatacaatcgcagacagaaggcaaaaagtggaaaggtacgctggaactgcccacattgtggccgcattacctggcaatacaacccatacgactttgatggatgcagcaattatagctgcgaaggatggcgagcatga

SEQ ID NO: 222213 - DNA, 216 bp, Klebsiella pneumoniae; identical to SEQ ID NO: 221648

SEQ ID NO: 222214 - DNA, 240 bp, Klebsiella pneumoniae
gtgagtaaggtcgaattgcttgagaagatatcggcgctcgctactgaatgccacgcgctggcctgtgagcttgatattggtgatgagcgaaccgaaatgttcgaaatctacggcgtgctgcacaacctcggtcgccgcggctacgccagtcaggtagggcggcgcatgaatccgctgcttgattcctgcgatgacgacgaggatgaggaagatgacgattgggatgaggatgacgactga

SEQ ID NO: 222215 - DNA, 240 bp, Klebsiella pneumoniae
atgaataatcaaaaatacatctgtattgctgcttcagtgatagtggcatgcatgtttgtcattgtcccgtcagataaaatggttagcggtcagtctcttgattttacatataaattcatttggaacttaggtgttcctgatggggatatatttccttatgtgccgaatgttggctttttgattgcccagataataggcgtccttgccattgtgtggttgttaagtaaggtaaaaagataa

SEQ ID NO: 222216 - DNA, 639 bp, Klebsiella pneumoniae
atgcgtaaacctgcacgtcgtaaatgcgcccactgccgcgaatggttccatcctgcccgggaagggcaggtggtatgcagttttgaatgcgccagcgcgatcggcaaaaaacagacagcaaaagcccgggaggcagcgaaggccagagcggtgaagcgccagcgcgaatccgagaaggaggggcgccaacgtcgccgagctaagcgtgagtcattcaagacaaaggcccagtgggataaagaggctcagtcagcctttaaccggtacattcgcattcgtgatgaaggtaagccctgcgtcagctgcggaaacccgcttatcggcaagagcaactacctgaccggcagcgctattgacgccagtcactaccgttcccgcggcgcagcgtctcacctgaaattcaacgtgttcaatgtccactccgcctgcacccgctgcaaccggcagttgagcggaaatgccgttgaataccgcattcacctgattgagcgcattggcctggctcgcgtagagcgccttgaggctgataacgagccgcgccggttcgatattccctacctgcagcgcatcaaatccatattcacccgaagagcccgcgcgctggagaagcgccgcgcccaccatcaggaggttgcatga

SEQ ID NO: 222217 - DNA, 201 bp, Klebsiella pneumoniae
atgaaattatttactccagttgaggcgagaagatttgttgccagtacttggtacgaaaatacggatctttcaaaaagagaaaagctttatgcgaaagcgcgtgagctgataagcggcgatcgtgcggagattatctgtcacacagataacccagagtaccgaaagtcagcacgagagtggtggaaatatgaccatggctga

SEQ ID NO: 222218 - DNA, 810 bp, Klebsiella pneumoniae
atgaacctcgaatctatcgccaaatacttcgcgcctaagtcaccaatgctgagcgactcgccacgggctactgcatcggatggtctaaccggcactgacatcatggccgctcttgggctggtaaatgccaagtgcggattcggcttcgacctctatctggcaaagattggggtaagcacacctgaccgagcaatggagctactttatgaatcagcagagcgattatcaatccgctttaacatcgtttcagaactcagccaggacgttcgcaaaagagttctcgaagttctgtgtgcttttgcataccaggattacacgcgaagtgctgccagcgttagaaaatgcacttgctgcgatgggactggcttcacagaggcccaggtgttcaccaataaatgctcatatccgtggggcaagccaccttattgggcaaagatgtcccgagcggttcgcccaagtcactgggagtgctggagcgaagtgcgcgaggtggtcaaggttaaatgctcagcctgtaacggaaagggtgctatcagcaattcgtgtcgctgcaatgggaaaggaaaggtactggataaagagaccagcgagcggcttgggctgccggtaatgaaggtgtgcgatcgctgcagcggaagaggctatgcgcgcatgaaattttcgacggtgctggaaggggtaagggccgtggcggacatcaagaaaacggtagcctatgagcagttgcaaccgttctttgaagagctggtatccgaatgccacaaacaggaatcatacgctgatgtcattctctccagggtaactaaataa

SEQ ID NO: 222219 - DNA, 588 bp, Klebsiella pneumoniae
atgcacgactcaacaagcgggttggtctttggagttggcaaactcgatgtacaccccgttatcaataaaggggtaagactcaggtcatacagagtatggtttgggatgctgaaaagatgctacggaaagggaacggcatttaaaagtgaataccaaggatgctcagtcgatgagcaatggcacaagttcagtaattttcagcaattttacgacaagaattacttcgaaggcgccgagttagacaaggatttgctttatctgggcaataaagtttactcaaaagataggtgcgtgttcatcccgtcattcctcaacgcctttatcactgttaggccgccaagaaacaacaaccttccgattggcgtataccaagttagcaacagccggaagtatcaatcagaaatacaagttaatggcgaaagaaaatatctaggactctttgaagatccgcatgaggctcactccgcttggtttaatgaaaagctgaagatggcaatttcctacaaagagttgtgcgattctctgcaccctgatttgtatggcggactcataacaaaaatagaaagcatgcgagtctatccggattaa

SEQ ID NO: 222220 - DNA, 531 bp, Klebsiella pneumoniae
atggctaacctgaaaacaaaactcagcgcggccatgctggcgcttatcgccgctggcgcatcagctcccgttctcatggatcagtttctgaatgagaaagagggcaatagcctcacgtcataccgcgatggcgccggcatatggacgatatgtcgtggagctacccgggtagatggaagacctgtaacccagggaatgaagttaacccaggccaaatgcgatcaggtgaatgccgtcgagcgcaataaggcgctggcatgggtagatcagaatgtgcgggttcatctgacgcctcctcagaaggtcggaattgccagtttctgcccctataacatcgggccaggtaaatgctttccttccactttctaccgcaagctgaatgccggtgaccggaaaggcgcctgcgctgaaattcgcaggtggatttttgatggcggaaaagattgccgcgtgcgttccaacaattgttacggccaggtttctcgccgtgatcaggaaagcgcactggcatgttgggggatagttgaatga

SEQ ID NO: 222221 - DNA, 324 bp, Klebsiella pneumoniae
atgcaaaagagcagatcgcactggacgcatcgggagcctcggctgatatccgggttgctgttgcgaatgatgattgcactaatcgccctgtgcctgctggcgcagttaagcggctgcagcaatacgcgaacggtttacgtcaaagttccggtggtaccgttaccggccagcctgacggctgacaccccgcaaccggaaatccccgacaacctgacgtggggccagagcctggatttaaacgtcagcctgctatcagcgctggggcagtgcaaccgtgataaggctgacatcaggcaagcagagaaaaaacgagcctcgcattag

SEQ ID NO: 222222 - DNA, 384 bp, Klebsiella pneumoniae
atgtttacagttaagaccatcattaacggcgtgacccacatctgcgaacaaccgagcgtgactattgcccgtgcggggtgtgagcgtttcgacgatattctcttgcagaccaatgaccactcaaaccctgattttgctatctggctgccagcggtctattcagacccgcagtgcaaagatgcgctgcaggaagaggaattaatcgtcagtgagcgcgagggggttctggatgaagatgctatcgccatcttggtagaagacttcgaaagccctgagcatgcaaagcgcaaggcattcgacggcgttcgctaccagttcatctaccccggcgaccaggtatatgtgatgaattcgcacggctcgacaatcgaaacggttaagtag

SEQ ID NO: 222223 - DNA, 924 bp, Klebsiella pneumoniae
atgaatattaagaaaacgattgttgcctctttgttagcctgcatgctgcctgcggtggttatggcaaaagatgtctccattggcgtctcgatggcgctgtttgacgataacttcctgacgatcctgcgtacctcgatgcaaaaagagatgaaaaaagatggcgttaaatcgcagatcgaagacgcgaaaggggatgtctcccagcagctgcagcaggtgcagaactttatcggccagggggtggacgccattatcgtcaacccggtggataccaacgcggtgaaaccgatcatggatcaggccaccaaagccgggatcccgctggtgtttgtgaaccgccgtccgcaggcggagctgaccgacaagatggcctatgtgggatctgactctattctcgccggccgtctgcagatggaagcgctggcgaaagcgatgaacggtaagggcaatgtggcgatcctgctcggcgacctggcgaatgaatccactcgcgaccgcaccaaaggggtggaagaggtggtagcgaaatacccgaacatcaaaatcgtccagaagcagaccgcgaaatttacccgcaatgacgcagtggatgtggtcagcaactggatgaccagcggtgaggatatccaggccatcgcctccaacaacgatgaaatggcgatcggcgccctgcaggcgctgggcaaaaacccgaaccatattctcatcgccggcgtggatggcaccccggacgcgctgcagatgctgaagagcggcaagatgatcgccaccatcttccaggatgcgaaaggccagggtgaaggcgcagtcgacgcggccatcaagctggcgaacggcgagaaagtggaaaaaatcatcgatgtgccgtatcagctgatcaccaaagagaacatggctgaatttaccaaccgtaatcagaaatag

SEQ ID NO: 222224 - DNA, 348 bp, Klebsiella pneumoniae
gtgatcaacggcaactaccaccccagctccggctatgagatgttcgcggcgctctgcgctcggctggggcgtccgccgaaggcgctcttcaccgcggcctgcgggctgctcgaaggggtgctgcgctatatgagccagcatcatctgctggattccaatattcatctcgccagcttcgacgatcactatctgtatgattcgctttccctgcgcattgataccgtgcagcaggataatcgccagctggcctggcactgctacgatctgctcagccagctgatcgacggtcaggccccggagccgcttcagcgctacctgcccgccaccctgcagattcgccatccctga

SEQ ID NO: 222225 - DNA, 924 bp, Klebsiella pneumoniae
atgaatggaaaaatctgggtactcggcgatgcggtcgtcgatctcctgcccgatggagagggccgcctgctgcaatgccccggcggcgcgccggccaacgtggcggtcggcgtggcgcggctcggcggtgacagcgggtttatcggccgcgtcggcgacgatcccttcggccgttttatgcgtcacaccctggcgcaggagcaagtggatgtgaactatatgcgcctcgatgcggcgcagcgcacctccacggtggtggtcgatctcgatagccacggggagcgcacctttacctttatggtccgtccgagcgccgacctgttccttcagcccgaggatctcccgccgtttgccgccggtcagtggctgcacgtctgctccatcgctctcagcgcggagccgagccgcagcacgacattcgcggcgatggaggcgataaagcgcgccgggggctatgtcagcttcgaccccaatatccgcagcgacctgtggcaggatccgcaggaccttcgcgactgtctcgaccgggcgctggccctcgccgacgccataaaactttcggaagaggagctggcgtttatcagcggcagcgacgatatcgtcagcggcatcgcccggctgaacgcccgcttccagccgacgctactgctggtgacccagggtaaagcgggggtccaggccgccctgcgcgggcaggttagccacttccctgcccgcccggtggtggccgtcgataccaccggcgccggcgatgcctttgtcgccgggctactcgccggcctagccgcccacggtatcccggacaacctcgcagccctggctcccgacctcgcgctggcgcaaacctgcggcgcgctggccaccaccgccaaaggcgccatgaccgccctgccctacagggacgatcttcagcgctcgctgtga

SEQ ID NO: 222226 - DNA, 465 bp, Klebsiella pneumoniae
atgtcgttaaattcaaaacttgaacatgaactcattctcctgaatgagcccccactgaacagaaatacactgttcaattatgtcagcaagttgttgctttcaaaaaactatgtagaaccgagctacccggaggcattgattgcccgagaagaaaatcacccaacagcaatgcaactggaaagaatgggtgttgccatccctcatgttgatgtcgagcatgtccgggaagaaaaactggtcgtagtcacttgtcctgaggggatcgtctttaatcaggctgaggacccggactgcaccatgaaagtgaatgtgatcttcttcttactgctcaaagaaaaagatgcacatcttgaatttttgatgaagctaatatcgctttttcagcgcagcaatgaaatggaccaaatcctttgggcaaaatcaaaagatgatgttatggagcttctggccaagagtctttattaa

SEQ ID NO: 222227 - DNA, 282 bp, Klebsiella pneumoniae
atgaacaaaaaaattatcttcgcctgtaccagcggtattgcgacttctgcagtagcaactgaaaaagtggttcagtactgcaaaggtcagggtattaatgttgagcccattcagtccaatatcggcacgattggtaaacaggatggcatggctgatttaattatcgtgacatccgcggttaagacggaactgaaaacaccggtcctgaatggccttcctttgctgaccggatttggcgaagaagaattactggaaaaaatcgtagccatcctgaaacaataa

SEQ ID NO: 222228 - DNA, 1395 bp, Klebsiella pneumoniae
atgatggataaagtattttccgccgtccagtatattctggggctcggaccgacgatcatgttgccgataattatatttatcatggcaatgtgtcttcagacaggtttcagccgggcattacgctcggcgctgaccatcggtatgggtttcatcggcatctttctggtctttggtttactggtcgacagcttggggccggctgccaaagaaatggtcagccacaccgggatcgatttaccggttgttgacctgggctggactccgctggcagccattgcctgggcctctcaggtcgcaccgtttgttgtaccgatgacgatcggtattaacgtactgatgctaaccctgaactggaccaagacggttgacatcgatgtctggaacttctggcatttctcgatggtcggcgccatggtttacggggtgacgggcaacttcttctttgggctgctaattgccggtgtcaccgcagcgattacctttgtgatggctgactggtgtgctccgatgatccagaagtacttcaacctgccggggatttcgctacccacactgtcatcggttattttcttcccgatcggtgtgctggggaatatggtgctcgataaaatcccgggcattaacaaactgaatgccgatccggatcagatccagaagcgctttggcgtctttggtgagccgatgatgctgggtgtgattctgggggcagggattggcttgctggcagaatatgatgtcaaaggtgtccttaacctggcgatgagcctcggtgcggtaatgctgattatgccccgcatggttaagttgctgatggaaggcctgctgccgctgtctgacgctgtgcgtagcttcctcaaaaaacgttatcctgaccgtcacgatctgtatatcggtctggatatcgcggttgctgtggggcatccgtcagtactgtcaactgcgctgttgcttatccccgtcggggtattgctggcggtggtactgccaggtaaccgtttgctgccactgggtgacctggcgaacatttgggtaccgatttccatggtggtactggcctgtcgaggcaatattgtcagggcgtttatcattggcattccatgcctggcggtaaacctgtatgtggcttcggctgctgcgccgatactgactaagattgcccgggatatgaatttcccagtgaaaacggacggtgaaatttccagcctgctggacggtggtaacccgtatcgtttctgggctgtcaaaatatttgaaggaaattccattgccctggtgcttattcccgttattttcctgctgtgtctgtggctatatcgtgtcactaaaaaacagctaaaagcagaagaggtggcagaaaatgaagcagcctcggctgatattcctttagcaaaataa

SEQ ID NO: 222229 - DNA, 1512 bp, Klebsiella pneumoniae
atgtatacgatcggaatcgatattggcacgaccaattgtaaggtgtgcttgttcgaaattccttctctggaattaattaatcagtatagtttcagaacgcccaaaattgtggacggagaagatacagattttgatgttcgccttatctgggacggggttctccatggtctcagaacgataacgaatattttggataatgcagggaagatcagcgcagtagcggtcgccagtgtgggggaagccggtgttttgctggatgataatgataatgtcattggcccggtactgacctggtatgacacccgtccgaaacagcagttggaaaacattatttcggctatggatattgagcatatatatgaaataaccggtatcccagcgcattcaaattacagtattaataaaattaaatggctgaaggataatatcagtaatgcaagtgaaggccgaaaatggttatgcctggcggaatacattgcctttaaattatccggtgtcaaacgttcggaatattctctggcatcacggacgatggcattaaacatcgctgagttgaactgggatgaacagctgattaatgctgcagaactttccccttctttattcagtccgttggtccaggcgggcgaggctataggcaccgtcacgtctggtgtttccgaactgaccgggctgacaacgaatacccgtgtcgcaatcgccgggcatgatcatatgtgcggttctgtggccgtcggattgaccagcgaagatcagatcctgaattctacaggaacgacagagggattactggtggtgaccgaagcggtcaacaacaccgggcggttcttccgtgctcgggtgtcaaatggcgtacatgtgcttccggggcttcattccctctatgcgtcattgccgtctgccgggtatgccattgaatggttcagaaatctctttgagctcgatatgcccgccttcctgaggatggtggatacactgcgtaacgagcaggacatggctatggctggcgcgcttgatggtgtcttcattccccatttgcggggcagcggtccgccggacagaaacacctggtcccgcgcattaatttacggccttgatgataagtccagaccagaagatatcctgcgttttgtgttccaggggttgtgctttgaactgcgaaacttgctggatttatacgaaacgctgactgggaaagattatccggttgtgaatgtgattggggctgcctgtaaaaacccgtactggttgcagcttaaggccaacattcttaaccgggaaattttggcctgcaatgtcaatgaggcagtgagcaaaggggccgccatgcttgcagcgaaagccgcaggtgtggaggtagagtgtttgcctggcactaatggagaacagacctgtcgctacctgccggaaattgatgctgtggcgcactatcaggcaatttacactcaggtctataagccgctttatgaatccaagatgcgtactgagcgtctctgtaatggagttaactaa

SEQ ID NO: 222230 - DNA, 1035 bp, Klebsiella pneumoniae
atgaaagccagcgtttactacagtaaaaatgatatccggtatgaagatgttgaagtgccagaaattggcgacggcgacatgctcatcaaaatgcactcctgtggcctgtgcggtaccgacattcataaagctcagcaccagacagtgaccggcccggtgatcctcggtcatgaagtgtcgggggaagtggtgaaaatcggcaaggatgtcacccgctaccgggtgggtgaacgggtggtgaccgctattcatgttccctgctttaactgccattactgtgaccgggggttcttcaccctatgcgaccagttcaagaaaacgaatctggaacccggcgggttcagtgagtttattcgtatcccacgcctgcatgttgagcacctgacgcaccgaattatcgatagtcttgactgggatcgggcggcaatgattgagcctgtcgcctgctgcctgcatggcctgaaatcgtccaatatccatccgaaagatacggtgctggtactgggctgcgggaccattgggctggtcagcgctcagttggcggccctgaaaggtgcctcgaccgtaattgtttccgatttttcccggttcaagcgtgaactggcgctgaaggtgggggtcacccatgcgatcgacccggcaaacgaagatgtcgaaacccgggtggcagaaatcacccaagggaaaggcccggatgtggtgatcatcgccgccggggtttcgtccctggtttctcaggccgtcaatgttgtacgccgtggggggagaattgttgtgttctcaccatttgataaaaatccggtcgtagaaattgatgccggcaggctgttccgtgatgaaatttccatcgtgggcacctattcattgacgccttatgaaatgaaagaagcgattgagattgtggaaaaagacaaaatcaatacgaaggacatgatcactcatacctggccgctgtcccgtattcctgaagcgattgagtttgcttccaatccggataatgacgttctgaaagtcattattaaagctgacgcatga

SEQ ID NO: 222231 - DNA, 744 bp, Klebsiella pneumoniae
atgagtaccatactgcaagactctgaaattccattatatatgcaggtttctgagtgggttcgcggaaaaatttataaaggtgaactggggaaaggggaccgaatcccgtctgaaaatcagatcatggaaatacttcaggtcagtcggggcacggtaaagaaaggtgtcaccatgctggtcaatgaggggttgctggttcaggttcagggaaaggggacctttgtgaaaaaagagaatatctcttactcactgggggaaggattgctttctttcgcagagtcgcttgaaagtcagcacttatcttttacaaccgaggtaattgattcatatatcgagaaggcctcaaaaggagtggcggaaaagttgcagatagaacctggtacacccatttttttccttaaacggatccgtagtgtggatggggaaagggtcatgttaattgaaaatagaatcaatatggcgctgtgtccgggaataaccgaggttgattttaataagcataacctgttccagaccgtcgaaaccatgacgggaagaacaattgaatactctgaaagtcgctatgccgcgaaaattgtaggtagtgaacggggacactatctggaagtaaatgaagaagcaccggtgcttcatctggaacaactggttttcctcgataatcatatgccatttgattttggcaatgtctggctgaaatcagataaatattatttgggtacagtacttcaacgaagaaagaggtaa

SEQ ID NO: 222232 - DNA, 840 bp, Klebsiella pneumoniae
atgccattagtaaacggtaatatcctgctcgatcgtatccgtgaaaaacgtgtcctggcgggtgccttcaacaccactaacctggaaaccactatttcgattctggacgcgattgagcgttcaggattgcctaactttattcagatagcaccgacaaacgcaaaactgtcgggttatgactatatctatgaaatcgtgcgtaaacgcgctgcgaccatggatgtgccggtcagtctccatcttgatcatggtaaagagctggatgatgttaagcgagctgttcgcgcaggcttcacctcagtgatgattgacggtgcagagttgccgtatgaagaaaatattgcgtttactaaagaagctgtagatttctgtaaatcgtttggcgtacctgtagaagcggaacttggcgcgattctgggtaaagaagatgaccacgtcagtgaggctgactgtaagacggatgtcaatcaggtgcgtcgttttgtgcaagagactggatgtagcatgctggcggtttccgtcggcaacgttcacggtctggaagatattccgcgtattgatattccgttgctacaggagattgccaaagtatgcccatgcccgctggttatccatggtggttccggcattgatgaagatatcatccgtagttttgtaaaatataatgtcgtaaaggtaaatattgccagcgacctgcgtaaggcatttattactactgttgggcaagcatggacgaaaaataacaacgaagcgaacctggcaaaagtaatgtcgggagcgaaagatgccgtagaagcggatgtttacagcaaaattctgatgatgaaccgtgcctcctga

SEQ ID NO: 222233 - DNA, 273 bp, Klebsiella pneumoniae
atgattagagaaaatattcgtgttgttaacagcacgggtctgcacgcacgtccggcagccacctttgtcaaaacactgaagaaatatgagtcttcagtaaccttggtgaataacggcaaggaaacggtgatcaaagggctcatgagtgtgttaggcgccggcattaaaggtaagtccagtattgaaatcatctgtgagggacctgatgaacaggttctgatggatgaaattaaagggttatttgccagcggctttggcgagaaagaagaataa

SEQ ID NO: 222234 - DNA, 195 bp, Klebsiella pneumoniae
atgctgtggctcaaaaatggttacaacggagcctacttgtcaatgatgacggtattgactcaccgggaattaaattactttaaggtgtggcacaatagctcaccgatgaagtctggggcgtggcgcacacaactaataaaatttgtgggaactttttttcacatgtttttatttaaccctgaaaccattgagtga

SEQ ID NO: 222235 - DNA, 1056 bp, Klebsiella pneumoniae
atgaaggcattgaatctgtatggagtacaggatgtccgtcttgaagatgtgcggaaacctgagattgaaaatgcaaatgatgttctaattaaaatacatacggcaggtatatgtgggtctgatatatcacgatttggtaaaattggatcatataaccccggtctgacatgggggcatgagttttccggaaccgtggatagtgtcgggagtggggtgacatcagttaggaaaggcgaccgcgtcacagcttgtaactgttttccctgcttccactgtgattattgtcaacagggcaattatgcccggtgtacggatatgaaggtgctgggaggccaggtcaatggtgcttttgcagaatacattcggatgccagcggaaaatgtcctaaaattacctgactcgatggacttcgctaccgcaagctttattgagccttccagtgtggttgtccatggcatgcggcaggtcgatataaaacctggaagcagtgtggctattgtcgggtgcggtactatcggcttactggctgttcaatgggcaaaaaactgtggtgcgggagacgtattcgcatttgacactgacgaaatgaaactcgccttggcggcgaaaacaggggcaacagaaacattctgcgtcaaagataagaaccatttttcccgattccaggagattacccataacgctggtgttgatgtcgtttttgaatcatctggaaatgtgaccgggatcggctcatcccttcttctggcggccaaaggtggcacggtggtgctgctgggcatcccttacggagacgttgctttaccccggctgaattttgaaaaaattgtgcgcaatgagttgaaggtcattggttcatggaactcaatctctgctccgtttccaggaaaagagtggcagacatccattcattacctcagtaccgggcagattgatgtttccccattaatgactaaacgggtgttactgaaagatgttccatcggttttgccggggctttataaacgggatgaatttttcgttaaggtcctgattgacgtcgaagcgttatcctaa

SEQ ID NO: 222236 - DNA, 342 bp, Klebsiella pneumoniae
atgtatgggttttatatgaaaccgttgcatgaacttattattctgaatcatttttattactgctttcttttggcgattaaactcagaaaatgcaatcttcccttagtggatggtatcaactcaaaagtctttatgaaacagtggcttttcactgcgcagaataacagactgtttgatagacttatctatgatgagattcagtggctgcttgacagcctgtcggatcggaaaacgacctctcagcagttcgagtataatattgagatcatttatcatcgttctttggagatgattaaagagaatgagagcttagtgccgcgtgtcgatttcattaacttttaa

SEQ ID NO: 222237 - DNA, 1062 bp, Klebsiella pneumoniae
atgcgaccaacaatgatgacatatatcagtgaagagcctgcctgcctggcgcagatcctgcgcgagtaccggcaaaagctggcgccgattgaaaccttcgcccgccagcacccggtacggcggatattattgctcgcgaccggatcgtcgctgaatgccgcgctgtgcgcgcgctatttctttgagcaacgcttcggtgtgctgcttgacattaaagagccgtacaacttcacccattacgacgcgatcgacccgcatgccgatctggtggtggcgatttcacagagcggaaaaagcgcgtcgacgctggaggcgatgcgtaaggtacaggcttccggcaagtcggttttcgccctgacctcagatccgcaaagcccgataggaggcgccagcgatggcgttctggatattaataccgggatcgagagcgtagggtttgtgacccgcggctttagcgcgacggtgctcaacctgttgctgatagcgctgatcattgctcgtaagcaggagaaagccagcgaggtcgaggagcagcactatctcgctgaattgcagcggctggtagcggcgatcccggaggttatcgtccgcacctcgcgctttattgaccgccatagcgaaacgctgcgcagcggcgagcgctttgtcgccaccggctacggcgcgctggttggcgtggcgaaggagttcgaaaccaaatttaccgagacggtgcgcgtgccttccagcggctttgagctggaagcctatatgcatggcccctatctggaagccaatgcccgccatgtgatgctgtttattgaagatacgccggacgcgcgaacccgggcgctgcgcgactatctggcgccgtccattggccgggcctttaccctgatgctgggtgacgaagaggatgctcaaacgctggcgctaaactgtccgtgcgagcatcacctggcgcctctgctgctgattgtcccagtgcagatgctcgcctggcataccgcaggactgaaaggcatcgatctggctaaacgtattttcgacgattttgaccgcgtcttaaaaagtaaaatctga

SEQ ID NO: 222238 - DNA, 1866 bp, Klebsiella pneumoniae
atggatagccatacgctgatacaggcgttgatttacctcggcgccgcggcgctgattgtgcccatcgccgtccgtctggggctggggtcagtgctgggctatctcatcgccggctgtattatcggcccgtgggcgctgcggctggtgaccgatgccgaggcgattctgcactttgccgagattggcgtggtgctgatgttgttcgtcattggtctggagctcgatccgcagcgcttatggaagctgcgcgcctcggtgtttggcggcggcgcactgcagatggtggcgtgcggggtgttgatcggcctgttctgcatgctgctgggcctgcgctggcaggtggccgagctgattggtatgactctggcgctttcctcaaccgcgatcgctatgcaggcgatgaatgagcgcaatctgacggtgtcgcagatggggcgcagcgcctttgcggtgctgctgttccaggatatcgccgcgatcccgctggtggcgatgatcccgctgctggcggccagcggcggcgccacttcgctgatggcttttgccctctccgcgctgaaagtggccgcagcgctggcgctggtggtggtccttgggcgctatctgacccgcccgctgctgcgctttgtcgcccgttccggcctgcgcgaagtgttcagcgccgtggccctgttcctggtcttcggctttggcttattgctggaagaggtggggctgtcgatggcgatgggggcgtttctcgccggggtgctgctggccagctccgaatatcgtcatgcgctggagagtgatattgagccgtttaaaggactgctgttggggctgttctttatcggcgtcggcatgtcgattgatttcggcaccctggtcacccatccgctgcgtattgtgattttgctggtcggtttcctggcgataaaaatgctgatgctgtggcttatcgccaggccgcttggcgtaccgcgcgcccagcgccgctggtttgcggtgctgctggggcaggggagtgagttcgcgtttgtggtgtttggcgccgcgcggatggcggatgtactggacggcgaatggacaaaagcgttgaccctggcggtggccctgtcgatggcggcaacccccattctgctggtgctgctgacccgtctggagaaatcgtccagcggccaggcgcgtgatgctgacgagattgatgaagagcagccgcgggtgattgtcgccggctttggccgcttcgggcagattgccgggcgattgctgctctcgagcggggtgaagatggtgatcctcgatcatgacccggaccatgtcgataccctgcgcaaatttgatatgaaggttttctacggcgatgccacccgggtcgatctgctggagtcggccggggccgaaaaggcggaagtgctgatcaatgccattgacgatccgcacgtcagcctggagctggtggcgagggtaaaagagcattttccgcatctgcagatcatctcccgcgcccgcgatgtcgatcattacattcagctgcgccaggctggcgtcgaggccccggagcgtgaaaccttcgaggcggcgctgaagtccggccgaatgacgctggaggcgctggggctcggcgcctatgaagcgcgcgagcgggccgatctgttccgtcgattcaacctgcagatggtcgaagagatggtggcgatggcggaaaacgatgccgcgtcgcgggtggcggtcttcaagcggaccagcgatatgctgaccggcatcatcaacgaagatcgtcatcatctgtcgctggtgcagcgtcatggctggcagggtacggaagagggcaggcacaccggggatatcgccgatgagccggaaaataagccctcagcctga

SEQ ID NO: 222239 - DNA, 543 bp, Klebsiella pneumoniae
atgtttcccgtcgcgggcttcgtcttctttctgaagcgctccccggggcgacaaatagcacttaaacgtaggtcgggtaaggcgttagccgtcacccgacacaaaattggctccgcgcccgcagttcttgcccggcggcgctgcgcttgcgcgggcctacgggactgcgtcgtgtttcccatcgcgggcttcgtcttctttctgaagcgctccccggggcgacaaatagcacttaaacgtaggtcgggtaaggcgttagccgtcacccgacacaaaagtggctccgcgcccgcagttcttgcccggcggcgctgcgcttgcgcgggcctacgggactgcgtcatgtttcccgtcgcgggcttcgtcttcctggagcgctgcccaaggctacaaatggcaaggaaatgtaggtcgggtaaggcgttagccgccacccgacaaaacgacgcagcaggtagcccggataaggcgcaacgcgccgctatccgggaagagtcaggacgcgacggcttcgccttcgtcgaggcttttctgccggtttga

SEQ ID NO: 222240 - DNA, 1287 bp, Klebsiella pneumoniae
atgaagaactggaaaacgctgcttctcggtatcgccatgatcgcgaataccagtttcgctgccccccaggtggtcgataaagtagcggccgtcgtcaataatggcgtcgtgctggaaagcgacgtcgatggtttgatgcaatcggttaagctcaatgctggtcaggctggccaacagctgccggatgacgccaccctgcgccatcaaatcctcgaaagactgatcatggaccagatcgtgttacagatggggcagaagatgggcgtgaagatctctgacgaccagctcgatcaggctatcgccaacatcgccaaacaaaataatatgaccttggatcagatgcgcagccgtctggcctatgaaggcatcaactacaacacctaccgtaaccagatccgtaaagagatgctgatttcggaagtgcgtaacaatgaagtgcgtcgtcgcatcaccgtgctgccgcaggaagtggaagcgctggcgaaacagatcggcgaccagaacgacgccagcaccgagctcaacctgagccacatcctgatcccgctgccggagaacccgacctctgatgaagtcgccgcggcccaggagcaagcaaactccatcgttgagcaggcgcgcaacggcgccaacttcggcaaactggcgatcacctactccgctgaccaacaggcgctgaagggtggccagatgggctggggccgtatccaggagctcccgggcattttcgctcaggcgttaagcacggcgaagaaaggggatatcgtcggtccgattcgttccggcgttggtttccacattctgaaagtcaacgacctgcgcggtggtacccagaatatctccgttaccgaggttcacgcccgtcatattctgctgaaaccgtcgccgatcatgaacgacgcccaggctcaggctaagctggaacagatcgcagccgagattaagagcgggaaaatcacgtttgctcaagcggcgaaaacctattcggaagatccgggctcggcaaaccagggcggtgatttaggctgggccacgccggacatctttgacccggcgttccgtgatgcgctgatgcgtctgaacaaagggcagaccagcggaccggtgcactcttcctttggctggcacctgatcgaactgctggatagccgtcaggtcgacagaaccgacgccgcacagaaagatcgtgcttaccgcatgctgatgaaccgcaaattctctgaagaagcggcaacctggatgcaggaacagcgcgccagtgcgtatgttaaaattctgagcaactaa

SEQ ID NO: 222241 - DNA, 657 bp, Klebsiella pneumoniae
atggacattaaataccattcagaggcggaaaaaaagttctctgagcacttattatctttaggatacaccaaagattcaatattatacgaaccagcattttttgccaatgatggcagtaggacatacagaccagactttgcaattatagatccagaaaagaaagaatatcttgccattattgaaataaaggcagacaggcttataaataacgaagaagttcttaatcaattaaaaaaatacagacatgcaattggcaataaaaaaatcccactattcttggtggctgtatcatccattccaaataatccattgccatttgcactttactcattgagtgaggcaggtgatttagttaaatctgacttcaatcttttcccaactttccgagcccttactgcggaagaatcggcggttaggaaaaatgatatccggcagaaaaaaactgaaactatggatacttttcaacgagtttcctggtttcttgctgcagtcttatttctaattgtgattgctgatattaaatttcattttttgacgactgagagaatggccttattaggagctagtgttgcactcatagtcattccatttgcacaaaagtttaaaggactaggcattgaatgggagaaagctaagaacgctaatcgtgacgaatag

SEQ ID NO: 222242 - DNA, 1032 bp, Klebsiella pneumoniae
atgattggttttcgcaatggcgtactcgataccctcaccggcgtattcagcccacacagcaaatcacactggctgcgtacgctgtgcgacgtggactttacccctccggtggagggcgaaacgctggaaacccacgcgccaaacttctggcgctggctcgaccgtgggaccagcggcaacgctgacaagcgtgatgtaatactcgccgcgctgtttatggtactggcgaaccgctacgactggcagctctttcttgatgtgaccggaaccggcgggagcggaaaaagtattctggctgaaattgcgaccctgctcgccggggaagacaacgccacgtctgcgaccatcgagacgctggagtcaccacgcgaacgcgcggcgctgattggcttcccactgatacgcctgcctgaccaggataaatggagcggggacggcgcggggctcaaagccatcaccggcggtgatgctgtgtcggttgacccgaaataccgcgacgcctattcggcctatatcccggcggtaattctggccgtgaacaataacccgatgcgcttcaccaaccgcagcggaggcgtatcccgtcgccgggtgataatccacttcccggagcaaatcgccccggaggaacgcgatccgcagctcagggacaaaatcgcacgcgagctggccgtgattgtgcgccagctgatgcagcgcttccgtgacccgatgaccgcccgcacgctgctccagtcacagcagaactcagacgaggcactgagcatcaagcgcgatgccgatccgacgtttgatttttgcggctaccttgaggagctgcccgaacctgacgggatgtatatggggaatgcgaatattgtcccgcgacagccgcgcctgtatctgtaccacgcctatctggtctatatggaggcgcacggctacaagaatacgctcagtctcaccatgttcggcaaaggactgtcatcgatgctgaaaagagtacggcctgaattacggcaagcggcgaacgaatcagaggatgcagactaa

SEQ ID NO: 222243 - DNA, 1062 bp, Klebsiella pneumoniae
atgcgtaataaagaatacccccacggtttggtcatagccgttcatccatatccgagatatataaatagtgattggattctgcatgagtacatcagcgaatataaggagccctttaaatggaaaagaaggaaagagatacttgaacagtttgattatggattggtgtttaatacttatgaagaagcattgaatgctgccgaggtaataaataatttcataaaggaaaaagttagtgagcttgaaattagtcaagaggtcaaagattcgtattttttaaaggcagaaaaagcaataatttctaggcaaaggcttcaaaatgaagaatatttaatgctttctgaagctttaaatattacttcgtcactgtcaaggcccaaagaagatgaagtgattttaaaattaaatgcttatcaacgcgctagtatatctatcaaagatgaactgctacaagagattaatattaacccgctgattgaaattgctcatttgaaagaaaatagaatggttataggaaaacatgcaaacggagattggggtaggtatctctattacaatgacctgaccactaaagttgcatttagagagaagatatcaagagcgtttggattttcaggtcgagatcactggggcagagtaaagtcagaaattagaatacggttattaccacgtgcaaatgaactattacagctttccagtgtaaaaaggatgcttgcagatgctcatgcaaagggtcataaggtattaatggcgggtgggtatgtattttggtatgaagaaactggcgatgttggatggattgttaaagcgactaatagtagtgattcacttaaaagcggtgaaagtatctggcacgaaggaactattatatcgaaaaatcatgggagaatcgttgttttcccatatataaaagtgaatggtgaaaaagtccaagggcatacgaaaaatgctcctcatgacggaaaggctaagccacgacatccaagtgaatatgttgaattaccattccttgtacttgaagacgatttgatggttggtctttttggtgagcttaaatatgagtga

SEQ ID NO: 222244 - DNA, 1959 bp, Klebsiella pneumoniae
atgcaacctgtaactttagatggaatgatcgcagcatcacttccttgggctaaagaagtcatcaagaataaaataatcccaataatttcatcacgagttaaagattatttagatgatgttagagccgcgagatttctaaatgacagcatggaaaaattcctttctcgtgtcggaggacaatgttctttagtaaacacattagctttccaaaacacccccatcgaactaaaaaaaatatatgaaccaatttctgtataccatgacaacgagcaatcaaactatgagtgtttaattaataacaagattgacatcttaaattcttataaccatatattaataactgactccgcaggtatggggaagtcaactttaatgaagcgaattgcattatattgcatagaagaaacgaatcaaataccaatttatctggagcttcgtcgcatacaagattatagcattgctgaacaagtaaagaatcaactaggtttaggtaaaaacatttccaatgcatgccttaaagaaattccctttatttacttattcgatggcattgatgaaatacctcaagggattaaatcctccgtagtcaactctttgcgtgagtttgcagatgatttttcagaaagcaaaataattataacttccagacatgatagcttcctctctgagttgtatggattctcaaggttcaaaataaaaccgttagattcttatcaagcgtatgatttacttagacgttacgataacaccggaaatatttcgtcaaagttaatcaaaggtcttcgtttagaagaaggaagaaacttcgatgattttctttcaactccattatatgtttctttattattttgcgcatataaattcaaaccaataattccacgtaagaaagaattgttttacagccaggtatttgatgctttatttgaatctcatgacctaacaaaagagcttggttacgtcagggaaaaacattctaagcttgattcaactgacttccatcagattctgcgaagattaggattttggtgtttaaaggaaggtggaaggattgagttcactaaagatgatcttcaaataatcattaaagaaattgcatctaaaataccagggttgactatatctacatcattattcataaaagatcttatcgaaaccgtacctttatttgtcaaggaaggagcaataattcgctggtcacataagtcacttatggaatatttcgcagccatgtttatatgtagggacactaaagaaagacagcgaggaatattaagaacgctttataaaaacgatgagtctataagacataaaaacctttttgaattatgtgcggatattgattactcgaccttccgttcgagtgttataaagaaccttttagaagattatgtccacttatatgaaaaaatcagccaacgatcgataacaagcaccccaaaagaagtcatttctaaagttgaacttctctttccaggtcgctcactaatttatatcttctctaagggagaagaaaacaaaaccctttccaaactaataaatggagacttcagggagtttaaagagcttaatacaaaagatggctacttaaacactacatttgcagatataggtaatgcatgggtagtaattgcacgtaatgaaacaataatctctcatgtattaagcatactaaaagtaaaaaatccagaatatttccatagtaatcatagattaacaagtgatgatacgaatcttacattagaggttcgtcgtgctataagacatgatgatgaagtaaagattgacgtaaattttgaaaacatcctaaactgcgatggaaaaacaaatcttaacttaatttcaggaattttgacttttgataaaacaccccaattaaaatatagaaaagctcttgccgaacttgacaaaataaactttgatgacagcaatggaataaatcaacttttggaaggattctaa

SEQ ID NO: 222245 - DNA, 1356 bp, Klebsiella pneumoniae
atgacacaaatactgggaaccggagagggaaaaacatcatcagccgcaaaagagccggttgttgagcgtaaacccgcacaggtattttttgaatcaatggcgctggctgcctcaatgagtggttattatgcagggccaacagccacaacgctgggaaattcgctttcattgggggcggggactgcggcaggtgtcggagaaggcgtcgcgggcgcacgggtgctggctgcgcctaatcccctcaccgttgctctgctggctatcttctattctccgtcactgaatgaaggtgagacggaaacgctacaaaatatacgtggcgaccagctctatcagaatctgatccatggccagatgatggtgggcgcttttacccgtgtaaattcaacggtcattgagggggattatgtcccggaatatgaactccgggaaatagcccgacaaaacggcacagtgcgcacgagggtacgctttcgtattgaagaagatcctgagtcaggggaactggtttcccgcagctatgaggtgggggaaaaaagcgggttggatcgggtccgggtgcggtttgcaaaacagctggataaagagacatggggttttgaagatccttcaattaaaggcacatttgtctggtcccggtctgccgggcagggaaaatttgagtggggttccagccagacgactgttcatgacgggagcgctggcggctctaccacaccgcctacacccattccggaaccgcggagcatctgggggttgcctaacccggccccggaatcgttaccgcccgtaccgggaacgccgatcccggaggaacaggaaccaaatattgaaacattgcccatcgaagaccgggatttcgatgactttattattgttgacccgatgggggttgtcccggcaatctatgtgtattttaagaaagcccctgtggaagagtatgaggttgactattatgaaaattttgaaggccgttcaaggcagggaaaatatcaagtcgatcatattccatctagagatgcggttcgtgtatatttagaggatttatatcctgatgagggaagtaaatatatagataagatggttgataaggttgcttcagttgctattccaatagctgttcatcaaaaatgtagtgaaacctatggcgggcgtaataatcgtaaggtagagacagaaagcggcgagatgataactaaaaaagagctagatgctcgtgacttagaagctgccgtcaatgccaactgggatgcgaatgctgaatgccttaagaatgaatatggtatgagtaacgagaaaatcgaagagatcagagcaaaactacataagttaaaccgaaatgtggggttatattaa

SEQ ID NO: 222246 - DNA, 654 bp, Klebsiella pneumoniae
atgaacgccgtaactgaacaacgaaaagtcctgctcgaaattgccgacctgaaggtgcacttcgatatcaaagatggcaagcagtggttctggcagccgtcgaaaacgctgaaagcggtggatggcgtgacgctgcgcctatacgagggggaaaccctcggtgtggtaggggagtcgggctgcggcaaatcgaccttcgcccgcgccattattggtctggtgaaagcgaccgatggcaaagtggcctggctgggtaaagatctgctgggcatgaagcaggaagagtggcgcgacgtgcgcagcgatatccagatgatcttccaggatccgctggcctcgctgaacccgcgcatgaccatcggagaaattatcgccgaaccgctgcgtacctatcatccgaagatgccccgtcaggaagtgcgcgatcgcgtcaaagcgctgatgtcggcggtgccgatccccgatcctgatctcgagaaaacgaaaactatccaactgctggaaggcgaattaccctcgccgattaatccgccctcaggctgcgtattccgcacccgctgtccgcttgccggaccggagtgcgccaaaacccgcccggtgctggaaggcagtttccgccatgcggtttcctgccttaaggtagacccgttataa

SEQ ID NO: 222247 - DNA, 1767 bp, Klebsiella pneumoniae
atgaccgttgccattaccgatgtcgtcctgcgcgacgcccaccagtccctgttcgccacccgtctgcgtctcgacgatatgctgcccgttgccgctcagctggacgacgtcggctaccgctcgctggagtgctggggcggcgccacctttgacgcctgcatccgcttcctcggcgaggacccgtgggtccgcctgcgcgagctgaaaaaggcgatgccgaagaccccgctgcagatgctgctccgcggccagaacctgctcggctaccgccactacgccgacgacgtggtggagcgcttcgtggagcgcgccgtcaaaaacggcatggacgtcttccgcgtcttcgacgccatgaacgacccgcgcaacatgcaggccgccctgcaggcggtccgccgccacggcgcccacgcccagggtacgctttcgtacaccaccagcccggcccacaccctgcagacctggctcgacctcaccgaacagctgctggagaccggcgttgactccgtcgccatcaaggacatgtccggcattctgacgccgcatgccgcctttgagctggtcagcgaaatcaagaagcgctatgacgtcaccctgcacctgcactgccacgccaccaccgggatggcggagatggcgctgctgaaggccattgaagccggggtcgacggcgtggatacggcgatttcgtccatgagcgccacctatggccacccggccaccgaagcgctggtggccaccctcgccggcacgccgtacgacaccggcctcgatatccacaggctggagagcatcgccgcctacttccgcgaggtgcgcaaaaaataccacgccttcgaaggccagctgaagggcaccgacagccgtatcctcgtcgcccaggtgccgggcgggatgctcaccaaccttgaaggccagctgaagcagcagagcgccgcccaccgtctggatgaagtactggcggaaatcccccgcgtgcgcgaggacctcggcttcatcccgctggtcaccccgacctcgcagattgtcggcacccaggcggtgctcaacgtgctgggcggcgagcgctacaaaaccatcgcgaaggagaccgccggtatcctgaaaggcgagtacggccgcaccccggccccggtgaacgccgccctgcaggcgcgggtgctcgacggcgccgacccggtgacctgccgcccggcggatttactcaagccggagctggccgcgctggaagccgacgtcagacgccaggcgcaggagaagggcatcacgcttgccgaaaacgccatcgacgacgtgctcaccgtggcgctgttcccgcagcccggcctgaagttcctcgaaaaccgccacaacccggcggcctttgagccggtaccgcaggcggaagccgcacagccagtggcaaaagcagaaaaacctgccgcctccggcgtctacaccgtggaggtggaaggcaaagcctttgtggtcaaagtcagcgacggcggtgacgtcagccagctgacggcggctgctcctgcctctgcacccgccgctgccgccccggccggcgccggcaccccggtgaccgccccgctggcgggcactatctggaaggtgctggccagcgaaggccagacggtggccgcaggcgaggtgctgctgattctggaagccatgaagatggaaaccgaaatccgcgccgcgcaggccgggaccgtgcgcggtatcgcggtgaaagccggcgacgcggtggcggtcggcgacaccctgatgaccctggcgtaa

SEQ ID NO: 222248 - DNA, 717 bp, Klebsiella pneumoniae
atgcagtgcggcggcagcgacgccttttcaggcgtgaccgccaacccggcggtaggttacgcgtccgacctgctggtgcgctgcggcgcgacggtgatgttctcggaagtgaccgaagtacgcgacgccattcatctgttgaccccgcgggcgattaacgaagaggtcggtaaacgtctgctggaagagatggcctggtacgataactatcttgatatgggcaaaaccgaccgcagcgctaacccctcccccggcaacaagaaaggcggtctggccaacgtggtggaaaaagcgctggggtcgattgccaaatcagggaaaagcgccatcgttgaggtgctctctccggggcagcgtccgaccaaacgcggcctcatttacgccgcaacccccgccagcgattttgtctgcggcacccagcaggtagcctctggcatcacggtgcaggtattcaccaccggtcgcggtacgccgtacgggctgatggcggtaccggtgataaaaatggcgacccgtaccgagctggccaaccgctggtatgacttaatggacattaacgccgggaccatcgccactggcgaagagacgattgaggatgtcgggcggaagctgttcgaatttattctcgacgtcgccagcggacgcaaaaaaaccttctccgatcaatggggcctgcacaaccagctggcggtatttaacccggcgccggtaacctga

SEQ ID NO: 222249 - DNA, 1464 bp, Klebsiella pneumoniae
gtgaacgaaaatagccatgataaaaatgttactgaagatgagtacgctgaattttggaagcattttaatgcgagatatgacgatccactcgtgaaagatgtaaagaaaacatatcgatggtttgttgaggttatgggggaagaaaaatggtttgagcgaagagataatgttctgcggtattttcgtaccctcactgaaaggttatatagcagtcaaacagatgtttctttacatgaaaaagattcgcgtatggccttttatgatgattggatcgcttggtatttgtaccttgcagaatcacttgccgatcgcccaacagttgatgaacctgcacaatcctctagaattttgccgttctttgccaccatcggagaatttagcgaagagttaaagcgtacaaaaggtattgaaaataaacttaaagatttacttattaaacctgagaatcaaccagactctgtcttatttgaattagtagttgctgcctgttatataaaaaatggttgggaagtagagtttatacctgagtcaggtgcaggtaaaacaccagaccttctggtgaagaaaggaaatgataaactatatgtagaatgtaaaaggcttgcaaaggtaactcaatattcagaaaatgaacgtatggaatgggttaaaagatggcagaaagctctaccttacataatttcttacccatatcctgttttttttaatgtaaagttcaaatgtgaggtcaatagcaccaatcctgatatttttttgaatattgttaggcaattatacgcctcaagagatttgatgcaatgcggtgttgtatcttgtgaaaatgatgaaatatcagtagttgcaaatttaattgatatggaccgagtaaatgaacactttgccaaatggatagtaaagtatccttcgccacaacttaactatcttttagatgataactatgaaccccatggtagttatacgatggcattacaggctaaactttgcacttatagcgaagatgaatatagtacaattaatgtttttgccgatgagataaggagacctttctgtgctaaatgggaatgtatagcagatgaatcgatttccaaaaaagctaaagatgttaaggggttacttgtgaaagctgtaaagcaagccccaagtgatggtaaaacagttatccatattggatatgaaacattacatggccctcatgtcgaggtgcttcgtgataaaaaaattactaatatgttagctaattttgattgcgagggtaaggatattgagattatatattgccactcgttccaaccaaggctattttcagataacaattgggattttgccgaaactgttaggtattatacaagaggtgttagcaaaaagtatcttttgaagagaatgatgcttttggaaagagagggtattgttgagtccaacgatacccattgggagcaagatctacgagaaatgaataataaataa

SEQ ID NO: 222250 - DNA, 576 bp, Klebsiella pneumoniae
atgagaattgaaggtcttggtttaaacaatgaagaagtgctggacaggatttgcgaggcttacggattttctcagaaaattcaattagctagacacttcgaaattgcatcaagctctcttgctaacaggtacagtcgcgattccatttcttatgactttattgtgcattgcgccctagaaactggcgcaaatctcgcttggctactcaccggcaaagggtcacctacaaccggcaatatgaataccgatacccaaaatgtggagaaattcacattaagtgaagagtctctggttagtgatggcgatttgagtattgctggcaagttctttagcaagccgcttacgaatccaattgccgtctacgctgacggaaaactccatttcatcgagcgagacgcatccctatcagatggagaatggctcgtcgatattgaaggtgctattagcattcgagaattaacaaaattgccaggcagaagactacatgtagcagggggcaaggttcccttcgaatgtggatttgatgacattaaagcattaggtcgcgtgatgggtgtatacagcgaggttaactaa

SEQ ID NO: 222251 - DNA, 171 bp, Klebsiella pneumoniae
atgtccattttactactggccgctttgttgtgtattgaggctctaacaaataatgactataacttatcaaagtgggtgtcatctttttttacagttgtttttattgcgtcatatattaaacaaattaattatattgtggcaagggttattaaagctaacaagctgccataa

SEQ ID NO: 222252 - DNA, 1092 bp, Klebsiella pneumoniae
atgggatacgaagttgattttttagccgttggagaaaaaaaaagtggagatgcgatatgcattagatggggcaatcttcacggagcaaggcacgagcaaaaagttgttgtgattgatgctgggtatgcgagtacaggtgctcagattattgaacatctagaaaattattaccataccaatattattgatctgcttatatccacacatccagatggtgatcatgtaggcggtttatcacatgtcattgaaaatgcagaagtaaaagagttctggattcacaaaccatgggaacacaatgaaaacctcgcagctgaattttctgacggaagaataacagatgccagtatcgcaagacgcatgcaagaaaacctacagaaagcttatgatgctgttaaattagctgaaaaaaaagagatagaaattcatgagcctttccaaggaaagacttgggataatgccacacttgttgttgttggaccgacacaagcatattatgaaacattaatacctgacttcgctcgaatgcctaaaaaagcagaagaagtatctggaactgaagctttaaaagcaacatatgactatcttgtcgagaaagctaaaaaattagttgaatatgttgcagactggttctccgatgaaggcattgatgataaggacaccacatcagcacaaaacaactcaagtgtaattttgaaacttgaaattgatggtaaaaccttggtatttactggtgatgcaggtgtcactgccttagaaatggcagcagatcacattgataacacttcattatcattcattcagattcctcatcatggaagccgaagaaatgttggtccgcaagtactaaacaagctggttggtaatattgtaagggagggtgaacagcgagggattagcgcatttatctcatgtgcacctgactctgacaagcatccccatcaagcagttattaatgctttcaccagacgtggggctaaagtaattactactgaaggctctacgaaaacccattataaagacgccccaattagagagggatggtcctccgccacacctcgtgcatacgtaactaattataaaactgaggaataa

SEQ ID NO: 222253 - DNA, 189 bp, Klebsiella pneumoniae
atgaacgagaaaaaatatcaatccctgcgtaaaaagtcaataagtaagggggggaatatggcttgtattgttatgctggtacacgcgctctccttttcctcattgcagatggatttagatgtacgtgtgggggatgtgaattggaaacactcgattgtgcttaaaactactggaggaaagggagagtaa

SEQ ID NO: 222254 - DNA, 555 bp, Klebsiella pneumoniae
atgccctttaaatcggcaatacaagatgctggtgagcaaggctcctgttatcttatccagacgaaagatattggacttgacggcattttagatctaggtgctttaacctctgttatcccagagggtaatcctgagaagcattatcttttccctaatgatattttattacgtctgcgggggcctgtgttttctgctgggattatcgaaggaaatttaggcaaaccaatcattacgtccaatcagttagcagtaattagatgtaatgataatctaatactgccacattatttacattggtatataaactctacttctggaagtaaacatattcgcagtttgagtgaaggtacgagtattagtaaacttaattcaaaaacagtttctaaaatgactgttaaactcccaaatttgggggttcaagaaaagattggttctattaatagaaactggaataaacaaaaaacagtttataattcactaatacaaaatggtgatatgctctttgatggtatatgtgaaagtatcattaatagcgaggagttagaaaatgagtga

SEQ ID NO: 222255 - DNA, 1482 bp, Klebsiella pneumoniae
atgagtgagatgaaggcgcttcatgaatcacttttacttgcttgtgatttgtttagagggaaagttgactcatcttcttataaagattatatattttcaatgttattgctgaaatatatttctgatgttaaggctgactatgaatatgatttaattaatgaagaatattctgggttgttagagattgtttctcgagtaccagaggatgcgagcttttataaaatatatcatgaggctaagaatcatggtgattatattggagagaggattgacgactcgctgaaattaattgatcaggctattgattcggtctgtcaaagtagaggtggttatttatttgagtctatacaatttgcgacggttaattttggtgcaagatcagcgagagatcgaatgcttgttaatttactcgctatttttgcacgtcctgaaatgaattttggttatattcaaggtggtaatgaaaagataaaagtagcatgtagatatcttttggaaaagattgcatctgactcggcgatgaggggtggagatttttatactccagaaggtatttcgttactatttgcagagctattgcagcctaaggatggagatagtatttgtgatcctacttgtggatctggttctcttttaattaccctaggggaaaaaataaaaaaatcctttaaaagcaataactataccttgtttggtcaagaggctaatagatccagttgggccttggctaaaatgaatatgattatccataacgaaattaatagtcggatagaatggggggatgtaatatctaaccctcagcttctggatacagataatagattgatacagtttgatgtagttgcatctaaccctccattcaatattatcggttggaatcatgatgatttaatacataatgattatggtcgttttaatttaggttttccacctcagtctaagggtgattatgcctttattttgcacatgatttcaacacttaaaagtgcaactggtagaatggccatactggtatctcacggggtattgttccgtggaggtcaagaggagagtataaggaaaaatttagttagtgaagggttgttagatgcggtaataggtctaccagataggttgcttcttggtacagggataccatgcgctattttgatcttcaggagagataaaaaacattctaatgttgtgttcatcgacgcatctgatttggctaaacccgtaaaggggcgcaatttaataacaaatgaaatcattgagaaggtatcagaatgctactttgaaagaagtagtatcagtaatttttcatatgttgcttcttttgatgaaatacaagaaaatgattttaatttaaatatatctcggtatgttaagaagcatgaagagcaggcttttgttgatgttgagagcttacgtcaacagcgtgaggaactactatcaacattgcatgaattagaaagagaaatgaaagattttattgataattga

SEQ ID NO: 222256 - DNA, 714 bp, Klebsiella pneumoniae
atgccgttggttacctttggtgaactcactctcgatttgcagcgtaagccaatcaaaaacttgcatatcagcgtacttcctccggatggccgagtaagagtatcagctcccatctctctgtcagacacagctatcaggatggctgttgtcagaaggctagtatggatccgacagcagcaagcacaatttcaggctcagccgcgccagagtgaacgagaaatgtgtagtggcgaaacacattacctttggggaagaggatatcggctggatgtagttttagtagataagcccgttgaagtgaaacttcagggtggttggatacgtatgaaagtacctccacattatgatacggcccagcgggaagctgttctcaaccagtggtatcgcggtattttaaaacaaagactgcctaagttaatggcaaaatggcagcaggaaattaaagttgaagccagttatgttggcatcaagcgaatgaagactaaatggggtagctgtaacccccaaaccgcacgtatctggatcaatctcgaactggtgaaaaaacctcctgaatgccttgaattcattgtagttcacgagctagttcatctacacgaacgcaagcacaatgagcgttttatcggcctgatgaacatgtacctcccgaactggcgcgaacatagagctaagttgaataagatgcccttggcttataattactggggatattga

SEQ ID NO: 222257 - DNA, 3096 bp, Klebsiella pneumoniae
atgaacagtgttggtcaacgtgaacgcatgacacaaaaacgtgttatccagttattcaccgaacatctcggttatcactatcttggtaactggcacaaaagagaagacaaccggaacatcgaaccaggcttagtctctgcctggttaacaaaacgcggcgtgtcagaagtcctaatcgcccgagcaatacgacaactggatcgcgctgcaagcctcggtgaaggtcgtatcctctatgatgcaaataaagaggtgtatcgccttctgcgctacggcgtaaaggataaagaaggtgcgggtgagcagaatcaaacagtgtggttggtcgactgggaaaatccagatgccaatgaatttgctatagctgaagaagtaacctacaacggcgaaaataaaaagcgcccggatttggtgctgtatgttaacggtattgcgcttggtgtcattgagctaaaacgttctacagtgtcagtctcagagggcatccgccaaaacctcgataatcagcaaaaagcctttatccgcaacttcttcactaccatccaactggtgatggccggtaatgatttagaagggcttcgatatggtgtaattgaaacgccggagaaatattaccttcaatggaaagaagccgccgaatcacctcacaccaacatgcttgatcgtcacctggctcagatatgcaataaacagcgcctgctggaattgatccacgactttatcgttttcgatgctggagtgaaaaaaacctgccgtcataaccaatattttggcgtcactgcaacaaaaccgtttattcaacgcaatgaaggcgggattatctggcatacccaaggcagcggtaaaagtcttacaatggtttggcttgcaaagtggatcagagaaaatattaccgacagccgagttttgatcattaccgaccgtacagaacttgatgaacagattgagaaagtgtttaacggcgtggaagaagacatccttcgcacccggagcggcgcggatctcgtggcacgcctgaatcaaactaaaccctggcttatatgttcgctagtacataaatttggtcgtcaggaggaggatgacaaagacgctgacacggacgattttatcgaacaaatgaaacgaaatatccctgccgattttagcccgaagggaaaattattcgtgtttgtggatgagtgccaccgaacccaatccggcaaactgcattcggcaatgacaagcattttgccagatgcacaatttatcggtttcaccggtaccccgctgatgaagaaagataagaagaagtcagtggaggtcttcgggccttatatccacacttataaatttgatgaagcagtcaatgatggggttgtactggacctgcgctacgaagctcgtgacattgatcagcgggtcaaatctcagaaaaaagtcgaccagtggtttgatgctaagacatctaaactttctcgccttggccaacagcaactcaagcagaaatgggcttcgatgcagaagctcttgtcgagccgctcgcgactggaacagattgtggctgacatccttctcgattttgaacaaaaaccacggctcgccgatggccgaggtaacgccatgctggtctgttccagcgtctatcaggcctgcaaatgctatgagatgtttagtgacgcaggttttgccggtaaatgtgcgattgtgacgagctaccagccaaatgccagtgagattaaaggcgaagagagcggtgaaggactgactgagaaactagccaagtacaacatctaccgcaaaatgcttgcggaatattttgaacaacctgaggctgaagcagccaaacgtgtgagtgatttcgaaaaagaggtcaaacaacgcttcatcaaagaaccgggccagatgcgccttctaatagtcgttgataagttattgactggctttgatgccccgtcagccacttacctctatatcgacaagaaaatggccgatcacaaccttttccaagcgatatgtcgcgttaaccggttggatggtgaagataaagaatacggctatattgtagactataaagaccttttccgctcattggaaaaaacagttcaggactacaccgcagaagcctttgacggctacgacaaagaagatgtagccgggttactgaaagatcgtttgcaacaagccaaaatcgatcttgatggtgctctggatgccgttcgcaccctatgcgaaccagtaaaaatgccacgcaatcaacttgattatcagcattatttctgtggggaatcaggggcgtcgatagagcagttatctgagaaagaagctttacgtctaacattgtatcaatccgtggcgaagcttatccgtgcttttaccaatctggcaggtgagctaacagatgctggttatagcgagcagcaggcaaatcaaatccgcattgatgttgagttttatacaaaagtccgggatgaaatcaaaatagccagtggcgatttcgtggacatgaagcagttcgagccaggtatgcggcagatgctggatctttgggtggatgccgatcctagtgaaacccttatggattttgaggaactagggctgcttgagttgattattgaacgcggagaagaagcactagatggacttccagccgacatgcgtggcaaccaagaggcgatggctgaagcgattgaaaataacgttcgcagaaccattgttgatgaaaacccagtcaacccgaaatactacgaaaaaatgtcggtgttgcttgatgaactgatcgcacttcgtcgtcaacaagctatctcctatcaagattatctagagcgcgtacgtgaactagcgaagcaggttaaacatccgcaatccggaagtaaaagtacttatccagcaagcattgatacccttgccaagaaagcgttgtatgacaacctcgggcaggatgaagtgttagttataaagatagatactgcagtacgtcacactaaaaaggccgactggtatggggatcgttttaaagagcgcgagatcagctttgctatcgcggaagaaattaaaggttattcagtgacggtcgcggatgttatggctctggtgaaggtacagaaggagtaccgctga

SEQ ID NO: 222258 - DNA, 2031 bp, Klebsiella pneumoniae
atgagtgatgcaaaggtaacatcctttacggtcagatcattactgggtgatgcatctcgttaccttatccccatgtaccagcgtaattatgcctggggagagggggagatcactcaacttgtgcaggacatactcgactaccaacaaaaaagcctgcatagcctataccctcaaacttactacatcggtacgttagtcgtgttcactcgtcctgatggggacgcagagataatcgacgggcagcaacgtttcactaccctatcccttcttgctaactggttaaaaaaacatgcgggatccacgctggatatgagctggtaccaagggattaacttagggtttgagagcagacctaagtctggcgaaacctttgctcggctctggcaaggcgtcgaaccacataaactgcggagtaaggaatttaatgaagggctgatcaaaggctacgaacttattggcaaggttctacgcgacttgaaattagttggtgagtcattaactcatttttgtacctatctattcgaccatgtacaaattgcccgaatagaagtgcctgctgataccgacctcaatcatttttttgaggtgatgaacaaccgaggcgagcaacttgaaaaacatgaagtggtgaaagcgcgactgatggcggtgttcaacgagataacggaccagcaagctcggcagagcagcctgaacaccctctcacgagtttgggatgcttgctccaatatggaacgttatgtccagtacggttttacaccagccgaacgtcatcaattatttgggcaggaaaattgggggcaatttgtgccccctgattttaattccctggctgatatgcttatcccatcggcttcggcgcttggtacaagagagaacgaaacaacccgcacactggctgacattatcaagtcatcttcaaccataagtggtgatagaggcgacgaagatgaaggtagctcagagcgttttaatagtgttatcaatttctccaacttcctgctccatgtgttgcgtgtctgtagccaaactggaaaggacagagtggatgttccgcttgatgacaaacaattaatcgaccagttcgaacttcggttatcaaagcagaatgacccggttaaagcggtacagaatttcacctttgcacttctcaaatgcaaatatctttttgatcagttcgtgataaaacgagaattcgctaagggtagcgatgggtggagccttaagcgcctgcgttggtattcggaaaagagcaccagctataccaatacgtttaatgacgatgatggtagctatgtagacatcaaccgacagatcttgatgctgctttccgcatttcacgtttcaacccctactctggtttacaaacactggttgaatggagctttgtactatctgtttaatgcccattctgctgaaaaccagattgatgcaaggaggtacctcgagtatctggagcatctcgcctccgcgtttgtctttcaaaacttcctggcagaacaagaaccaaaatcatattttgagatcatttacggtaaagaggtacctctccaacccacggtactgtcggacaagattcagaagaagatgcgctttgggatgatagcaaacaacttggtgttcaattacctggactacttactctggtgtcgtgacagaaataaagcagaggtagtcaaacgttttgaatttaccttccgaagttcggtagagcatttctaccctcaacaccccatggatagctacaagacattaccagatgtatcgttgcactccttcggcaatctctgccttattagccacagcaagaattcgcgactgagtaatttccagccaaaacaaaagcaagagcacttcgaagcgagtcttgaacggaatgaaatagatagcctgaaactgctcgccatggtcgagttgatgaaaaagaacaatcagtggggggaagaagaaatcgccgctcacgaaacggaaatgctggcagtgttaacctgtgccggtggtagcgatagcgtatttagggaggtgttatga

SEQ ID NO: 222259 - DNA, 1434 bp, Klebsiella pneumoniae
atgaaacacacccttgataagacagttctgtccgtcaagggtcttttgagcctgactgacgtagccattccggcctatcagcgtccttataaatggacggtaaaaaatatcagcgaactgttggcggacataaacggtcatctcgataaatcggcctaccgcttgggctcagtagtgtttcatcagcctgagagtaatgaagaacatagactggatatcgtcgatggtcagcaacgaacgttgacactaatgctggcagtatgggccattatcgaaacccgatttgctgagttggaacgtcaggatttacaggaaacgctaacccatctaaagccctccgttgaaggttttatgggacggcaacgctttgtcagtcaggtatcggaatacaatctgtaccagaattatcaggagctaaaacgtagggttagccatcgagaattcagcgagcaacatattgattttctcctcaaccgctgccagttggtggtctttgtgctgactgacctttctgaagcctttcagttcttcgactcacaaaatgcccgtgggcgggatctggatcctcacgatctgcttaaagccttccatctacgtgaattcgccagccatgaggtagaattaaaagctgtatccgttgcccattgggaaggattacctagtgatgacctggctaatcttttcgcatcttatctctacagggtacgtcagtggtcgcagggaaattcagcgcgtttctttggtaagaatgaaatcggcctattcaaagggatcaaccttgatcagattggtcagtttccttatgtggaatctttgcgtatggctcaccattttgtggatgactataacaatcaataccagcgcaagattgatggccagaaaatgcgtttccctttccatctcgatcagatgattatcaatggaagacgctttttcgaaatggcggaacactaccagcaacaggtatcggcaattatcacaagtgagcatgccagcactcatactcaaaagccgttaatgattcagggcacagtccttggtgaaatggcaacccggatactaagaacgttaaatagctatagaaatcgccatcgaacaggggatcaatatatacgcactatgtttgattgcgctctgatcttttatatcgacaaatttggtgggcagtcgttatctgcagcgattgaaaaaagctttatctgggcctacagatgccgaatccgacagcaggtggtacagctagcgactatggataagtacgtactggaaaataatctgttccgaataatcaaagaagccagagtacctggtgatgtgctatctataccattactcacaattcgggcttcagaaaataataataaccgccgtaccggtaaccatgagcaagacgagctggtgaggctgttcaaggagatgaactactatgagtga

SEQ ID NO: 222260 - DNA, 1368 bp, Klebsiella pneumoniae
atgaaaatgaataaatcacagaatttgaaatcgatcccaactggttataaacagactgaggtggggattattccagaagattggaaagttagtaatattggagacctatgcgttatttttggacgcataggtttcagaggttatacaaaagctgatattgtatcacaagaccaaggagtgctaagcattagtccgtctaatataattggtgggcgtacaagttttactcatggaacatatattactcgtcagaagtacgaagagtcacctgagataaagatatacgaagacgatatcctgctagttaagactggttctacctacgggaaaatagcattagtaaaaaatttaaaagaggatgcaactctcaacccccaggtagtagtatttaagagactaaaaagtcccgctgcatttctagcatacataatgcaatctgatattgtgcaaaatcagattgaagaaacaattgttggtggagcaattcccacattatctcaaaaggtagttttaagttataaaatcccgctccctgctccaagagaacagcttgctattgctaacgtgctctctgatactgatgcattgattatcgcgatcgagcaattaatcgtcaaaaaaaaggctatcaaaaccgccttcattcagcaactgctgactggtcgcacacgtttaccacagtattcgaagcatcctgatggcaccattaagagctataaacatacagaattaggtctgattccagtagattggataatctctactattgatgaatgtgcaaataaggttggcagtggcaagactcctactggtggttcgtcagtttatactgaggctggacacccatttgtcagaagtcagaatattggctggggtaaattagaactatctgatattgcttatatttcagattcagtacataaaacttttcccggcactgaattagcggaaaatgatgtactcctgaatataactggtgcatctattggcagatgtgcattatcagattttcgtattgcagggggaaatgtaaatcagcatgtctgcatcatcagagtaaacagtgataaattaattccaaaactgcttgtagagttaatgaacgctgacatcggtcaaaatcaaattgatagttttcaagctggcggaaatagagaaggattgaatttttcacaggtgagacaactcagatttgctatccctaaatcactcgaagagcaaaatactattgcaactatcctctctgacatggatgctgaactcacagcgctagaacgcaaacttgccaagttccgcgatataaaacagggcatgatgcaacaactgctgactgggcgtatccgtttaccgttggaacagcagccatga

SEQ ID NO: 222261 - DNA, 2454 bp, Klebsiella pneumoniae
atggctatcaagaagaacgaactttactcctccctttgggcgagctgcgacgagttgcgtggcggaatggatgcttcacagtacaaagactatgtgttgaccctactgtttatgaagtacgtctctgacaaagctaagggcaacccttacgcgatgattgaagtgccggaaggtgcaagtttcgacgatatgattgctctcaagggcaacaaagaaattggcgaaaaaattaacaaaaccatcagattactggctgaggctaacgacctgaaaggtgttatagacatcgctgacttcaatgatgaagacaagctgggtaaaggcaaggagatgatcgaccgcctttccaagctggtggcaatcttcgaagggttggatctctcagccaaccgtgttgacggggacgatctgctgggtgatgcctatgaatatttgatgcgtcactttgctacagagtcaggtaaatccaaagggcagttttacactcctgcagaggtgtcacgcattctggcgaaagttattggcatcagcaagcagacaccacaggatgctaccgtttatgatcccacctgtggttcaggctcactgttgttgaaagccagtgacgaagcaggccccaaggggctaaccatctatggacaagagatggattatgcgaccagcgcactggcccgcatgaacatgatcctacatgacaacgccactgctaaaatctggaaaggtaacactctggccgatccgcactggaaagatagcaacgataatctgaaaacttttgacttcgcggtagccaaccctcctttttccaacaaaaactggaccagcgggctggatgctgcgaacgatacttttgaccgttttgtctggggtacaccaccagaaaagaatggtgattatgctttcctgttgcacatcatcaagagcctgaaaagtaccggcaaaggtgctgtgatcttacctcacggcgttctgttccgtggcaatgccgaagcgcgtattcgtgaaaatctgctcaaacagggttatatcaaaggcatcattggcctgcccgctaacttattctacggcacgggtatcccagcatgcatcattgtcatcgataaagaagatgcccagctccgagcgttcaacgctaatggcgagagtcagcaaggcatctttatgatcgatgccagtaagggctttattaaagacggcaataaaaatcgcctgcgcgcccaggacatccataaaattgtcgatgcgtttaatcgcgagcaggaaatcccccgcttcagtcgcatggtcccgctgtcagaaattgcggccaacgacttcaacctcaatatccctcgctatatcgacagcagcgatccggaagatctgcacgacctttctggccatttggctggtggcattcccgatcacgatattgatgctctcagtgcttactggaacattttcccgactttacgacaggatctattcgaacccgcccgccctggctatagcaatgcccgagtcgaggcaggtaaagttaagagtactatcctggcacatccggaatttgcatctttcagagatggagcactgataccctttgaaaattggtatgcagaatgtcgacttgatgaaattgctcgtggtgattcgccgaaacagcttattgaagagattggcgagagtctccttgctgcctatgcttctgaagccacagttgacgtccctctacttgagaactacgccatctatcagttactgatggactactggatggatgtcatgcaggacgatgtttatgtcctgagtcaggatagctggcaggcgggcaaagtgcttcgtgaacttattgtagaaaaaggggaaaaactcaaagaaacaccagatctagtaataggcaagaaaaagtataaggctgaacttttgccgcctgcacttttagtaactcgctattttgctaccgagaagctggaacttgatcagcttcaggtcgcttatgatgaggctgcccaagcacttgaaagtttccttgaagaaaacagcggtgaagatgggttactcgctgatgcgatgaacgacaaagagaaagttacagccgccagcattaaagcacgattcaaagtggccacggataaagaagaaaaagcagtactgaaaactgctcaggcgttgtttgatgctgaaaccaaagccaaaaaagcgcataaagaagcacaggaaaaactggatcttgctgtatttgcccattatccaaagctcgctgataacgagataaaaattctgctagtacaggataaatggaaggccagcctagttgatgctttggaagcggagattgagcgtgttacgcagcggttggcaaatcgagtgaaagagcttgaagaacgttatagctcaacaatgcatgaactcacacaattagtggctgagttagaagccaaagttacgattcatcttaagtcgataaatctgtga

SEQ ID NO: 222262 - DNA, 4131 bp, Klebsiella pneumoniae
atggctactattcatttaatagcaggtactgaaggggcaaaacgcaatgttgttctgatacacggtctgggtggccattaccgtaaaacctggactgccggaatggataaacgtcagttctggcccgaatggttacagcaggatgatccggatctgcgaatctgggctgtcgaatatgaaaccagtctcctgacctggttgcaacccgacatgggcttgaaggatcgggctcagaacatatttaaattgctacttctgcagaatgacatcactcgcggagaagttattttcatcggtcacagtcagggcggattgctgattaaacaaataatccggcttgcctgtgaccgaaaggatgagcctgaggtcagcgtactgctgaatagtatcaccgccgttgcctttcttggtaccccccatcagggttctgatgtctcgagtttaggtaattccttacccgcaagattgctggcatttgcctgcctcggaggacgaccgtcagccatgacggcctatctttaccgtaacaaccccgatttgcgcgaactcaacgtctggtatcgcaactgggaccgcacctttaccggtaagcgtctggtcctcggcgaaagccgaaaattatacgggcttgctaagattgtcaaaccaaacagtgccgacccgggaatccaagcagagatggttatggtcgatgctgatcataacgggatctgcaaacctgattcgaggcagaatgaggtgtatcagcatgtgctgaactttgttaagtcggcgaaaatcaccccacagcacttctggctaatgaagcattttggcagtcaggtcagtggctggcgcggataccagaactggtcaggcgctacgcaagacgttgacggacgttatattattgatgataaggtcaagttcagcgatgcgagtatcgatgctggcaggaaaatcacggctgaagagatgctggactcgatcagacaaaagctcgctgtgcccggtgcggtactccgcttggtcggactgtctggggtcgggaagacccgctttgtacaggccctctttgaaacaaacatcggtcgggcagctctctcccccgacactgttttttataccgatgccggaggccaagcgtttccagctccagatgttctactggaaaaactcaaatccacggcacaggaggcggtggttgtcgtcgacaactgtgccccggccttgcataactcactgaacagtgtgttaaacgccgatcctgggcctgcgcgttcccgtcttctgaccgtggagtatgatgttcgggatgatattcctgataacaccgatgttatctcgatggaggccggctccggagaactgattgaggccttaatatctggctatttccctgacatcagccaggctagtcgaagtaccattgcagaattctcgggagggaatgcccgtgttgcactggcgctagctgccaccatcggccggggagagaatatttccagactgaggagcagcgagctgttcagcaggctctttaatcagcggcacgatactagcccggagttgatgcaagctggttcacttctctcgatagtgtattcattccgctttgctaacggggacggatacagtgaagaactgaccgatctggcctgcattgcccaccttcatcatgacagactttatgcctgcgcgcgtgaaattcaacggcggggactggctcaagttaggggagactggatggccattcttccgcaccccattgcaaacggactcgcacagcgagcactggaagacattccagccacacagatcctatcggttctggcccctgataaaaatgaacgtctgttcagatcgtttacacgtcggctgggttatctttcggattcccaggaagcggcagccatggctggtaagatgctggcttctgacggcatatttgacaggatgctcgcccaaggaaaggaccactacactgaaaccttttccctgattgccaatgtcgccccggtagcccaagagcaaacactggagtttattacacgaacaggtgacctggagccagacggctggttctttacgcgtgacaacctggcatttaccgtgattactcgtctgttacgctccctggcttatgaggctcgctattttgagcagtgtgtctggctgctgtgccgctttgccgaaaatgagaagacaaacaaaaacaatgcctccagtaccgaccttctgtgcaccctgtttcatatccatctgtccggcacccatgcaccgttagcaatgcgtcttaacatcatcgaaacactgcttctcgagcaacgcacgggtctggcattgcgtctgttaaatagtctgctgaaaacatcgcattttacctcatttcagggcttcgactttggggctcaggttcgtgactttggatatattcctcagacgaggagcgactacgagggctggttctgcagggtactggactttctcatcgctacctataccaggcatccggagctatcccgcgatacgtgcgggatagtgcatagctggttcagatcgttatggaaaatcaaacccgcacagcccctacttgtcacgttgattaaaatgctcgtcggcacgccgggtgatgaggcattgtggacgaccatcaaacaggccattcatttcgacgccgagaaacagaccgaagcagaacgggagactctgcagctgctcgaacaactgacccggccggacaccctagcacagaaactcaacatctttattttttcacaacaacagagtttttatggcctcggggaaaaggatgtggacggggaaaatcacacttccggatatgacgttgctctaagagaggcagccaccctcggcaggaacgttgcatcctgctcgccagaccttagggacagcattatctgccgtgccttgcttgaggacagcgagtatagacaaatgatggaattttcgactgcgctgggcgaagagatttcagaccctcatgatttctgcaagaaacttaacccccaggtagcccggctaggcgcagataatattaaaaatgtgtttctctgtggtgcgttaaggggagtttatcgccaggctcccgcactctgtcatgccgttctggatgcttggatacacatgcctgagatggagaagcactttgcagtaatacaggcgcacataccgatggatgcaaacagcattgagcgagttatgcgccatcttgaggacccgggaaaagatgtgagtggctaccgaatattaaccagtggcatgcggcatgccatgatccccgacagttcactcatcgaactcctacaactgatgtggtgccaacacaatggcccttccactgcgttcgatatcctttcgatgcgagttcatgatgacggtcgcgacggctatgtctgcagtgagcctctgcttgagctcgcgcgtgggtggatctgcgccatcatctatgggcatccggtaccgaccagagatattcccacagataacatctctgcgatcgcgaaacgtgcatttcaggcgtgttctgctgagcaggctcgcgacctactggcagccattgtccggtcatcagaacgctatactctgcatgattatgactttaccgaggtactcggcctcatctgtcactaccaaccgcaagttattcttgaccgcttatgtcctgcacccggcgtcattgatgaagccttccatgacgttgtttcacagcggtcttacagcaaagcccagcctctgacggtactgccactggcagtcacaatggcttggtgtcagcaggatcctcggacccgctatccatgcctggcaacactgatttctccgtatgaaaaatccggagagcatctcgtgtggaccgccctggccaacgccctgattgcaggagctccttcacccgaaccggtgctatcgggcttggtgcataatgtctctgcagatgacgacttaggctccagagcagtctgtgcagaggataaattggcattactcgctgagcttcgcaacagcggaaatccggagcttgcgcttgcagcctcgcggataatgggcgaagtgcaagaacggttcgacagagaccaacagaggagcgcgagactaaacagaagggatagtgaacggttcgaatattaa

SEQ ID NO: 222263 - DNA, 495 bp, Klebsiella pneumoniae
atgacgccatcaatgaggaaaaaactgattggtgtgatcgccggcggtggtggcgccatagccattgcttccgtcatgcttggtaatgctgacggcctggaaggaaggcgttattacgcctatcaggatgttgtcggcgtctggactgtttgtgatggtcacactggcaccgatattcgccacggccatcgttataccgacagggaatgcgacagcctgctgaaggcagatctgcagaaggtggcaagcgccattgacccgctcatcaaagtccgcattcctgatcctacccgcgccgcgctttactcattcacttataacgttggctctggcgccttcgccagctccacgctactgaagaaactgaatgctggagacgtccctggcgcctgcaaggaactgcagcgctggacgtatgccggtggcaagcagtggaagggactgatcaccaggcgagagattgagcgtgaagtctgcgagtggggccagaaatga

SEQ ID NO: 222264 - DNA, 315 bp, Klebsiella pneumoniae; identical to SEQ ID NO: 220558

SEQ ID NO: 222265 - DNA, 780 bp, Klebsiella pneumoniae
atgaacctcgaaagcgcagttaaatttcactctcctaaatcgccacagctttcagacgcaccaagggcgaccgcgtcagattctttaactggcactgatgttatggcggcattcggcatggtgcaaagtcgcgccccacttggattcagtgcttttagcgggaagatgaatctgagcgaagtcgataaaaagaaagctgttcagttgctaatgcaatacggggtaaagcactgcgataaggtggcagcctttcgcaagcttgagacaaatgttaagggcaagatcctgcaaaccctcgcaacttttgcatatcaggattattgccgatcagcggccagccagcttacctgctcatgctgtaagggccgcggcgtaatcaggagggaggaactggtggttaagcaccccggatgtggagagaaaacgcctgcaaaaacagctaaagagcaggtggaagaaacgtgcaagaaatgtagtggccgaggcgtcatatcaacatcctgcgtgaagtgcagagggagaggtgtggcaatggatcgcaagaagtcagaggagcagggcgtgccagttatgagtgcttgtcgtcaatgttcagggagggggtatgagcgccttccggcagcgtcctgctatcgtgccatctgccagtttactgatgctatttcacctggcgtatgggacaaggccgttaagccattctatgagaatttaattgcagagattgaaaaggcggaatcttcagcaaatgcgatcttatcgaaagttactagcaaagtttga

SEQ ID NO: 222266 - DNA, 360 bp, Klebsiella pneumoniae
atgaaaatctacgatatcacaccaatcggcaagcctcgcatgacccgcgcggataagtggaagcagcgcccacctgtaatgcgttatcgcgctttttgcgatgaagtccgcctgcgcaagatgaccatgcctgaatccggatcacatgtgacattcgtcctaccaatgccaccaagctggagtaagaagaaacgagcggagttcgccggtaagccccaccgggccaagccagactgcgacaacatgctgaaggccctgatggatgcgctttatgaggatgatgctcacatctgggattgccgcatcacaaaggtctggggagagaaggggcagatcatcatcggggagtgcgcgccgtga

SEQ ID NO: 222267 - DNA, 285 bp, Klebsiella pneumoniae
atgagtaaaacctaccgcagcaagaagtggctcgccgcagtcggccagattgagcaatgcgtcctgtgcggagcgtggggcgtacaggtagcacaccgcaatgaaggtaagggaattggcatgaagacagacgactgcgccaccgccgctatctgtgtcacctgccattcagagatcgataacggaaagggtttgagccgtgacgaacgccgccagttaatggaccgcgcgattgtactgaccgttatccagattgcccgtcgtggcttggtggtgcccgcatga

SEQ ID NO: 222268 - DNA, 168 bp, Klebsiella pneumoniae
atgagcagccttctcgccaaagtaatggagcgcggcatcttccgcgtaccggcgcgccgcaagcgcaaggtcgaagttaagccttccgacatcccgacatttcactatacggctcacctggcagatgtccgctggctgcgccgcgctgccagaaggaaaattgcatga

SEQ ID NO: 222269 - DNA, 456 bp, Klebsiella pneumoniae
gtgaacatccctcaatgcggcatcaaactgcacagcggcaacttcagcgctataggcaagattcttcaggagcagctctctgacgggaaatgcctgcgcctgcaggtcaaagagtggcgtgataaacgcagcctgagccagaacgcactcagtcacatgtggtacgcggaaatcagcgaatacctgattaactcaggacgtaccgacgcaactcctgagtgggttaagcgcaacctcaaaaagacctatctcggctgcgaagaggtgacttacaccgacttcatcaccggtgagaaaactacaacctgggaaccccggcatacctccgatcttgataccggcgaaatgcacatcttcctgaccaaagtagaggcctggtgcgctcagtttggtctggctctcaccattccacacggttgcgaatatcagcaactgcagcaaaagcaggaggcctga

SEQ ID NO: 222270 - DNA, 573 bp, Klebsiella pneumoniae
atggctatcagtcaagcgattgcattggctgcgataactcaacaaatgaacaaggttcaggatgctgttaatagtgcattcaagccattgatttctaatgcctgtgaaattcctgcgagattgaatgcggaagagtctttgcgtaggtgtacagcagttgtcgcaagcatcaagctgatagaagacatggcaaaagaaggcatgcatcacttggctaatgtgcgctcgggtgagattgatttagggagcgcgcctgaagggctcattgagacgatgaatgctttggctgtggcatgtaagaatgctcgcggtcatgttgtggaaatgtttgcatttgctgaaagctctcctatgtggagcggacatatcagcatgctcagacctttaaagaaaaaatatgttaaggcactttcagcagccgaaaacatcgcaaaccaaatgattactgaagtcaaagaggcaaaaccagcgtccgccgatgttgaatctttagatataggtcgtgacgacgcgatttcattaattaaaacttcacacatcatgctgggggctgattctccaaagtggatgtga

SEQ ID NO: 222271 - DNA, 369 bp, Klebsiella pneumoniae
atggcactgaccaaaaaacagcgcgcagaactgcgcatgaagtttggcggacgctgcgcttactgtggctgtgagcttggcgataaatggcacgctgaccatgttcagcctgttatccggttcgatgggcaaatgcttcatcaggagcgagacgacatcaacaacatggttcctgcatgtcatccgtgcaatctgcacaagcactgcaatagcttggaggactatcgccgaattatcgacgatgggcgcagagagttcctggtgtccgggaaaggaaaggcgctggttcgcatggggttggttgaaatgaaatctgacccggtagtgttctggttcgaaaagtatcaggtagaaggagccaaccaatga

SEQ ID NO: 222272 - DNA, 225 bp, Klebsiella pneumoniae
atgatttttctcaaattaagccaaaaggtaaccgtagagcgccagggcaaatatggctgggagcctgaaacagtctacgagcctgtatttgttgccgcaggtcacatcgtcagcatgtttttcgctggcgtgacaattctgaaaatgacctccggagaaagcattgacgtgaaagagaccccggaagaaatcatcgccatgcttaccgaaggagcctccaaatga

SEQ ID NO: 222273 - DNA, 255 bp, Klebsiella pneumoniae
atgaaccacatcgaattcattgagaagaacgtccgcgaagagctgatgcgccagggattcacccaggcagtggctcaggggggggcataccaggcggtcgatatgtacaagcgcatgtcgcaggccagtcgcaaggggaagatttttgatgatgtattgcggttcgcgaaattgtgggcagagaagcaaacactgccgtctgacaaattcgaaaagaaaagagcgaagcctattaagcagcagggactgttctga

SEQ ID NO: 222274 - DNA, 321 bp, Klebsiella pneumoniae
atggagaatgcaatagcccgaaagttagagccgccaatcctcaacccaattgagattgaaggcattttgttaaaccggcttttatccattggccaaaaggtttttgcggaaatgcggggagttagcgagtcgacaatcagtcgccgcaagtcggaggggtattacgccgagatggcgaaggaaatatcagcgttgggtctacaggttgttcctccagaggcggtggtagtttctcgccactacctgcagtcagtagaaacgctggcggatatcggattacgtgcagagcggtgccgtccaggtccgttagggtgggattga

SEQ ID NO: 222275 - DNA, 630 bp, Klebsiella pneumoniae; identical to SEQ ID NO: 96487

SEQ ID NO: 222276 - DNA, 159 bp, Klebsiella pneumoniae
atgatgcgcaatcgccgtaccggcgccgcctggctggtcagcttcgactatcgcgacggcagctactggcatgagccgcagggcaatctgcgccacatccgccggccatacgcttcacgcagtatcgaaccgaacctggttccagccgggacgcattaa

SEQ ID NO: 222277 - DNA, 234 bp, Klebsiella pneumoniae
atggcccgaagaaatttactccacaaatcgaaattagccgacttcaaggagtggctctcgatgaacggaattcagtggagagatgggaaaggtagttaccaggtaatccaggtgaatacgggatgcggctggacaccgatttatgacagcagcaaagagcgacgcgagcatttcactattcaggatgctctcaggcctttggtaaacagattcatcagagaggctgcaaaatga

SEQ ID NO: 222278 - DNA, 504 bp, Klebsiella pneumoniae
atgacagattcaaaaacacattaccgcaaggctttcgattctccatacctgagcagtgccgatatcgttgaacccacggtgctgacgatcgcccgggcaacattagaaagcgacaaaaccaaaaaaactaaagacgtttttaacaccgcttattttgaggagcgcgagttgcgccctggcgaaaagcttaagccaatgatcctgaatgccaccaacagcaagatgctgaaaagcattaccggatcgccattccttgaggattgggtcggcgtgaaagtcactgtttacgtcgataaaaatgtcaggttcggaaaggaatcggttgaaggtctccgcttaagcccagcgcgcgtttcaaaacctgtgctttcgccggaaaaaacgcaggcatggaataacgctaaggccgccttcaagcgcgatggcaacctggatgcagtgctggcgagaatggacatttctccagagcatcgccgccaactggaacaggagtgctcagcatga

SEQ ID NO: 222279 - DNA, 624 bp, Klebsiella pneumoniae
atgatctggcatgacgtcgagcaaaacggggaagagtgggatgctcttcgcctggggaaggctaccgcttcaaacttcggcttgattatggctaacgatggcaaggcgtttggtgagccagccaagcgttatgcgcttcagttagctcttgagcagattaaagggtgcaagtctgagtttggattcacaaacgaccacatggagcgcggacacgaacaggagccaatcgctcgcatgctgtacgaagagatgaacttcgtcgacgtggataacggcggtttctttgatcacgaaacgtatggggatagtccagacggactcgtaggccgggatgggttgattgagattaagtcggtaattgccgctactcactacgccaccctcacccgcggctccttcgatccggcatacagatggcaactaatcggccaccttgattgctctggccgggattgggttgacttcatcagctactgctctgatttccctgacggaaagcaactcattgtttaccgtctgacagccgctgagtgccaatcagaaatatcccgccttcgagcgagaaggagtgagttcctctcccttgtggcagagaccaagcgaatgatactggagctcggatga

SEQ ID NO: 222280 - DNA, 657 bp, Klebsiella pneumoniae
atgaaacgctactcacttatctatgctgacccggcctggtcttacgggaacacgatcagcaacggtgctgccgtcgatcactaccccaccatgagcctgctcgatatgaagcggctcccggtatgggagctcgcagcggataacgcagtgttggcgatgtggtacaccggcactcacaaccaggaggcgatcgagctggccgaggcctggggctttacggttcgcacgatgaagggcttcacctgggtgaagttgaatcagctggccgaactgcgcattaccaaggctctggcagagggcgatgtgaccaacttttacgacttcctcgacctgctgaatgccgagacgcgcatgaacggtggcaaccacactcgcgccaatacggaagacgtactaatcgccacctgcggcgccgggctggaacgcaagcacgctggaattaagcaggtggtctacagcccgctcggcgctcatagcgagaaaccgtgggaagttcggcaccgcctggaactgctctacggcgacgtgccgcggattgagttattcagtcgcagcgctgcgccaggctggagccactggggcaaccagtgcgccaccgcttccgtagagctgatccccggctgcgccatcgacgttgtgaagacggaggcagcatga

SEQ ID NO: 222281 - DNA, 219 bp, Klebsiella pneumoniae
atgagcgcagaaatcatcgatcaggccaacgagttagcggaactccagcgggaagccgccattgcgaaatgtcgcatcaaccatacggcggtatcggctactcactgccgcgactgcggggaagagatacccgagcggcgccgggaactggtggcgggctgccagcgctgcgctgactgtcaagaagagtttgaagaacgcggtaagcacctgaggtga

SEQ ID NO: 222282 - DNA, 135 bp, Klebsiella pneumoniae
atgtgggtaatgatgaaacttaaacgtactgggcaggtgatgtatttccagtgttacgacagcagtgaaacggctgaaatggcgattaaggttatgaacgccgtcgccagcagctgggaattctatatcagataa

SEQ ID NO: 222283 - DNA, 945 bp, Klebsiella pneumoniae
atgcacaccaaagcccgtaaagtgatgattattggcgccggcaatgtcggcgcgtcggcggcctacgccctgctcaaccagagcatttgcgaggagctgatcctcgtcgaccttaaccaacagcgcgctgaggcccacgctcaggacctgagcgacgccgcggcctacctgccggggatgatgaccatctccacccgcgaggccagcgactgcgccgatgtcgatatcgcggtgatcaccgtctccggcggcgcgctgcgccccggccagagccggctggatgaactgacctccaccgcaaagattgtgaagagcattgtgccgacgatgatggccaacggatttaacggcatctttctggtggccaccaacccctgcgacatcatcacctggcaggtatggcagctttccggcctgccgcgcagccaggtgctgggcaccggcgtctggctggataccacccgcctgcgtcgcctgctggcgcaggaactggagattggcgcccagagcatcgacgcctttatcctcggcgagcatggcgatacccagtttccggtgtggtcgcactcctcggtatatggcacgccaatcgccgacctctaccagcagcgcaccggcctgccgctcgatcgcgaggcgatggctgacaaagtgcgcaagctgggatttgagatctacgcgggtaaaggctgcaccgaatatggcgtggcagggaccatcgccgagatctgccgcaatatcttcaccggcagccaccgcgcgctggcggtctcctgcattcttgacggcgagtacggggtcagcggcgcggcggctggggtgccggcggtgctggcccagggtggcgtgaagcagatcattgaactgcagctggccggcgaagagcaggcgaagttcagccagtcgatcgcggtgatcaaggccaatatcgcccgtctgccctga

SEQ ID NO: 222284 - DNA, 483 bp, Klebsiella pneumoniae; identical to SEQ ID NO: 212242

SEQ ID NO: 222285 - DNA, 126 bp, Klebsiella pneumoniae
atggtaacgcaacaaaaggcgtcggcactggcggtcggaaatacccagacgctgcgcggccatcggagtagtcagccgccggtcaacaacgtcttgaatgattttgagtcggttgacttcatctaa

SEQ ID NO: 222286 - DNA, 231 bp, Klebsiella pneumoniae
atggctaaccgccgtcgtgaaaaacccagcaataaccagctgcctgatggccttgcacagtacgcgctcagtattatccgcgagcgctataccgactttgggccgacgctggcgtgtgagaatctcgcagaactgcacgatgttcacctgtccaaagagattgtccgttcactcatggtcaaagccggtcgctggctccctcgcaaacaacgtgcgccgaaaattcagtag

SEQ ID NO: 222287 - DNA, 321 bp, Klebsiella pneumoniae
atgatcaccgagaacggcattggctgctttgatgagctagttaacgagaccgtagaggatgattaccgtatagccttcttcagggatcatatccgctctgtcggtgaagccattgccgatggcgtggaggtgctgggctactacatgtggtctccgctcgacattatcagctgctcgtcaaaccagatgtcaaaacgttatggtctggtttacgtcaatcttgacgatctggggcgtggtgacggcaggcgtttctgcaagaaaagctactactggtatcagaaactcattgcgaccaacggtaaatcactcgaggaataa

SEQ ID NO: 222288 - DNA, 636 bp, Klebsiella pneumoniae
gtgtccgaaaaatttcaaactgtcagcttcgatctctattcctcggtgatggggataaccggcctgggcctggtatggcgggccgcagcaaaaacctacgacgtgtccgcgttgcctggtgaagtattccttgcgacaggattagcggtatttttagtactgaccggtatccaacttctgcggctggttttttgccgtcagattatccttgcagaatggcattcacgtgccagtaagaactttttttgtgctgccacaatttcaggttttctgctcgcaatgggactgctaccttacagtatcctgctggcgaaggtgctctggatagcggccgtcgccgcccagatttttttcctcacgtgtacattccgccgctggcttatcgatcagctcgatacgcatgaaatcagcccggtatggcttatacctatggtgggcaacgcctctccggctttcgcgggcgtggatttggggtttccgggcctcagtaagatgctgctgttttcagctctgctctgctgggcgctttttatgccgcttatcctctggcgtatcgtgtttgttcgtcctgttaccccgcagaaggccatgcccggcctggctattatcgcaaaccccctggggctgggcaattga

SEQ ID NO: 222289 - DNA, 1503 bp, Klebsiella pneumoniae
atgctaaatttccgctatattggtcctgtgccattactgtttaaaggtccaattcaggtaaataattggaccacaggggtttgtgtgattgaaattcacctcagccgcagcgcgacggctcttccgctttaccatcagattgagcagcagatcagctggcagatcatcaaaggccgactgaattatggtgagtacttacccccctcgcgggaactggcccgccagctgagggtatcccggggaagcgttgtccgggcttatgaagcgctttgcgtgaaagagtactgtcacagccatacgggaagaggaacgatggtgatttaccgggaaaagccggatgcgtcaccgcctggtccggttgcggctgccccctccccgatcgcctacgcgagcgataaatttcttcccgggggcttatccctgcttcccagccatgccagcacggcccatcttccggtcagtgagttccggcaggctttcaaccgcgtgctgcgttatcctgacaggcttaatcagtttggcgagagcgccgggaatctggagctacgtcaactaatctgcgaccaaatccttccttctcggggcatctcagccaccccccaggaagtgctgattgtccccggttcacagtatggaagtctgcttctggccatgacggtacgccaggagagaacatgttttcattttggcgagccgggctacctggagtttgcccgtaatttttcgcgtttcggctacaatctacagtcacacaggatggatcctgagggaatcgatctatccgactttcggccaacggcgaaggatattctttatctgatgcctgaacatcattttccgcaatgtatcacgttgtcggatagcagacgaagcgaaataattcatttggcaagtcagaaaaaggtgcttctgttggaagacgattacgacagtgaattttacttcgacaaagttccccgccctgccctccgttcaaccgcagcctcagaacaggtcgtatatatgggtaccttttccaaagtacttttcaataacgttcggctcggatatctggttgcagacagccatctaatacaacagatggctgctctacactggagtctgtcacgcggtacaagcgggcttgtgcaacaatgggtagctgaattgctgaaaagtggaacatatgcgagacatttgcgaagaatgcgaacggtataccggcataaacgagatgatatggtggctctggtacggaaatacctgccggacgcacagttcagcgtcccgccaggtggcctgcaactttacgtcaaattcagcgagcctgaaaaagccatctgggtttatgactggctttccggaaacaatattcaggttgctgatacaggaaactacacgttagatactgccgcgacgtctgattttatcgtattagggttcgcgaatactgatgtgaatgaatgcgagacggttcttgaaaggctgagtcacgcactgtattcaggcctcgacaggatctga

SEQ ID NO: 222290 - DNA, 1389 bp, Klebsiella pneumoniae
atgactaccgaaattcgtgcgctttatacccggcttccggccattgaccgcttactccgcgaccccgctttttcctccctgctggcgcagcacggccattcgcaggtggtgacgcagctgcgccagatgctggacgaggcgcgggaacagatccgccagtgtcagacactgcctgactggagccatgactggctgcacgcctgtgagcagcggctcaccgccggccagcggagcgccctgcgtccggtgtttaatctcaccggtacggtattgcataccaatctggggcgcgccatccaggcggagtcggccgtggaggcggttgccagcgcgatgcgcgcgccggtgacgctcgaatatgatctcgacgacgccgggcgcggccatcgcgatcgcgccattgccgatctgctgtgccagatcaccggcgcggaagatgcctgtatcgtgaacaacaacgcggcggccgttctgctgatgctggcggccaccgccagcggtcgcgaagtggtggtctctcgcggcgaactggtggagatcggcggggcatttcgcatccccgacgtgatgcgtcaggcgggttgtcagctgcacgaagtgggtagcaccaaccgcacccatgccaaagactatcgtcaggcggtgaatgacaataccgcgctgctgatgaaggttcacaccagcaactacagcattgaaggctttaccaaagccgtcgacgaagcggagctggcggccattggccgcgaactggacatcccggtggtggccgacctgggcagcgggtcgctggtggatctcagccagtatggcctgccgaaggagccgatgccgcaggagatgatctccgccggggtgagcctggtcagtttctccggcgacaagctgctcggcggcccgcaggccgggattatcgtcggcaaacgcgcgctgattgcccagctgcaaagccatccgctgaagcgggccctgcgcgccgataaaatgaccctcgcggcgctggaggctacgctgcgcctctatcagcacccggaggcgctgagggagaaattgccgacgctgcgcctgctcacccgtccggcggaggagatccgccggctggctgaacgcctgcagcctgacctggcggcacactatgctgattttgccgtcagcgtggcagcctgccagtcgcagattggcagcggctcgttacccgtcgaccgcctgcccagcgcggcgttgacctttaccccgcatgacggccgcggtagctggctggaggcgctggcggcccgctggcgcgcgctgccgtgtccggtgattggccgcatttatgacggtcggctctggctggacctgcgctgtctggaagatgaaacccgctttatggagatgttgttacgatga

SEQ ID NO: 222291 - DNA, 1059 bp, Klebsiella pneumoniae
atggacggtacctaccgcggcgctgggggcgtatttattgttagcgcgcttattttattaatgaactataaccacccttacacctttctggcgcaaaaggcggtgatatctattcctattacgccgcaggttaccggagtggttaacagcgtcaccgacaaagcgaatcagcgcgtcaaaaagggtgaggtgctttttactattgacccggcgcgctatcaggcgcgggtcgaccgtctgcaggccgacctggtgacggcgctgcacagtattaacaccctcaaagcgcagctctctgaagcccaggccaacaccacccgcgtgtcggcggaacgcgatcgcttatacaaggactatcagcgctacctgaaagggagccaggcgcgggtgaacccgttctcggaaagcgacatcgataacgccaggcagaattaccttgcccaggacgcgctggtcaaggcgtcggtggcggagcaggcgcagatccagagccagctggacagcatgatcaacggcgagcagtcgcaagtggccagcctgcgcgcccagctggcggaggcgaaatataatctcgatcagaccaccgtgcgggcgccaagcgatgggtatatcacccaggtgctgatccgtccggggacctatgccgcctcgctgccgctgcgtccggtgatggtgtttatccccgagcaaaaacggctgatcgtcgcccagtttcggcaaaattccctgttaaggctggagaaaggcgacgacgcggaagcggtgtttaacgccctgcccggacaggtattccacggcaaactggtgagcattttaccggtggtgccggggggaacctatcaggcgcagggggcgttgcagtcgctgaccgtgacgccgggcagcgatggcgtgctggcgaccattgagctcgatccgaatgccgaaatcgatgcactacccgatggcatctatgcgcaggtggcggtctactccgaccatttcgcccacgtttcggtgatgcgtaaagtgctgctgcggatgaccagctggatgcactacctctatctcgaccattaa

SEQ ID NO: 222292 - DNA, 537 bp, Klebsiella pneumoniae
atgcaaacactttcctttcaacaaaataccggattcaacaccggcgccctgataaagcgaaatcagctgagagagtcagatcacgacgctattcgctctgctgttcgcgcctgggctgcagctgagggccaggatgttgtatcggcacatatcatcgatgagtggcgccagcagggcggtgaggagatcgcgttccctgatgatatcagccgtgcccgacagaagctttttcgctacctggacaacccggccgagtctgagcgctatcgcgagtacgttcgccttcttaccccggcaatcatggccgttcttccgctggagttccgacatcgtctgatgccacaggacgatattttgtcgcgcctgtcttcggccatgaaggaatgcgctgaagcaaagcaagcggtgatgctgaacgcgccagagcaccagaaactgaaggaggtgagcgagggaatagcgtcgcttttcaggctaatgcctgagcagacaggaacgctgatgacgatcgtgagctcaatgcttggcgtgatgtaa

SEQ ID NO: 222293 - DNA, 861 bp, Klebsiella pneumoniae
atggccgacctggctaacgggtataccaagatcgcaaacgagatacagaagctcaagccacgtctgcggatgtctggtcgtgagtggcagtgtcttgaggctgttatctggcttacctatggatggaacaagaagcaggaccgagtaacaaacacggtgattgctgagcttacagacctcggagagtcgcatatttccgacacaatcaaatctctcgcggagcggaaaattatcttcgctcataagcagggagtgatgaaaattgtcggtataaatactgagctatctgagtggattttagacaaaccgaaaacgggaaaactcttcccggaatcgggaaaagtgttaccgaaaacgggaaaacctttcccggaaacgggagacacccaatacaagaacaagaacaatagtaaaagatcttcttcgtctcggaattctaaagaatcccgaaacgaggaaaccttgaagtttctctctcgtcatccagaagcggccgatgggatttatacccctgcgggtaaatcctggggaacagctgacgacctcaaagccgcgcgatggattttcgataaagccctgaccgttaatgcctccctctcagagccgaactgggttgaatgggcgaatgccatccgcctgatgcgcctgcaggacaagcgcacgcactatgaaatctgcgaactgttcaagtgggcaaatgaggatggtttctggcagggaaacatcctctgcccctcaaaactacgtaagaagtgggaccaactcacaactcaacgcctgcgcagccatggtccatcaagaaactcatcaggcgccagtgcgctggacaacacagactggatcgacggggtactcgaatga

SEQ ID NO: 222294 - DNA, 501 bp, Klebsiella pneumoniae
atgactgatatcaccgaactggcgcagagagccagaatcaacgctgaatgtggtgagcatctttccccggcggagaccttggagcttgtagaggcactggaatcagagaaacgtatttgcgcaacgtggagaaaaacagctaagtcgaccggtgaaaagctggagaaggcgcagaccatcaacgcagcagccgaaaagctggttcgctgcaaaggtcgctatcacagcgagcagaactaccgagcactggcggcactgtttggcgtgaaaaccccggacctgccgccgttggagcatgaaaacgtccattatgccgatgctgcagagatggagatcgcagcactgcgccagcgcatcgccgagctggagtcccgcaccgtgaagcttccgccaacattctggtatgagcacgacgatttgtcgcgagatgttcctgtgcttgataagcgcttggtcaagaagatgctccgagaggctggcatcaaggtggaggccgagtga

SEQ ID NO: 222295 - DNA, 216 bp, Klebsiella pneumoniae
atggctatagaaaacccgagttcatgcccgcactgcggcggtgagaatggattccacacgaaagaggttgtggatttcaagcagttttatgcttgggatggctctttccttgaggggcagcacaccagcggcattcgcggcgggaaagcattctactgctgcgactgtggtcggaatataacatcgcgcatcaataagccaggagccaaccaatga

SEQ ID NO: 222296 - DNA, 636 bp, Klebsiella pneumoniae
atgaccagcaaattaaccagagagcgcctgcaggaaatcgctgaagatggattcctgaagcatggtgaaagcaaagagctggcccgcatggcgctggccgcaatggacagcgagccggtgatattgtaccgggagcgcaatccctacaacggcttaaccacaggctggcatgagcttaccgaaaacgagttctcattcatcaaagagaatgccggggaaaatgcagagttcctcacgctctatcgccacgcgcagccggtgccggtagtgccggaggaaaaaccaattccaaatacactgagcatgtacgccgtggatgcagtagcagccatcgctgaggtgaagggctggaacgcctgccgcgccgccatgctcgcagccgacccccagctacccggcagtgaccccgctaccgtgccgggtaaatggattccggtaagcgagcagatgccgcccagtcgtcatgaggtattggtcgggcgttggtggggagagaagccgcggtggtgttgcaaatgggcaacgtatatccctgggcacccagattcgcagagtagcggctggttgatccccggcgcgtcatggacgccaactcactggatgccgctgccggcagccccgcaggaggtgaggtga

SEQ ID NO: 222297 - DNA, 171 bp, Klebsiella pneumoniae
atgcaacaacgcaaaaaatcaaaaaacaatcgcaactacctcatcaaatgtacctgccctaactgcatcaaccaatcagaacatagttacacccgagtccaaaaaggttctgcgctgatgtgcccccactgcagtaagattttcactcaagacaaactccctctagcttag

SEQ ID NO: 222298 - DNA, 2157 bp, Klebsiella pneumoniae
atgaaactaaaagataaacaaagtaattccattagcagtaaaaatgatgaaatcgatttgagaaaaattattggcactctcatcgatgataaatggctaatagcatcaattattggtgtgtttactgctgtatcgcttatatatacggttattgctcagcctatttatagatccgatgcactggttcaggtggaaaaatcaccgggtgtttcatcaataatagatggtgcatcagatttattcccgcaatctgatccgacgtccgcaacagaaattgaaattattaaatctagaatggtaatagggaaagcaataaatgacttaggtttagaaaatgaagtaaatagaaaatccctgcctataattggtggagtatgggatcgtattactgggaaaactaaaaaaggaatatctgtagaattatttaaagtccctgagagtgagataaacaaaaaatttaatatttcctttactaatgggaaagattttgttttaagtgacgaagataaaaatatactaaagggcaccataggtaaaattgcctataacgataaatatagtattcttatcacatctggtacagtcgctgagggtgatgaatatactcttgtaaaacgtcattttttgacaacatataataatttactaacaaattttgatgtaagcgataaaggtaaggacactggtgttttggggatgacctatgataaccaagaccctgatttcgcttcgaaggtattaaatagtattacagaaaactatttactacagaatataaatagaaaaacggaacaagctcaaaaaagtttagattttcttaaggaacagttacctaaagtaagaaatcaacttgatgaatatgagcaaaaattaaatggctttaggcgtcaaagttcgtcagttgatttatccctagaagcaaaatcgcttctggataacttggtgcaactcgatgctcaaattaatcaattgacatttaaagagactgatatagctcaactttttacaaaggatcacccatcatacaaagcattattagagaagaaagcaatattagaaaaagaaaaattgagattaagcaaagaagtgtctcaattaccaatgactcaacaggaaataattagactttctcgtgatgttgatgtacagcagcaggtatatctacaaatgcttaacaaacaacaggaattgggtgttattaaagcaagtgctatcggctatgtaagaataatcgatcaggcgatgacgagactctctccggtggaacctcgtaaaattatagtcattttacttggtatatttttggggaccttagttgctgcagcatttagtcttgtcagaaaagcgttacatcgaggtgtagataacccagaaatgttagaagcagcaggtattgatgtgcttgcaagtattccattttcagaatggcagcggaaagaacttattaaatctaatctagctgctgatggaaaaattaaattacttgcaagtagtaatcctagcgatcttgcaattgagtcaatacgaagcttacgtaccagtattcatttcagtatgatggaagctaaaaataacatcttgatgatttctggtgtaagcccaaatattggtaaatcatttattagttcaaacctttcggcagtgcttgcgcaaagtggaaaacgtacacttttgatcgattctgatttgcgtaaagggtatttgcatgatgtatttaacctccaggataataaagtaggcttaacagagtttttggaagggaaaattaatcataaggatattgtgcaaaaaattgcggatgttgaaaatttatgggttatcccacgaggtagtattccagaaaatccatcagaactgctgatgaaagatagactaaaaactcttctagaagaagtttcacaaagttttgatgtagttattatagatacaccacctattcttgctgttactgatgctgctataataggtctgtatagcggtactaacttgctcgttacccgttttgaagaaaacagtgtgaaggaagttgaggttagtatccgccgcttcgcacaaaatggtattgttattaaaggtacaatattaaatgcagttttaaaaagagcttcttcatattattcatacggttattacgagtatgaatataaagaggattga

SEQ ID NO: 222299 - DNA, 1134 bp, Klebsiella pneumoniae
atgacgaaaaaaaatgtaaaactttcagtattggcgttgattataggattattgtcggggtgtactgtattacccggacaagatctaaatagtttacgaaaaaataccgttgaattacctgatagtgattatgaccttgataagttggtcgatgtttatccaatgactcctcagttgattgaacaattacgaccacaatcaattttagctcgaccaaaccaagaattagacactctgttaaaaagctatgagtatcgaattggtgttggtgatgttcttatggtcacagtttgggatcacccagaattaactactcctgctggtcagtaccgcagtgccagtgatactggtaactgggttaatgcagacggctcaatcttttatccatatattggaagggttcaggtcgcaggtaaaaccttagaccaggtccgtcaagtaattactaatagattaaccacatatattgaaagtccacaagtagatgtaagtgtagcagcattccgttcacaaaaagtatatgtcacaggtgaggttgcaaaatcagggcagcaacctattacgaatattcctttgacggttatggatgccattaatgctgctggtggattagcagcggatgccgattggagaaatgtcgtattaacacataacggtaaagatacaaaaatttcgctttatgccttaatgcaaaaaggtgatcttactcagaatcatctcctatatccgggtgatatactttttgtaccacgaaatgatgacttgaaagtctttgtcatgggagaagtagggaaacaaaccaccctgaaaatggaccgaagtggaatgacgttggcagaagctcttggaaatgcgaatggaatttcccaagaactcagtgatgctactggtatttttgtagtacgccaattgaaagggaacaaagatggtaagattgctagcgtgtaccagcttaatgcccaagatgcttcagctatggttatgggaacagagtttcaattacaaccatatgacattgtatttgtgacatcgttgccgattgttcgctggaataggcttattaaccagctattaccaacaattaacagtgtgcggtatatggtgagtactgcagatagcattagaaagtggtaa

SEQ ID NO: 222300 - DNA, 1200 bp, Klebsiella pneumoniae
gtgattactaacccggaaaccaccgccgcctcgccggatatggccattccgttcggcctcaagttcagcggctacgcccgctatggcgcccacttccagaccggcgaccagaaatatgtcggcgtcgacggctcctataacggcgcctcggcgatcggccgtctgggcaacgaaagcaacggcggcgaattccagatcagcaaggccttcaaaagcgcgcagggggctatctgggatcttaacgtgatgttcgaccactggagcgacgaagttaacctgaagaaggcctacgtcggggtcaccaacgtgctggaatccaaccccaacgcctatatctgggccggccgcgacttccaccagcgtccgcaacaggggatcaacgactacttctggatgaaccacgacggccagggcgccggggtgaagaactttgatatcggcggcgtgcagttcgacgtggcggcggtctcgcaggtgaaatcctgtagtccggaagtgatggccgacgagaccaacccgtcgcgcatcacctgtaccggcagctccgacaccggcgacaacggccactacgcgctgaccaccaaaacccacaacatcaaggccgggccgatcgacgtcgaggtgtacgccaactacggctttgattcgaaggcggtggacagcgacgcgcgtctcgaagcctggcagggcgggctggtgctgagccacaccaacgacagcggggtgaacaaggtgatcctgcgctattccgacaactcggataacagcgtctataacaaaaccgacgacctgaccacggtctacgccagcttcgagggcagccataagttcacccagcaggcgcaggtggaatatctgctggccttccacgactacgacaacggcaaagataataccgacaaccgcaaaaactacggcgccatcgtccggccgatgtacttctggaacgacgtgcactccacctggctggaagcgggctaccagcgcgtggattacgagcagggcggggataaccacggctggaagctgacgctgtcgcagaacatcgccatcggcatggggccggagttccgtccgatgctgcgcttctacgtgaccggcggccaggtggataacgagcacaccgcgaaggtcaacaacaccaaagaccagcagctggattcgctgaacgtcggcgggatgtttgaggcgtggttctga

SEQ ID NO: 222301 - DNA, 1200 bp, Klebsiella pneumoniae
atgtttaacccagaccagaatcgtcttgcccccacgctggcgatgatcatggccgcgtcgcttgtgggatttatcaccggctatacggtgccgttaatcagtcttgagctggcgcagcagcagatcgcgccgctgtacgtcggcctgctggccgccctgccgcccgccggcatgatgatctcctctttcctctctcctgcgctgtgccggcgcgttgaaatgggcgtgctgctgagcggcagtctgatcctgctggcgctggcgaccatcgcctcatgcatgactaccgatatgacgctgcttttgctgccgcgcctgctgaccggcctggcctccggggtcattatcgtactcggcgaaagctggatcaccggcggcgcggcgggcagccagcgcgctaccctcaccggtctctacgcctcggcctttaccggctgccagctggccgggccgctgctgatctccgtcggccccgcctggcagacctcagcgctgatagcgattgtcgcggtcaccgccgtctgcctgctgatgctgcgccatctgcccaccggcactcgtgaaagcctcggggagcgcgccagctggcgcagcctcggcgcctttctgccggtactggcctccggggtcttctgcttcgccttctttgacgccagcatcctcgccctgctgccgctgtacggcatggacaaagggctgaatgaagggctggcggtgctgctggtcaccgtggtgcttaccggagatgcgatgttccagaccccgctcggctggctggccgaccgggtcgggattcgccgcgtgcatctgagctgcgcggtggttttcagcctgtcgctgctggccctgccgctgatgctcggctcgcgcattcagctgatggccatttgtctgctgctgggcgccgcggcgggcgcgctttataccctgtcgctggtgcgggcggggaaaaccttcaatgggcagaagctgattatgattaacgccctgttcggctttttctggtccgccggcagcgttgccgggccggtagtcagcggcatgctgatcggcatcactggttacgatggcctgatcgtcaccctggtggccagcggcgtgctgttcctgttgattcagtgtctgtgcaaaaacgagaaaaccctgcttgccagtgagcaggaagatgacatggacgaggcgacggagtccgcacggtag

SEQ ID NO: 222302 - DNA, 1770 bp, Klebsiella pneumoniae
atgaatgtattacgcagaaagtggcaggggctgccgcgcggcgtggtggtgtgcatcacggcgctggtgatttatgtcccgctgttatttattgtggtgcagagttttctctccgcgccgttcttttcccgctccaaatcctggagcctggaagccttcgcctttatttttaccgacccggatttttatctggcgttaaggtcaggctttattctggcctttggcctggtgattatcgccattccactgggcggtattttggcctttctgatggtacgcaccgatttacccggccggcggttcattgagccgctgatcctggtgccgatcttcgtctcgccgatggtgctgggctttggctacgtggtggccgccgggccggtaggcttcttttcccagtgggcgcagcagctgatcggctttgtgccgtggaatatctactcgatgttcagcattgtggtcatcgccggcttaacccacgtgccgcacgcctatctttatatctcttcggcgctgcgcagcgtcggttccgacgtggaagaggcggcgcgcaccgtcggcgccacgccgctgcaggtgatgacctcggtgagtctgccgatggtgcggccgtccatcctttacgcctgcgtgctgctcttcttcctcggtctggaggttttcggtctgatgctggtgctgggcgaccccgagggcaacatggtgctggcgacctatctctataagctgaccaacaagctcggcaccccctcctaccatctgatggcggcggtggcggtggtgctgatctgcatcaccatcccgctggtgatgctccagaggcggctgatgcgcaccgccaaccgctttgtcaccatgaagggcaaggcgtcgcaggcgcgggcgctgccgctgggtaaatggcgttgggtggccggggcggtggtggtggcctggctgacggtgaccatcggcgtgccgctgctcggcgtggcgctgcgggcctttatctccaactggggcgtcggcgtgtcgctgtgggatgagctgtcgctgacgacgttccacaatatctggcagcagcccaacctgctgcgggcgatcgtcaactcgatggctatcggcatcgtcggcggcgcgctggcggtgatctgctatctgtttgtcggtatcgccatgcaccgcaaagcggacaacgtcacccgctttcttgattacagcgtactggtcccgcgcgcggtgccggggctgctggccggtctggccttcctgtgggtgttcctgtttgtgccgatgtggctcgatcagtcgctgaagcacggctggctctcggcgctgccggtggccgactggctgcgggagcaccttatcgtgcagctgcgcgcgctgcgcaacaccatcttcagcgtctggctggcctacaccgtggtatggatggcttatggcctgcggctcatctcttcgacgctgctgcaggtgggcccggagctggaggaggcggcgcgcagcaccggcgcctcgcgggggcagatcacccgccacgtcaccgttcctctgtcgcgctatgggctgattggctcctggctgctgatgttcctgatctttgagcgcgagtattccaccggcgtctatctgctgtcgccgggtaccgaaaccatcggctcgatgctggtgtcgctgtgggcggcgggggccatcgatatcgtcgcggcgctctcctttatcaatattctgctggtggtgattggcctgggtatcgccctgcgctttggagtgaaattacatgattga

SEQ ID NO: 222303 - DNA, 786 bp, Klebsiella pneumoniae
atggccgtaaatgtctcaagctttgaggatgaaaaaaccggcgggattcaggttatcgcccgcgcagctgcaattttgaatgtgctgggaaaacaccctggcggcatgagtctgggagaaattgcgcaggaggttgctctccctcgttcaacggtgcagcgtattgtcgcggctttagatagcgctcaacttgtgcgtagcagcggggccggtggcctgcgtctgggacctgcactactcaaacttatttccagtgtgcacagcgatgtcgtggatcttgtacgtcccttcctagagcaactttcggccaatattaatgaaacagtgaccctggcacgtgccagcggtacacagctggcaatcatccactacgtcgtagcaacacgggaattacgtgttgtacctcgtattggacttaatttgccgctctacagcacttccggcggacgtgtgttactggctatggaaagtgatgaagatgtccgcatactggtaggcgaagcctatgaagatctcaccggaatgacagttaaaactcttccacagcttctggagctgatcgctgatgttcgtgccaaagggctggctatagatctgggtgaaactcttgagggtgtctgcacgatagcggtagcgctggacacactttttggtcgtttttctatctcattattagttccagcgccacgtttccataaacatgaaaccttttatcggcaagaactcatgcaatgcaaggaggcaatagttaatgaaattggaagaataatttcggtaggagaataa

SEQ ID NO: 222304 - DNA, 1584 bp, Klebsiella pneumoniae
atgaatgcacagcgttctactccaccttcgcccccctttacctggcgccttgcaatgggatttgtggggatactcatcgcagccttaacttccggacttaatggtcgggttatagatatagcgcttgcggatgtgcgtgccggaattggcgtgacttatgatcaagccagttggttcacctctgcctaccaggccgcagaagtagtggcgatgatgatcgcaccatggtttgctgtgactttttcgctgcgtaaattcgcgcttacttgcgctggcggttttatggtttgcggcatacttttacccttgctcccgaatgcgccgctgtttattctcttgcgaacgatacagggcctgtttagcggtgccctacctcccttactcatgactgtggcgctacgttttctgccaccatcgataaaactttatggacttggcgcttatgctctgactgcgacttttggtccaaatgtggccccttcactggcggcattctggacagatgatgtgagctggatgttcatgttctggcaagtggtccccgccattttgatttcgatgctctttattggctggggtttgccgcaggacccgattcacctcgaccgatttaaacagatcgacctgttcggtatgattaccggctgttctggaatggcgtttttgataatcgccatcactcagggtggacgtctggactggtttgaatcgcccttatttaatggcctgttatccagcgccttcgtgtgcctgacgattttcctgattaatgaatggtttcatcccctccctttgttcaaattacagatgctggagagaagtaacttttcatatggcctgatggcgctcgctgtagtgttggtactggcactggctggctctgctttgccgtccaatttctttggtaaagtagagggctttcgaacagtgcagtttgccccgctggctttgataattgggctcccgcagttaattatcaccccgcttgttgccgcattgcttagtctgcgctgggttgattgtcgctggctgatagctttcgggattgttctgatgatttctgccagcctgatgggtatgcagataaccagcgattggtcacgccagaatttctgggcaatacagcttctgcaggcgattggattaccgtcaattattttaccgttgcttatgagcgcaaccagcgttgtggctccccctgaaggacattatgcctctgctatgttcaataccgtacggggtttttcaagcatcgcagctggcgttttagtggaatggtttataaatgacagagagcaatttcattctaatgttctggtcaataacgtagccaaccgcccatggttgatatcgacaccggtcagcgagcaggccagcagcagcattcctttattacacgacggcagcatcagcaacaccgagaacatcgctggatttatcaccttattaaaacatcaggcaattgttctgagtctggccgatagctatctgctgatgactggctttgccgtccttctgttattactcactgtctggttgccaaaacgtgtctggccgccccagacacttttcaacctgcaatga

SEQ ID NO: 222305 - DNA, 1029 bp, Klebsiella pneumoniae
atgaaattttcggtatcgagaagaacgactctgctcagcgcattattaatcctgatgatgacgatgatatttttcgtctggtcgacaatgctgaacaatgatacccgtaccaatgatgcctatgtgaatgcggattacacactggtagcaccaaaagtatcgggttatatcaaaaatatctatgttgcggataaccaacgtgtcaaagcagggcaaacactggccacgctggatgaccgtgactacaaaatagcgcttgaaatggcgcaagctaatttgcagcttagtgatgcaaaacgcctgagcagccttgcacaactggagcagcaacaatccattattgctcagacaaaagcgacccttttagccagtcaggcatcggcgcagtatgccagtcagaatgctgaacgttttaataagctttatcaaagaggtaccgtcgctgcggacgatcaacaaaaagcccattcaacacagcgttctgcatccgcagtcgttcgtcagaacgaagctgctctgacctcagcagagaaacaggtaggcgtgttgagggctgcattacgtcaggcggaagccgatgttgcagtcgcgcaggcaaaagtcagtcaggcgaggcttaacctttcttatacgcatattgttgcaccagtcgatgggatggtaggccagcgttcggtgcgcctcggagcgtacgttaacgcagggacacgtctgctggccgtggttccgctacatcaaacttacatcactgccaattatcttgaaacacagttggcaaatgttcagcaggggcagaaggtcttaattaaaattgatgccatgcctggcaaaaagtttactggacatgtcgatagtatcgctcctgcaaccggcgcaacgttttcagccatccagccagacaatgcaacgggtaactttactaaagtcgtccagcgtttaccggtgaaaatagtgctggatggtaatcaacccgatgcaaaattattgcgcgtcgggatgtcagccgttcctgaaattaaaatacgctaa

SEQ ID NO: 222306 - DNA, 1164 bp, Klebsiella pneumoniae
atggggtacaaagagatttatgcccgctatcgtcagcaaattcaggacggccttttgaaaccgggggagcgcgttccctcaattcgttcgctggcgagcgagttgcaggtcgcgcgaaaaacggtggaaaccgcgtatgaaattcttactggagaaggctatttcgtaagtctgggggcgaaggggacctatataaatccggagctccggctgacctcaacggtcagagaagacaattatgtatcgtctcgttcacttgacacgccggttactgaaaggaagggtgatctccgactcggcattcctgcactggatgaattcccccataaaaaatggctgttgatatcgggaaaagcggcgcgaagtctgcgtccggaagaaatgctcatgcccccggtagtgggctttaagccattacgtgaggccattgcaagttatctcactatttcaagaggactgaattgccgaccagagcaaatcttcgttaccagcggctatcgggccaatttacggtttattctgtcggtacttgcacaacctgatgataaagtgctgtttgaagatcctggctacttttatggtcagcaattattgaagcgaatggcatccaaactgcactatatacctgttgatagacagggcatggatgttgattatcttcagcgctatcacaacgatgcacgcttcgctatcgttacacccactcatcaaagtccgctcgcagttagcctttcattaccgcgtaagcatcagttactgtcctgggcacagcaaaacaatagctggataattgaagatgattacgacggagagtttcactacacacgcaaagtaatcccggcgttgaaaagcctcgatacgcatgaccgggttatttataccggtacatttagtaaaacgataatgccagctatgcgtatcggatatatggtagtgccacaggagacggtaacccgtttcagtgaactgggtgaaatccttgaaacgggtctgccattactaccgcaaaaaatccttgcacagttccttagtgaagggcacttctaccggcatataaaaaagatgcgtttactctaccagcagcggcgtcgcatgatgcttgacgcaattgaaacgacctttccaggtttttttgaatttgaggtaatgataccaacgtgttga

SEQ ID NO: 222307 - DNA, 426 bp, Klebsiella pneumoniae; identical to SEQ ID NO: 199962

SEQ ID NO: 222308 - DNA, 234 bp, Klebsiella pneumoniae
atgcgtaccgtctacccgaataaattgcacgtcggtaatgccaatatattcaagcgctacgcgaatgtatggcgtaaactggtcatccgctacaaatggaccgtgtgcaaatacgctgccgctggcgacaacgcaatacacctttttgccgctgacgagccctatttttttgccctctggcgtaaaggcgaaagttcgtccggcgcgggttatatgatcgaaccaggcctttaa

SEQ ID NO: 222309 - DNA, 480 bp, Klebsiella pneumoniae
atgtcgtcacgtgtgaatcattttaaaaccattcccgcactggctaaaacactagccgatgcctctatggcattaggaaaagtctcgctggataaaaaacttaagcacttagtggatatccgagcctcacagatgaatcattgtgcgttttgtctggatatgcacgttaaagaagcaaaaatgcatggggagcgtgaactgcgtctttatcacgttgcaatctggcgggaatcgccactgttcagcgccaaagagaaagctgctctggcactgactgaagcgttgacacgcattggtgataatggtgtaagcgaagcgctttacagcgaattgcgcgaacatttctctgaagtggaagtatcagagttaactttcaccattgctgtaatcaacgcctggaatcgtctccagattttatcacagatgtcaccaggatcgatggatagcgcttacggtctggatcgtgctgaattacattaa

SEQ ID NO: 222310 - DNA, 450 bp, Klebsiella pneumoniae; identical to SEQ ID NO: 166891

SEQ ID NO: 222311 - DNA, 717 bp, Klebsiella pneumoniae
ttgaatattttaattcacagcaataatatttattttaatatcggtatcgcccagtgttttcgggatattcagaaaacagcgcccgaattaaaggttattcactccctgcccctcagccatcttccagaactgtccgggctggatgtgattattttgtcactggaaaactatcatgattacctggctgccgctgaaatcgctcagcactttcagggcctggtcattggctttacgtcagccggcaacgtaaggcgcggacgcgcctttttcgcggataccctactgtgggtcagccagcgcgaagcggtacgtgaagtgagccgccttctgcgctgcctggccgagcgccgctggccactcgtgccgcgtcaccaacgtcagagcgtttctttccgtcaacgagccccgctcaaccgcctggagatgcggatgattgatgccaccatgaagggtcagtcggttcatcaaatggccgctacgctggggattaatcgcaagcgggtctataacggcctggaaaggattaaagtgaatttccgcctggtcagtcatagccattttcatcatttcatgaccgacaggctctcttttagtcgcctgtctgccgacctccgatgcctgaccacagcagctaatgcaaccctgccgccgcgcgcagcctcgcggctggcggaaaatcattcatattatttgaaagagtttcgcaaattgttttga

SEQ ID NO: 222312 - DNA, 1023 bp, Klebsiella pneumoniae
atgactgttaaggtgatagaccttttttgtggcgctggcggattgactcatggcttgcaattggctggcttagatgtcgttgctggtattgatcttgagggggaatgccgattcccttatgaaagaaacaataaagcaaagttcattgagcaagatatagccaaagtgacaaaagaggcgctccttgagttgtatggtgatgcttccattaaagttttggctggatgcgcaccttgccaacctttttcaaggtatacgcaaggtaaggataaggctgaggataaaaaatggcctcttctttatgaatttgagcgtttaatccgtgaagtctctccagagattgtgactatggaaaatgttcctgatgtcacaaagcataaagtttatgatgacttttataactcattaataaatctaggttataacgtttgggcttcacgggttgattgtgttgaatatggtattcctcaaaatcgtgcgcgtcatgtcctactggcttcaaaactggggagtattgaattagtgaagtgtcaaggcgtccagcttaaaacagttaaggacgttattggtgcactgcctccattggaggatggcgaagctgacaagtcggatattttgcatcgggcaagcaagttaaccccaatcaacaaacagcgtatcatccattctgtccctggcggaacatggaaagactggccggaagagcttatcgctgcttgtcatcttaaatctagtggtaaaggctatgctagcgtatacgggcgtatgtcttgggataagcctagcccaacgattaccaccctttgttatggctttggaaatgggcgttttggtcatccggagcagaatagagctatatctttgcgtgaagcagccttattacaaactttccctatggattatgcgttcgtggcggatgagtctaaatttgttatgcgtagtattggaaaaatgattggtaatgctgtgcctgtcgagttaggtagagttataggtcaatctattaagcaacacttaagttaa

SEQ ID NO: 222313 - DNA, 684 bp, Klebsiella pneumoniae
atggacagttttcgtgaagattttgagattaggtcaggagaaatcttagcctatctagatcttttaagattcattgagcatgcaggcgctgaactgttatcctctgacgatcccgaaaataagttcgctattacggctcaatcacgtaaaaccttaaaaggaacggtatatatactgctgtataatctaattgaatcaactatgagggaagctatttgctttattcatgagaccatttatgacagaaacatacagtttgatacactcaagaaaaacttaaaatgtgaaatcttaaaaagattaaaaaacgactcagttagcgttgaaaatcttattaacggcctcacagaaaaaggaatatcctgtggcatttcctatagtacctttaataaaaagaaactgttttcaggtaatatagaccgagaggaaataaaagagaaatcacaaatttatggtttttcaacacagtcagactatgcgcataccaaacatggtgaaaaattagcaacggtcaaacaacaccgtaatgatttggctcatggaaatgtttcttttgctgaactgggtaaaaacgtttcatatcaagacttagaaaatgtttctctagaggtgattgcatatctagactctatagcaaataatatcgaacattatattaactgtaatggttatcttgcttcttga

SEQ ID NO: 222314 - DNA, 1143 bp, Klebsiella pneumoniae
atggacattcttgagttgaaaacacaacttaaatccgaagatgatcccaagaaaagagcagatctacttgctcagttagaagtttttaaacaaaatgccgaagagcaggttcgcgcagagcaaaaagatgtagatttcgaaactaaagagtttaccgtcgagcttctggtcaataagtatcacagtgggttggaagacgacactaatgaactgtttgttccagattatcaaagagatttcgtctggagtgaaaaaaggcagtctcgcttaattgaatctttgatactaggatttccgatcccatatatttttacagcagatgttctttctgaagatccagagttggatggccgtatagaaatagttgacggctcgcaacgtgtaagaacaatacatgcattcattcacaataaattgactttgcaagatttaaagtcattaagctcccttaacggatttaatttccaagacttacctttatcaagacaacgtcgctttatgcgaattccagtacgagtaattgaattaagttcaaaatgtaatgaggaaactcgtcgagatttgtttgagagaataaactctggaagtgacattctcaaggacatggaagtgcgtaaaggttctgaacttggttcaactactttatatacacaagtaataaaaccatgctcggccataccacaattcaaggaacttgctccattatcagaagcaaaagagaagcgtgatgaacgactcgagtttacgttacgattctttgcttatttagataactaccaaagctttgaccattcggttcgtgactttttgaatgattatatgagcgcaaatggagatattgacgctgctaaacaaagctcaatgaaaacagaattcagcaatatgttagattttgtcgaaaagtatttccctgctggttttagaaaaacggttacagcaaaatcaacacctcgcgttcgatttgaatccattgctgttggtacagctttagcgcttcgtttagatccgcatttagcgccaaaaaaccttgactggattagctctgaaaaattcaaaggactaacaacttcggacggagcaaatagtcgtattaaagtaattgagagaatcgaatacgttcgagaccaactcttagagggataa

SEQ ID NO: 222315 - DNA, 1050 bp, Klebsiella pneumoniae
atggctaaccgcaaaaaccgcagcaaggcaccgcgcggccagaccgccaccgatacggccaacatggtcagtaatgcacatgcggaggcgtttacgtttggcgatccgatccccgtgatggaccgccgggagttatttgattacctggagtgcgtacaggtagaccgctggtacgacccaccgatcagcatggatggcctggcgcgaacttaccgcgccgccgtgcatcactccagcgctattcaggtaaaacgtaatattcttaccagtaccttcatccctcatcgctggctgtctaaacaagccttttcccggttcgcccaggactttctggtattcggtaatgcctaccttgaaaaacgcatgaaccggttagggcagatcatgcagctgcgcgcctcgcttgccaaatatacccgtcgtggcattgacccggacacctactggtttgcacagtatggctacaactcacagccctatcagttcgatgagggaagcgtgtttcacctgatggaacccgacgttaaccaggaactttacgggatgccggaatacctctccgctattccctccgccctgctgaatgaatcggccacgctgtttcgccgtaaatattaccttaatggtagccatgctggtttcatcatgtacatgagcgaccccgccgccgatcagaaagacgtggacaacatacgcgaagcacttaaaaaatcgaaaggaccaggcaacttccgcaacctgtttatgtacagcccgaacggcaagaaagacggcattcagatcatcccgctgtcagaagtcgccgcgaaagatgagtttcttaacattaagaatgtgagccgtgatgacatgctggcagctcaccgcgtgccgccgcagctgatggggattattccaacgaataccggcgggtttggcgatgtggaaaaagcggcgcgcgttttcgttcgcaacgaacttacccccctgcaaggccgtatcacagaagttaacgagtggctgggtgatgaggtgatacgctttgatccctacctgaccgatgaagactga

SEQ ID NO: 222316 - DNA, 1713 bp, Klebsiella pneumoniae
atgtactttcagggataccgcgtagcccgcattgctgaaatgctgggcgagaaagttgcaaccgttcacagctggaaaaaacgcgataagtggggcaaatatggtccactagatcagatgcagctcaccaccgccgcacgttactgccagctcgtcatgaaggagcagaaggaaggaaaggactttaaagaaattgacctgctggcgcgtcagtcagaacgacaggccaggatcggcaaatttaacaatggcgggaatgaagcagatctgaatcccaacgtggcgaaccgcaataaaggcccgcgcaagccaccggaaaaaaacctgtttaccgacgagcagatcgaaaagctggaagagattttccgcgccggtatgttcgagtaccagcgccactggtgggacgctggcatcaagcaccgtatccgcaacctcttaaagtcacgccagattggtgcaacctactatttcgcccgtgaagcgttgatagacgcgctgaccacgggacgaaatcaaatctttctgtcagcgagtaaagctcaggcacacgtttttaaacagtacatcatcgacttcgcaaaagaggtggacgttgagctgaaaggcgatccgatggtgctgcctaacggagcctgtctttacttcctcggtacaaacgcccgtaccgcgcagagctatcacggcaatctgtatcttgatgagtatttttggatacctaaattccaggagctgcgcaaggtggcctccggtatggcgctgcacaaaaaatggcgccagacctatttctctacaccttccagcctgacgcacagcgcctacccgttctggtctggtgccctgttcaataaagggcgcccgaaagccgacagagtagaatttgacctttctcacagcagcctggcgcacggcgttttatgccctgacggccagtaccgccagatagtcaccattgaagatgccgtaaacggcgggtgtaaccttttcgacctggaccagctgcgcctggagtacagcccggacgaatacaacaacctgctgatgtgtcagtttgttgacgacctggcgtccgtgttcccgctggcgttgttgcagtcctgcatggttgacagctgggatgtgtgggacgatttcgaaccgcttttactgcgtccgtttgcatatcaccctgtctggatcggctatgacccggcaaaaggaacgcagaacggtgacagcgccggttgcgtggtcattgcgcctcccatcgtccccggcggtaaattccgtattcttgagcgtcaccagtggcgcgggatggacttccgcgcccaggcatcagcaattgaggaaatcaccaggcgctacaacgtgacctacatcggcatagactcgaccggcgtaggcgatggcgtttacaaaacggttaagcagtttttccctgccgcgcgcgagtttgtctacaacccgaccgtaaaaaatgccctggttcttaaagcctacgacatcatcagcgggcgccgcttggaatttgacgcggggatgctggatatcgcgcagtcctttatgtccattcgccgttcaaccaccgccagcggcaaccgaccaacctacgaagcagcccgcacagaggaagccagccacgcggatttagcctgggcaaccatgcacgcactttataacgaaccactggcaggagcttccgccagtaccagcaacatcgtggagattttttaa

SEQ ID NO: 222317 - DNA, 828 bp, Klebsiella pneumoniae
atggcaaaaaaatctaagcgttttcgtattggggtcgaaggggccacaactgacgggcgcgttattgagcgtgaatggctcacccagatggcagcgagctataacccgcaggtatacaccgcgctgatcaatatggaacacatcaagggcttcacccctgatgggcctttccgtcgttttggcatggtggaaaagctggaagcggaagaaatcaccgaaggggcattgtccgggaaaatggcgctgtatggctggattgccccgactgacgatctggtcacgatgaccagcaactggcagaagcttttcacctcaatggaagttaacaccagctttgccgataccggctccgcttatctggttggcctggcgattactgacgatcctgcaagcctcggcactgaaatgctgcagttcagcgccagcgcagaacataaccccctggcgcgccgcaagctggacaaagacaacctgtttaccgctgctgttgaaacgctgatcgagtttgaggatgtgccggaaaaaaccagcctatttacccgcgtgaaagagctgctgtcccgcaaaggcgccgatgataacgcccgatttgccgatgtgaatcaggctgttgaaaccatcgcgcgtgagcatcagacgctggcggagcaggtcagcacccatcaaaccgatttcagcaacaagctgagcgatatgcaaaaggttgttgaagagacaaccagcgcactctccaccctgcgtgagcagctttccacccaggacagccgcagcgagcgccgccctaatgcgaccggcaataacggcgcagaacaaaccaccgattgctga

SEQ ID NO: 222318 - DNA, 1149 bp, Klebsiella pneumoniae
atgaaaaaagagactcgctttaaatttaacggttatctgacgcagctcgccaaactcaacggcgtatctgtgagcgatatcgcctcgaaatatacggctgagccgtcagtggcgcagacgctggaaacgaaaatccaggagtcttcctcgttcctgcagaaaatcaacattgtcccggttgatgagcagtccggcgagcgtctggggctgggtattggttccagtattgccggaaatactgataccactcagaaagaccgtgaacccgttgatccgacttacatcgacggtgaagggtacaagtgtacccagaccaactctgatacggcgctgccctatgcgaagctggatttatgggccaaattccaggacttccagacgcgcatccgtgacgccatcattacccgtcaggcgcttgaccgcatcatgatcggcttcaacggcgtgaagcgtgagaaaacgtcagaccgcgtgacctatccactgctgcaggatgtgaatatcggctggctggaaaaaatccgccaggagaaacccgttcaggtgatggataagatcgtgtccgaaggcgaggtgatttctcagactatccgtgtcggtaaaggcggtgatttcctgaatctggacgcgctggttatgggcgccgtgaatgagaaaatcgcgccgtggtatcaggaagatacggagcttgtcgttatcgtcgggcgccaattactggcggataaatatttcccgatcgtcaaccgtgaccagccaaacagcgaagcgctggcggcggatcttatcatcagccagaaacgtatcggcaacctcccggccgttcgtgcgccgttcttcccggcgaatgccatgctgatcacccgcctggataacctgtctatttactggcaatcaggctcccgccgccgttcggtcatcgacaatccgaagcgtgaccgcgtggagaacttcgagtccgttaacgaggcgtatgttgtcgaagattacgacggcgtttgccttgttgagaacatcgaactgttgcccgtgcaggcaggtggcaatgccagcccagcgctgacaactgaaaccatccaggaaatcgtcacggcagcggtgaaaggcgcgcttgatgcgcaggcagctggcggtactggcgccggagcgtga

SEQ ID NO: 222319 - DNA, 654 bp, Klebsiella pneumoniae
atgaatccgttccgtgctcacactcagtatgtacaggcacaggatgccgcccggcagggcggcagtcatgccagtatgacgggctacaaccagatgctgttacagctgacagaacaccgcaggcgccttaaaaccgtccagtcaaatgagcgcaaggctcagctcaaacgtgagtttcttcccgcttatgcctcatggattgccggtttactggatgctgacgcgtcaggccaggacgacgtggctatgtacgtcatgatctggcgcattgatgccggagactataccggcgcgctggacattgcccgtcatgccattaaacacggctgggtcctgccgcagcgcttcaaccggacctgcgggaccgcagttgcggaagagtttgccgacgcggcaatgcgcgctttttctgccggtgaatcattcaatgccgccattcttacccaggtgctcgatatcgttgaaggtcaggatatgccggatcagtcccgcgcccgacttcataaggcgatgggctacgcgctgcgggataacgatcaggcagtggcggcacttaaccatctgaagcgtgccctgcagctggataacagttctggcgtcaaaaccgaaatcaacaagcttgaaagccgattgcgacaggcaatgtcggcttaa

SEQ ID NO: 222320 - DNA, 468 bp, Klebsiella pneumoniae
atgcaattcgtttcgccggaacaggccggggaaagtacccaggacgttattaaaaacaccagtttctggcctgatgtcagggtttcagagttccgccgtgatatgcgcatggatgggagtgtcaccgatccacgtctgcgtctggcgttgctgacagcaattgctgaagttaacgcagatctttatgagttccgcgagaaacaacgagagcaggggtatgcgagcttggccgacgtccctgctgatgtgatcgacggcgaaagccagcggctcatgctgtatcgccgtgcggtgttttgctgggcaaaagcaaacctggttgagcgctatcgcgattttgacgcaaccggcgatggaagcaagaaagccgaagatatcgaaacaaccttaggtgagctgtggcgcgatgtgcgctgggcggagtcccgtctgcgcgatatgccgcatatgacggtggagctgatttga

SEQ ID NO: 222321 - DNA, 216 bp, Klebsiella pneumoniae
atgacgcttgaacgaatcagcgcctttatcacttactgcgttgccctgcttctggcatggctcggcgatttgtctcttaaagatgtatcgaccattaccggtctggcgctggggattattactgcagcggtgacctgttatttacgctggaaagcctatcagctgctacgggacggcagaatatccaggggggaatatgagtccttcaatcgttaa

SEQ ID NO: 222322 - DNA, 510 bp, Klebsiella pneumoniae
atgagtccttcaatcgttaagcgttgcctggtcggcgcggtgttggcgattgccgccacgttgccgggctttcagtcgcttcatacctccgtcgaggggctgaaactgattgctgatttcgaagggtgccgcctacagccataccagtgcagcgccggggtctggactgacgggatcggcaatacgtccggggtagtgccaggcaaaaccataacggagcgacaggccgcgcaggggctgattaataacgtgttgctgacggaaaaaaggattgaagcctgcctgcaggttaagccacctcagcatgtttacgatgccctgatcagtatcggctttaatgttggaacgggggcaatctgccggtcaacaatggtttcttacatcaatcgccagcaatggtggcaggcgtgcaaccagctcccccgctgggtttatgtaaatggtcaacggaataaagggctggaaaaccggcgcgtccgtgagcttgcctggtgtcttaaaggggcatga

SEQ ID NO: 222323 - DNA, 429 bp, Klebsiella pneumoniae
atgacgcgcgcgctggcggtgatcctggctctggtgctggcactgctgggctggcagtcatggcggctcaacaatgccgatcacaccatcgggacgcaggctgaggcgcttaaaaagaacaagcaggagctggcgaagaaaaacagccagctcatcagcctgtccattcttaacgaaaccaacagccgggcgcagacgcaactttatgctgcagcggaggagacttccgcgctgttgcggagtcgtcagcgccggatcgaggagctaaaacgtgaaaacgaggatttacgccgctgggctggcactcctttgcctgctgacattatccggctgcgggaccgcccgccactcgccggaggtgcagcttaccgtgagtggttgtccaaaagtgacgcagtgccgcctggacagggcagcgccacgcagtaa

SEQ ID NO: 222324 - DNA, 432 bp, Klebsiella pneumoniae
gtgaacaagccgcagtccttacgcaacgccctgaataaatcggtggcgtatgtccgtgacaaccctgacaaactgcacctttttgttgataacggttcgcttgtcgcaaccggcgcccgttcaatgtcatgggaatatcgctacaccctgaacgtggtgattgaagattttagcggcaaccagaatttagtgatggcgcccgtgctgctctggttaatgaccaatcaaccggacgccatcaacaacccggagctgcgcgaaaaactttttacctttgacgtcgatatcctgagcaacgatctgtgtgatctcagcctcaatctgcagctcacggagcgcgtgattgtcagcacagacggcaccgtatcaagcgtagatgcggtgccggaacccgacgtacccgaagaaatgtggacggtgaaacgtggatga

SEQ ID NO: 222325 - DNA, 447 bp, Klebsiella pneumoniae
gtggatgacctgcagagggtggatgactggctggcggccctgctggcgaatctggaaccggcagcccgcaaccgtatgatgcgacaactggcgcaggagctgcgtcggtcgcaacagcaaaacatcaggctgcagcgcaatccagacggcaccgcctttgaggcgcgccgggtgacggccagaagtaaaaaggggcgcatcaagcgccagatgttcgccaaattgcgcaccactaaatacctgaaaaccgcagccactgcggactctgccagcgtgcagtttgatgggaaagtccagcgcatcgcccgtgtacatcactatggcttgcgtgatcgggtcagccgtaaagggccggaagtcaaatatgcagagcgccggttgctcggcatcaatgatgaatcagaagacattacgcgagacgttttactgcgttggttgtcacagtga

SEQ ID NO: 222326 - DNA, 573 bp, Klebsiella pneumoniae
atgaatacgcaattaaccgaaatcatgcgccttatcaccaatctgatccgcaccggcattgtgaccgaagtggaccgggacggctggctgtgccgggtgaaaacgggcgacctcgaaaccaactggattaactggctgacctaccgtgcaggtaaatcccgcacctggtggtgcccgtctccaggggagcaggtggtgctgttcagcctgggcggcaatctggaaacagcctttgcgcttccggccatctactccaacgcctgcccgccgccgtcagactctgaaagtgcggacgtgaccgcatacgaggatggtggctggttcgaatacgaccccgccacggggcgctggattattcgcggcgtgaaaagcgtgctgattgagtcttcgcaggttgtctcctgcaaaaccggtgagtttgtgatcgaggctgacaccacccgtattaacagcaatgtgatcctgaacggcgatgtaacccacggcggcggcgcgatgacgtcaaacggcgtcgttgctgataagcataaacaccctggcgacagtggcggaacgacgggaggtccattttga

SEQ ID NO: 222327 - DNA, 363 bp, Klebsiella pneumoniae
ttgacgctctatatcggaatgagccgcgataccggcagagccataacggaaactgaccacctgcgccagtcggtgcgtgacattttgctgaccccgcaagggagccggcttgcgcgccgggagtatggttccctgctttcagcgctcattgaccagccgcaaaacccggcgctgcgcctgcaaatcatggctgcggtgtatgtggcgctgcggcgctgggagccgcggctgcagctggacactatcacggttaacagcagcagcatggatggcgcaatggttattgagctggcaggccagcgtaatgacggcgtgcccgtgtccctttccgtatcgacaggagcagacaatggccgttattga

SEQ ID NO: 222328 - DNA, 909 bp, Klebsiella pneumoniae
atggccgttattgacctttcccagctgccgccgccgcaaattgtggatgtgccggattttgaaaccctgctgtctgagcgtaaggctgaatttgtcgcgttatttccggcagaagaacaggaggccgtggcccgcaccttagcgcttgaatctgagccggtggtgaaaatgctgcaggaaaatgtgtaccgggaactgctgctgcgccagcggattaacgaggcggctaaagccgtgatggtggcctattccggcggggatgacctggacaatttaggcgcgaataacaacgtacagcgccgggtgattacggctgcagatgacaccacaacgccgcccacggaggcagtaatggaatctgacgcggattatcgccagcgcatcccggcagcctttgaggggatgagcgttgccggtccagtcggtgcttatgaatatcacgcgcttagctcggatggtcgggtggcggacgcgtcggcgttcagcccgtcaccggcggaagtcgtggtgactattctggcccgcgacggcgatggtactgcgccggaagacttactgcaggtcgtcggtgaggccctgaacgatgaggctgtgcggccggtggcggatcgggtgagtgtccgatctgctgagattgtcccctatgaaattgatgcggttctttatgtctatcccggcccggcaaaggaacccatcctggcggccgcgaaagcgcagggtacggcatatatcaacgagcagcgtcgcctggggcgtgacgtgcggctgtctgcgatctatgccgctctgcatgttcagggcgtccagcgcgttgagctgatgaagcccctggcggacatggtgttagataaaacgcaggcgtcatattgcaccgattttaaagcagaaattggtggctctgatgagtaa

SEQ ID NO: 222329 - DNA, 603 bp, Klebsiella pneumoniae
atgagtaacagcctgttaccgccggggtcgtctgcgctggagcgcaggctggcgcaagcctgttcaggtatcagtgatttaaacgtgccgctgcgtgacctgtggaacccgtggaaatgcccggcaaagtttctgccgtatctggcctgggctttctccgttgaccggtgggaggaaacctggacagaaaccgctaagcggcaggcggtcagcgatgctttctggatccatcagcgaaaaggtacggtggctgcagttaagcgggtgatcgaggggctgggttactcaatgacccttgaggaatggtgggaggtggccgaccccgccgggacgtttcgtcttgagatcgatctgaatgaaatcggcatcacggagtcgatgatttacgagcttgagcggattattggcgatgcgaagccagtgagccgccatatctcgcaactgactctttccatgagtattcagggcgtcgccagtgtcggcgcggcggcattggatggcgaagtgatttcggtctatccgccgggctacaccccggacgacagtatttattttgacggcgcagcgcggtacgacagcaacttttatttcagcggaaaataa

SEQ ID NO: 222330 - DNA, 2319 bp, Klebsiella pneumoniae
atggtcaacatcaacgaaacgcccgcatgggaagaaactatcaagctgattgagcgtctggagcgtgtcgccggggggcgtgatggtgcggtcaatattcaggcgagacagctggcgaaccggacgctgtttctgtaccgggaactgatgtccctgcaactggtggcctatgatgccgcagcggtctttgctgataccgcagcggggttgctggctacgtcgccgggggaatactttaagacgccgggcgatggtcagtcgctgcttatctggcagaacaataacggccaggcgctcaaagtggcagagctggcagggccggaatccattaaggcgattcaggcgtcggttgccagaattgccgcgattaacgcatcgtctgtcgacaaactgccgggtgtttccgggctggggatggacgccaccggtaaggtcgttttccagcaactggatgatggggccagccagtttccggcgctgatgattggtgatgatattgaggccgttcagtctcagagcggcatgatccttcgcagccgggccagcgggcaggagtttatccatatcaaacgcaactccctgataacgccaggtcaggaactcttcctcggtgaacatggtgttgcggaggcgcaggccgaccgacaggggcgtactttcagcgagaccgcagtggacggcacccggttgtttgccgctatctcaattggcggtattgatatcgtgcagaccgggaagggcctgagtcttatccgtcgccaggacgggcaggaaatcagccagatccggcacgatggctcaaccgtccagaacggtgtttatacgttctataccgataagtacccgggttacagcgagattgaactcgaccggcaggggcgcgtgttccgtcagcgccggactgacggcacgttagaggaggccagccagcagagtaaaacggatacggttacgccgccttttgcctacgccgacgggggctgtatctatgccatcaacggcgggagcgtcacccgactgaccgacgacccggaaggggtggaaaataccgagccggcatcattcccgacctttatccgctggttatctgcgcgcgatggtgtgcgccaggtgcatcgaggctcgtttgacggcaagcgccgggtgcgggagtccagcggcagtctggtgcatatcatcggtaccggccagtcactggcaccgggcggctcgacaaaggcgcaggcacccgtcaccacggcagcacaggcagattacggcatcctcgcattcgccagcgggccgaaggtcgattaccgctatgacaccctcgacagcgagctactgacgtcagttattccctgccgggaaaataccggcattcgtccggggcaggaatcaccggccagcggtatggcctggcaggttcaccagatgaccgggaataccgtgctggtttccactgcggcaagttccggcaccgccattgatgacatttccgcaggtaccccgacgttcaccggcgcaacggcgatgattgaggccggggcggcactggcggcagaaatggggatggagtatgtcccggtactggttctcgtgcatggcaaccagaatgccgcgctgggtacagcggcggacacttaccgccaggcaatggagcgcctgcgtaaacagtatgagtctgtggtcaacagcgtgaccggccgcgaggacagcctgatgatgtttgccgggcaactcgcgaacgtcattccctacggcggcaccgcaggcgatacaaaaactaataccatcggcattgcgcagtatcgcgagtcccgcgataacccgtttattaccctggcgagcacgcagtatgcgcggggctactcggacggcgaacacctcaccagtaacagctaccggacagagggagaggtcatcggggcggcgattggtacctggctgaatgacggggaatggtcaccccttacccctgatgagagcgggattgtgcagacgaacagcacgataaccatccccgttaaaggctgcacaggtgggattgtcgccgataccgtgcgtgtggctgaccccggtcattatggtttcaccctggcaggtgctgagattgccgccgttgcggtggaaggcagcgacgccagcgcgaaaatcatcatcaccaaaaccagcaacgcgatggcgacggctgtttcttacgccaccaccggtacggcgggcaaaaatccgggagcgcagaccggctcgcgtggctgcatcagggattcccgccccggcgtttccctgtcgggcgaccccctgtttaacgacctcgtcgtttttactcatacattctga

SEQ ID NO: 222331 - DNA, 771 bp, Klebsiella pneumoniae
atgactgcgtatacgcgtgtaacacttaacccctacatgacagccacgcgctatctgcgcaagctgccttatccgaacgatattaccgaaatcccgtcgctcgtctccgggctgattatccaggcggattatgacgttaatgacccgggttcactgacacgtaaccgcgtcagcgagaccgcgatgacggttgtcggtgcgccggaactggtgacgtatggtgtggtatgcgacgaacagaactacatcgacaccaatattgatatcagcgcctacaacgccgacgacatgagcatgattgttattgctgaccgcctgaccgcaggccaggcggggctggtcggtcatctggtgctgaccggcacgcaacgttacaggggggtgctggcggcagcggataagtggacggcaaaatggttaacgtccggcatcgtcaatcaggaagccgctattgccgtgtccaccctggagggttacagcgagtttgtggccgcccggtttattcgtgatgccggtgacggcagcatgatgaccaaagtccgcacccagcgaaacctgagcgagttcacgcggacggcgtccatcaccccggcaaacatgccatccgccaccatgaaaatcggcgcaaccgccagcggctccggcacctcggcggcgactgtccgggcggtactggttttcaaccgcgcgttaagtgatgaggaaatggcgctgatttatcagatttacgccaattactacgaataccacgaagccggattcagtctgtga

SEQ ID NO: 222332 - DNA, 210 bp, Klebsiella pneumoniae; identical to SEQ ID NO: 190762

SEQ ID NO: 222333 - DNA, 1074 bp, Klebsiella pneumoniae
atggcaaaatacagtgcagtagtgaccgccgccggacgggaaaaaatggcctctgccgccattaccggccagccggtgggttttgcctttatgggcgtgggagacgggggcggcgtggtgccatcgcctgacccggcacaggtcagcctggtgaatgagcgctatcgtgccgcactgaacagagtggttatcgctgaccagtcagccaacatcatccgcgcggaaatgattatgccgccgcaggttggcgggttctggctgcgtgaggccgggctgtttgatgaggatggcgtgtgcctggcggtggcaagcctggccccgtcctacaaaccccttttagccgaaggttcgggacgcctgcaggcgctgaatatctggatagccgtcagcagcaccgcggatattgagctaaaagccgatccgtcagttattctcgctacggttgatgaagtcaataaggccagggatgaagcgaaggactacaccgatcaggtagtcggtgatcttgataccagcattcagcaggttatcgctgacgctatcactgcggcgcgtcgggacttttgggaagaagaaaacccgcctggaacggtgcgcttctttgctcaaaatgtcgatccgaacgaaaaatggccgtggtcccaatgggtgtacaccggcgaaaacaaaacgatccgtgtcggaaaggctgacggttcgaacgtcgggcagagcggcggcagcgataacgtcacacttcagcaggccaacctgcccgccgttcagattgacgtgagcggagaaaccagcgaacaggggcagcaggagctgacgacatcgggcaacggaaggcaccggcacagggcaggtgacggggcgccgggggatacctggcaggaagccactcacggaacggataaccagaaatatacggggtggaactataccgactatgcagaagaccatcagcatggcgtcacgatcccgccgcacaaacactcgaccagcggcaaaacagcaagcctcggtgagggcaaatcgttcagcgtggttgaagcccacacactgctgatgtgctggagccgcgttgcctga

SEQ ID NO: 222334 - DNA, 2628 bp, Klebsiella pneumoniae
atgagtgataaaaacctgcgcctgcaggtggttctgaatgcggttgataaactcacccgccctttaaaaaatgcgctggctggctcgaaggagctggcctacggcatccggcagacccgtgatcagcttaaacggcttaacgacgcggggagccagttaaaatcttttgatcaactctcacagagcctgaaccggaccagcaacgagctggaccaggcgcggctgcgtgcgcagatgatgacgcgcgagctggcagcgctcgaatcccccacgaaaaaacagacccaggcgcttgaggcgcaatggcgcgccgtatcacgcctggaacaaaagcaggggcaggaaacgcggcagatggctgcagccagggcggagctgtaccgccttggcatctctgcgggcggtggcgcccgtgaaacggccagaattacccgcgaaacggatcgctataaccagcagttggcagagcaggagcggcgcttgcgggacgtgggcgagcgccagcgcaagctgaatgcgatcagggccaaagctgacaagatgcgcgacgtgcgtaacagcctggcggggaacggggccgggatgatggcggccggggtgacaacgggcgcgaccttgctggcgcccattcgcgcctactcggaatcagagaacgccgctaaccagctggcaggctcaatgatgggaccgggcggaaaggtcgcgcctgagttcctgaagctgaacaagctggcgattgccctgggggaccggttgcccggtaccacggcagattttcagaacatgatgaccatgttacgccgtcaggggatgtcagcgcaggttatcctgggcgggctgggtgagtcggcggcttaccttggcgtgcagctgcaaatggcgccgacggaggcggcagagtttgccgcaaaattgcaggacgccacgcagaccaccgaaaaagacatgatgagcctgatggatcttatccagcgtggtttttatgcgggcgtagaccccgggaatatgctgcagggtttttcaaaaattagtagcgcgatgagtatcctaaataaaaaagggatagatgcagctaaaacctttgccccactgctggttatggccgaccaggcaagtatggccggggagtctgctgggaatgcgtatcggaaaatattccaggctgccctggatgcaaagaaaattaaagctgttaatgatgatctaaaagggaccggcattaagtttaatttttctgatggtaagggaggatttggtgggctggaaaatatgtatgtccagctaagtaagctgagcaaacttactcccgagaagcagatggcaacaaaaaaagacctgtttggcaatgattcagaaacgctgcaggcgttggatatcatgatccaaaaaggtattgatggttatcgtgaaacagtagcgaagctggagaaccaggcaaccctgcgcgagcgcgtcgatgcatcgcttaataccctgggcaacaaatgggaagccgctggcggctcctttaccaacgccatggcgagcatcggtgaaaccgtcgcgccggtgctgaaaaatattgcggactggctgggtaatctggcgtccgcgctggatggttttgtgaagcgtcatccgcaactgacggcggcgctatttaaaattgcggctgtatttgccgtggtagctaccgcagcgggtgtggtgtcactggcccttgcatccattttgggacctatggcggtagtgcgggtaagtgcaggcattctccagcttaaatttgcttctgcgtttggtctggtcacaagagtaattggcggcgcaggccaggcggtcatctggttaggccggttgatgatggctaaccccattctggcgatagttggcctgattgcgatgggagccatctatatctggcagaactgggaaacgctggggccgaagtttaaagcactgtgggatgccatcacgtcaggggtatcagtagcctgggctgtgattaagcagaccataagcagcaaatgggatgaaattctgagtgatgttgccgcgctgcccgcaaaatttaaagcggtgggcggggcgatcattgacggcatcctgagcggtatcaatgagaaatgggaaacgcttaagagcaagctggcatcggtcaaaagctacctgccggactggatgaccggcggcgataattcgcagggcgcctcaccgcagaaaaagaccccaggatttttcgcggggatgtatgacagcggtggttatattccacgtggacaggtgggtattgctggcgagaatggcccggagctgattaacggtccggcctatgtgaccagccgcaggagaacggccgcgctggcgtccgtagtcgccggaatgatggggggagcaatgccagcagaggccgccccgcttcatcccatgagtctgccggcagcttcataccgtcctgtaactgataagcctgcaggcagccagcctgtattccagtttgaaacccaggcacaaattattatccaggcgctgccggggcagagtgcgcaggatattgcgcaggaggtagcgcgacagcttgatgagcgcgagcgtcgtatgagggctaaggcccgcagcaatttcagcgatcaaggagggtatgactcatga

SEQ ID NO: 222335 - DNA, 219 bp, Klebsiella pneumoniae
atgatgaattgtccaaagtgcggccacgcggcgcatacgcggagtagctttcgggtaacggatcagacaaaagagcgttactgtcagtgccagaacattaattgcggaaccaccttcatcactcatgaaaccgtagtgcgatacatcatgacacctggagttattgataatgccccgccgcaccccactgccgccggacaggggcatatgaacttttaa

SEQ ID NO: 222336 - DNA, 378 bp, Klebsiella pneumoniae
atgaaaaaacctcttttggccttgctacttgtcgcatctcaaagcgcattcgcagacaaaatcccagactctattgagaatctcattgctgtttacgatacaagatcgcacagcctggacaatggcgagctaaccattaaatacagcaaaccaaaattattgatagatgccgctgaatcacttttcagcggcatttgcaatgattactttatgaacaaatggaagccagagacgattaaaaaaatcactctgttaaatgtttcccatgaccaaggttttaggattaatggcggtggagttgaatgtaaaaaaactggctccatggaaaacgaaaaggcacgcgcttacagaaccagtttgattgaacctctgcaataa

SEQ ID NO: 222337 - DNA, 1857 bp, Klebsiella pneumoniae
atgattaaaaaagcttcgctgatggcggccttatccgtcacggcattttccggctgggcgcaggatagcaattcagatacgttggtggtgacagcaaaccgttttcaacagccggtcaataccgtgctggcgccgaccgacattgtgacgcgcgatgacatcgaccgctggcagtccaaagatttaaacgatgtcatgcgtcgtcttcccggcgttgatattgcccgcaacggcggcatggggcagagcgcttcgttgtatgttcgggggacggaggctcgtcacgtgctggtgctgatcgacggtgtgccgatggcgcgtccggggatctccaacggcgtagatatcagtcagatccctatctcactggtccagcgggtggaatacatccgcggcccgcgctccgcggtgtacggctccggagcgatcggcggggtggtgaacatcatcaccatgaccgattcagaccgttcacaggttaacgtcggaatggggagtaacggttatcagacttatgacggcgccattaataaacgttttggcgataccgtagtgactgcagctggtgcttatcagaccacaaaaggttttaacgtccagccgaattcgccgtacagcggcgacagcgatcgtgatggctatcgtaacaagcttttcctgggcggtgtgcaacataagtttgacgataacttctctggtttcttccggggctatggttacacagccaatactgactacgatcagggctcgtatggctatgttggcggcaatgatgaaagacagaattacacgcagtcctgggatacgggtctgcgttacagctccggtatctattcctcccagctgattgctaactatcagcgcatcaaagattacaactacagcagcgacgctggccgctatgccgcgggcaccaccctggatgatatggaacagcgctatatccagtggggtaataacattgaggttgggcacggggcgattagtggcggcgtcgactggaagcaagaaaagctcacctccagtagcacaacattgtctgatgcctacaaacgcgataccaccggtctttacctgaccgggcagcagcagattgacagtgtgaccctggaagcatccggacgtgaggatcatgacgagcagttcggatggcacggtacttggcagactgcggcaggctgggagtttattgatggctaccgggctacgctctcttacggtaccggattcctggcgccgtcactgggtcagcaatatggcgcgacgcgttttgcttcgttttatgggcctggcattgcttccaacccaaacctgaagccggaagaatctaaacagtgggaagccggaattgacgggctaacggggccgctggattggcgaatctcagcatatcattatgagattcaaaacctgatcgactataaaaacaatcaatatatcaacgtgaagtcagccacgattaaaggtctggagtggacggggaacgtgacgactggcccggtggagcatcatctgacgttgcagtatgtcgatccgcgtgatgatgatactggcaaggtactctatcgccgcgcgaagcaacaagtgaagtatgaactgaccggacagatctacgatcttgactggaacgtgatgtatcagtacctcggcaagcgttacgatgatgactatgacaatgggcgcgatgtcaaaatgggcggtctgagcctctgggatgtcggtttatcgtatcccgtcacctcacacctgacagttcgtggtaaaatagccaacctgttcgataaagattacgagacagtttatggctaccaatctgcaggacgggaatacaccttgtctggcagctacaccttctga

SEQ ID NO: 222338 - DNA, 315 bp, Klebsiella pneumoniae
atgatccgtaaagccttcgtcatgcaggtgaaccccgacgcgcacgaggagtaccagcgccgccataaccccatctggccggagctggaggcagtgttgaaggatcacggcgcgcaccactatgccatctatctcgataaagaacgccatctcctgttcgcgacggtggagattgaatcggaagcccgctgggaagcggtcgccagcacggaggtatgccagcgttggtggaaatacatgcgcgaggtgatgcccagcaacccggacaacagcccgctgagcgcggagctcaaagaagtgttttatctggcgtga

SEQ ID NO: 222339 - DNA, 276 bp, Klebsiella pneumoniae
gtgtataacgatattgcggcaaattatattatcgatgggctaaaagaaaaaggcatctccattcctgaagatgttgcgattgccagttttgacaataccttgctggcacaaactaaaaaaataactagcgttgcacagccggtaaatgaaattgctcacctcgcgtttcagatggtgaagcatcaacagcagccggacagtattgaaatgcacgaaattgtctctcggttaattgttcgtgagagcagcgtaaaaattaatattacttccctgtaa

SEQ ID NO: 222340 - DNA, 540 bp, Klebsiella pneumoniae
atgctaagccgctatgaggtgctggcgatcgtcggcaccctggatccgcatcttgccgatctaccctggatctcgctggattcgctgatctctggcgaagggagtcgtccgctgatgcgcatttttggcgaactggcgacggcggaacaggtcagcgagatcaacaacctgatcctgaaaaacttttcgctgcgccgggtgatcgagtcggtgacgatcctcgatacggctaaggtgatcaaccaggttgagcagtttttgctgcgctatgagcatctggccgggcgcgatgtacctaacgatcgtaaggtcgcgctgtatgtgcatatcagctgtctgatagagcgattaattcgtcacgcttccccagcccaatacactggagggcagtgtccggatcgcgagctggctacgctacgcgaggcctttagtgtcatagagagcgggtatagtgtcaaaattcccgttgtagagctctgctacattcacgatatcctgacgcgggaaacggaatttattcaggaagatcaagacttttaa

SEQ ID NO: 222341 - DNA, 2094 bp, Klebsiella pneumoniae
atgcgtaaaacggaactgttggcttttttgcaaaatcagaccgattttttcgatccggataacctgagcgaggtctttaccgccagctggctggcccggcgtttcgcgatgcaaagaaataccgccagccattatctcaatcagctggtcgctcaggacgtgctggtgaaaatcaacacccggccggtctattttctgcataaaaaagccttttgccagcagttctacccgctttcccgcagtgagtatgccagcatggcggagttactcgcggagagcgaccgccagccggagcaggcggaccatttttcgttgctgaccgggcatgacggcagcctgcgtaaaccgattgagcagatgaaaaccgcgctgttttatcctaacggcgggctaccgctgcttattaccggcgacagcgggaccggcaaaagctatatggctgagctgatgcatgagttcgccatcgcccaggagctgctggcgcccgatgccccctttgtgagctttaactgcgcgcagtatgcgagtaatccggagctgctggccgccaacctgtttggctacgtcaaaggcgcgtttaccggtgcgcagagcgataaagcgggggcgtttgaggcggcaaacggcgggatgctgtttctcgatgaggtccatcgcctggatgctcaggggcaggagaagctgttcacctggctggatcgtaaggagatctaccgggtgggggagaccgcgcaaggcttgccgatttcgctgcggttggtgtttgccaccaccgaagatattcacagcacttttctcaccaccttcctgcgccgaattccgatcctggttagcttgcccgatcttcaacaccgtagccgcgaggagaaggaggcgctaacgctacagtttttctggcaggaggcgcgcacgcttgccgcccggctgcaactaacgccgcgactgttgcaggtcctgacgcagtatgtttatcggggcaacgtcggcgagctgaagaatgtggtgaaatacgccgtggcgtcagcctgggccaggtctccgggccgcgaaatgttgaccgtgacgctgcacgatctgccggaaaatgtcatggccgcgacgccagcgctcagcgaagcgatgggccagcaggagccgctgcttatcgagccgcagaccagcctggtctggctgctgcgcgcgcgcgacccggtacaggggctgatctatgacgttcagtgtcgggttctggcgcagtatgaagcggtgctgaataaaaaaacggtctgggaagaggcgcaaaggagcatgggggaagagattgaaaccctcttcgatcggctgatctttgataatcatgactccagtagctcgcagatgctgctgctgatcgctcatcaggttcgggaggagtattatcgcctggaaaagcgcttcaatatccagtttaacggcaactgcctctacgcgctgagccactacctgatccaccgatcccgacaggcgcagtccacgataaacaatgaaaaagcccgccagctggaggacttcctggtacagaagtttccgctgctgtatcgcttttgcgaagcgatcctcggtgcgttgacgctgaagctggatattgaaccccagcgtatcgacctgctgctgttagtgctgtggttccacaagaatggcgccatcagccagcagcaggtgacccgggcgataattctcgctcacggttacgctaccgccagcagcatcgccaacgtggcaaaccgcttgctgaaaagccagctctttgagtcattcgatatgccgctggacgtgacgccggaggctatcgctaaccaggtgatggcctacatagagagccatgctctggcatcaggattgataatcctggtcgacatgggatcgctgaacgccattcaccgccattttaatcgtcgcctgagtacgccgatggcgatcatcaacaatgtctccaccggtatggcgatgtacgtcggggagcgcattttgcagggcgttatgctggaagatatcgtccgcgagatcggcgatgaccttttgcggttgagcaccagctctattacccgcaaaccgataagccgcgggcgattttaa

SEQ ID NO: 222342 - DNA, 570 bp, Klebsiella pneumoniae; identical to SEQ ID NO: 102306

SEQ ID NO: 222343 - DNA, 411 bp, Klebsiella pneumoniae
atgactgactcaatgaaatatctatggctgcttttgcgcgaggattcgtcatatatttttatgttgatgctggttattgtcactaccgtagtaatgtctttctttttgcagaggttgtttgtgtcctggtggggtaagtcaatcattctgataatgtgtattgtcgtcgcgattacagaagtttttggctttcttgagcctgagtcaacatacaaacagattcaaaccagaaaacaggatgtcatctatacgctgaaaaactgcagaatctccgcatttgaagcgcagcaggcagggtttctggctaaagcaaaagatgcctggtcttgcccggatggcgtaacacggtatatggatgtgagatacagagataaggcagagattaataaactcagtacggagggtaagtaa

SEQ ID NO: 222344 - DNA, 219 bp, Klebsiella pneumoniae
atgcatgcctttatttttctggtgctgatgacgccgagtagtggcggtgggatttgggatattactcccatgcctaatacagatgtctgcataaaaatgctacgggtactcgaagcacgtggaggcagaggttacggaagtaatacaggagagtgcattgaaattaaaacacgcgagcctttgaacagcgtgatggaaacattgagtgagggtgggtaa

SEQ ID NO: 222345 - DNA, 405 bp, Klebsiella pneumoniae; identical to SEQ ID NO: 104066

SEQ ID NO: 222346 - DNA, 393 bp, Klebsiella pneumoniae
atgatgctgttttttagaaagtatggatttttgtttatccctccagtctactggctcatctatctgggagctaggctgacttacaatggactggcaggagagtattctcctgatttctttcagggtattcgacatgaaggcatctatattatctgtagtttgtgtatcttttattttttctgcttagaggtggaagttagtgatggggagttctcagcgaacattctgttcctgattgttttctttcatgtggttttattatttatcactctgcttatttgtttgtggcaaggggcgatgttgttggatgcgatctttatgggtcagattattgcctccatgtgtttattgtttttcattcctgtgctttccattataagaaggagtttctag

SEQ ID NO: 222347 - DNA, 186 bp, Klebsiella pneumoniae
atgaagacggtgcgcaggtttaataagtttaaagattggttcaggttagcaggggtaatccttattcctgttctgttgataattaacatggcaacgttattaacgagcgatgatgggttcgtggttgttagatctttattgtttatttttgttctcacgattatagccagacgattaatgccataa

SEQ ID NO: 222348 - DNA, 573 bp, Klebsiella pneumoniae
gtgaaaaacagcctgaagaacctcgctaagacgccgctggcggcactggctctttcccttgctctggccgggatggcacatgcgggaacgctcgatgaggtgaagtcgctctgggatccgcagggaatctccggtactgaaactgcttccccgcagagcagcactccccaggcggtgagcggggcatctcagcctcgctggttacgactcagcaacggaaagcaggtggacctgcgcgactggaaagtggtgctgttcatgcaggggcactgtccctactgtcataaatttgacccggtgctgaaacagctggccggacagtatggcttctccgtgttttcttacaccattgacggacagggtgatgatgcgtttcctgaagcgctgccggcgcctcctgacgtgatgcagacctttttcccgaatatcccggtggccaccccgaccacgtttctggtgaacgtaaacacgctggcagcgtacccgatcctgcagggcgccacggatgcgcagggctttatggccagagtggatacggtatttcagatgatggagaacccgaataatggataa

SEQ ID NO: 222349 - DNA, 2850 bp, Klebsiella pneumoniae
atgcttgagatatatgccattgctggcggcgactggttacggggcaacctgaacgcgattgcggcgtttatggggaccagcacatggtcgactatagaaaagatgtgtatcgccatctcggtactcattgtggcggggaactgggtaaaaaaacacaacgtaatggaccttattggctgggtcttttccctcaccctggtctctatgctggttgtcattcgtacccctgtgcagatcatcgattacagtaacgttgcgcaggtctatgaagtcgataatgtgcctattggtctggcgattccggcgtcgctgacaacacgggcaggaaacgcgcttatccagagttatgagatggtcttcgctctgccggacagtgtcacgtacagtaaaacggggatgttatttggcagtaatctggtcgcgaaaagtacggattttttgtcacaaaatcctcagattacgacgctgttttccgattacgtacaaaactgtgtgatgggcgatattttcctcaatcataagtactcttttgaggaattactgaattcacctgatccgtataccctgatttttgcaaacccgagtccactgcgtggcgtgtttgacaaaaacaaccagttccagacatgcgaggaggcctcacgggatctgaaatcggctctcgtgctggatactcagacaggcggtaaaacctggaactactatgttcgtcagctgtttggcggcaaacctaatcccgatctgcttttcagccagatgattggcgacagctacaattacttctacagctcgggacagagcgccgggcagattatccgccagaacgtcacgatgaacgccctgcgcagtgggatccagagttatgcggcccgcagcggggacaccgccagtctggtcaatatggctaacacatcatcccttgaaaagcagcggctggcacaggccacaatggggcaccaggcgcttcgcacacttccgctgatgcagaccgttatcatggggataatgattgggatgttcccgatcatggtgatggccgccatgtttaatatgatgactctgcaggtgctaaaggggtatgtgtttgcgcttatctggctgcagacgtggccattactgttcgccatcctgaacagcgcaatggcctactatgcgaagcaaaatggcgtcccagtcgttctctctgagttgtcgcaggttcagctcaaaaactcggatattgcgaccaccgcgggctatattgccgtgatgataccgcctttgtcgtgggggatcgtgaagagcatgggagcagccttctccagtgcctacagccatttttcttcatcggggctcagtgcaacatcgcaggctgcctccggcgtggtggacggcaattactctttcgccaacatgcagatggagaacgtcagcggctacagctggggtaccaacagtacaaccagtttcggacagatgtcacggcagctggcgaatgggggcatgagcacgcagacgagggatggatcgatggtctgggacagtggtggtgcaatgtcaaaactgccggtggatatcaacgtcggtcgtcagatagccagtgcgcagcaacagatggcccgtgaggctgatgtccaggccgaaagcgcgctgcatggctataacagcagcgtgacaagtgcctggaatagtctgcagcaatttggtaccaataaagggaacagcgcctcaacaacgaccggagctgatactaccgagtcttcgcaggactcgatggccagaagcaagatgtggaatgcggttgttgctaatgcgaaagccaacaacatcagtaatgaggagtctttccagcagttgatggatgattcagctaaaagtacgcagggcgttgatttatacggatctggtaagtggagttcaggggatcagctgtttggtaagctaggtaaatggggaactgggttatctgctgaggccggagttaaaggcagtgcgggttggacccacagctcgggtaacacagataatgttggcacttccggtcgtgaatcgaatgacagccgacatgataccagtagtcaggcggccaaagactttaaggaagcatccgattactttaccagccgcaaaaccaccacatcgggcaacattaccgataataatgccagctcgcgtgttgaccagtttgccgcgtcactctccagtgccaaaaacagctatgaccagtatacaagcagccggacacgcagccatgagtacagtgagatggcgtcacgcacagagagcatgactggccagatgaacgaaaacctgactcagcagtttgcgaactttgttcagcatcgtgctccacaggatgcagaggccattctgaccaataccagttctcctgaaattgcggcgcagcgtgaagccctggcgcgtgaattcgtcaaagagcaggtagaacccagggttgatgctgcgtatcaacagggtcgtgaaagcattggacagaatatggctggggtgtcaggtggtggtgacaatggatcggtaatggccgactaccgacaaaattctggtcgtatcgatgctatgacgcaagatgcgggtattaaggataatgtggatcagaaagttggtgggatgattacagagaataaacaacagcagcaggaaacccgcgaaaacatacaacggcaaggcgcagaggtgaaaaatgagaatactgaaatggaaaaggaccataaaacaaaagcaaatgagtttaaaggtgattataatgaaagaaagagtaaggtgaaatctttaccaggagctgactcgcctactgagttagaggcaaaagcggcgaaaattcaaaaggattatcttgatggtaaaaggtaa

SEQ ID NO: 222350 - DNA, 2310 bp, Klebsiella pneumoniae
atgagtttcaatgccaaagatatgacgcagggcggtcagatcgccaatatgcgctttcgcatgtttggtcagattgccaatattattttctacgtgctgtttattttattctgggtgctgtgcgggctgatgctgatgtataggcttagctggcaaacctttgtgaacggctgcgtatactggtggtgtacgacgctgggtccgatgcgcgatattattcgttcccagccggtatacaccattcagtattacggccagtctctggaatatacctcagaacaaatcctggccgataaatatactatctggtgcggagagcagctgtggaccggtttcgtctttgctgccgtggtttctcttgtcatctgtatcgtgacgttcttcatcgccagctgggtgctgggccgccaggggaaacagcagagtgaggatgagaataccggcgggcgccagctttccgataagcccaaggaagtggcccgtcagatgaagcgtgatggtatggcctccgatattaaaattggcgacctgcctattcttaaaaactccgaaatccagaacttctgcctccacggtaccgtgggttccggtaaatcagaagtgatccgccggctactgaactacgtgcgtgcccggggcgatatggccatcatttacgatcgctcctgtgagttcgtcaaaagctattacgacccgtcactggataaaatcctcaacccgctggactcgcgctgcgcggcctgggatttgtggaaagagtgcctgacgctgccggacttcgacaacatctccaacacccttatcccgatgggtaccaaagaagacccgttctggcagggttccggtcgcactatctttgccgaaggcgcgtacctgatgcgtgaagacaaggatcgcagctacgagaaactggtcgataccatgctgtccattaaaatcgacaagctgcgcgcctatctgcagaacacgccggcagcgaacctggttgaagagaaaattgagaaaacggccatctccattcgtgccgtgctgaccaactacgtcaaggctattcgctacctgcagggcattgagaagaacggcgagccattcactatccgggactggatgcggggtgtccgtgaggaccgacccaatggctggttgtttatctcctccaacgctgacacccatgcctccctgaagccggttatctcaatgtggctgtcgattgctatccgcggcctgctggcgatgggggagaaccgtaaccggcgtgtttggattttcgctgacgagctccccacgctgcacaagctgccggacctggtcgaaatcctcccggaggcgcgtaaatttggtggttgttatgtgttcggtattcagtcctatgcccagctggaagacatctatggcgttaagcctgccgccacgctctttgacgtaatgaacacccgggccttcttccgttcacccagcagggagatcgcggagtttgctgccggtgaaattggcgaaaaggaaatcctcaaggccagcgagcagtactcctacggtgctgacccggtgcgtgatggtgtatcgaccgggaaagaaaaagagcgggaaaccctggtcagttactccgatattcagacgctgccggacctgtcctgttacgtcacgctgcccggaccgtatccggccgtgaagctggccctcaaatacaagccgcgtccgaaaattaccgagggatttattccgcgccgactcgatacgcgtgtagacgcccggctcagtgcgctgcttgaagagcgggaagctgaagggagtcttgccagggcacttttcacgccggatgcgccggcatcggggccggctgatacagacagtcacgccggagaacagcctgagccggtcagtcagcctgccccagcagacatgacagtatctccggcaccggtaaaagcgccgccgacaacgaagatgccggcagcggaaccttccgtcagagcaacggagccgcccgtcctgcgggtcacgaccgtaccgttgatcaaaccaaaagcagccgcagcggccgctgctgcctcaacagcgtcctctgccggtatccctgcagcagctgcaggcgggacagaacaggagctggcgcagcagtccgcagagcaggggcaggacatgctgccggccggcatgaacgaggacggtgtgattgaagacatgcaggcgtatgacgcttgggctgatgagcagacgcagcgggatatgcagcggcgtgaagaggtcaatatcaaccacagccaccgccacgatgagcaggatgatgtcgagattggggggaacttctga

SEQ ID NO: 222351 - DNA, 2196 bp, Klebsiella pneumoniae
atgagcagtgcctacgatagcctcgatccccgcgtccgtaagtgggtttacaagcaggggtggtcgacattaaggcccttgcaggagagttctatcccggcaattttagcccgtgatcgagacgtgctaatcagtgcaggtacagcagcgggtaaaacagaggctttctttcttcctgcctgttcggcagttgcagatctcacgaatggatttggcatcgtctatatcagtccgttgaaggcattgattaacgatcagtaccgtcgtcttgggagccttggagatgcattggaaatgccagtgactccctggcacggggatgtaccacaaagcaaaaagaagaaggctcggacgaaccctgctggcattttactgattacacctgagtcacttgagtctttgctcataaattcaatgggctggctcaaacaggcgttttcttcagtcgcatacatcgttattgatgagtttcatgcttttattggttcagagcgtggtgtacagctgctttctctgctcaatagaattgaccatgtgctaggatgccaggtaaatccaattccccgcgttgcgttgagtgccacgctgggggaactggagaaagtgcccgaaatgttgcgcccggacaaacgactcccctgcgtaactgttacagatagtaatagcatggccactcttcaggtacaggtcaaagggtacctggagcgagtgatccaaaatgaggaagaacttcagagttcagctgaacatgacgtttgcgctgacatttttagactttgccgtggcgattctcatttggtctttgcaaacagccgaaaacgcactgaaagcattgcggcaacgctgagcgacatgtgtgaggaacaaattgttccgaatgaatttttcccccaccatggttcccttgccaaggaattacgtgaggtgcttgaatctcgtcttcagaaaggaaatttgcccacaacagctgtttgtacaatgacgcttgagttgggaattgatatcggtaaggttaaatcggttatccaagttacgcctccgcattctgtttccagtttgcgccagcgaatggggcgttctgggcgacgcgattccccgtcagtactcagaatgctaattacagaaaatgagcttactgtgagtagcagtatcgttgatcacctacgactccagttggtgcagtcgatggcaatgatcaggttgatgatctctaaacaatggtttgagcctgccgattcccggcagatgcattactccacgctgctacaccagattcttgcaattaccgcacaatggggtggagttcgtgccgaccagctctggtcacaactatgccagacagggccgttcagaaatgtagatttaaacgatttcaaaagcctgcttaaacatatgggagcatgtggcctactcactcaacttgctagcggcgaaatggttgttggggcagagggggagaaactgactaaccattacactttttatgccgtgttcaatacaccagaagagttccgcattatcaccggaaacagaacccttggaacagtgcctgtggactccccactgctaccagaccaacacatcatcttcggtgggcggcgctggaaagtgacagagatcgagacagagaaaaaagttatctatgtagaggcaaccaaaggcggtcagccaccacaatttagtgggggaggtatgtctgttcatgatgccgttcgtcaggaaatgctcgctatctatagggaaggtgattaccgcatagcaataggtagcaagaaagtagattatgccgatactgccgccagaaacctatttgcggaaggctgtagtaactttcagcgttttaaacttcaaaatgagtgttttattacgagtggacaacactgttacgtaataccctggatgggggataaagttgtcaatacgattacagccttgctcatacgttgtggttttaaagcaaattcatttgctggcgttatagaaatcgataactccagtgtagcttccgttcagcacgcgctgaaagaaatgctgttgtcaggcttgccatctgcatttgatcttgccacagatgttccagaaaagtacttagataaatatgacgagtatttaccagagtcccttcttgcgaaagggtatggtgcaaaggcgtatgaaacagaaggtacgcgcatctggttgcagaaacatctttag

SEQ ID NO: 222352 - DNA, 1317 bp, Klebsiella pneumoniae
atgtctgtaacacgtataagagtgaaagaacgcgacgctattattcagtcacttaagtcaggtgtaacgccaaggataggcattcagcatatccaggttggccgcgtgaatgagatcaccgctctccatcaggatattgagaggattgctgacggtggtgcaagcttcagacttatcatcggtgaatatggttctggtaaaacgttctttctgagtgttgtgcgctctattgcgctggagaagaagttggtgtcagtcagtgctgacctttctcctgacagacgtattcactcatcgggaggtcaggctcgtaatctttattctgagctcatgaaaaacatgtccaccagaaacaagccggatggtaatgcgttacttagcgttgttgaaaggttcgttacggaggcaaggaaggaagctgacacggacggctccgaggtttcatcagttattcataaacgcctggcagcactatcagatatggtcggtggatatgactttgcgaaggtcattgatgcattctggcgggggcatgagcaggataacgaaacgctaaaatccaatgccattcgctggttgcgtggagagtacactactaaaactgatgcccgtcacgatctcgacgttcggactattatctcagacgcatcattctatgattctttgaagctgatgagcctttttgtccgccaggcaggctatgccggtcttttggtcagcctcgacgaaatggtgaacctcttgaagctgaataatacgcaagcaagaacagcgaactacgaacagattttgcggatcctgaatgactgcctgcaaggctcagccgagaacattggttttatcctcgggggtacgccagagtttcttttcgatccgcgtaaaggtctttacagctatgaggcgctccagtcgcgtctggcggaaaaccggttcgcgcaaaaagcaggagtgattgactactcatcccccactttgcatcttgccagcctcacccctgaggaactgtatattttgctgagaaatcttcgtcatgtttatgccggtggagatccagagaattatctggtaccagatgaggcactgactggattcctgcatcactgtagtaaaaccattggagacgcttacttccgtaccccccgtaataccataaaaggtttcctggacatgctggccgtgctggaacaaaacagaacgatgaactggcaaacactaatcgagggtgtggcgattgaagaggaccggcccagcgatatggatgacaccactacggaggaaagcgatgacgacgacggactggcgaacttcaaactatga

SEQ ID NO: 222353 - DNA, 2310 bp, Klebsiella pneumoniae
atggagttattgaattttttggcggcgatttttgtcatttacttgttgttttttagaaagaaaaaacgtaaatctccaaagtcttatgcttcagaccccgtgaaagcaccgccaaaagaatggctcgctgacatcaagaaaaaagaggcggttgtgcgaaacgatgatagtgaagacgataaccttgcaacttttacattgagcggtggccggggtgttgaacttcgggtgacaaccaatcattaccgcaacacctcaaagtcagcaggtgcactagctcgatgggtacttccgggtgagatgataactgtagctggtgtagcaattagcggtggccacatttacgtggggcaacgtatgaagccctccggtcaggaatcaggcggctattatgacgatggaagtgaggcatcattaattgatgacacatgtaagataaaacctacttcttatctttacgaggacagttcattaggatactggcccagtttttcctctctttccccagaagcacgcggtgcgtatgtcagttggcttgccagcgataggtctgatccatcgtgtcctatcggctatgtttttatctacctctacggcctggaaagaaaagcgctcgtagattccactgacccaaaattccctgatgctgagttccgtaatctgttcaatgaagtcgctcggttaagatcgatattcattgagaaccgctccttccgtggatattcgacccaattactcgaagccatgtctattctgcgcccgaacatgggcttagccactgagctcgatagcaattcaggtttcagcaacagcatgcaatttaagctggctcttgcaaaaactgtacatgaaggagttcctgtatcagctgaactggcgttgaactgggtaataaaccacaccgagtattcgctgcgtaccccggctcgccgctgtgctaaagagtttgctgcacttttcaaacggcgttacaccctcaaatatggtgaagggatggtcgttaaggcgaataaaacgcgcctgaggttagattacacaccagcaagtcctagtttgcgaggtgttcgacttcctgttcccgacctgcctgatccaagtgcgttgaagagccctgtccagaaaattatggctcttgccgatatatgtacagatgaacttgatgcttatagtcgctaccttggtaggaaaggtacgtcagtcaatgatacggctgcaattatgctgctcccttcagagatagttaatgaaagcgcagaaaaaatattaagctcattcaaacgctgggctgatgaggcgatcctcgtcaaggaggggttagtctcagttgctgacttttgggcacatatgaatgccagttgccccaataagatcaataaaaaagaggccgatttgatgcaggcctttgctctgaagatgggttacggtctggcacctgacccgtattatcaccatgtgaaggcggatgttgatgggacacttgttctattccctgccgccgaaggtggacgcttctcaccttctcctgaatttatctcagccgtaatgacgctcagattaggggcgatggtcgccttgattgacgattctcttgatcaagctgaacagaaagtgcttgagaatgccatcaacaacaatcctggcttcaccgatgatgaaaaacgctctctacatgcgtatttaacgtggcaacttcataccccagccaatatgacaggaatgaaaagtaggattgagttgatgggggccgcggaaaaagctgctgtgggtaaggttatcgttagtgttgcctgttcggatgggacaatagcgcctgccgaaatcaaacagcttgagaagatttattcaagtttggggctggatccctcatctgtctcgagcaatatccatcagcattccgcaactgaacatgatctcgtctcgtctgtaccaactgatcagccagcagcagggttcacactggatgctaatgtacttgcccgccacgaatctgccacggatgatgttcgtaaattgctgaacacaattttcaccgaagaagaaccggaagagccagaaagcgctccagcctcatcaacggaggcggggggacttgactccgcacatagccagctttatcgcagtttgctggagaaagaacagtggtcccgaaaagaggcgacagaattgtgcggaaatttgaatttgatgctcggcggtgcgcttgaggtgatcaatgactggtcctatgcggtggttgatgctccagtactggacgatgccgatgatgatatctgggttgacctggaaattgccaaagaattagagggatag

SEQ ID NO: 222354 - DNA, 642 bp, Klebsiella pneumoniae
atgcaagaagaaaaactaaaaaaagccattgaggaatgggatgaggtaatacacaataactttcatagtggcatgataaatggagctagtttggccacaagcgagataacatctattttagataagtttagtatgtggttattggctggtgttggcggtacggctgcattgattattgcgaatattgataaggtaactccatacactggcataggcggatttaaatatattgttttatttttgtgcgcgtctgcgatttttggttttttagcaaaatacttttctatagtggtgcattcgtcagttgcagttagcattcgtatggctcagatttctgcagaagagttaaagaaataccatgagcactgtaaggaacgagatgaaatagggagtgaaataaattatgttagtgataaaaatgtagatgtcaatgaattctataatgattacatgaacttatatcctactggtttcttgagaaaaaaaataaaaaagacatttgataagataggcaaagacaagcttcatggtaatcgaagtgctgtgacatgcgtagtttatcaaagtttatgtttagtgttgcaagcactattttatgtggcatttcttatatctgtcgccttcttaataagcatcaaatag

SEQ ID NO: 222355 - DNA, 402 bp, Klebsiella pneumoniae
atgagcatcacactcgaaaatggacgtattaaccttgattccctggtaacaattgaagatcacttgcgcggactcgcgctggcgaacaggacgctagacagtattaaagaccaaatgtctcagcgttccgataaaaaatcagactggtacagacgggctacagttgcgcacaaatcatggttctgggctcgctcacgaatctgcgaacaactggctattttgcgccgtcaggaaaaggacgttaaccgtcttcgctggcagtatgaaaatgaagccctgatggcgaaactgaaaagccaggtgagcaaagaggttttcagtgagtgtttgcgccgggcaaaaattaaagctgaacagcgactggagcaagactttcgtgctgcgatgattgaggtgaagtga

SEQ ID NO: 222356 - DNA, 723 bp, Klebsiella pneumoniae
atgatgaataacttgatcactaacaaaccatccatgaccagccttgaaatctccgaattagttaatagtcgtcatgacagtgtgaaacgtaccattgaacggctggtagatgctcgcgttattgtccagccaccgttggtggacgaacccggaacagactctatggggcgtccgcggacaatgcaggtattccgcttcacagatgagcaaggcaaacgcgacagcatcattgtggtcgcgcaactcagccccgagtttaccgccaggctggtagatcgctggaaagaactggaagaggagcgctcgcgtccaaaatcacaggccgaactgatcgcagaaatggcccttttgaatctcgagcaggaacgccggctgtatcaggtagaagaacaggttgaaaccgtcgcggaagctgtcgaaaacattaagcgtggaaatatgcgggccgggtatgtcggttatcgccaggtggtcgcaaaaagcggcatgaccgatgccaagtgccgaaaccttgttaacgcataccgtatcccaaccgatacgcacgagttcatgacgcctgatggtctgctgtctcgccgggcgatcgtggagtttgaaccttttatgaaagcattccgccaaatgatggcagaagccgaaccacgtggggcccgttggtatcacccgaaaatggggctgtttcaggctattgggtgggaggaaaaacattgtgaaggttga

SEQ ID NO: 222357 - DNA, 477 bp, Klebsiella pneumoniae
atgcgtagtaataacaacgaacataataaatatttttctgtggatgcaggcatctcatcagagacaattacgaaggctgagcgtcttgttatggaatgctacagtaatatgtactctaactggaaagagaaagaaaaaaattaccggcaagaagtggaggatttgcgtcaaaaagaaatcgctggatttaaaaatatactgcctgctccgtttacattaagcgatgtaaccattgaatgggattactgggaatccgtacttcgtcacaggtataaaacacaaaatggcgatggctacgtccagattatctgggatcggcgcgggtggcacactgaccttttgtgcgtcatgaaaccagttacccgggctgaagcattaacagtctgcaagtggttgctggcatgtgactattttgaggaacgggattcgctgtttgatcgcattattttgaacctggtcggggagtgcgaagaatga

SEQ ID NO: 222358 - DNA, 645 bp, Klebsiella pneumoniae
atgcgtgggacctataacggtgcccgcggcagccttaatgccggctatagctatgacaataacagccaacgtattgactacggcgccaacggcagcatcgtcgctcatgccgatggcattacacttggccaggacatcactgacgccgccgtgctggttaaagcgccgggcctggataacgtcaagttgaccaacgataacaccatctccaccgactatcgcggttacgctatcgtcccgtacgttacaccttaccgtcgtaccgacatcacccttgacagcacttcactgggtgaagatatggagcttccagaaactacgcaaagcgtcgtgccgacccgtggtgccatcgtgcgtgctaattatgacggcaatatcggccagagggcctttgtgcatctgaaaaccgccagcggtcaggacgtgccttatggcgcgatggttctactcgccggcgacagcaaatcgcagccaagcatcgtcagcgacgccggtatggtctatatgtccgggttgcagcagaccgggatccttaacgtccagtggggcaaaagcgccgcgcagcagtgcaatgcttcctttactttaccagccagggaaggcaaagcgtctggcatcagtcaaatcgaaacggtttgtcgctaa

SEQ ID NO: 222359 - DNA, 1017 bp, Klebsiella pneumoniae; identical to SEQ ID NO: 219672

SEQ ID NO: 222360 - DNA, 1287 bp, Klebsiella pneumoniae
atgttaaaaaaaatctatcgcaaggaagcgattgagtataaaaagcatcactggaaaggaaaggcactgctgctcgcagggcttccagcatggcttgttgcattactctcttttgcttttcttgcgatcctgatagccaccacagtattttgctcctttacccagagaatcgacgttcagggagaggtcattactctacctcactctgtcaacgtttatgccccgcagcaaggctttgttatctcccaatatgtaaaagtcggcgatattgtgaccaaaggccagccgttatatgagatcgacatttcccggaacaccacaacgggtaatgttagtgcggtacaaatagaggtcattaatgaaaagatcgcaaatgctgaagatatcatttcaaaactgaatcataataaagaagaaacaaccatttctttagagaagcagttaaaaacaatcaatgattcgttaaaagaaactaatcgcatgttggctaacgcccaggctggattaaagaaaatgcatgataatctatccagctatgataagtatttaagtgacggactgattaccaaagaccaatataactatcaacactctttgtattttcaacaacaaagcacttaccagtctctggtgagtcagaaaatgcaactggaatcgcaggtcactcagctcaatagtgataaaattacaaaaatagctgattttgacaatcaaatctcgtcacaagaaaaccagattaatgattataaaaatcaactggttgaatcaaacgcaaacggtaacattattattaaagcaacgactgaaggccgtattgaatcattgaccgtcactaaaggccaaatggttgataaaggcagcagtctagcacagataaaacctaccggtgatatagagtattatcttattttatggttacctaacaatagtataccttatgtaaaacctggggatgtaattaacattcgttatgctgcattcccatcagataaatttggtcaattccctggaaaaatactttcaatatcttctgttcccacatctcgacaagaaatgtctgagtataccaatgttacgaacggcacaaaccagcaggaactggcgctctataagaccattgtgaaaattgaaaacaaaacctttgaatataatggtaaaacgctttcgctttcaaatggcctcaaggctcaagctgttgtattcctggaagagcgtccgctctatatgtggatgtttacccctgtgtataagataactcaaagcattactgggccgatccatgactaa

SEQ ID NO: 222361 - DNA, 237 bp, Klebsiella pneumoniae
atgagtcgccaattatcaatgcgccctagcatcaatcttgtggtgtctgaaccatttattaccttggatgagttctgccgccgtaccggttacaaactcagctacgcccgccaaatgatccgtgaaggccgccttccaattcgtaaaaaggaaggggtaaacagccttatcgaagtaaacatgttcgcattgacgatggaagcggctcaaggctgcgaaatcgcaatgcaagcctga

SEQ ID NO: 222362 - DNA, 621 bp, Klebsiella pneumoniae
atgtcaacacgaaacttaacgaataaagatgacgtaaagctgattcgagatttcatatctcaaaatagaggcggaaaagaggtcattgctcgcattctggaagcatatggtttcactacccgcatagccctctgccatcagcttggcgtctcgcaaagcactatggctaacaggtatgcacgcgataccttcccagccgactgggtgatcgtttgtcatcttgaaacaggagcatcactaatttggcttagcacaggggaaggaagcaggttccttaggggcaacgatgaaaatatcacctatttaaaacgcatggacatcacgaatgggaatatctcaacccaaaacgatgtaatagctgatacatcgacaattccagagggcttgaatgcaccgttcatcctgaatgctgacaaaacgacctaccttgctgaccgttacgatggcgaattggtcgatgggttctggttcattgaaattgatgggattgtaagcgtccgcgagctgtaccgctttcccggcggacgcgtgcgagttgagaatggcaaggcctctttcgaatgcaaaattgatgacataaaaatccttgggaaaataatcactcgtacagagagcatgtga

SEQ ID NO: 222363 - DNA, 1086 bp, Klebsiella pneumoniae
atggctgtttcaaaactacctaacggaaagtggcaggctcaggttttcccaaacggtagggatggaaagcgcatccgtcgccagttcgcgaccaaaggggaggctttagcatttgagcgccacataaaagatcaggctcaagataagccgtggctgggcgagaaaactgataaacgccgcgttcgggatttggttacagcttggtataacgcacatggcgttacgcttgctgatggtgaaaagcgtaaaggcgcaatggagtttgcctgtctcgcaatgggtgatcccctcgctacagaattcaacgctaaactgttctcaacttatagagaacagcggttaagcggaaaaataacccgctccgatcgcgttaaggctgtcacccctcgcacggttaaccttgaactagcttactttcgggctatgttcaacgagctgaaaagacttgatgactggacagcacccaaccctcttgaaaacgtcagagagtttaagatcgcagaaattgagctggcctggcttacagttgaggaagcggctcgcttgctggaagaatgcgaaaaaagcaaggcggaggatttaaccatgattgttaaaatctgccttgcaaccggagcaagatggggtgaggcggaaagtttaactggaaagcagataagccccggaaaaatcacttttatcaaaacgaaaggtaagaagaaccgagctgttcctatcagtgatgagctttatgaattactacccaaaagccgaacctctaaaccgctctttaccggatgttactcagcattcaggagcgcggtaaaacgggcgggaattgagcttcctgacggtcagctttcgcatgttttacggcatacttttgccagccatttcatgatgggcggcggcaatattttagtcttacaacgcatcctcggacatacagatatcaaagtcacgatgcgttatgctcacttcgcccctgaccaccttacagaagcggttcaacttaacccattaaacctgataagtggcagcaaaatggcagcacagcgcagcactatgcaatacttttcgacaatatacgaaatgctatgcgtttga

SEQ ID NO: 222364 - DNA, 219 bp, Klebsiella pneumoniae
atgttccattgtccaaaatgccagcacgcggcacatgcgcgcaccagtcgctatctaagtgagaacaccaaagagcgttaccaccaatgtactaacataaattgcagttgtacgttcgtaacgatggaatcggtggaacgctttattgttacgccaggaacgataatcccggccccgcctcatccgacagttggtggtcagcgcccgctatggctctga

SEQ ID NO: 222365 - DNA, 408 bp, Klebsiella pneumoniae
atgaaactcttaaaaataacgcttctatgtactgtcgcagccctttcaagtagagccttttcacaaagcattgatgcacaaattttaatgaaaagtcttaaaccgtggcagcccgttggaattgaggtcaagacggactcaatgaatataaagttaccaactgccactgtaacctcggatgcatatgaagcactgatatcatccggtgtctgcactcctgtttgggttaaaagtgcccctgagggatatctcaaaaacaccaaagagatacatgtcgttaataaattttcagcgcagggctatacgtttgaaacccctctgattacatgtaaaaagatgggtgcgctgatggacgatgaagcaaagactttgatgtatgaaaacacccacggctacgtttcaaaataa

SEQ ID NO: 222366 - DNA, 1161 bp, Klebsiella pneumoniae
atgctggatatgctgaatttgaatgcgggtggcgtcctgacgcccgattttatgctgatgctcgacagcaaagatattaccggaaatatcagtaaccgcttaataagtctgacgatgaccgataaccgcggatttgaggcagaccagcttgatattaagcttgatgacgctgacgggcttgtcgagttgccgttacgtggtgccgtgctgacgctttatctgggatggaaagggtttgcgttaattaacaagggctctttcactgtcgatgaagttgagcattatggcgcgccagatagcgtgacaatccgtgcccgtagtgccgattttcgggggacgttaaattccaggcgagaagagtcatggcatgacaagactttaggcgaaattgtggcggcgatagcgacgcgtaacaaactgacatcgagagtcatacctgaactggcgggaattaaaatcccgcatatcgaccagtcacaggaatcggatgctaaatttttgactcgtctcgccgagcgaaacggtggtgaggtttcggtaaaagcgggaaagttgctttttctgaaagccgggcgtgggttaacagccagtggaaaggctattccacaagtcactatcacccgcggcgatggcgacaggcatcagttttcgattgccgaccgtggggcatataccggtgtcacggcaaaatggttacacaccaaagacccgaaaccacaaaagcaaaaggtgacgttaaagcggaaaccgaaagagcgacatttacgtgcgctacagcacccaaaagccaaaccggtaacgaagaaaaaagcggtgaagacaccggaagccagggaaggtgaatacatggtcggcgaggatgacaacgtgttcgccctgacgacaattttttcaaccaaagcgcaggcgatgcgagcagcccaggcaaaatgggacaaactgcaacgtggagttgctgagttttctatcaggctggcgacggggcgggctgatctttatccagagacgccggtacaggttaaaggctttaagcgcgtcatagacgagcaatcttggacaatcactaaagttatgcactacctgagtaaaagcggctttacgtcgagcctggagcttgaggtgaggttgtttgatgtggaatatgatgctgtggatgcttaa

SEQ ID NO: 222367 - DNA, 480 bp, Klebsiella pneumoniae
atgatgcttgcactcggtatgtttgtttttatgcgccagacgttgccacaccagacgatgcaacgcgatgccgaatatctgtggccatcaaactcacgcgtaggtaaacgggattctttccagtatctggggccgggggaagaaagaattaccctggccggtgtgttatacccggagctcaccggcggaaagttgacgatgacagctattcgtttaatggctgacgaagggcgcgcctggccgttgctggatggcaccggcactatttacggtatgtacgtcatcaataatatcagcgagacagggagcctgttttttgctgacggcacggcgagaaaaattgatttcacgctgacgctcactcgcgtggatgaatcactcgcggcgctgtatggcgatattggcgaacaggccaatgcacttattggcaaggcggaaaatatggcttcgtcagtgtctggcttggtggggattagctga

SEQ ID NO: 222368 - DNA, 1077 bp, Klebsiella pneumoniae
gtgggtaaaccattttatacgcgcctgacccctgccggggagcaaaagtttgcaacggcggcggtgtctggtgagccggtcagtttttatgagatggcagtgggcgatggcggcggaatcctgcctgacccctcccgtattgacggtctgattaacgagcgatttcgggcgcaaataaaccgtgtagtcatcgctgaccaggcagctaacgtcatccgcgttgaaatgatcatgatgcctcaggtgggaggattctggatacgcgaagcggcactctacgatgaagaagggatttgtcttgccgtcgcgaatatggctccgacctataagccgctgcttgcagagggggccgggcgtttacagtcggttaatatgtggattgccgtcagcaaaaccagcgacgttacgattaaagcggacccggcggttattctggctaccgtggaagaggtgaaccgcgcaaaaaatgaggcaaaggattatgccgaccaggtcgcagggcagctggatatggatattcagcaggttatcgctgacgctatcactgcggcacgtcgggacttctgggaagaggagaacccgccgggaactgtgcgcttctttgctcaaaatattgatccgaatgagcgctggccgtggtcgcaatgggtatacaccggtgaaaataaaacgatccgggtggcaaaagcagacggctcaaacgtagggaataacggcggcagcgatactgtcacaatcaagcaggctaacctgccagctgtgcaggttaatgtcagtggcgaaaccagtgagctacccgggcaggaactgaccaccagggaggcaggacggcataaacacaaaggcggaatgctcgccccgggtgaggtctgggatgataattacatagtcggttcggataacgacagccgccgcacacgaaattatacggatgaggtggccgatcatagccatattgtggacttgccagcccacaaacacacgagcactggcaaaaccgataacctcggtgaagggaaatcaatcagcgtggttgaagctcacacgctgctgatgtgctggagccgtgttgcctga

SEQ ID NO: 222369 - DNA, 699 bp, Klebsiella pneumoniae
atgattcagtttcaggtcgctaaggattttggtaatcccctactgcccgtcagtaaggcccgctcggaaatgtatctggattctgcactctctatttacgaaatgcgcagcgcaaaagaaagcagcagtaatggcagagcgctggaggttaacggcctgacctttgataatgaggggctggtttgtgatggcattgatggtcattacgctgatacggggcttattgagcctctggctaataccgtcatcgttgcatttcgggctaatccgcaggaagtcacaacgcagatttactcgggcctgcctgaatcggagagaccgtttacaggagcgcgggccgcgattactaaagacggtatttttgtggctgatacgggggcgacgcccacgacgatccacgctcaaatcggcaatatcacgccaggctgggagctaatagcagtagtgacgggagcaaaacaactttcggtaatccgtgcatcgactatggaaacagtgaccacgaagtttgaaacccgaaacgagccgaaaagaactattcgcatcgggggtgggtatgttgccccgcacaacctgggtatcaacggacgtgtaggattatgggccatgtataacggtgtgctggatagcgcgaccattgtaggtctgttcgcaaaagcacgtaccatcatggctgggaaaggcgtcgttattccttaa

SEQ ID NO: 222370 - DNA, 2178 bp, Klebsiella pneumoniae
atgaatattagtgaaaaaccacaatgggaaaataatatcagtatgcttgcccgccaacaaaaggttgaaggcgggagagatggtgcggctaatattcaggctcagcaactggcaaaccgtacccggtttttgaaacaatccgtcgaagcatacagcaccctgattaaatcgggcgagcttccttattcaaatgaagatgaagcaaaggccgctattgctgcggggaaaatcccggaaaatagtttgttttccgttcgctctgaaagtgcgggcgtatgggttgaagagtttaaaaatattaacggggtgcctgtttcaactggcaagcggttgcctgacagtcagggtatttcggtggtggttttcaccagtgatgatgatccgacgggtgagaaggctggattgtcattaacggtgccgggccaggttttccgggttgcataccccgatgacagcagcaccgaaacggtttaccggaatgacggagatcgcgcggttaagctgctagaggtcgcggataaacgtgcaatggacaggatgttgccagatgccgggattatgggggaggttgatccagattatgccgtcgagtttgttgatgcattgttccgtcgcgccgtgggtattgatttgcgtggtgtgctggaagcgaacgccggaatgcgcattatgggagtccctgtaaccaacctgccggatgactccgattactgttttgcatttggtgatgagctggggcgcattgtctttggtatcgggaaaacaggcttcatcgaagtgatgggaatgcggatttttgtcacggagggtgagaactttcttgaaattattgatgaaaatcagcgggtatccgccgggattggcagcaaaggcgagattttcaataattcagcggtggagccacagcccatcgagcctgagcaattatggcttgattttgccgaagtgctgcatgtcattatctacgggcaatcactttcaatcgggcaatacggtacgccggtgctgaacacgccgacacgcaacgccctgatgttcaatacgggggtgcggagttacagttccagcccggcatcactggtgccgctgcgtgaaactgtcagtggcagcaacggggagacagtggcgtcctctctggcgtatggctttactgataacgtcagcgatatggccggtcgcgatctactgtttaatgctggcggcgtcgggggaattacggttgaggggctttcgaaaggcacagagccttatcgccggttgattgcgcacctgacatggacagcttcgcaaatggcgctacaggggcgtgactatgccgctgattttatgttgtggatccagggcgaagcgaacatggcaaacgggaccagcgctgacagttacaccgggagggtgtcaaccttacgggcggatgtggccgcagatacggcggggatgcgtgatgcaggccgcgatctggtcatgttgatgtatcagacctcatcccacggctattacgtgggtacagcagaaaacccaccggagcttatcgctcaggcgcagcttgatatggcgctgaataatcctcttattgatatgtgggggccatcatatatggggcttccggcaaaccataccattggacagggaaacgtccatcacaatgcccacggttaccggctgatgggcctatatgcgcaaaaggcattgcgacatcgcctgcgaacacgcaccgcagataagccgaatggtgaaaaatatttacctgtgcatgctacccgtgcccgaaaaataaacagcagaaccgtgattactgatgtatttacgtatcacccaccgttagttattgatgactcgtatatcactgagctggcagatggtaatcatggtgtcgaattacatgatgaaaccgggcggcttgatattgtatccgtggagattgtggcgggaacgaaaattaagatcgtgtcgaaaacagatatcggaaacggggcgtttgtggcatttgcctggacgccggagaaccgaggagaaatcacaaacaaccgatatcaacaatggtttttcgggcgagaaacaggggtacgaacaaccattcatgattctgaccctgaaaaaactgatttaacagatgaaaacggcaagccttatctgctttataactatttaccgattcaaaagattgccatttccgaataa

SEQ ID NO: 222371 - DNA, 744 bp, Klebsiella pneumoniae
atggataagaaatttagtttgctgaggcataaaataaaagaatcacaaagtgcggtaatgaataaggttattagcaaccataaaactgaaatatgtattctttgtggtagcgataatgaaattacaaaggaacacgtgttgcctcaatggtcatttgagggaaggccagagaaattcctgataaatactaaaaacaatcagtcgtctaattacataaagatgactgttccggcatgcaagacatgcaactctgatttgcttggtgcttttgaagattatcttaagcgatttttattggaaaaggacggttcggaattaaataattatgaagtggattgtataatatggtggttgcaatatattgcgtttaaattacagataatggatttgcgttctcaattcttgcgatacaaaggaggtgagtatatcccttttttatctaatatccctgtggcaatgttctggggggagattgatacgaccccaaatgatgtattcaataccataagaagaagtcgcagggtgctaactaagaaaagaaaggcaaataagtacaattcattattagtttttaacaccacaaataaaagctttcacttttttcataaggtagatgattttatttttattgaaatgcctcaagttgggaaagcattctttttatttttgaataaagaatttgctgaacataaagacgcacatgcagaatgcatggagataataaaaaaggtatataacgactga

SEQ ID NO: 222372 - DNA, 456 bp, Klebsiella pneumoniae
atgaatgacttcaaaccctttgaggacaagcttgccgggttgatagcggccctttctcctgccgggcggcgtcggatgaccggcgacattgcgaagaaactgcgccagcggcaacaaaagcgtattaagtcacagaaagcgccggacggttcgccatttgtcccgcgtaagcgccagcccgtcagggcaaagaaaggccggattaagcgcgagatgttcgcaaaactgcgaaccaaccgctatatgaaagcgagcggtaacgacagcgcggcgatggtggaatttaccgggaaagtgcagcgcatcgcccgcgtgcatcaactcgggcttaaagataagccatcccccaaaagcgccaccgtagagtacccgcagcgccagctactgggttttgatgatgactctatacaattgattgaaaaggagttattaatgtttttgtctaaaaacgaataa

SEQ ID NO: 222373 - DNA, 534 bp, Klebsiella pneumoniae
gtgagcgaggggaactacatcgactcaggcattaatatttctgcctataacgccaacgacctgacagaaatatccattctgaactggccaggagcggtgcgcgctgttattggccgggtgcaaatcaattccccgcaacgctcccgcggcattcagacctctactgcatcatggatagctaaatggctgacgcaatcaggcacggcgcagcaggcgaccattaccaacagttcggtagccggtaacagtgaaatggttgtcggtcgattcatccgtgataacggtagcggctcgatgctcaccaaactgaaaattccgcgtaccgcccaggaaaccacaacgacggccgcatcagttccgtactccatgcagtcatcaaacatcctgctgggggcatctgttgatgccgcgacgacaggttctgtttttatgagggcggcgctggtagccagcagagcgctgacggatgcggagatagcaacgatctacgcaacatacaaaaattactaccagttgaaaggcaaaaccatttaa

SEQ ID NO: 222374 - DNA, 195 bp, Klebsiella pneumoniae
atggcgagctatatcgcgaactaccaggccacaaaagaaggccaggttatttattcgggaacactggcggttgaatccgaggggaacgacgctgcagttaaagaggctgtgacagcagaactgaacaacatcaatacccagtatggcggcggggttcctgattccgtcatggtgaatagttacagtaactcttaa

SEQ ID NO: 222375 - DNA, 780 bp, Klebsiella pneumoniae
atggtaaacgaaaactcattacgttcattattcattgagccgtatttcaatgacatgccattagcagaagctactgcattcattatcgagcataatggtaaattatttttgataacaaacagacataatgttacagggagaaatcaaaccacagatgaatgtttgagtaagcatggagcaatccctaataagattaaggttcacttcaacaaaaagaattccataggtgaatacgtcattaaagatattaaaatattagatgacgatgaaaaccaactatggcatgaacatcctgcactcgcgaaaaaagctgattttgtagccctagaacttaacgatgatcctgagatagaatttttcaaatatagctctaacaaagatcatgtgatccatactctaaatccatcaaatactctgagcatcattggattcccttatggaaaatcttcagataaaaaatttggcatttggatttcaggttttcttgcttctgacccagatataaattacgaaggactaccgattatgcttgtcgatgcaaggactaggaccgggcaatcaggatcgcctgttatcctttataaagaggcaggaatgagcatgataaacaaaggggggcaaacaacttataatccttcatattcaactaattttttaggaatatatagcggaagattaaatgccgaatcggatataggtatgatatggaaaaaagaagcgatcattgaattacttgatagtatcaacaaaagaaaaccattgtggcctgtcaagtattaa

SEQ ID NO: 222376 - DNA, 1935 bp, Klebsiella pneumoniae
atgattatcagtccacctcttctgaaagtgaaacaagacgatgaaactgatgcggcctggattgaaagaatcctgaccgtagttgaccgacgcggatacccggtcaacggttatggttcgtggcatggcggaatacatatacgtcagactgacgaaggaaggcctgctgagagcgtgcgggcgatagctgacggtaccgtcgtttcactccgcaaaagctcagacaagcgcgatctagcaccattcaacatcaacgccgataaacccaatacaaaggggagtaatgatggttatgtgctcataaagcatgaaaccgagatcggtagcggtgatgaaggaaaagtggctttctattccttatacatgcatctgaagtcgctggctgaaactgttaaagccggtgataaagtttaccgtaaggatcctataggccttccaggcatggttgatggagtgaatgctttccatttccagattttctgcgatgatgacaacatcagcaagctaacgggcaggaaaacaggagagctggatatttcgaagaatggccgcaccgatgcggtttatggtgatattcacttttatctgccaccgcagacaaagttttatgacaaggctccagcagataacagcatttctaccaccggactttctgaactatataccagcaatgtgcctctgtatgccagcatgactctggcccaaggcaagtgcacgatggttactcgtcagaaaaatacgcagactgacggaaaatatgatctgctgggtgaaccactggttaatgcagatggtgatgactacgaatacaatctctataaaaccgcgatgcggaattataaggagagcccaagtgccgggtttgaattacttcgctttgggcgagtgatcaacacggaccatgaaacactggtaccggcagacgcaccattatggatgacagtcaattacccgggtggtaaaggggtgatcaaccttgctgattccagtattaaaaagtttagtgacgctgatttccctcactggacgggctggcagatggtagatgacgatagtgatagcaacagccagtgtaattcagctattatcaagaaacttcatgaagttggtgacttcgataaccagtgcgggaagctaatctgtcatttcccatttgaatgggaaaaaagtacgatcgacatccgtttttcgtggctgaaaacgggaaatgaagagcatgaaccgatgacggaagccgattatgcaaagtttaaatcccatgcggaagcactatgctttgattctggagcgttgagttctgaccggttgtggcattttgagccaaaatcatttattcgacatttcaggaaatgtagttggctcgactctgaagtaattgaaaaagtaatgacggcgaatgctagtaaaaaaaataaaaatgcacttgaaggtattaaaaatattacattagagtactatgcggacataaatacaatcatgcgaaagtataacttatctgatgcaaatagaatttgtcattttttagggcagggtgcagttgaatcaggttatttattgtccatgcaagaaactagccagcaacaaattattgttgatggtgttcagcaaggtggtgtgattgttgaagcatcaacatttaatgaaactactaagctaggtcattggtacggagctcttaaagccgagaaggataactatttctccgggaaaaaatacaattcccgtggagggtatatcacaggatcctatagctggattaacggtaactgtggagatgtagatgcacaaaaattcagaggtagagggtttaaaatgctaactggacttaacacatattcaagctactgggtatatcgaggttggttgtcaaaaaatgactttgataaatattggtgggatgacccggagtacaagaaaaaaattcagccggtatga

SEQ ID NO: 222377 - DNA, 177 bp, Klebsiella pneumoniae; identical to SEQ ID NO: 203197

SEQ ID NO: 222378 - DNA, 201 bp, Klebsiella pneumoniae
atgacgatgttgatcgcgagctgcgcgaaagatttacccgccccggtagtcgttgatacggcctgcagctgggtgagggtcatctacctgaccgactacgatatcgacgtgctggataagcagaccaagcgtgacatcctggcgcaaaacaaatcagtgcaggctaactgcccgcaactaaccggcagggttacgcgatga

SEQ ID NO: 222379 - DNA, 276 bp, Klebsiella pneumoniae
atgagcttcgaaattattgctgggctggtggtcgtcatcctgggcgctatagctggcgcgtacggtatcggccatgcacgcggaaccagcaaggcggaagccaaggccgaacagcagcgcagcgaagagaacgccgccgccatcgtcgccacggcagaacgccgtgctgaagtcacaaaaggggccagtgatgtacaggaagacgttaagcgtatgggcgatgacgatgttgatcgcgagctgcgcgaaagatttacccgccccggtagtcgttga

SEQ ID NO: 222380 - DNA, 309 bp, Klebsiella pneumoniae
gtgctcgttctgttacttctgcgcaaatatacccggctggagttcgtaggccatgccagcttgctgctgaaaacgtggtctgtaaagctgggagctatcggcgcgctggttggtgtatgggcgcagtcattcccggatgctgcgctgcacgcctgggcggtgctgccgccggacattaaaaacatcctcccgccaaacattgtggcactgattagccctgcgctggtggtgctggcggtgctatcgcaatacgtacgccagccagcattgaaagataaggccgacgaactgaaggagccgcagcaatga

SEQ ID NO: 222381 - DNA, 168 bp, Klebsiella pneumoniae
atgcgcgaatttatcaccgtgtatctcaatggcattaaggtaaagtacgcctttactgttgacgatgagaaaggtgaagtgattgtcgctgtgcgcgatagtcgtggacacatccccgccgagaacggagaggtgaagcggcagacattgtacggcacagtgagatga

SEQ ID NO: 222382 - DNA, 276 bp, Klebsiella pneumoniae
atgagcttcgaaattattgctgggctggtggtcgtcatcttgggcgctatcgctgccgcgttcggtattggccacgctcgcgggaccagtaaagctgaatcaaaggccgagcagcagcgcaacgaagagaacgccgctgccatcgtcgccgcggcagaacgtaaggcagaagtcactaaagaggcaagcgatgtacagcagactgttagccatatgcctgatgacgatgttgatcgggagctgcgcgaaaagtttacccgcctcggtagtcgttga

SEQ ID NO: 222383 - DNA, 456 bp, Klebsiella pneumoniae
atgcttttgctgaattttggtcatatacgccagtacctgtcggatgttggtgatactgtccggatcgctgtaacgtaccggaatgttaatattagcctcgtaatgctctttaaactcacatcggtgataccagccttccctgttagtgatatcactccagtacaaaccggcttgctgtgcccaggaataggtattctgagttttactaccatccagccagaatacgacatgggcatggtagtgatggtcttctgtccattcgataacccagaagaaaccgactactacttcgagttgcaccatacggttcatcagctttctgacatccctttcgagctgccggtgatcccgcaggaaaaacttagcggtatgatcctggtaaaacagatctgttcggagtgcccgcaggcaggaatagcgctctaccagtttgtcgatatggttgttcaggagtga

SEQ ID NO: 222384 - DNA, 594 bp, Klebsiella pneumoniae; identical to SEQ ID NO: 124116

SEQ ID NO: 222385 - DNA, 207 bp, Klebsiella pneumoniae
atgactacccgcccttcactgaccgaagaccagttcgttgacatggcatttatcactagtctgctgcaaatgacagataagtggatttataagctcattaaggacggaatctttcccaaaccaatcaagctggggcgaagctcccgatggttaaaaagcgaagtcgaaaactggctacaggagcgaatcgaccagtcccgtaaataa

SEQ ID NO: 222386 - DNA, 879 bp, Klebsiella pneumoniae
atggttaagttaacgggcaatgaccggagtaggatacagcatctggagaaacgactacgggaggcattagataagaatttttatcatcctcctgccggggcaagtgaaaacgactatcgttcatatcagcaaaaagtcactatttatcttcggagtattaacacacccgaaaataatattaacgcctttctttctgaaacagatcgcctttattcagggatgtttccatctgaaagtgatacagagtggtatcgaaatgatccacgggcgagcttatggctggtttgtgaactctatgaggagctgaagaaaaataaagttgagcataatgccgattttttatcaccggaattattacagccaagccataatgtaagagttgatgccatgcgtagatgtattaatgactggcctttatttttcaccacacaaaatgatttcatcaaagacagaggcattgaatgggctaaccttctggatagtcatgatttattcagagatgtaagatcaagtaaagtagatgttggttcatggctgaaagattatcttaaaaataatacatcaataggtttaaatcgaatttgcggtgagtctccagaagaagtcatggcctggtgttataccagttatttcatttggagaaaaaacaacctgcacttacctgattcagttgagttgtttgacaggaaatttaagggcgcgtgggcaacccagaaaaacagaaacaagaagaaagttgagctaaacctgatagctctgaatgtaaatataactcaaaaatcacgcgatattttagctgattactgcacatgcaaaggtgtatcaagagactcggctattgagcatgcaattaaaacggcactcagtaaatttaaatag

SEQ ID NO: 222387 - DNA, 822 bp, Klebsiella pneumoniae
atgcgattagccagccgctttggccgtataaaccagatacgccgtgaccggcctctgacccacgaagagctgatgagtcatgtgcccagcgtgttcgggactgacaagcatgaatctcgttcagacaggtacacctacatcccgaccatcaccatcctcgaaagcctgcagcgtgaaggctttgagccgttctttgcctgccagacaaaagttcgcgaccagagcaagcgggagcacaccaagcacatgcttcgactgcgtcgcgccggtcaactgaccggacatcaggtgccggaaatcattcttctcaatagccatgacggttcatcaagctaccagttgctgccggggctgtttcgaggcgtctgtaccaacggcctggtctgcggccagtcattcggggaagtgcgggtaccgcataaaggcaatgtcgtcgagaaggtgattgaaggggcttacgaagtgctcggggtctttgaccgggtggatgagaaacgcgatgcaatgcagtcgctggcgttaccagtcccggcccgtcacgcgctggcaaatgccgcactgaagtatcgatttggtgaggagcaccagccggtcacggtatcgcagttgctgactccgcgtcgtcgggaggactacagcgatgacctgtggaccgtataccagcgcgtgcaggagaacctgatgaaaggtggattgtcagggcgaaccgctcaggggaaaagcagccgcacccgtgctgttaccggtattgatggcgatgtgaagctcaatcgcgccctgtgggtaatggcagaaaacatgctcgcgtttttcgagcgttaa

SEQ ID NO: 222388 - DNA, 444 bp, Klebsiella pneumoniae
atggatacacacaaccctgagttcgctgagcaggcagcaattactgcctcggtggtccctgacgagctacgcatcggcttctggccgcagcactttggctccatcccacaatggataacccttgaacttcgcattttcgcctggatggaccggctgtgtgtcgattatcacggcggtatctggcgcttttcgacgctcagtaatggaggtgcttttatggctccagagtcagagagcggtgagaagtgggcattgttcaacagcatgaacggcaatggtgcagagcttaccagtgaagctgcagggatggtcgcctgtctgatggcttacaaccaccatgcctgtcgcaccgagtgtgacgcgatgactgaacactattatctcttacgcgactacgcgctgaaccatccggaatgcagcgccattatgcatctaatcgactga

SEQ ID NO: 222389 - DNA, 543 bp, Klebsiella pneumoniae
atgaataccgcattatccccggtgtcaacgcagcctgaactctttccgctggcggttatggcccagcatggttgcctgctccccgcgacctccggattgacaccttatgcccaacggaccattcgccgcgctatcaacctgctggataaatatctgcgccagcccggcatgtcctttacctcaagcacggctgcccgtgactggcttcggttacatctggcaggacaagaacgggaagtgtttatggtgctctatctcgataaccagcaccgtttactggagagtgaaacgctatttgccggttcggttaaccatgtccaggtccatccccgtgaggtggtgaagtcagcgcttcgcttcaatgctgctgctgttgtgctggcgcataaccatccatccggtgatccggagcccagccaatgtgaccgcaacattacgggcaggcttaaagaagcgctggcattggttgatgtgaacacgctcgatcatctggtcatcggttcagagggcatagtgtcgttcgcagagcgaggctggatatga

SEQ ID NO: 222390 - DNA, 1488 bp, Klebsiella pneumoniae; identical to SEQ ID NO: 215491

SEQ ID NO: 222391 - DNA, 354 bp, Klebsiella pneumoniae
ttgcaggcgctaccacagtttgtgctgatcattgttatagggctgattgacgggctggtacgccgcgacttacggcgattcggcgcaggccatgagtccgggtttgtttatcatcatgcaaggcgtatgatcggctccagcctcgcggcaacggggctggcgtggctggcgtggctggcgtggctggcgtggctggcgtggctggcgtggctggcgtggctggcgtggctggcgtggctggcgtggctggcggtgccagtttttctggaatcaagatatattgtaatacctggagtgatgctgagtgggctcgcgggttcagtagcgacgggagcattcaaaaagcatttgtaa

SEQ ID NO: 222392 - DNA, 435 bp, Klebsiella pneumoniae
atggggctttacaggagttcatcacatgtatattggcgttgcaaataccacatagtctggacgccgaagtaccgcttcaggatcctgaaagataagttgggtaaggaactttacaggacaatctacattctctgtggaataaaagattgtgaggctctggagctaaatattcagccagatcatgtacatcttgtagtaatcatcccacctaaaatctcgatatcaactctgatggggcatctgaaaggccgaagcgcgatcaggctctacaatcgttttccacatatacgaaaaaagctatggggtaaccacttttggtcacgtggatactttgtagatacagtcggtgtgaacgaggaaattatcagacgatatgtgcggcatcaggagaaaacggaacaaacgcatgaacagcagatggaattgttagagtag

SEQ ID NO: 222393 - DNA, 618 bp, Klebsiella pneumoniae
gtgcgatatataagagaattagaagggttgcgtggaataatggctctttgggtagtttttggtcatagtcttgcgagtcttccggctttcagcactcggataccgcctactgctttaaattcatatgcagttgacgtgttcattattttaagtgggttcgttattttctttatgttggataataaaaagcaggtgtattctgattatataactcagcggttttttagaatttttcctatttatatatttgcattttttttaagtttactaattttgaattttacccaagagacattgctttctgcagatctttcacctggcactgacaagagattgttactaatagaatccttttatgaaagaccattagctcatatccttgcacatattactttgttgcaaggagttattccaaatgggatgcttaaagatgcatcatatactgttttaggacaggcttggagcgtatcggttgaatggcaattctatctggtggcaccatttatttttttcatgttatccaatcttggcagtcgtagaaatatttattttacattattcctctctttggcaataatcatggtttgtaagttttttagcagtggttttttttggtaa

SEQ ID NO: 222394 - DNA, 1311 bp, Klebsiella pneumoniae
atgaaaaagctgatatcgaatattatatatttaatatctgaaaaatttttaaccacatttatattgctcgtttccaatatcatagtaattagacatcttggcgttgagtcttttggtaagttagctatttttcaagtttattttgcattggctgttaccgtgtctgagttcggtattagaagagtatattcatctttcaggacttataggcgagagatcattaccttcagcgaggttttgctgctaaaaactatcttgtcaggaagttttttcatggcaacccttctggtggtttacttctttaaacttgatgttatttattatttattagcacttgctttcttggcatctccttttgaatcttattcatatcattttgaagctaatttaaataatcaattgctgtcgaaaataagagtttcagtttcattatttttagccttactaagaatattactttgtttcatatcagcagatcttatattaataatactatccttttcaattagtaatataataattaatttattgtgttactggcaatctaaaaagaaaggatttaaacctgattattctctctctgcagcaaggaaattgataataaggaagcatttattaagtcgctcgctatttttttggttgtctgtagttgttgtacaactgaatctccgcacagaccagtttatgttatccataatgacaagtgcagctagtgttggcatatatgcaggggcttacaagctggtcgaacaatttatgatgatcccatccattcttgccggtgtgtttttgccgcatattagtcgccagactaatattgaccgcaatttatatttaaaacgtctgtatttttatagtctaattataagtgtgcctgtaagtcttggatgtgcggttgttgcgccttttctattgccagctttattaggccaagcttttaatccttctgtgcctgtatttcaattattagctttatctttacctgttttagttttggttaatctaagtgggttgtattatagtatccataaattagagaaatatgcagtttttaggaatctttttggtctttttttaagtttaagtcttaatgctgttttcatcaaactgggaggggtggttggcgctgctttatctgtattaattagttataccctagttgcttttttcgtcgaatttttattgcccataactagaaaaaatgcgatgttgaaacttgagtcgttacgtgattgctttttaccacaatcttataaatccttgatttatgaatttaaggatatattgcataaaaggaaatataagaaataa

SEQ ID NO: 222395 - DNA, 987 bp, Klebsiella pneumoniae
atgcgaaaaaaaattatatactacccgtttgatacgggtgtaaatcaatatggccaaagaatgaaggaagtgctttcaagacttggtgatgtcgaaaagttttcttatcgtcaagtgctgacatcgccttttaagaagaaagatttgtgtgttattaattggattgataatcagtttctaaatgaaaaaggtagagtatccatagtcggtactcttaaagtatatttaaaaatcgccttgttaaaaatacactgcaaaaagattgcttacgttagacataatgtttatccacataatactcataaagattcaatttttactctaactcaaatgattaacaggttaagtcgattttttgatataacatttgctcattctcccaaatttttgcaatcagttgaaaaatatattccacatccactataccaatatcctcttactgtagacgagcattcaacaattcaaagagatgatgatctctatattatttttgggaggattgttagatataagaaaatagatgaagtgataaaactattccctaaaaacaaacgtttgcttattgctggtttctgtgaagataaagaatatagagatgaactaacccgtttgattagcggaaatagcaacgttcagcttatatcaaaatttttaactgatgacgaagccagaaaacttgttagatcagcaaacgctatgatcattagccatgctgatgacgatatgattgtttctggtagttttttttatgcgttaagtcaacgtatttctattatttgtgttgagacaccttttatgcgttgggcggaggaaactctatcaaataaagttgttttgacttgtccttctatttccaaaatgtgtaatgtactaagccaaaagcattcagcatatatttataatgatataactataagtaaaattaatgatttatttagtgatgatcgtattgaatatgagcttactaaattgttatctaaacgttaa

SEQ ID NO: 222396 - DNA, 516 bp, Klebsiella pneumoniae
atgcgtacatggattgcttcttttatcaaagagttaaaaaataatccaacattaaaaagtagaataatagtctttttgtatagaatggcttctatttatttttcaaagagaaaaaaccctttgaaatttttatttattatatttgttataatgtattattttattgttgagtttatttggggaatagaaataaagccaaaaacaaaaataggttggggggtaatcatttaccatccagtgtccatcattattaatccaggtgccgttttgggagataatattcttcttcggcatggtgtaactataggtaataaatataccagacgtactggagttgaaagtaattgccctatcataggtgataatgtcgaatttggagcccatgcgtgtattgttggtgatatcaatgtcggtaatgatagtgtaatcggggcggcggcctatgttgattttaatgtaaagccatatacaattattgcctctcctagaggaatagttctccgcaatattgactaa

SEQ ID NO: 222397 - DNA, 1398 bp, Klebsiella pneumoniae
atgaaaatacttactcaccgagcacgagctaatgcgaatgcttcacttatatcaatggttcaacgcttttctgatatagctataatctttattgggctatatgttatctgtttattgaatgacactgtttttggttataaacatgcattgatttctcttacggtgctagtgattttccaaatgattggcgggattactgatttttaccgctcttggcgaggaggtaaaatatcagcagagttgatattaattttaaaaaactggactttaagctttcttctggcattaggcgttacatctctattttctgacttggacgttgatttacatattttcctgcaatggtatttcattgttgtaatcggcttcattctttgccgttcttctattcgcttagcttctgggatactgcgtaagttaggttataatacacgtaatgtcgctgtcgtcggttcactacctgccggtgtaaatttactaaaaagttttattgaagaaccttggttaggatttgtagtaaaaggcatttacgacgattcagaatctgatgattatgacggtgttccttatgcaggaaatatttcacaattaattcaggaagcaagagaagggaagttggatagaatttatatagccttaggtatgaatgatgaggcaaaaattaaaaacattgtatctcaactaactgacacaacatgctctgtactattaatacctgatatcttcactttcaatatactgcagtcccgaactgaagaaatcaatggcgtgcctgtggtacctcttttcgatactccgcttaatggcatcaatatggtctttaaacggttagaggatatcgtggtatcactaacaatactagttttaatttccccggtattgttagttattgcatgtgctgtgaaattatcgtctcctggccctgttatatttcgccaaactagatatggcatggatggaaaaccaattaaagtttggaaattcagatcaatgtctgtgatggagaatgatgataaggttattcaagctaaaaaaaatgatgcgcgtataaccaaagttggtaaatttttacgtagtacctctcttgatgaactacctcagttttttaatgttttatttggacaaatgtctgttgttgggcctaggccacatgctgtggcacacaatgaacagtatcgtattttgattcaaggttatatgctacggcataaggtaaaacctggaataacaggcctcgcgcaaatcaatggatggcgtggtgaaacagatactttggaaaagatgaaaatgcgaattgagtatgatttgctctatattagaggttggagtatttggctcgatctgaaaattatttttttaaccgtttttaaaggttttatcaataaatctgcatattag

SEQ ID NO: 222398 - DNA, 1155 bp, Klebsiella pneumoniae
atgcctcaaaacatgaatataggtattgtcgcagattggttagtaacttatgctggcgctgagcgagttattaaagagtttgttgatttatacccgtcatcagaactatattcaattgtcgattttctatcagatgagtcaagacaacattttcataataaaaaagtcaaaactacatttattcaaaaactcccttcggctaaaagtaaatatcagaaatatttgccattgatgccattggctatcgaacaattagatgtatccgcccatgatattgtactatcgagtagtcacgctgtcgcgaaaggtatcctgacaggtcctgaccaacttcatattagctatgttcattcacccgttcgttatgcttgggatttacagcaccaatatcttcgagaggctaatttagatagtggtataaaagggctccttgctaaatggatattgcataagattcgtatttgggatagtcgcactgcaaatggtgtagatcattttatagcgaattcgaaattcatttccagacgaattaaaaaagtatatggacgtgatgctgatgttatttatcctcctgttgatgttgatcgtttcttattgaatgaaaacaagggtgattattattttactgcatcaagacttgtaccctacaaacggattgaccttattgtagaagcatttagccatatgcccgaaaagaagttagtggtaattggagatggctctgaaatgaataaaatcaaatctaaagcaactaaaaatattgagattttaggataccaagaaaatgctgtaatgcaagaacatatgcaaagagcaaaggcattcgtatttgctgcagaagaagacttcgggatcactcctgtagaagctcaagcatgtggtacaccagttatagcttttggtaaaggtggtgctttagaaacagtacgcccaataggtcaaaaaaagcctacaggtctttttttccataaacaggatgtttcttcagttgtagacgcggtatctaaatttgataatttaattgacaaagttgacccaatcgactgtagacataatgcaatgaatttttcaagagaaaggtttcaaactgaaataaaatcctatgttgaagataaatggaatatctttaatgattcaaaaaacattcaatattaa

SEQ ID NO: 222399 - DNA, 3528 bp, Klebsiella pneumoniae
atggctggaacgtttgatgctggcagcgttatctacgaagtcgacatggatacttcgcgcttactggcagctcgccgggaagttgatgcggcgctgaacggtcttaatgggagcatggggcgtctggaggccagtgttaaccgcactgaacgttccattggctctatggagcggacaatgtccagcctctctggcgttgctaaaggcttgctggccgcgctttctgtgcaacaggttgcgagttacgccgatgcctggactgaactgaataacaaagtcgctaactcggttcgtactggagagacgcaggccgaagttatgcagcggatctttgatgtttcacaagcaacccagtcatccctgaacggcacggcgactctttacgcccggcttgagcgcggaaccagaacatacaacaccagcgcagaagacttaacccgccttaccactattatcaaccagggatttgcggtatccggcgcaactgctcaggaagctgagaacgcaatcattcagctatcacagggtatcgcttccggcgttctgcgcggcgaagagtttaactcagtgtcagagcaaggcagccgcctcatggtcgctctggctgattcgatgggtgtttcgattggtcagttaagggctatggccgctcaagggcaactgacaacagacgttgtagttaaggggcttctgtcacaaggggatgcaatcggcaaagaatttgccaacactaccgtctccatcgccaagggattgcaggtggccggtaacaacgtaacgaagttctttggcgaaaactcgacggttaaatcattcgcagcagggttccgagactctgttattacaataagcgaaaaccttgagacactggggacagctttaattggcgctgctgcaataatgggcggtaggtttgctggcgcgttagcaatggcaacagccgctcaagcctcaagagtgaaggcaacaattcagggaatagttgcgacaaggcaatcggcgcagcaggaagctgcagcggcatcagtaacagccagaaaagcagtagcagataaagatgctgccctttccgctctaaatctggcaactgcggagtataacgtagcaaaaggatctgccgctgaagcctttgcacttgagaacgttatacggctaagggggatttatgtcgcaacatccgctgaagctgcattggctaataatgcactagcggcatcacaagccaaagtggccgctacgggtataacttttgcaaacacaatgaaggtagtgaattcggttactgctcctttgggtgggcccattggcgtaatagccattgttgccgctggctggtatctgtattcacagcgacaggctgaggccagaaaagaggcaatagcttttgctgacaccgtacctgacgttattaagcgcctcaaggacatgaatcttgctcaagctcagggcgttagggctgatacggtcacctcaattgaggcccaaaaggaagctattagcgatctgaaagataccatttcaggtctgcaatccgattacgagaaatatacaacgcttgcaaggcaatatggagttaccgaagatcaaaataatggtttcgtgattaaggcaagggatgccgcaaacgagttggccaaaaagcgcagggatctggatggagcgacagccactcttaagcaaactgaagacgcattacacctaattagcattcaagttaatcagggcattgttgatcagatgagggctgccagagataacgctatcgctatcgctgaagcagaaaagcaagcgtcattcctcggtggaacccaggcattcctggctgaaaaactcggccaatcaacgcaggccctgaaagccttcaactcagaaagtctgaaaataaactggggcgggaaagaaggcgagaagctaattaagcaggctgagcgccgacttgccttgtcaaaattggagggggaagcaaaagccaggcagcaggcggcctatgatgctgaggatgcaggcgttacagatgagcgagcaatcaaaaggcttcaggataattatgctgcaacagagagaaacactcaggcaagaaaggatcaaaagaaggaagataatgctgcggcgtctgaggctaagaaacttgctaaccagcaggaatcggtaaaccaaaaacttgaaaatctgcgccagcaatcagaactcgctgctggctcaacgcaggagttaagccgggagaaggcgatcctcaatgctcagctttcgcttggcaaaggcgctacgcaggaacaaatagcgctggctgggcagtatgctgctaaaacgtgggatacggccaacgctatcaaggcgcaagccgcggctgagaaacttctccctgaagccagagagaatgcgtcttaccagcaggatgttaaagatctgcaaactgcactggccgccaaaaaaatcactcagcagcagtacaatcagaccagtgagcaactggaggctcagcaccaagttaatctggcaaaaattcgggctgggcaagtagtaactcctcagcaacaagctcagggagagattgatccagttcagcggcttgctaaccagcacgcgcaggagctggctttgattcagcagttcgagcagcaaggggttatcgctcatgagaatgctttggcgctgaaaaatgccgctgaccggcagtatgagcagcagcggatcgcagctcaatgggaaatcctgagccagcaaagcctcggctataacatgctgacgagtgcggtggatgcgtttagcgggaatgcctccaatgcgatcaccggtctgctaaccggcacaatgtcagcacaggaggcgatgcggtcgctaggtaacaccatcctgaacagcgtgatcaacagcattgttcaggttggcgtcgaagcgctgaaaaactacatcctcggtcagacgctcggcgctgcatcggtggcgacatcagtcggactggcggcaactaccgcatcggcctgggctccggcggccgcgatggcatcgctcgcctcgttcggtgctaacgctggcccggctgcagctggtattagttcgacagttgggcttgccagcgggcttgcgcttgcgggtgggcgtaagaatggaggtccggttactgctggaaatgtttacccagtaggcgagggagatttacctgagttcatgcagacccgtcagggattattcatgatacctggcgataacggcacagtgtttagcaacaaagacgttactggtggtatgccgcgtatcaagaaggcctcgacgggtagtgaataccaaagccagagcagccgcgacagtggttcaacaggatcgcagtcgtcgaaatctatatcggtaaacgttcagttctatgatcagacttccggcggacagcattcattccaggcgcaggccagccaggagggtggtgttgtgaccgtggaagcttttcttaccgatgttgatcgcaatgggccaatgtcctctgcaattcagagcgcttttggtctcggaagaaaagcgcaaggtgcttactaa

SEQ ID NO: 222400 - DNA, 558 bp, Klebsiella pneumoniae
atggaatatccaacagtaattaatgggttagacttccgcgatctgatttttgtggccgataacgacccggtcacagactcgtttatggtggcgaaggcatttggaaagttgcctaaaaacgtaattcgcgacattgaacgaactatcgaggcctgcccgccggagttcgatacaaaactcaattttgagctttgctataaaaacaatgagttgcagaacggtaagccgcagaagttctatcggctccgcaaagatggattgatgcttctggttatgtcctacaccaaaaaagaggcgatgcgcatcaagatcgcctacatcaacgccttcaactggatgtacgcgatgcttcaggttgggcggcgccagtttgaagaagagcgtaacgccgtcatgctggagttcctgaaagagaaggatgttgccagtatgtctggtcgcctgttacgccggtgggggaaagagaagaagccccagctactttcacgcattgagcaactggacaagcaaggtcagttggcattgcctggttttactggcgttcttaccgagtcatga

SEQ ID NO: 222401 - DNA, 363 bp, Klebsiella pneumoniae
atgtcttcggtagctaattggtcatacaccgcgacggcgacagtctggcggcgcatacgcgatgctgacggtagcgataccgacggcggaggtcagccgtatgggtgggaagcgccgatcgctgtcctctgcgactaccagggcggactctctgcaaaaatcggtgaccttggccgggagctcgttgttaaaaacacgatatggaccgagtacgcaacggcgcgggagggagattacatcctgattggcgcttcgaccgatgcagcaccgccggatgaggccgacgagatacggcagatcgtccagttcgcagatacgttcgagcgactggcggacgatttcgcactgattacgggagtctga

SEQ ID NO: 222402 - DNA, 2607 bp, Klebsiella pneumoniae
atggcagagaaagcaggtgaaatttattatgacattgaggctaacgtatccggcctgatccaggcgcagcagcaggttaataaacgtcttgaccaaatggacgccaagtttgagcaatcatcacgatctgccgggcgattcgaaggtgctttaaataaagttggcgttgccattgcagcagctttcaccattgatgcagcgaagaagcttatcgccatcggcgacgagatggttacgctccaggcgaggatagccagactaagccccagcattgatgtggccaaagaaacacttgcctccctgtctgcaatcgcggctcaaacaggtaatagcctgtcagaaactgagaggttatgggaatcactgacgacagcgttaaaggaaactggcgccactaactcgcaaattctcatgttgacatcgacgctgcaaaaaattggcacgatcggtgggtcctctactgaggaaatggcaaacgcattgcgacagttcggccagtctatttctggtggtatcgttcgtgctgacgagttcaactctattcttgagcagatgcctgaacttgctcgccagattgcagcggggctaggtatacccttcggcgatcttcgcaagagaatgctggaaggtaaactgacggctcaggatgctctgaacgccattcaacgtcagtcgcagtcggtcaatgaagagttcgataaaatgccggtcagcattgatcgcgcaaagaacagcctcgatgtggccttcaaaaatgccattaacgacctgaaccaggcaataggcctgactacgacccttgcaggattgatgcagagcgtcgcggataacctcaattactacaacaacaatgtcggcgattcttcaagaatgccgaagctgatcaagctccagcaggatctgaacaatgagctgaaagacggccagagatggtatgaaactgactcagtttttcaggccagaagggcgcaggcagcagtgcagctgaagcagatcgagggggaaatagcccacattcgagcaaaggctcagaaggacgccggaagcaaccagtttaatgcgcctccgaccaaaggcgatgacgccgcaaccaagaagctggttcaaaactctgaacgccggcttgcgttggccaaacttgaaggcgaggcgcgagccaggcttcaggcccaatatgatgcagctgatgctggtgtgaccgatcctaagcgaataaaagcgctgcaggacgaatacgccgaaacctaccgggttacggaggccaggaaggaaagcgacaaagccgggaagcagtctgcttccaccgctgagtctatagctcaaaaactcgaaaaccttcgccagcagtctgagcttgcagcggactcaactcaggaattgagccgtgagcaggcgatattgcgtgcgcagcagtctctcggtaaatcggctactcaggctcaaatccaggaagcaggcaaatacgcagcagccgcatgggatgcagccgcagcggcgaagggggtaacggaggcgcttaatgccattccggaacaggcggagaataaatcttacgctgaatccatgcagaacctgaaagcagcgctgaacgccggaaagattgatctgcaggaatacaacgcagccactgagcagatggagcagcagcatcaggccaaccttgccaaaatacgctcgcagcaggtggttaaccccacccagcaggcacttgccgaagttgacccggtgcagcaactcgctaaccagcacgcgcaggagctggcgctgattcagcagtttgagcagcaaggggttctcgctcatgagaatgctttggcgctgaaaaatgccgctgaccggcagtatgagcagcagcggatcgcagctcaatgggaaatcctcagccagcaaagtctcggctataacatgctgacgagtgcggtagatgcgtttagcggtaatgcctcaaatgccataaccggcctgctaaccggcacaatgtcggcacaggaagcgatgcggtcgctcggcaataccatcctgaacagcgtgatcaacagcattgtccaggttggcgtcgaagcgctgaaaaactacatcctcggtcagacgctcggcgccgcatcggtggcgacatcagtcggactggcagcaactaccgcatcggcatgggctccggcggccgcgatggcatcgctcgcctcgttcggtgctaacgctggtccggctgcagctggtatcagttcgacagtgggacttgctaacgggcttgcgcttgccggcgctcgctacaacggcggcccggtatcagccggcggcctgtatcaggtcggcgagaaaggcaagccagagatttaccaggccagcaccggcaagcagtacatgatccccggcgataacgggaaggtcatcagcaataaggatatgcagtcaggaggaggggtcagcgtgcaggtgaacgtcatcaaccagtctaccggcgccaccgttcagagtgccgacggctacatgcaggacggtagcgcagtggtggatttgctgatcaccgacatggaaagaggcggcccggtatcctctcagatgcagcagacatttggactaagccgcaaagcgcaaggtgcttactaa

SEQ ID NO: 222403 - DNA, 579 bp, Klebsiella pneumoniae
atgaagctagagagggggatcgagctttccgatggaagagtgctctactggatggagcatttctgcatcaattgcgtgccaagccaaaacggcgaatggcatgtagggcattttgatcgagctgaatatgaaaccctgcgagagaatacggtagctctcctaaaaaacgaagagtttcagttcatggtaagggtaggaagtggattttctgtaaaagcctggtgtgtttctctcaatgggacttttgtgttcagtgttcaccgtgatcctgatgggataatggcagctatcattgtacttaatgctcaacaaaaagaagtatttaggctaactactacgacccatctaacctcatgctccctatctgagtttgccgaatatttggcgctatccttttatggctcttcaaaaggaagagagccttatgacaataaattagaggtattcaacttaaaaacaggtgaggtgattacatctatcgacaaggataacgagcttaggcatgcggaagtaatagttacagagccagcgggcaatgtcgtcgccttttataagggaaagagttttaaagtttgctag

SEQ ID NO: 222404 - DNA, 210 bp, Klebsiella pneumoniae
atgacggatggctggccgctgtatgaatcccgcctgaagggaaagctgcacgttatcagcaagcgttacactcagcgcattgagcgacataacctgaatctgcgacaacatctggcaaggctgggacggaagtcactgtcgttctcaaaatcggtggagctgtatgacaaggtcatcgggcattatctgaacataaaacactatcagtaa

SEQ ID NO: 222405 - DNA, 837 bp, Klebsiella pneumoniae; identical to SEQ ID NO: 137381

SEQ ID NO: 222406 - DNA, 729 bp, Klebsiella pneumoniae
atggtcgtatttggtggctggccagcatcgaattctataaatgaactagatcggataatgtttaagttgaatgctataaagtatactgacattattgatttccattatggaaatgaaggcccttataatcatctctacgagaattacttaaaaccgggttatgttaaaggaatatggcaaacggaattaggttttagggctgaaaaggatggcttattaagaatatatttaacaatttttcactggatgctttcacataattggtcttcagaagatcaatataaattgttttggtatccgggctgggggagtcgagaaaaagaattaagaggtttaacgacaacccttgccgcaagaaatacagtgcctactaaaaatggtaatcaattgagcttattgaattctttgtatggtggaggaaatttaaagctagctgatttatctgtattaaattgtggggggtgcactcctggtaacgcttttgcagtgtctattgctgataaaaagatagtgatagcaaatatatctaaagtagtagctaaatttaatgactctatgcaatatacagtaaatgctaattttcatccaaacagggcttttattatttcttcggacggagaaaaaaagactatcgaattcacgtatgatagtaataaagtaatagtaacaccctttgctaatggtttacataaaaagcaaaataaaatattttttattcaaattgaatag

SEQ ID NO: 222407 - DNA, 795 bp, Klebsiella pneumoniae
atgtttaatcttaataagttaataaaaaataacgaaaaaaagaaagttttttggtgggagcctcgtgacggaagtcaaaatgcaggtgatcatttggcaaaagttatcgttgagcaaatgcttgctctcaaagataaaaaaataatagacaaacttaccaataaaaacaagcttttatcaattggctctgttatgcattttgcaaaagataatgattcaatttgggggacaggcattaatgggaagataaatgagtcgcatcttaaatttaaaaatcttgatgtcagagctgttcgaggtcctcgcacaagagagtttttaatggggagaggaattatggttcctgaaatttacggagaccctggtttattattacctatgtttttttcgaaggagtgtcttttgaatttcgaagaacctcaaaaagatttcatcgtaattccacatatgaatgaaaatttcgatgattataaaaaattcgaaaaaaatatatgttctcctaaacaaggggctctcagttttactaaggaaatagtgaatagtaagtttgttatttcaggctcattacatggtattattattgctgaggcatacggcatcccagctatttttttagataacaatagcggagaatcacgattcaaatatgatgactattattttggtagtggtagggatagttaccctatagtatctactgtagaagaagctttcaataaagaagtggcaaagcctattgatctaaataaaataaacaaaaaattaattgcaagctttccatatgatctttggtaa

SEQ ID NO: 222408 - DNA, 1419 bp, Klebsiella pneumoniae
atgattcttcctgttattatggctggtggtacaggtagtcggctttggcctatgtctcgtgagctgtatcctaagcaatttctccgacttagcggctctcaatcaatgctacaggagacaattacacgtcttaaaggcctgtcgaccttatcacctctaataatctgtaatgaacagcatagatttttggctgctgaacagttacgtcaaatcggacaattatcgaataatattattttagaacctatggggagaaatactgctccagctattgctttagcagccctaagtgcaataaataatggagatgaccctcttttattagtactagccgctgatcatgtgattgataatgtcgaagcatttcatttcgcaattagtagtgccgttcattatgcggaaagcggtaaacttgttacttttggtattgttcccaccggaattgaaactgggtatggatacatacaacgtggctcccaaacacaagatgcgcaagcatataaagttcataggtttgtagagaaaccaaattatgaaactgcaaaacagtatctggccactggtgaatattattggaacagtggtatgtttttatttaaagcaaaaagatatttagaagagctttcaaaatttcggcctgatatattggaagcatgccgaggagcaataggggagcttaggtatgatacaacacaagattttatccgtatagacagagatatattctcccagtgtgccgatgaatcaattgattatgcagtaatggaaaaaactgatgatgcagttgttatccctcttgatgcaggatggaatgacgtaggctcatggtctgcactatgggaagttaataaacaagatgaaaataataatgtgctaactggtgatgtatttagtcataatacttctaactgctatattaatactgaagacacgcttgttgcagctgttggtgttgataacttagttattattaacactaaagatgcagtgttagtaattaataaatcagaagtacaggatgtaaaaaaggtcgtcgaatatctgaagaataacaatcgtcgagaataccgaatccatagagaatcgtatagaccttggggaaggcacgataagatcgttgaatcccaaaggtatcatgtaaaccgagtgaccgtaaagcctggtgggaaattttcgttacaaaagcatttacatagagcagaacattggatagttctttctggtacagcagaggtaaccctagaagataaacgttatctattaactgaaaatcaatcaacatttatcccggctggtaaaattcatatgcttgaaaatccaggtaaaatatcgttagaattgcttgaaatatcgtcagggtcatatttaggagaagatgatatcctccgtttaaaagatcattatggcaataacaattaa

SEQ ID NO: 222409 - DNA, 1377 bp, Klebsiella pneumoniae
atgtctaagacattaacttgttttaaagcttatgatattcgaggaaagctcggtacagaattaaatgaagatattgcttatcgaattggccgagcctatggtgagtatttaaaacctaagacgatggtgttaggtggcgatgtccgcttaacaagcgagtcgcttaaattagctctagcacgtggtttacaagattccggtagtgatgttatcgacatcggtctttctggaacagaagaaatatattttgcaacatcctatttagaagtcgatggtggaatagaggttacagctagccataatccattggattacaatggaatgaagttggttcgagaaggttcaaaacctattagtggcgacacaggacttaatgaaataaaaaaattggctgaaaacaataaatttgataataacgaggaatgtaaaaaaggtagttattcaaaactttctattttaaaaccatatactgataagttacttagttacgttgatttaaataattataccaggccattgaagttagttgttaactcagggaatggtgccgcagggcatgtaattgatcaaattgaaacatgctttaaagaaaacaatgttcctattgaatttataaaagtacaccatgagccagatggaaattttcctaatggtattcctaatccattactgccagaatgtaggcaagataccactgatgcagtcattcagcataatgcagatatgggaattgcatttgatggcgactttgataggtgtttcctttttgatgaaaaaggtaatttcattgaaggatactatattgtaggtttattagctgcctcttttcttgaaaaacaaagtggttcacgaattattcatgatcctcgattgtgttggaatacaatcgatataatagaaagtgctggcggtattcctgttatgtcaaaaacaggtcatgcgtttattaaagaaaggatgaggtctgaagatgctatttatggtggtgaaatgagtgcccaccattactttagagatttcttttactgtgatagcggtatgattccatggctacttgttgctgagttattatgtattaaatcagcttctttaagtgaattagtgtcacagcgtatgaatgcatatcctgcttctggtgaaataaatagttctttgaaaaatcctcaagagtcgattgagcgagtattattgacatatgaaaatgatgcattgtcagtagactatactgatggtattagcattgagttcactgattggcggtttaatttacgtagttcaaataccgaacctgttgttcgcttaaatgtagagtcgcgtggtgatataggactcatgaaggctaaaactcaggaaattcttgatattcttagacgttaa

SEQ ID NO: 222410 - DNA, 201 bp, Klebsiella pneumoniae
atgtctgcaacagagtctaaggtaaaaactgcaccgaaaaccagcaaaaaaacacttaagtctgccgaggctgaggcgcttaaagtggctctcgatgccgcacaggtcgagtatgtcccggtgtctgcactggtgaagtctcccctgaacgtcaggacctgtatgggtccaccacatattgcaatttttactctcacgtaa

SEQ ID NO: 222411 - DNA, 633 bp, Klebsiella pneumoniae
atggcctggatagttggttttatttcccagaaaggtggtgtgggcaaaagcactaaggcgagagcgttagcgcgtgaagcatccgcctgtggcatcaaaacaaaattagctgacctcgacctggaacaggcaacgagtgctgagtggcaccgccggcgtctgtcagctggtttaccaccggttgcttcagtcgaagtattttcaacagcaaagcaggccatagaatctgccggcgagtttgatcttctcattcttgatggaccagctcgtgcaagcaaagggacttcggaaattgctaaggtggccgaccttatcgtccagccaacgggggcttcccttgacgatcttgtcccggcaattaaagttttcaacgcgctggtaaaagaaggcgtgccacgttcaaaactggtctttgctttaagccgtgtaggtaccgaagcggaagagctggatgctcgtgcatatatcagtgaggcgggttatgaaactttagctggatgtctttttgagaagccagcttacagaaaagcgatgaactcaggacttgcagtgacagaaacacgctataaaggtttaaacgagagagctgatgaacttatccaggcgctcatcgataagattggagaagagtaa

SEQ ID NO: 222412 - DNA, 753 bp, Klebsiella pneumoniae
atgaccacccgtatttatgtagaccagggcgttgttgcgacgcgctaccttgacacatatccgtatccgaacgacatcacattgcttccctcgctcatccctggaatcatcatccaggccgactgggatgtgaacgaccccgcatcactcacacgtaaccgggttggttcagcaatgacggctgtaggcagcccgacattgggtgattacggcatcacagtgagtgagggtagctacatcgactcaggtattgatatttctgcctataacaccaacgacctgacagaaatatccattctggactggcccggcgctgttcgtgccgttattggccgcgtacaaattaatgctccgcagcgctcccgtggtattcagacttcgaccgcatcatggatcgctaaatggctgacgcaatccggtaccgcgcagcaggcgaccattacgaacagttcggtagccggtaacagtgaaatggtggtcggtcgatttatccgggataatggcagcggttctatgctgaccaaaatcaaggtccctcgcaccgcccaggagacaacgacgacggctgcagcgataccttactcgatgccgtcatcgaacatcctgattggggcgtcggttgatgccgccaccaccggcagttcatttatcagagcctccctggttgccagcagagcgctgaccgacgaagagattgcgacgatttactcgacttataaaaactattaccagttgaaaggcaaaacaatctaa

SEQ ID NO: 222413 - DNA, 195 bp, Klebsiella pneumoniae
atggggaaaatcatcgcagattaccaggcaacaaaagacggtgaggttatctattcaggctcgctttctgtggtatctgacgagaacgactcgtcggttaaatcagcagtgatggctgaactgctctctatcaacagacagtttggcggtggagtgccagataccgtcaccgtgaattcatggtctgctgaataa

SEQ ID NO: 222414 - DNA, 195 bp, Klebsiella pneumoniae
atgggaaaaatcatcgcagattaccaggcaacaaaagacggtgaggttatctattcaggctcgctttctgtggtatctgacgagaacgactcgtcggttaaatcagcagtgatggaagaacttctctctatcaacaaacagtttggcggaggagtgccagataccgttgctgtcaattcgtggagccctgaataa

SEQ ID NO: 222415 - DNA, 753 bp, Klebsiella pneumoniae
atgactacccgtatttatgtagaccagggcgttgttgcgacgcgctaccttgacacatatccgtatccgaacgacatcacattgcttccctcgcaaatccctggccttatcattcaggccgactgggatgtgaacgaccccgcctcactcacacgtaaccgggttggttcggcaatgacggctgtaggtagcccgacattgggtgattacggaattacagtgagtgaggggaactacatcgactcaggtattgatatttctgcctataacgccaacgacctgacagaaatatccattctgaactggccaggagcggtgcgcgctgttattggccgggtgcaaatcaattccccgcaacgctcccgcggcattcagacctctactgcatcatggatagctaaatggctgacgcaatcaggaacggcgcagcaggcgaccattaccaacagttcggtagccggtaacagtgaaatggtggtcggtcgatttatccgggataatggtagcggttctatgctgaccaaaatcaagatccctcgcaccgcccaggagacaacgactacggctgccgcgataccttactcgatgccgtcatcgaatatcctgattggggcgtcggttgatgccgccaccaccggcagttcatttatcagagcctccctggttgccagcagagcgctgaccgacgaagagattgcgacgatttactcgacttataaaaactattaccagttaaaaggtaaaaccatctaa

SEQ ID NO: 222416 - DNA, 1617 bp, Klebsiella pneumoniae
atgattggctcaggggttgagcttgtgcaaattgcaggtggaggtttcgtctgtcagctaagggatactcaggaggagattttcaaggtatcggcttcagggagcatcattcggggtactgtaactagctggattactgatgacgaaagcatcagcgattatgttgaaatccatatggatggccaggggcgcatctatcgccgcgtgctggctgatggaacagttgagcaggttggcgatgatggccccactgatgacacttcatcgtatccgatggtggcgtcggtagatggcaacattatcgctgtgcaggacgacaccgttacacaaataacaagcgacacaggagtgtcgaatattagcccagttgcatacgccgattttctccgctatctgtcaaatatcagcggtaattacctgacgtatcgctcaacctatgacggcaaattccgggctcgcgaaagcaagaaaaaattgattcacggcattattactgggcaatcactcgcggctgggggggcaacaataagccagtctccggtaactattactgctgaagctgatttcggggttatcagcttttccaccggacctaaggtggattttaagtacgataccctggatgaatccctgcttgattctgtcattcctgcgcgggaaaacgtgggtacccgcccggggcaggagtctccgtccagtggtatagcctataaaatccacgaactaaccgggcataccgtcctggtgtccgatgcctgttcgtctggtactgcaatagcggacatctcctcaggaacggcgacatttaccggagcaaccaaaatgattcaggcggctgttgcgatggccgaacagttgggcatggattatgtcccggtgctggttctcatccacggcaaccagaacgccgccaacggaacgactgttgcctcctatcgtgccgcgatggagagcctgcgcgcgcagtatgagacggttataaacaccgctaccgctaaaacagaatctctgaatatgtttgtcggtcagctctcgaacgtcgtgccctacggcggtaccgcggggacaacgaaaaccaacaccatcggcattgctcaatatcaggaggctcgagacaacgagtttattcacctggccagcgcgcagtatgcccgcccatattccgacggtgagcacctcaccagtgcaggttaccggactgagggggaggtaattggctcagttatcggtaactggcttaacgacaacacatacacggctcttatgccggatgaaactgcagttgtgcaatcgggaatcactattaccattccacttaagggagggaaaggaaaccctgtctccgatacaacgcgcgtttccaaccctggtaactacggctttctgattgaaggggcgaccatcgcatcggtggccgtgagtggcagaaatatagtgattactaaaacggattcaaccccggccacgcgcatctcttatgccgaaacaggaatagccgggcagagccctggcgctctaactggttcacgtgggtgcattcgtgattctcagagtggcacatcgctggctggacttcctctttacaacgacctcgccgttttcgcattccagctctaa

SEQ ID NO: 222417 - DNA, 858 bp, Klebsiella pneumoniae
atggataatagtataagtgtatatataccaacacataatcggccagaaatgcttgatagagcattagcatctttacttgagcaaacatataagaattttcaagtattagtatgcaatgatggctctgtaaagaattattctgatgtcattgataagtataaattcttgtttaaggatttcgtatatatcgaaaacgattatcctaaaggtgcctgtaatgctaggaatagattaatcaacatagctgatggcgagtttataacagggcttgatgatgatgatgaatttttgccctctagattggaggatttcattatggcaccacaacttaatcgttatgcctttttatcggccggtcattatactaggacctctaaaggtacatttaggcagaatgtttcggaaggtgaaatctttctgcacgatttgttatcaaaaaatattgttggtaaccaagtttttgtcaaaactgaactatttaagaaaagtggtgggtttgatgaaacatttcctgcttggcaagactacgatgcttgggtgcaattaaccaagcttgcaggtaatggttataagatagaaaaatataattatagatggaatgtagatcatgaagagggaagaattagtaattcaccgaaagcaaaacaagggtataacatgtttttagaaaaacataaagaactcttaactgaaaaaaatatacgtgatttatatattcaagatgtcataaatagaaatgatgtgattagtttgcaatggctgttaaagaacattgatcaagatgtaattaaaaccgccctgaagtataaagtaaaaaaaatggtacctggtttaaaggaatggatctataaaacatga

SEQ ID NO: 222418 - DNA, 960 bp, Klebsiella pneumoniae
gtgggctcggagatgtgtataagagacagcattaattttgatttagtaaaaacctttaatatgctattccccttttttattgctgtttcttgcattggttatattattatgccaaaagaaataacagaagatggtagtggtggggctgtccatttcttcttcgtatcgcataatgcagcaggggggttttattcaatacttgcagccatttcaataggaatgtttttagagacgaagaaaaaaacctatcttctgtattctatcttatttctcttctttttatacagcactaattcgcgcggaagtatacttgctattgcaggagctatcgcttactcattcattaaatttaaaaaaccagcattagttttctttgcatttgtaatcgtacaatttgtcattgtgtatgaaacttatcctgtatgggaagctatgggtaaggtaatgtctgagcaagcaaactttacggttagtaatgtatctacaggaatagattttcaacgagctggaacttttatcgatagattatactatctatggcctagggcaatagataactttttgcactcaccattattcggaatgggatttggtagtttcgatgatctctattataagtatataaatattataaatcactttgttgcagtaaaagacggtgcaacagttcgccatacagatgcccatgcccataattcaacatttacaatattggctgagcttggaagtattggatatgtgctatttatattgctgtttaatgagattaataaaaaaattcgtgggttatacaatattgataccatgcaatacacttgccttagccttgccttctggacatgtattttttcgtctgcgacggagcacagaattacaacccctgctcaaatggttccattttttataatttttgggctgacttatcttaagtattatggaaagaataagcgcaatacttaa

SEQ ID NO: 222419 - DNA, 1488 bp, Klebsiella pneumoniae; identical to SEQ ID NO: 214992

SEQ ID NO: 222420 - DNA, 204 bp, Klebsiella pneumoniae
atgaagaataccatttcatttgtgctaatgctgttctttgtgagtagtgtccaagctgcagtgacgttttcagacatgaatggcagcaatggagacgttgataaactgcttgctgatgaaatgggactctctattgtccgaatagatcttagctggaataaagttgaaagtaccaaaggagtatacggttgggatgcctggtga

SEQ ID NO: 222421 - DNA, 165 bp, Klebsiella pneumoniae
atggcaaaactcacaaaatatttttttccttatgagtataacgaagaaaactataatgtcattatagaaaaagcctttttattcaaaggcaaaaatgaaattattgataaacatattttttcagaagaaaactatatgcaaaaaatttatcaattgtatacttag

SEQ ID NO: 222422 - DNA, 327 bp, Klebsiella pneumoniae; identical to SEQ ID NO: 220205

SEQ ID NO: 222423 - DNA, 351 bp, Klebsiella pneumoniae
gtgaaaaaagagatctcccgcaacccctctttcacaccttcgcctaagctgcgagcacatctgaactcccaccgggaaggggtgactgaacggctgaataatatctttgatcgctatgcgcatctggttcgcgcctgtgcccttcctctcgatgacgacgaaacacaggttctgcttaatgtgctgaatggctccgttgtggaacccgcctttattgaatatctggctcaggaaattcgggactcggatgattatctggaagggatacccgcagctaaatcactgtacgaaaagtgtcagtcagcgacctatccgcaattgctggccaccgtcgaacgtctggaacgataa

SEQ ID NO: 222424 - DNA, 273 bp, Klebsiella pneumoniae
atgaacttcacgataacatcccgtaaaaccggcgaaattttcagtttttacgcacccgacagtggcggttatgttcacctggagtccccgggacattctggtaacaccggcgcccagatttgctgtggtggagggttcatggggagtacgctttcctgtggcgcttctgaggacgatctggccagtgttgcccgtaaatggtaccgacagttcgtgagggagcggcgcaaattcttaatgatgtcgggccagtattctgaggataaccagtga

SEQ ID NO: 222425 - DNA, 162 bp, Klebsiella pneumoniae; identical to SEQ ID NO: 139499

SEQ ID NO: 222426 - DNA, 627 bp, Klebsiella pneumoniae
atggattacgtcgccgcagaggcgcagcgcggaacgttggaggcattcaataacctctcgcagcagtctcaggtctacgccagccagacgacgctacagcagcttttaagcagccctggtcaccttaatcaggtggcagccgccagactgacaacgtttagtgactggaaggtcatcagcgacaccgcccgcggcgatctgaccaatatcatcaccgatgcggtagcgcgcggggtgaatcctcgcgagacggcaagcgtcatcagcaagcgcctcgatgtgtcgatgtcgaaggccaagaccatcgctcagactgagcaggtcggcgcgttgcgacaggcgcaatggaacgaaacggactgggcggcggatcggcttggcctgaataccggcctgctgtggctgtcggcgctcaaaccgacgacgcgcagctggcacgccagccgtcacggaaaggtctataccaccgagcaggtgcgagacttctacgccgcgaacggcaaccggtacaactgctattgcagccagattccggtgctgctcaatgacgacggtagcattttcaatcaggggttggctgagaagctggagaaagaacgtaaaagttggttagagacgacaccatag

SEQ ID NO: 222427 - DNA, 300 bp, Klebsiella pneumoniae
atgtattaccggcatgtgctgggtctggagctacatcacatcgccggctacgaatctggcgcggatttcattacctgctacgaacaggagcgcgcccactggcggcgagtgccggtggcgtccaccggatgcatcgccgttttttaccgcggcgaagtgccagcgcatatcggtgtgatgaccagcccggttaagtgcctgcatgcccgcggcgaattcggtttcgtgcgctgcgacagcccgctggcgcttcttaaggtctacagccgcgtggagtacatgatccatggttcgatatga

SEQ ID NO: 222428 - DNA, 195 bp, Klebsiella pneumoniae
atgggaaaaatcatcgcagattaccaggcaacaaaagacggtgaggttatctattcaggctcgctttctgtggtatctgacgagaacgactcgtcggttaaatcagcagtgatggctgaactgctctctatcaacagacagtttggcggtggagtgccagataccgtcaccgtgaattcatggtctgctgaataa

SEQ ID NO: 222429 - DNA, 579 bp, Klebsiella pneumoniae
atgacggctgtaggcagcccgacattgggtgattacggcatcacagtgagtgagggtagctacatcgactcaggtattgatatttctgcctataacaccaacgacctgacagaaatatccattctggactggcccggcgctgttcgtgccgttattggccgcgtacaaattaatgctccgcagcgctcccgtggtattcagacttcgaccgcatcatggatcgctaaatggctgacgcaatccggtaccgcgcagcaggcgaccattacgaacagttcggtagccggtaacagtgaaatggtggtcggtcgatttatccgggataatggcagcggttctatgctgaccaaaatcaagatccctcgcaccgcccaggagacaacgactacggctgccgcgataccttactcgatgccgtcatcgaatatcctgattggggcgtcggttgatgccgccaccaccggcagttcatttatcagagcctccctggttgccagcagagcgctgaccgacgaagagattgcgacgatttactcgacttataaaaactattaccagttaaaaggtaaaaccatctaa

SEQ ID NO: 222430 - DNA, 633 bp, Klebsiella pneumoniae
atggattacgtcgccgcagaggcgcagcgcggaacgctggaggccttcaacaacctctcgcagcagtcgcaggtctacgccagccagacgacgctacagcagcttttaagcagccctgcataccagaaccagatcgccagtgcctacatcagcacgtatagcgactggaagctggaagctgaccgggcgcgcggtgacctggcgaacatcatcgcggatgccgttgggcgcggtgtgaatccccgcgaaacggcgcaggtgataagcaagcgccttgatgtctctatgggccgcgcaaagactatcgctcagactgagcaggtcggcgcgctgcgccaggctcaatggaacgaaacggactggtctgccgacaggcttgggctgaataccggcctgctgtggctatctgcgctcaaaccgacgacgcgcagctggcacgccagccgtcacggcaaggtttataccaccgagcaggtgcgagacttctacgctgagaacggcaaccggtacaactgctattgcagccagattccagtgctgctcaacgacgacggcagcattttcaatcaggggttagctgagaagctggagaaagagcgcaaacagtggtccccgaataaaaaggcagcatag

SEQ ID NO: 222431 - DNA, 477 bp, Klebsiella pneumoniae
gtggcaacagttcaataccctccgttcctgccgcttccccagcgcgccgatcagaacatgacgcaggatacagcctggcagacgacgcagacggcagtgggacctgcgatatttaccccgatcactacggaccttaaagcgaaatggacgctgcagtggatattcacgctcgcgcaggccgagaggtttaagtcgtggcttcgctcgccgacgtactgcgaccgcgggcgcaactggttccagatgccgatcgacctgggtgatacgcagggcgttcagcagcagacgctgcatttcgtcgatatgccggtgcagaccagcaaaaacggcagcgtcgtcacctggaccgcaacggttatcagcaacgggctcgaggacattaccgaggactacgacgactggattgttgaggcgcagcctggctatggatactggctggattacctgatcaccgaagtgatgccgagggctgactga

SEQ ID NO: 222432 - DNA, 534 bp, Klebsiella pneumoniae
gtgagtgaggggaactacatcgactcaggtattgatatttctgcctataacaccaacgatctgacagaaatatccattctgaactggccaggagcggtgcgcgctgttattggccgggtgcaaatcaattccccgcaacgctcccgcggcattcagacctctactgcatcatggatagctaaatggctgacgcaatcaggaacggcgcagcaggcgaccattacgaacagttcggtagccggtaacagtgaaatggtggtcggtcgatttatccgggataatggcagcggttctatgctgaccaaaatcaagatccctcgcaccgcccaggagacaacgactacggctgccgcgataccttactcgatgccgtcatcgaatatcctgattggggcgtcggttgatgcggccaccaccggcagttcatttatcagagcctctctggttgccagccgcgctttaaccgatgcagagattgcaacgatttactcttactacaaaaactactaccaacttaaaggcaagaccatctaa

SEQ ID NO: 222433 - DNA, 195 bp, Klebsiella pneumoniae
atggcaactcttatcgccgattacgaagcttcaaaaaacgggcaggttatttactcaggctcattgctggttgaagcagaagagaatgatgaatccgtaaaagatgcggtggcgcagcaactaagtagtatcgatctcaagtatggcggaggtgtaccagacacggtaaccgtcaactcctggcacactgaatag

SEQ ID NO: 222434 - DNA, 195 bp, Klebsiella pneumoniae; identical to SEQ ID NO: 222433

SEQ ID NO: 222435 - DNA, 240 bp, Klebsiella pneumoniae
atgctgaccaaaatcaagatccctcgcaccgcccaggagacaacgactacggctgccgcgataccttactcgatgccgtcatcgaatatcctgattggggcgtcggttgatgccgccaccaccggcagttcatttatcagagcctccctggttgccagcagagcgctgaccgacgaagagattgcgacgatttactcttactacaaaaactactaccaacttaaaggcaagaccatctaa

SEQ ID NO: 222436 - DNA, 276 bp, Klebsiella pneumoniae; identical to SEQ ID NO: 5786

SEQ ID NO: 222437 - DNA, 324 bp, Klebsiella pneumoniae
atggactgctggggcctggtggttctgtattaccggcatgtgctcggactggaactgcaccatatagccgggtacgaatctggcgcagagttcatcacctgctacgaacaggagcgcacccactggcggcatgtgccggtggcggccaccggatgcatcgccgttttttaccgcggcgaagtgccggcgcatatcggtgtgatgatcagcccggttaagtgcctgcatgcccgcggggaatttggtttcgtgcgctgcgacagtccgctggcattactgaaggtttacagcaaagtggagtacatggtgcatggtgcgatatga

SEQ ID NO: 222438 - DNA, 516 bp, Klebsiella pneumoniae
atggcaacaccagattgggaggccattgaatcggcttaccgggctggttcattgtcagtaagggccatcggggaaaagcatggcgttaaccacgccaccatcctgaagagggctaacaaagaaggatggcagcgcgacctgacagaaaaggtcagggcggcaacgaaagccaaggtaaccaagtcggtaaccaaagacggtaaccagtcaccagtggttactgatgagcagattattgaccgggcatccgatgaggcggccgctgtagtcatggctcatcgggaaagtttggcggcatggcgcggcatcaccaataagctccgcgacttcctcgaagacgcagaaattacggaagacaatcacgcctcaatgtctcgctcgatcactgccggtgtcgatgctcagataaaagtgataaacgctgagcgtaaggcgtataacctcgacaccgaggagggcaataagacggttgatgacctgtctaacctgatggattcactgtctcagggggtgtaa

SEQ ID NO: 222439 - DNA, 267 bp, Klebsiella pneumoniae; identical to SEQ ID NO: 215497

SEQ ID NO: 222440 - DNA, 1671 bp, Klebsiella pneumoniae
atgcggactaacactaacggactggccattattttgtgtttaaatttgctcacctgctttaccgcgcgggcgggtattgactccgccacggtaaaccaggtagaacaggataaagcccgtgaaagcgcattaatgccccatcagcagcaataccaatcttctcgcacctatgcgaaaacgcaaaccttgatatttcccgaggaagcgacctgtcggtacatcacgaaagttgatattgcctccgaggacaacgcaaaaaccaccgccctcctcgggaagatcgctgcccaggcgcccggccattgcctcggaatagaagggattcgcctgctgacgaacgccctacaaaatgaactgataacacaagggtatattacttccctgatcgatatcccttctcagtcactagaagggggcattctcaaaataacgctgacttatggcaaaacggggcatattgattttgcgccaaatagtgccgtgacgaacctgtggacctccatgcccacccataccggtaaaatcctgcgcctcagcgatcttgaacaagggatggctaacctgcagcgcctgcctggcgccagcgcccatatgaagctgcggcccggggaacacattggcgaaagtgatattgaaatcgcccgggtaatggataaacagtggcaggttggcgcctggcttgatgacgcaggcagccgcgccagcggtcgctatcagggtggcggcgcgctatacctttacgatttatcttcattgaacgatattctttccatctcggcaggcggcgacgttgaattcaaccagcacaacgacggcaaccataacggcaacctttactactccgtgccttttggttactggtcattgagcctgtacggctcctacagccagtaccgccagctgtttaaaggaagatggtcaagcatcgactataaaagtaaaaaccgttattacagcgcgacccttagccgcctgctttcgcatacccgacaacaaaaaacgaccgccgatctgcgcatagcgaagagcagttcgcactatttctttggcggcgatgagttgtatgtgatgcgtaaacaaaatcctgtctgggaatttaccgtgcgccatcagcactatttcaacaggaaaattatcgacgcaagcctgggcgttcagcgcagcctgccgtggctgagctccgtccccacccccgaggaaaaaggcggtttatatagccatcaatcgcgcattgttcacgccgatatacaggccttgatgcagtttgccgcaaccggcgataagtttagctggatgccgcgtttccatgcccagttcagcccggatagattatcttcggacaaccagtttaatatcggcaatcgctggacggttcgcggctttgacggtgaaaatacgctttcggccaatcaaggctggtactggcgcaatgattttagctggaatattcccacccccgaccagcaggtatatcttggccttgacttcggcaggatcattggtaccgagcgcgccaggcagggaaaaagcctttcaggcgcagtcggcggcgtccgcggagaaatagcgtctacgcaatatgatttttttatcggcacgcccatcagtaaacctgatgactttcatagcgatgccatgaacctgggcttttcattacagtggaggtattag

SEQ ID NO: 222441 - DNA, 1779 bp, Klebsiella pneumoniae
atgtttaaattcaaggtttcatatgttgctctggctgcagcgctaagttcatccgttgtttatgccgatccgtcaagctatacgcatagatcaggggcaaatgttattgatatcgaagctcctaatgccgctggcgtctcgcataacttatatcgcgaattcaacgtcggccctaacggcactattttaaacaacagcgccagcgacgtgaaccacagcactcacggtaatatcgctaagaataataatctgaccaacggcagcgcttccgttattttaaatgaagtcacctccaataaaatgagtaatctgcagggctttatcgaagttaacggacaaaaagccgatgtcgttatcgccaaccctaacggcatcacctgctccgggtgcagttttattaatactaacaaagcagtgctgacgacaggccaggtcaatctgagcgataccggcgcgattgatagctatacggtcacgcagggtaaaatcaccattgacgataaaggtatgaacgcgtctaacagctatgcagccttgctggccgacgccatcgcgattaacggcacaatgacggcagccaacgctatggtgggcgcgggcaacttaacgtttgataacaaaaccggaaagatgaccagccttggaaaagcagccacagccaaacaaatattatatccggaatacagcattgatattagccaactaggcggaatcaaggccaacagtatcaccatgactggtaataatctgggtttcggcgtccggaataaaggcacgatggctgcaaacacccttctcaccatgaccagcaacggttcactgattaatgaaggcgctatcactgggaaaggcatcgcgacgcaaatcgtctcagcaggtgagatgaaaaataagggcagcattaacagcagcgccctcgccactcaggtcaccactctgaacacattgaccaatgaaggcacgattaccagtgacaaaacgcttaacgtgagcgccgccggcaacctcgtcaataccggcagaattaatggcaccaaggcattaaccttaaccaccctcggcgatatcaataccacctatggttcaacgattaacgccgatggccagttaaatatttctgcccacaatatcaacaacggcggtacaatgtggggcgaaatcaccaacgtcaagtttagcggggataatctcaccgtcaccggtaacctttggggctacactaatctggctatcgtgtcggcaaaggatagcaacgtcagttcaggcaacatccataatacagggcgaatttctggtatcgatatatcgcttatcactaatggcgatatcatccaggacggtaaccttgttagcggaaactctatgacggttaaaagcgtccagttcaaaaataacaactacgtttacggaaaatccgtacagattgagagtaataacgttcacaataaggcaactattgatagtgtcgatgcgaatatcatcgcttattatggtatgaaaaatgaaggccaaatcatcgcagccaaagatctcaccttggatacgaaaaattttgccgatatcaccaactacggcactcttctggcaggagagaatctgacgattatcgctaataaagtctataatggcggctatcgctgtggtttcctgaagctttcaacttgtaatgttggttctatctccactaacaaactggtgctgaactccgcgcacaactatgtttccgagatgggcggtcatcagcagtttaaacaagctgaaatcacgaccaatcggtaa

SEQ ID NO: 222442 - DNA, 630 bp, Klebsiella pneumoniae
atgcgcatccatcacgccaccctgccgctggccggctatacgctgcagcagatcgatttcgacccggcgactttccagcctgaagatctgttgtggctgccctaccacgccagcctgagcggctggggccgcaagcggcaggcggagcacctggccgggcgcatcgccgcggtgtacgccctgcgcgaggtcggggaaaaacagcctcccgccatcggcgatcggcgccagccgctatggcccgcgccctggttcggcagcatcagccactgcggccagcgcgcgctggcggtagtgactgaccggccggtgggggtcgatatcgagcgccggtttacgccaccgctggcggcggagctggagagcagcattatcaacgaggtggaaaaaaaggtgctgttacacagcggcctgcccttcccgctggcgctgacgctggcgttttcggcgaaagagagtgggtttaaggcgacgccgacggcaagccagcgcgcgctggggttcgacgactttcagatcgtggaggtaacggcaagcaccgtagcgctgcggtttgcggggcaacgctatccgctgcactggaccgcgtcggaggagcaggtcatcacgctttgcgcattgcagcagtaa

SEQ ID NO: 222443 - DNA, 2034 bp, Klebsiella pneumoniae
atgacagatctttcgcaaaacagagaaaaggacaaaatcaatccggtggttttttacacctctgccggactgattttgttgttttccctgatgacgatcttttttcgcgatttttctgccgagtggattgggcgcaccctgggctgggtgtcgaaaaccttcggctggtactatctgctggcggcgacgctgtatatcgtcttcgtcgtctgcattgcctgctcgcgcttcggatcggtgaagctcgggccggagcagtccaagcccgagttcagcttgctgagctgggcggcgatgctgttcgccgccgggatcggcatcgacctgatgttcttctccgtggccgagccggtgacgcaatatatgcagccgccggaaggggcggggcagaccatcgaggcggcgcgccaggcgatggtgtggaccctgtttcactatggcttaaccggctggtcgatgtatgccctgatgggcatggcgctgggatactttagctatcgttataatttgccgctgaccatccgctcggcgctgtacccgattttcggcaaacggatcaatgggcccatcggccacagcgtcgatatcgcggcggtgatcggcaccatcttcggcatcgccactaccctcggcatcggtgtggtgcagctcaactacggtctgagcgtgctgttcgatattccggactcgctggcggcgaaagcggccctgattgcgctgtcggtgatcatcgccaccatctcggtcacctccggggtggacaagggcatccgcgtgctctctgaactgaacgtcgccctcgcgctggggctgatcctgttcgtgctgttcatgggcgatacctccttcctgctcaatgcgttagtgctcaacgtcggcgactacgtcaaccgctttatgggcatgacgttgaacagcttcgccttcgaccgcccggtagagtggatgaacaactggacgctctttttctgggcgtggtgggtggcctggtcgccgttcgttggcctgttcctggcgcgcatttcgcgcgggcgcaccatccgccagtttgtgatgggcaccctgatcattccgttcacctttaccctgctgtggctgtcggtgttcggcaacagcgcgctgtatgagatcatccacggcgacgcggcctttgccgaggaggcgatgctccacccggagcgcggcttctacagcctgctggcgcagtatccggcgtttacctttagcgcctcggtggcgaccattaccggtctgctgttctacgtcacctccgccgactccggcgcgctggtgctggggaacttcacctcgaagctgaaggacattaacagcgacgccccgaactggctgcgcatcttctggtcggtagctatcggcctgctaaccctcgggatgctgatgaccaacggcatctcggcgctgcagaacaccacggtgatcatggggctgccgttcagctttgtgattttcttcgtgatggccggactgtataaatccctgaaagtggaagattaccgccgggtcagcgccagccgcgacaccgccccgcgcccgatgggcttgcaggaccggctgagctggaagaagcgcctgtcgcggctgatgaattacccgggcacacgctataccaaacagatgatggagacggtgtgctacccggcgatggaggaagtggcccaggagctgcggctgcgcggcgccgcggtggaactgaagagtctgccgccggaagagggcgagaaccttggccacctcgacctgctggtgcacatgggcgacgagcagaactttatctacaagatctggccgcagcagtactcggtgccgggctttacctatcgggcgcgcagcgggaaatccacctattaccggctggagaccttcctgctggagggcagccagggtaacgacctgatggactacagcaaagagcaggtgatcaccgatattctcgaccagtacgagcggcacctgaactttatccatttgcacagggaagcgccggggaacagcgtgatgttcccggatggctag

SEQ ID NO: 222444 - DNA, 357 bp, Klebsiella pneumoniae
atgagaatttttggcttgatagtcattgccgttctgctggtggcctgcggagtcattcaccccttcggcgacaaaaccatctatcagacttattcggtacccgatcggctggggctgcactggcgctatgactgcatacgcagcgccctgaagccgcaaggctatgaggttgagcgcatcatccccgagcagaatgcgccaaacttctttgatatttcgcagcacggcacacgagtcgcccagatcgatatgtatcaggtggctggggcgagggcgataagtatcaccctgatatccggtgcaaaacaggtgaatgctgctatcgatagcattattcagccgtgccttgatcgctaa

SEQ ID NO: 222445 - DNA, 669 bp, Klebsiella pneumoniae
atgacatcagagtacacacagcaggttgcacagatcgccgggccgcttgaagcagccatggacgccatggcgggaacgttatcagcgaatcaggaggtggtgttgcataatctcactacccctgaacattccattatcaaaattattaacggtcatgttagcggcaggggtaatggcgatcatttattagccggcccggaaaaagatgccggttttgcgctgcttctgcagaagacgaataacaacaagccgagaaccataagcgattataaaaccgtcaccgcttcagggaaaacgctcaatagcgcatcgacaatttattacagcgaagagggatatccgcttatcgccttctgtattaatgtcgacccctcgccttttgagcaaatacgcaagagccttgacgcgctgctgccatcgccggcggaggccgcagaggcggtcgatcttaatttaggcggattgattgatcagtcaatccaggaaatcattgataaatattcagtgccgggtaaaaaaatacaaaaagcgcagcgtttgaaaattgtcgctgaaatgcatacgaaaggtatttttaaaatgcgcgggggcgtgcagcaggcggctcaggccctgggggtaacacgatatacggtttataatgaccttgaggtgatgaatgaaaaataa

SEQ ID NO: 222446 - DNA, 801 bp, Klebsiella pneumoniae
atgaaaaataattcacagcagcgcattcgcttttatcaggtcgatgctttctcaaaaggcccctttaccggcaatcccgccgcggtttgtttgctggaggcgtggcctgaagatagcgtgctgcagcgcattgcgacggaaaacaacctgtcggaaacggcctttgttgtcaggcagcctgacggtttcggattgcgatggtttaccccagccgtcgaggtcgatctctgcggtcatgccacgctggctgcggccagcgtgctgctcaatcaacaagcgcgcgatcgggtgcgttttttcacccgcagcggcgcgctggacgtcacgttgcatgacggaaaatataccctggattttccgctggttgttccgtcacccatcgccgcgccgcaaggattgttcaaggcgctgggactggctgaagacgcaggtgaaacctggcaagcctccgatattattgtcgtcattgatgacgaagcgctgttggacgcgcttaaacccgactttaacgccttgaatgccttcaacacccgtggcgtggtggtcaccgccgcatcacggaccttcgattttcgttctcgctggttcggtccgcaggtgggagtcaacgaagatccggtcaccggttcggcacatacttttctggcgccgctgtggagtgagaaactggcgaaaaaaacgcttcatgcccagcaaggtggcaaccgtaagggagaactcttctgccacatcaaagataacggacgtgttgaactctcaggcgaagcctgtctggttattgaaggtacctttattttgtaa

SEQ ID NO: 222447 - DNA, 219 bp, Klebsiella pneumoniae
atgaaaaagttcgttgcagtattcggtttggcattattaacgttcaccgttgcggggtgttccagcgattatgtattagagaaaaaaaatggtgagatgattatcacccacggaaaaccggaggtcgatgacgatactgggttaatcacctatgaggatatcgcgggaaatgaacatgccattaaccgggatcaaattattcagatgatcgagaaatag

SEQ ID NO: 222448 - DNA, 123 bp, Klebsiella pneumoniae
atgtctgttgtgacggcgacggcgctgcggggttttccgcatttcgtcgtgatcggaatcacaaataatggctgttttatcatcacttttttgaaacatcagtccatttatgccacaccgtga

SEQ ID NO: 222449 - DNA, 921 bp, Klebsiella pneumoniae
atggcgacagagcacctgcagtggggcattagccccctgtgctggaccaacgatgtgctggaggatttaggcggcgatatccctctcgacacctgtctgcgcgaggcgcgggaggcgggatttcagggcattgagttagggcgcaagtttccccgccaggcggagacgctggggcctctgctggcggcggctgacctgcggctggcgtccggctggtacagcggcttactggctgaccgcagcgtggaagcggagctggaggcggtgcggggccacgcgcagctcctgcagcagctcggcgccagggtcatggtctatggcgagtgcgggcaactgcccggtgaaacgccgcttgatgagccgatctcgctctcaccgccgttaagccgcgtcagtctgacggcgtattgccataagctgaatacctttgccgacctgctgctgcgggactacggtctgcggctggcctatcaccatcacctgatgatgctggtggagcacgacgacgagctggagcggtttctgtcacagacccatgacaacgtcgggctggcgtttgataccggacacgccttcgtcgccggggtcgatatcccgcgcgtgctggaaaaatatggtcaccgtatccgccatctgcatctgaaagacgtccgtccgcaggtgctggggcgcctgtatcgcgaaaacctgagctttaacgaggcagtgcgcgcggggctgtttaccatccctggcgacggctgcatcgactatgcgccgatcctcgactttgcccgcgacagcgactaccgcggctggctgattatcgaagccgagcaggacccggcgatggcgccgccgttggccaccgcccgccgcgccttcgcctggctggcgcaccatttctcgtccccttcatcatcagaggagcacgcatcatga

SEQ ID NO: 222450 - DNA, 339 bp, Klebsiella pneumoniae
atgagcaggaaaaagtggagccagccgctgatctggggaatgatcatcacgatcctcaatccgttagggataagttatatcgccttaatcggcgtcgctctcggcaacacgctgacgtttgtctggtgtgcgatgctggcgtgggctatttatttctatgccatttatttgctctgtacccgccctcacgagagccgactggtacaaatctatttactgatgatgggcatcctgatgctcccctgggggttagtactgcttatcacttgttgcatgaatgagatcaaggccaataagccgcgatcgtcgtcatcgcagagcgagacaaaagacggctaa

SEQ ID NO: 222451 - DNA, 174 bp, Klebsiella pneumoniae
atgggggtgtttgctgttcggcctaaaggagttcccacgcaattgaaacttaacgcccggcaggtagacgccggcaagcctaaaagaagtcttacaagctggctgatggtggtggtctgtatctcctgctcaaacctgatgatggcaaatactggcggctcaagtatcgtgtag

SEQ ID NO: 222452 - DNA, 1089 bp, Klebsiella pneumoniae
atgtctcaaaaaattacagcaatcaaagagccggtggttgagtacaaggacaaaactcttcattatcgtattgcaaaagtcatcggcgagaatgtggatcaaaccttacaagagatgattgcggttgctctgaatcgtctttctgcggttaaagaccgttaccagactgtaagtgttgacagccatgatggcgaagatggtgatgttcaacaggcaaggcaatttttgaataataaaatagagagatggagtatattattcaatgaattagttcgctatagtgatggcgcaaataaaaatattataactattgatgaaagcgcttctttcttatcaatagaccaaatagcgccgccggtttctgtagatggtaaaagacgtgaatttcttgattcaataatgcacatggcatttcttagaaaccatgtggtggtaattcagtcaccagttctaagaactcgagagttggaaaaatacattacgtggttattaaaaaaagcaggggtaattacccaaggttctgtaatgctcaatgctgagttaccaaagcagcaaagagacaaaataatgaataataataccaagaaggttagaatcggtacgcctttggtagatacgcttagtaatatgcctattgagaacgcaagagaaacgataacatcagaagcaataaaaacaaatcatgttaaagtaactccgaaggggttggggctggatatcattaaagttctttttactgatagagagcgcgaaaactatgggcttacagatgatgtcttctcaggtgatgctattgataaaggtaatattaacgtttcggtggaaataagctataattacaaagccaaaaaaacctcccaagcaataattaataatatcagccaagcattaagacatagccatccagatgatgttgaattaacacttgataaggtgggaaaaatcaaaggtgatagtttagttatttctaagaaaattaaacttaagtttattaatggaatagcagatccagaagagatgtatatgaagattagagaatggttagttgaacaaatccggttaggcgaattagatgctgaagctgaataa

SEQ ID NO: 222453 - DNA, 567 bp, Klebsiella pneumoniae
atgctgaagctgaataatgttttcaggtttatactgaccataataatcttttcaggctcattttattatttttctgagcctgaaaggataaataacttaagtggttggttacatttgattataggcgggggagttttgacacctttggttacctacgcttggagtctaaagtcaaaatttgaaaagcttcttgaaagtgaagggttgaattcggttcaaactgacaggttaagtagaagtatttcagtctttataagaaagattggatattggatgctattttacgtttttagtgctggagttatttttctacttcaggtgtttaaggatgatgttgaatatgcaagatacttagcatcactgacgatagcattgttattcatagcagtattatcatttatttccttacgtgattttgatatatcactttctgagttgaaagctgcaataatcataagacgaaagaaaaatgcagagaaagaagctttactcaagctgctgaatgctgatgataaattcagtgacaaagaaaaggaatattttaatcattataacaaggatgaatag

SEQ ID NO: 222454 - DNA, 2088 bp, Klebsiella pneumoniae
atggcaatttcattggtcgaaaatgcaaaaaagaaagagggctttatcgactttgcgccctatttcaacaaaattaagcacaagctgatctggtgcctggtagtggttattgttgccgcggtggcatcatttatcctgacgcgctttatgtcctcaagctatacagcgactgctaccgtgctgtttaaagcgcaatcacaagacatttctccccttccgcggcttgaaaactacgactccacgcgcagcgattactatgaaaccaagtacgcgctcatgggttcacgagtagtacttgatgccgccgtgcgcaaattaaagctgtatcaggacgcggaatttaacggcggtgataagctcgacgaagccacacgcatccataatgccattcaggcgctggaaagaggcctgacaatatcgggggtacgtactacccaactggtatccgtgtcgatggaagcaaaatcgccgcaaaaggctgccgatatcgctaacggcgttgcccaggcctttatcgattacagcctacaacagaagcaaaacaccttgcttcaggcccagggctggaacgaaaaaatgatggacgaccttaagcacaaaatggatcagcaaaaggcggacatcgacaacttccttaagcagaatggattgctgacgttccgcagcatggatggctatgagaccgagcgcatgggaatcgtcattaaccatcttgccgacgccacccagcgtcgcctgaaggctcagacggtgtgggataaagttcgtcgcgagcagggtaaaccagtagagcagattatctcactgccggaaatatccgggcacccacaaatacaggacttacggattgcacttattcagacccggcgtaatctttctgaagcggctaagcattatgggccgcaacatccaaaatatttgcaggctcaagcccagttgcaggcggtcaacgtacagctaggccaggtactgggggagctttttaacggcctgcgccagcagtatcaaatcgctctcgacgatgagcagcattaccagaaaatgcttaacgaccagaaggcgaactttcaggcacttggtgctaagcgcgaccagtataacactatgaccaccgcgctgaataaaactgaagagttgtataaatccctgtatcagcgcgccaacgaacagaaattatcagagagtttttcagtgccggatgaggtcatttatgacgccgcggtgccgccggaccgcccctcaaaaccacagcgtggtttgctgatcgtgatgatcaccatgatggccctcgcgctgtatatcatgtacctgatcgtcagtaccgccctggataaatcagtcaacagcctcagcgagctgaaagcgaaaactgggctcaaagccagtggagaattcccgcgtctgacgcaactggagagtgtgaagcaggtttcccataacgtcctttatgccgacatgatccacagcctgcgtctggcattgcttaatcagcgcgacaaacccgctaccattctggtgacctcggtgcaatctcagtccggcagttcgctaatctcagaacttctcgcctggtctgccagtaaatcgcgtaaaacgctgctgattgatctcgactatcaaactgctcagggcctgtccgcgaagtatccgcagcacaaaaaaggcttcagccagctgctcaataattgttgtacgccagaacaggcaatcgtcaagctcgatgagcaactggattttatgccgcgcggcgatcttcaggaatcatcgctgctgctgctgaccgcccagcgcttgcctgatctactggccaatctgcatcagagttacgatacgctgatcatcgacaccccggcactcagccaggcacaggatagcttgctgctggcggcgcagagcgatatctgtctgctggtagtgaaagccggcgagcaggcggcacgcatccgcgaagcggagcatcgtctgcaaggtacaggcgagctcctggtggcgagcgtactcaaccaggttcaggaagagcagctggaaacgcaggaaggaaagcgtctgctcgatcgccagatgcgcgaactcatttccccgaaatag

SEQ ID NO: 222455 - DNA, 321 bp, Klebsiella pneumoniae
atgaaaaaagctctctttgctctgttctctattgctgccgtggccgccgccagcgcttttgcggctgataaaaccgacgctccgacgcccgctgtcgacaacggcggccgtcctccgctggagatgggtcatggtcccctgccgccgttcccgccaccgtttccgccgcacaagccggtgctgttttcagcaacggtcgcgaccgatacgccggcggaaaccattaacaaactaaccgccctgatcccaactggtcaggcgaagcactacgaagttcacgtggaggtggtgccggttgcggaggatgccgacgggcagtag

SEQ ID NO: 222456 - DNA, 162 bp, Klebsiella pneumoniae
atgtttatactgatgatgaaaaagatcatcaatatatttgacaacactcagcgggctggcctggcgccagcccgctcggtttacagcaccttgctgagaaacgcggcggtgcgtgggttgctcggcgcgctaaagatctgccccggcttgccctcttcctga

SEQ ID NO: 222457 - DNA, 324 bp, Klebsiella pneumoniae
atgatggaattggcatctctggtccgggatattctccggcaacagcacgttgaacaactggcgcagcatcgtgaacaggaccatgaagcggaagcagagtgggagatcgcgcgctggcgacatcgcagcggggtggtgatcgagcaccgctacgaactcgaacttccgcaacaggatgccgcctcctgcccggagtgctggatcgagtggcaggttatcgatagcgccggcctggtggtgcagccaatgcgcaaacaattttataacctctgtcagcaatccttctggctggccatgcaggcggacggcgaagatgagagctga

SEQ ID NO: 222458 - DNA, 843 bp, Klebsiella pneumoniae
atgaaaattctctctcccctgcacgccgaaagtcttgtcagctggctggcggacaccgccagcgcctgcctgattgacgaagcccgtctgagcccgaaaccgggtctggtcgacagccgcggcagtggcgcgcatcaggacctcacgctggcgctgatggaacgctccgcccgcagcctgcagccgaccttccacgcgctggcccagcaaagctggcgccgcccggcggatatcgcgctgcgcgaaaccgtcggccgcctcggtcgcgaaggcgaagcgcagatgatgcaggccaccggcggggtcaatacccaccgcggcgccatctgggcgctggggctgctggtcagcgcggtggcgatgttgggtggagagggtcaatcacagacgatcgccgacaccgccgccgccctcgcccgcctgcccgacagcctggcgccgaaaagcttcagtaaagggctgcgcgccagccgccgctggcaggtgcctggcgcgcgcgaagaggcgcagcgcggtttcccgcatatcaccgccctggcgctgccgcagttacagcaaagccgcgcccggggcgccagcgagccgcaggcgcgacttgacgcgctgatggccatcatgacctcgctgagcgatacctgcgtgctgtcgcgcgccggcatgagcggcctgcagaccatgcagcagggcgcccgcgaggtgctggcggccggcggttgcgccagcgtcgccggacgcgccgccctggcgcgacttgacgcgcagatgctggcgcacaacgcctcgccgggcggcgccgccgatctccttgccgccaccctgtttctcgaccgggttgccggctaa

SEQ ID NO: 222459 - DNA, 330 bp, Klebsiella pneumoniae
atgcagcagtttgagtggatccacgccgcctggttggctatcgccattgttctggagattattgccaacgtctttttgaagttttccgacggtttccgccgcaaggtctatggcatcctgtcgctggcggcggtgctgggtgcgttcagcgccctctcgcaggcggtaaaaggcatcgatctgtcggttgcctatgcgctgtggggcggcttcggtatcgcggcgaccattgccgccggctgggtgctgtttggccagcgcctgaataacaaaggctgggcgggagtcatcctgttggttgccggcatggtgttaattaaactcgcctga

SEQ ID NO: 222460 - DNA, 2103 bp, Klebsiella pneumoniae
atgatttttctcgccgggctcggcctcaccgcgtcggtgatctccctgctttacctgtcgcaacacctcattgccagcaaatccaatgaaattgaccagcagcgttcggtcctgtcggtggaaggggcggtgcagacatcggtcaaccgggtgctgtccctggtgctggacaatgctatctgggacgatgcggtgacccagacttacgcccccagactggatcaaaaatggctgtacgacacctggggatcgggcttcaaaatcaataacctgtacgacggcacctttgtccttgatgaacattatcacattctgtggggcgcctttcagagtcaggtgatgccccggacagacctttcatttctcggcgccgggctgaccagcctgatccgttatcatgcaaaggctctgcgcgagggcaaaaacgccttcgccggcatcacgcgcaccgaggcagggatcgctttcgtcggcatcggcctgatccggccaacgaccggccggctgcaggtggctgacgatacccggcgctatctggtcattacccggcacatcagtcctcagctgctgcagcgtttaggagacaccttccagataagtcatctccatctcagcgacggccccggcgaacaccgtattccgctgcgcacgcagggaggcgaggtgctgggctatctggcgtggcagccgcgtctgcccggcgccgaagcggccctggcctcatcaggcagtatgcggctgatcgccggggtggccgccagcctgatcctgctgtttattctgttcagcagcctcggcatgtataagctggcccgcggcgaacgtcaggcgcgggagatcgccctgattgactggctcagccggctgcccaaccgacgagcgctgctgctgcggttaagccaggtgtgcgacacgagtaagcacgacatgcagtgcgtggtgtttatcgatctggacggatttaaggatgtgaatgataactatggccacgatgtgggcgacgccctgatccgccatatcgccagcgcgctgcaaaaacgggtgccggcggaggccatgctggcaagaatgggcggggatgaattcgccatggcggtgagcggcgaacaagcgatcgaccgggcggcggcgttcgcctgggcggcgctggagctgctgaaagcgccggtggcactgagcaaacgcaaaatttatatcggcgccagcatcggcatcgccagcggaaccccggcggaatgctccagtaccgaactgtttcgccgggcggatatcgccatgtaccacgccaagaagagcggcaaggggcagacggcctggtatgacgatgcgctggatgccgtgcgacgtcatcagctgatgatcgagaatggcatccgtcaggggctggagcaggatgaatttgaggtctggtatcagccggtagtcgatgccgataccctgacgatgaccggtgttgaagcgctgctgcgctggccgcgtcgcccgcagggtgcgctggcgccggatgcatttatcgccattgccgagagcagcggcctgattgacaccctcggccagttcgttctgcaacgtgcctgcagcgatctgcagccggtgagcgatctgctgctgtcggtgaatatctccccggcgcaatttcgcgatccggcttttgaaagccgggtgatggagacggtcgctgcctgccgctttccgccgtcacgcctgcaagtggaggtgacggagagttatgtgctggaaaatccggaacgttcgcaggcggtggtggagaatctgaaagcccagggcatcgccgtggcgctggacgattttggcaccggttattcgagcatcggctatttacgccgctttcgttttgacagcctgaagattgacaaatccctcgccgggcgggtggactgtgatgcgcaggcggcggagatggtgcgcggcacggtgcgcatcgcccgcgcgctggggatgacggtcgtggctgagggggttgaagatccgcaacagctggcgctgctgcggcgggccggttgcgaccggctacagggcttttacttcagtaaaccgatgccgatcgccgacctgctgcagcggcgccagcagcaggggtaa

SEQ ID NO: 222461 - DNA, 372 bp, Klebsiella pneumoniae
gtgtttggtggttttgtggtgttttttcgctgcctgggctttctgggctaccggtttagcggcagctttgtggtgctttttagcggcctgggctttctgcggagcggctggtttagcttctgcttttttgtgttttttagcggcctgggctttctgggcagcggctggtttcgcttctgctttcttgtgttttttggcagcctgagctttctgctctgcagctggttttgctgcggctttatggtgttttttgtgatgggtggtcttggcagcagtgctgtgggtagcagcaggcgcctgagtggtgcttactgcgtcagcagcgaaagcggcggaagagagacccatagcagcggcaacgaccagagctaa

SEQ ID NO: 222462 - DNA, 2082 bp, Klebsiella pneumoniae
atgaagcgcgtgggaaaacgcggagaaggtaaatttgagcgtatcagctggcaggaagcgctggatacccttgctgaccgcctgaagcgcgtcgtcgcggaatatggcaacgaagccgtgtacattaactactcatcaggaattgtcggcgggaacatcactcgctcctcgccttccgcttcgccggtggcgcggctgatgaactgctacggcggctcgcttaaccagtacggtacctacagcaccgcgcagatcgcctgcgccatgccctacacctacggcagtaacgacggcaacagcacctcagatattgaaaacagcaagctggtggtgatgttcggcaacaacccggcggaaacccgcatgagcggcggcggcattacctggtatctggaacaggcccgcgagcgctccaacgcgcggatgatcgttatcgatccgcgctacaccgataccgccgccggtcgcgaagatgagtggatccccattcgccccggcacggacgccgcgctggtcgccggtatcgcctgggtgttgattaacgagaatctggtggatcagccgttccttgataaatactgcgtcggctacgatgagaagacgctgccggccggggcgcctgagaatggccactataaagcctatatcctcggcgagggcgacgacggcgtcgccaaaacgccgcagtgggcctcgcgtatcaccggcatcccagccgatcgcatcattaagctggcgcgcgacatcggcatgagcaaaccggcctacatctaccagggctgggggccgcagcgccaggccaacggcgagctctcggcccgggcgatcgccatgctgccgatcttaaccggcaacgtcggcatcaacggcggcaacagcggcgcccgcgaatcgacctacaccatcaccatcgagcgtctgccggtgctggaaaatccggtgaaaaccgccatctcctgcttcacctggaccgacgccatcgcccgtggtccggaaatgaccgccacccgcgacggcgtgcgcggcaaagagaagctggatgtgccgatcaaattcctgtggaactacgcgggcaacaccctcatcaaccagcactccgacatcaataagacccacgatattctgcaggacgagagcaagtgcgaaaccatcgtggtcatcgacaactttatgacctcgtcggcgaaatacgccgacctgctgctgcccgacctgatgaccgttgagcaagaggatatcattcccaacgattacgccggcaatatgggctatctgattttcatccagcccgccacctcggcgaagtttgaacgcaaaccgatttactggatcttaagcgaagtggcgaaacggctcggcgacgatgtctaccagcgttttaccgaggggcgcacgcaggcgcagtggctgcagcatctgtacgccaaaatggtggcgaaagatccggcgctgccagcctacgaggagctgaagcgaatgggcatctacaaacgcaaggatccgaacggccactttgtcgcctatcgcgacttccgccgcgatcccgaagcgcatccgctcaacaccccgtccggcaaaattgagatctactccagccggctcgccgagattgccgcccgctggcagctggagaaagacgacgtcatcagcccgctgccggtctacgcctccacatttgaaggctgggacgatccgctgcgcagtcagtatccgctgcagctgtttggattccactataaggcgcgcacccattccagctacggcaacgtggatgtgctgcaggccgcctgccgtcaggaagtgtggatcaacccgcttgacgcggaaaaacgcgggattaataacggcgatttggtgcgggtgttcaaccagcgcggcgaagtccggctgccggcgaaagtgacgccgcgcatcatgccgggcgtgtcggcgatgggccagggcgcgtggcacgacgccaatatggccggcgaccgggttgaccatggcgcctgcatgaataccctgaccacccatcgcccgtcgccgctggcgaaagggaatccgcagcataccaacctggtcgatatcgagaaggtttaa

SEQ ID NO: 222463 - DNA, 582 bp, Klebsiella pneumoniae
atgaacgaacagttacgtaatgcactaccgcataaagacaccccttttttccgcatgctgcatattattgtcgccaccctgattctgctgcagattattagctctaatttcactgaaagtgaggcgcttcgcgacctgaatattaccggggtcgtcacatggtttcatattgtctcgggattagcgctgattgcgcttggtgcggtgatgctggtttggatgcttaatacgcgcgggtttcgatactattttgcctggtcgacgtttgattttcgtggtgtggttgaagacagtaaacagctgatgacatttcgtcttcctgaagcccatgccgggggcatagcggcaatgattcaggggcttggcgtactggcactgttagcggtcgcactctgtggtggactctggtttgtactggacaccgcgtcatgggcgtcaccgtcgctggcggaaacagtccttcattggcataagtttctgacggtgttcattgaaacctatttctgggcacatggtgcgatgggagtgctgcatatctttctctcctttcgccgtcaaaggaaacaagcgattattgattaa

SEQ ID NO: 222464 - DNA, 690 bp, Klebsiella pneumoniae
atgcatcttgaacgacacagcatcgaaaccgtcggctggctaagggctgcggttctgggagcaaatgacgggattgtctcaaccgcaagcctggtgctcggcgtcgcctctgcaaacagcggctcttcgggtgtactactggcgggggtcgccgggctggttgctggcgccatgtctatggccgcaggagaatatgtttcggtatcatcccaggcggataccgaagccgcggcgcttgcccaggaaaaaagcgagcttgacgccgattatcagggagaggtgcgggagttgacatcactttatatccaacgtggtgtggagccagcgcttgcccggcaggtagcagagcagcttatggctaaagatgccctggaggctcatgcccgcgaagaactggggttaacggatgtcctttctgcgcgacctttgcaggcggctctcttttcggcagtgagtttttccgtcggggcggggttgcctttgatcgttgccttgttatcgcctgcaaaattgatatccatctctatcttcttttctacacttttttcactggctgcgctgggctatctctcttccgttgtgagtaacgcaccgcctgtcagggcgatcatcagaattacgttctggagctcgctggccatgcttttttcgatggggattgggcgtatcgccgggcagatactattgtag

SEQ ID NO: 222465 - DNA, 537 bp, Klebsiella pneumoniae
ttgcatattgagactcatcgcctgcgtcttcgccctgtcatggctgaagatgttgtcgatctataccgaatttatggcgatccggcgacaaatacctttaaccccgcagggccctatccggatattgactatgccagtacggttctccagcgctggcttgcccactggcacgatcgcggatttggcaactgggccatatcggcgcgtgataccccggaaaaaatcattggctttggcggcgtaagtctacgcagttataacgatgtcaccattaacaatctcggatatcggttttccactgaggcatggggaaaaggactggccaccgagtttgcgattggcgcgataagatatggcttcgaggcgcttaaacttgcggagatgtcagcggttgtctgggctaaccatctggcttcgcagaaagttctcgagaaagccgggatgaggtacattaacgatattgctgatgtaaaagatgcgccgccgagtctgctctattcgttgaccttaagcgagtggttaagccagtcggggtaa

SEQ ID NO: 222466 - DNA, 672 bp, Klebsiella pneumoniae
atgtgcggacgttttgcgcaagcacagacgcgggaagaatatctggcttatcttgccgaagaggctgaatacgatatcccctgggacccggcgccgattgggcggtataacgtggcacccgggacaaaagtgttactcctgagtgaaaggaatgcgcaactccacctcgatcccgtttactggggttatgcgccaggatggtgggataaacccccgctgatcaacgcccgcgttgagaccgcagccaccagcaggatgttcaaaccgctgtggcagcacgggcgggcgatctgcttcgccgacggctggtttgagtggaaaaaggccggagagaaaaagcagccctacttcatccagcgcaaggatggtcagccgatatttatggccgctattggcagcacgcccttcgaacgcggggatagcgccgaaggatttttgctggtgaccgctgccgccgatcgcggtcttgtcgatattcatgaccgccggccgctggtcctggcgccggaagccgcccgggaatggatgaggcaagaagtcaccggcgcggaagcggtggagattgccagggacggagccgtcaccgccgacgatttcatctggcatgcggtatcgcgggcggtcggcaatgtcaacaatcaagggccagagttaattgagccagtagaatga

SEQ ID NO: 222467 - DNA, 612 bp, Klebsiella pneumoniae
atgacgaattttttgatcaatataaaaaatcactattttcgggttgctattgcggaactggtggatgaagcgatgaagacctacgggggatcagagtatcagttttctcaacaatggaacgcggatgggatggcgcaagctaatgtgatcttcacggaaatggtggcgggagaatggtacctgtgtcatgacctgtttcagcatgccccagagcaatacacgctttttatttttcaggataatgaacaagctaccgccgaagagggtttacccaactgtctgcggcaggcggtgtttatgcctccccacgctcccgttcagcttcttaaagatgagatagccagcgcgattcagcgctccctgccacctcatcatgacccatccttcaatcgcctgcggcgttgcatcaattgcgcctgcaagacggtcagcgatgcgcaaaccaaagtcatttacgcattcagtattggattaagtccgcatgaagtcgccgcggcgcttaaaattagccataaaacaattcattcgcataaaaagaatattatgtgcaagttcaatttaaacagccgccagcaatttaacaacctcgtaaaactactcgcaagacgttaa

SEQ ID NO: 222468 - DNA, 915 bp, Klebsiella pneumoniae
gtgcttatgaagcagaaactctatttaaaaatgttggcgtggctggaggataatatctactgtaacccggcgatcgatgacctggcacagtatatgggctattcgcgtcggtttgtgtacgaggtgttttatcaatacggccggttacccatcgggcagtatattcgcctgcggcgcttgaccatcgcagcggtcagtctgcgcttaacgcggcaaccgatcgccgctatagcctggcagttaagttacgattcgccgcagaccttttcccgcgagtttaagaaacggttctcgctttcgccacgggaataccgatgcgcagcgcactgggatacggcaaaactgttaaaaaaattctcccctgatgatgaacgtctgccattggcgcggatctgttccctgccggagcgggtctattatggctacccgatgaagtatgaactgcgcctgtcggatatggtgctgcaacgcaccgccaagacggctatcagacaaaaggttgaccgtttttttaccgccggagaaggctcgctttccatactctctgattacgccgcggcgcgtcaaaatgagcttaacgtcgagattaacgcctttgttggttgtcatgagacgcgaaagccatcgtccacgttgaccgcccggtcgggactctatgtcggagttgatttctacggcagctggtcacgctatgcccgtttgtccagcgatctctatctggatctgctgccaacgctgggggtaagccgtcgcgacgggtatgacatagaatgtttcatggcacgccatacggaaggcggagatacagaagagaggtgctatcacgtacgctattttataccggtgacgctgaaagcggcggctcagcagccgggcagcgataatgagtcagtccccgcgagggggacccaataa

SEQ ID NO: 222469 - DNA, 762 bp, Klebsiella pneumoniae
gtgattccaattgaacgtcatcagcgtattttagccctggtggagcagcgtggggcggtaagcattaatgagctgacggagatcctcggcgtgtcccatatgactatccgtcgggacgtcagtaagctggaagaacaggggctgctggtcagcgtctcgggcggcgtgcgcgccgtcagccggctggccgcagagcccagtcatctggtgaaaagcaccctgcagagtgaagagaagcaggctatcggcgcgctggcggccagtctcattgccaaaaacagctgcatctatcttgatgccggcaccaccactctggcgctggcgcgggccatcctcgaccgggacgacctgcaggtggtcaccaatgattttgagataacccagctgctgatagatgccagccagtgcggggtgatccacaccggcggcaccctgtgccgggagaaccgctcctgcgtcggcgagtcggcggcgcgcaccttgcgccacctggctatcgatacggcctttatctccgccagcggctgggacagccgcggaattttcacccctgatgagaacaaagtcaccgtcaaggagaccgtcagccaggtcagcgccagaagcatcctgctgtgcgacagttcgaaatacaatcaggtggccacgtttatggcgttgcccttgactcgctttaccaccatcattaccgaccggcatctctccgatgccgctgccgcccatatcacccggcacgcctgcgaggtgctgcgcgccggataa

SEQ ID NO: 222470 - DNA, 861 bp, Klebsiella pneumoniae
atgcgttatgttcgcctgtgccttatctccctgattgccgccctgccactggcggtattcgccagccctcagccgcttgagcagattaaaatcagcgaaagtcagctggcgggccgggtgggctatgttgaaatggatctggccagcggccgcatgctggccgcctggcgcgccagtgagcgctttccgctgatgagcacctttaaagtgctgctctgcggcgcggtgctggcccgggtggatgccggcgacgaacagctggatcggcggatccactaccgccagcaggatctggtggactactccccggtcagcgaaaaacaccttgccgacgggatgaccgttggcgaactctgcgccgccgccatcaccatgagcgacaacaccgccggcaatctgctgttgaagatcgtcggcggccccgcgggattgaccgcttttctgcgccagatcggtgacaacgtcacccgtcttgaccgctgggaaacggaactcaatgaggcgcttcccggcgacgtgcgcgacaccaccaccccggccagcatggccaccaccctgcgcaagctgctaacccccccctctctgagcgcccgttcgcagcagcagctgctgcagtggatggttgacgaccgggtggccggcccgttgatccgcgccgtgctgccggcgggctggtttatcgccgataaaaccggggccggtgagcggggctcacgcggcattgtcgccctgctcggcccggacggcaaagcggagcgtatcgtggtgatctatctgcgtgataccccggcgaccatggtcgagcgtaaccagcagatcgccgggataggcgcggcgctgatcgagcactggcagcgctag

SEQ ID NO: 222471 - DNA, 132 bp, Klebsiella pneumoniae
atgaactataagaaagtacttaagaccgcacgctggctggcgccgctgattgctgacgatacgcccgccgcgctgcgcggtttgccaatgatctatgccatcccgggaggaactggtgcacccgataattaa

SEQ ID NO: 222472 - DNA, 423 bp, Klebsiella pneumoniae
atgtcgttctgccacatgcgcatcgccagaccggtcagcgaactggagaccagcgccagcatgtattgtgccgggctggggctgcaggaacttggcagctttaccgatcatgaaggatttagcgggattatgatcggctccgcggatgccagctggcatctggaattcacccactgccgccaccatcccgttaccccctcgccaggagatgaagatctgctggtgctgtactatccgcagcgtcaggcctgggaggcacaatgcagcgccatggacgccgccgggtttctgcgcgtcacggcgttcaacccctactgggaggtcaacggcgtcactttcgtcgaccgcgacggctatcgcaccgtgctgcaaaaccgcgcctggggcgtggtgggcgatgagtcgcatgtggcggcgagctga

SEQ ID NO: 222473 - DNA, 501 bp, Klebsiella pneumoniae
atgatcgcgctgagtcagtttaacagcctgagtggcgatgaggcaggggagctgctggctccctgtgtggcgatcccggcctggagcgataagctggtgaacttgcgccccttcgccaaccgtgaagcgctgctgcaggtcgcccgggaagcgatgggcgactggggagagaacgatctgaacgcggcgctcagcgcccatccgcggatcggcgaaaaaccgagcggcagccaggcgcacgcgacgatgtcacgccaggagcagtcggcggtggacagcgataatgaaagactggcgcaggccctgcgggaggggaatgcccgctacgaagcccgctttggccgggtgtttttaatccgcgccaaagggcgcagcggcgaagagattctgcaggcgctgacgcgccggctgcagcataccgctgacgaagaagtggctgaggcgcttgcccagctgcgggaaattacgatgttaagactggaaggagcgattggcgaatga

SEQ ID NO: 222474 - DNA, 1323 bp, Klebsiella pneumoniae
atggcgacgctcaccacctggatgaacaatgcgcgcgtgggaaccttaacccgccaggccaacggggcgcacagtttccgctatgatgaggagtggctgcgcagcccgcgcgccagaccgctctccctctcgctgccgctgcagtatggcaatattaccgccgacgcggtgtatcactattttgataacctgctgcccgacagcccgcaggtccgcgagcggatcgtcaggcgctatcaggcgcgttcgaaacagccgttcgatctgctggccgaggtcgggcgggacagcgtaggggcggtgactctgctgccgccgggggaagaggcgcatcttgccgcgttgcgctggcagacgctggatgaggcgcagctgaccgctttgctgaccgcctaccagtcggatattcctctcggaatggtgaccggccaggacgattttcgtatctcggtggccggcgctcaggagaaaaccgcgctgctgcgaatgggcgagcactggtgtattccgcagggcaccaccccgaccacccatatcattaaactgcctatcggcgagataaagcagcccaatgcgacgctggatctgcgtgaaagcgtggataacgaatatctgtgcctggcgctggccagggcgttgggcctggcggtgccggaggcggagattatcaacacgccgcggatccgtgcgctggcggtgacccgcttcgaccggcgctgggcgcaggaggggcgcgtgctgctgcgtctgccgcaggaggatctgtgtcaggcattcggcataccgtcgtcgatgaaatatgagtctgacggcgggccgggtatcgccgcgatcatgacctttctgctgggttccagtgaggccctgaaagatcgctatgactttatgaagttcatggtgttccagtggctgaccggggcaacggacgggcatgcgaagaacttctcgctctttttgctgcccggcggcagctaccggctcacgccgttctacgacattatttcggcatttccggtgctgggcgggacgggactgcatctgcgcgacctgaagctgtcgatggggctcaatgccacaaaagggcggaaaacggagattaacgctatctatccgcgtcattttctggcgaccgccaaagcggttaacttcccccgggagcagatgctggcgatcctgggcgagtttgccgaccgcgtgccgcaggccatcgaaagcgcccgccaaacgctgccgtcggacttttccgcccacgtctggcgggccatcacggagaacatgcttaaactgcacgcccgcctgcagcaagggctgctggcgggatag

SEQ ID NO: 222475 - DNA, 207 bp, Klebsiella pneumoniae
atggctgtggtggtgaatctggacaaactgctggtggaaaaaaagatgacgtccagggcgctggcggcctttgttggcattaccgaacagaatttgtcgctgctcaagtcgggaaaagtcaaaggcatccgctttgataccctgtcgcgcatctgcgaggcgctcgagtgtcagcctggcgatattctggcgtgggagcccgactga

SEQ ID NO: 222476 - DNA, 534 bp, Klebsiella pneumoniae
gtgaagcaatccagaacccggctgagtctggctattattagcggcatactgcccctcttttttatgctcgccctgatcgtgccgctgtggattttctttaccggcgaacgatattttctttccaccctgctgcactttgctgaagtgccgttaaccgacaacccggcccaggcgccggggatggcgagacgtttgttgctgctggccctgctgtatcttccggccgggctgttcgcgttcgctatctggcagggcatgaaggtaacccgtagcgtccgccagcgcagcgtgctcagcctctccctggcgcacagcgttcgttacatcgctctggccatggtgggcatggggatcctgttgccggtgtgccgctttctgatcccgctgctcgcctggtggccgcagccttattaccaggtggtgtttctgctcagcgacggggggctgcttctgacaggaagcttgctgtttgtgacatttcacgccatgctccacgggatccgtgcggaagaagagaataaggagtttatttaa

SEQ ID NO: 222477 - DNA, 345 bp, Klebsiella pneumoniae
atgaacggaattgacatcctctgggcgctgttaacgctgttgtcggtgatcctgtttatttccggcgactggctggcgcagcgaaaaatacgcctgctcaattatgttttgctggtgaccggggttatttatctcgccgaggttttccagaccctgcagaatctcggcaaaatgggctacctgtttcggatgctgacctggaccatccaggcatcgttcatcaccctcagcctgtaccgcgtctggacccgtccgtggtttgccagccgtcgacgcggcgtccgggcgatgagcgttgtcttcgccgtggcccttatgtcatgcttgacgcggctggtgctttaa

SEQ ID NO: 222478 - DNA, 1116 bp, Klebsiella pneumoniae
atgcgctggaaccgctatcgccgggacagacagatcattgccgccgtgctggtttttaccgtcatcgtggcggcggggatcgccctgcagcccggctttcatccccccagctcccggacgacgggggataaacagctggtctcgatattaacgcctctgcttaacggcgcccgcggacaggtcgccgccgcgctgattacccctcagggggtgcgctacggcctgtgggggagcgagtatacgacgcagtatgagatcgccagcctgagcaaaaccatgaccgccagcctgctgctggaggctattcgccgcggcgaagtcaccgcgcagacgccggtgtcggcgctggtcccggagattgtcagcccggtgcgggacgttaccctggagcaactggtttctcaccgttcaggactgccaccgctcaccgcgtcggttgggcagcggctggctattctgagcgacattgcccggcggcagaatccctggcgctacgatcgacccgcgctgatcgcgatgatgaaccaggccactctgcagccgacgaaatggtttgattattccaacgccgggtttgccctgctcggactggcgctggagcgggcgtctcatcgcgattttgccacactgatggcgcaacgggtctttgcccccgccggaatgcagggcgcggaagtggcccggcagaataccccagcctcgccgtcgtttgccgcgggctggtctgtctctggttttcctcagcagccatgggtgatggatgccttcgcccccgccggcggcgtacgcgccacgattgtcgatatggcgaaatatgcccaggcgctgctggcaggaaacctggcgggcagtgaaggcatgccccccctgttcgccaccgatgatcccgattcccgggtgggttatgcctggttcactacccgcgtccgcggacgggagatcgtctggcatgacgggcagagtggcggctttgcggcaatgatggccttcgaccgacagcgacagaccgcggtagtgatcctctccgataccgcctggccggtgatcgggcctgccatcaagctcttactggctgccacccctgatgaacaggaggcgcgtaatgaacggaattga

SEQ ID NO: 222479 - DNA, 1656 bp, Klebsiella pneumoniae
atgagtaacgatcacctgacggacattgcctatcgccactttattgaaagtgttaaagattatgccatctatatgctgagcgccgacgggacggtcattagctggaatgagggcgcccgccgggcaaaagggtacctgagcgatgagatcatcggtcgctacttcggtctcttctatagcgaagccgaacaactctccggggtgccggcgaataatctgcaaattgccctgcgtagcgggcagttcgaaggcgaaggctggcggtatcgtaaagatggctcccggttctgggcgcatgtcatgatcaatgccatccgcgatgagcaaaataacctgctgggctttgccaaaattacccgcgacatcagcgaacagaaggcgatcaatgaccgcatcgcgtggatggcgcgttacgatgcgctgaccggtttacccaatcgggtggagttctttgagcgggtggaaaagctaatcaccgggaatgacgcccgccgctttgccgttttcaccatcgatttagataagtttaaagagattaacgatctgcagggccatcttattggcgatcaactgctgcagcgcgtggcaggcgccgtactcaaaacgctgcagaaggaggagatggtcgcccgcttcggtggcgatgagtttgtggccgtcaaaccttttgccgatgaaagcgaggtggacgcctttgccgcccgtctctggcactgcttcagcggtaagcagacgtttgccgcgacggaagtgatcctttccgccagcatgggtatctccgtctacccggaggacgggacggatattaatacggttctgagcaattccgatctggccatgtatcgggcaaagagcagtctcgaccacaaaatttgctggtacgaacgcgagatggacgacaagacgcggcagcggaatatgatggccgccgacatccgccgcggtattcaggcgggggagttttcgcttcactatcaggcgatccgcaatattaaagatcgtcgcatcaccggttatgaagcgctgttgcgctggcagcatcctcagctgggcgctattccgccggacgtgtttattcccattgccgaagagagcggcgccatcgtgccgttaggctactgggtgctggagcaggtgtgtaacgaagcgctggaaaagggtctcaacagaaaaatttcggtcaatatctcgccggtgcagctgcgtcatcgtagctttatcgaaaaagtccgcgagatcctgatgcgtaccgcctatccggtcagcctgctggagtttgaggtcaccgagacggcgtttatcgtgaacaagcagctggcattcagcgtcctgcatcatctgcaaaagatggggatcagtatcgcactggatgatttcggcaccggctactcctccctgagcatgctgcgcgattttcatttcgacgtcatcaagctcgaccgcagctttatgctggatgtggagagcaatccccaggtccgctcattcgtgcgggccattatttcgctgggcaactcgatcaatacgccgcttatcgccgagggcgtggaaaccgcaggacaactgcagatcctcgaagaggagggatgtgacgaaatgcaggggttcctgttcggcgagccggtcgatattaaacacctgcccgatcagcgctga

SEQ ID NO: 222480 - DNA, 141 bp, Klebsiella pneumoniae
atgacgctggcaatgctgttggtgcttatcaatcaccataaaggtctgactatcttattgattgtgattattgcgctgctgtttatggcgcttaccccgctggtcaaaaaactgcttagcacccttcacgatcggtcctga

SEQ ID NO: 222481 - DNA, 252 bp, Klebsiella pneumoniae
atgtgtaacgcgcttaatggtatcgcgatcgtcctctgctttcgcgggataagcatcgtgacaggctatcgtcaggcggtctggcaggtcatcatcacgctggctattattatatcgacctggtatagcgctaattatttcgccgccctggaagcgcgacgcgacagacgacgctttctgctgctggcctgggtggtgatgaccattctgctgaatttcattcacctcagcggcgctgaataccgttattaa

SEQ ID NO: 222482 - DNA, 153 bp, Klebsiella pneumoniae
atgaaaaacgccatcgctggtccgcgggaagttgttggacacgtggtgcacggtcggcatcagagtaccgtgagtgaaaacagcgcgagtcatatacaaacgagtaagcagccggtggaggacaagatggagcctatgaatttcatggggtag

SEQ ID NO: 222483 - DNA, 960 bp, Klebsiella pneumoniae
gtggatgaaggcgattatgtcgaaaaaggccagcccctggttctgctggacccaagcgataccgccatcgccctgcagcaggctgaagccaatctcgccagcacagtgcgtcaggtgcgtggcctctacagcaccgccgacaactaccgtgcacaagtagctgccaaaaaagtagccctgcaaacagcgaaaagtgactatgtgcgccgggaaaaaattgtcagttccggtgccattgcggtggaagatctggcgcactaccgtgatgccgtgaccagcgcgcaaagcgatttactggctgccgagcaagcgctcaaaaccaatcaggcgatggttgatgacaccgtggtggataaccatcctgaagtcaaaaccgccgttgcgacgctgcgccaacgctatctcgataactcccgcagcaccattgttgcgcccgtcagtggttacgtcgctaaacgtgctgtgcagctcgggatgcgtgtcacctccggcaccacgctgcttgccatcgtgccgctgaatgaagtgtgggtggatgccaactttaaagagagccaaatgcaggatatgcgcattgggcaaaaagtagagctgaatgcggatctctatggcgataacgtgaaatatcacggcaccatcgaaagtctcggcattggtaccggtagcgcattctcactgttgccagcccagaacgccagcggcaactggatcaaaatcgtccaacgcctgccggtacgcatcacgcttgatccacatgacatgcagaagcatccgctgcgtgtgggtctgtcgatgaacgctgaggtggatatccgcaatcagggtggtcaccttctgccacaaaaaaccgtcgaacagccgcgattccgtaccgatgtgtatgaaacgccaatggaagcagccgataaactggtggcgaaaatccttcatgacaacaccagcgctgtagcccagcgctaa

SEQ ID NO: 222484 - DNA, 1539 bp, Klebsiella pneumoniae
atgtcagagccgaaggcagcctttacgccccccagcctgtttctggcgacgcttgccctgtcgctggcgacctttatgcaggtgctggactccaccatcgccaacgtggcgctgccgactatctccggcaacctgggcgttagcgccgatcaggggacatgggttatcacctcttttgcggtgtgtaacgctattgctctaccgttgacaggctggtttacccgccgattcgggcagttgcggttgtttatcgcctcggtgatgttctttaccctgacgtcatttctgtgcggcttcgcccacagcatgacggagctcatcatcttccgtgcgctgcagggctttttcgccgggccgatgttcccgatgtgtcagacgctgttgctggttatcttcccgccgatgaaacgcagcatggcgctggcgctgctgtcgatggtgaccgtggtggcgcctatcgtggggcctatcaccggcggctggcttaccgataactactcctggccgtggatcttctacatcaacgtgccgattgggattttcgcctccatcgtggtctggtcgcagctgcgcatgcgtgaagaaacaacgcagtcatcgcctgtcgactatattggcatcgcgctgttggtgcttggcgtgggcctgctgcaggtggtgctggataagggcaacgacgaagactggttctcttctacgcccattatcgtgatgtctattgtctcggcgatcagcctgatttgctttgtgatatgggagctggacgaacgtcacccgattgtgaacctgcggctgttcaaagaccgcaacttcgccatcggcacgttggcgctgatgctgggctatgccgcgttctttgccatcaacattattctgccgcagtggttgcagacccagatgggctacacggctatctgggccggtctcgccgctgcgccgatgggcttcttaccactggtgctgacgccagtcatcggacgttacgccaccaaagtggatttgcgaattttatgctcagtgtcattcctgacaatgggggcatcctgtctgatgcgcgcgcagttcaatactgacgtggatttccgcaccatcgccagcgtgcagatgtttatggggattggcgtggccttcttcttcatgccgctgaccaccattgtgctgtcgaatctgcacggtaacgaagtggcggaaggctcaggactggccacgttctttcgcgtactcggcggctcctttgcctcatcgttaaccacatggatctggcagcgacgtgaagttttccaccacgcgaatctgaccgagagcgtgacacagtacaacccagcggctatggattacgtaaataagatgggtggcccgacgcagcagcatcttgcgatgattgaccaggtggttacccagcaggcctacatgatgtcgacaatcgactatttctgggtgctcggctggggttttatggcgctgattatcatcatctggttcacccgcccgccgttcgtgaaatcgggtatgccaggcgcccccgcagcaggtcactaa

SEQ ID NO: 222485 - DNA, 1674 bp, Klebsiella pneumoniae
atgacttcagagaccttccagcaaccgctgttacaggtggcgcaactgagcgtcagcttcccctcgccgcaggggctgattgaggcggttaacgccttatcgtttgacgtgcatgccggtgaagtcctggctttggtaggcgagtccggttcgggtaaatccgtcacggcccggacgctagtcgggctggcgggggcaggggcggctgttcgcgccgagtccctgatattgcatgggcacgatggcctgtcgcagaatttactggcgtgcgatgcccgccgttggcagcaactacgcgggcgcgaaattggttttgttttgcaggatgcactgacctcgcttgacccgctgcgccggattggtcaggaagtcgcggagccgttgttgacgcaccgcctggaacggggggcggcagttcgcgaacgcgtggcggagctgttaacgcaaaccggcatccccgatccgcataaccggatggcgcagtacgcacatgaactctccggtggcttgcgccaacgagcgctcatcgcgtcggcgctggcggcggggccgcgattactcattgccgatgaacctactaccgcgctggacgccaccgtacaaaaacaagttttgaatgtattcagggccctggcggatgccgggcatggcgtgctgctgatcacccatgatttatcggtggtggcggatattgccgaccgtgtggtggtgatgcggcagggcaaagcagtggagagcggcaaggtgcgacaggtgctgcatgcgccgcaacacccttatacccgccgtctgctggcggccattccctctgccggtacgcgtgggacgtggttaacaggaaacgatccgctgggtcaaacggtagtgcgggagaacatcagtactgacagcaccacacccgtgctggctgccgataacgtatcactggcgtatgttctgccggatggccgtcgcttgcaggccgtcaatcaggtgacgttagaggtcgcgcagggcgaaacgctgggcattgtgggcgaatccggtagcgggaagaccacgctaggcaaactggcgctggcgctgcaggcaccgcaacagggcgagatccttctcgctgggcaaccatggagcaggctgacagaacgtcagcggcagccgttgcggtcgcgtatccagacgattgtgcaggatccgctgggttcatttaatccgcaatataacgtggcgcaattgctgcaacagcctctgcgcctgcatacgacgctcacagccgcggaccggttgtcacgtgcgcaggcgttgctggcgctggttggtttaagtcctgatctgctgacgcgacgtccggccacgctttccggtgggcagcggcaacgtatcgccatcgcccaggccctggcctgcgagccggatattctgatttgcgacgagccggtgtcggcgctggatgtcaccacccaggcgcaagtgttggatttgctggtagcgctgcaacgccgtttgcatctgtcaatgctgtttatctctcatgatctgggcgtggtgcagcatatgagtcatcgtattgcggtgatgaaagacggcgaggtagtcgaaagcggcagtgtggatcaaatttttcgggcgccacgccacccgtggactcgacaattgttatcagctgttgggcagacgccgttgcgatataactga

SEQ ID NO: 222486 - DNA, 864 bp, Klebsiella pneumoniae
atgagtgatcttttactgcgggtggcccgccgcgacggggggcgctatcgtaacccgtggctggcgccgggtaccagcattccgttgttactggtgctactgctcgtggtggcggtgttttttccatcgctattcacgccgaacacccccgaacagatggatttcagcgcgattttgcagccgccggacctcagacactggttcggtactgaccagttggggcgtgatgtgtttacccgcgtggtgtatggcacctcgctgtcgctgagcattggggtcggcgcgaccctgattgccagcgcgggcggtattgtgctggggacactggcaggtcttgcgcccagggcggtacggcagttactcgtacggctactggacattatgctggcgttccccgatttgctgttggcgctgctggctatcacggtgttggggcgtgggccagagaataccctgctggcggtcggactggccggcattgctggctatgccaggctggtgcgcgcgcaagtgttgcaggtcaggttatcggggtatgtgcagcatgcggtggcgttgggagagccgccaatggtgattattttgcgccatattgtgcccaatacgctgcgcccgctgctggtactggcaacggtggggatagggtattccatattatccgcctcggccctcagtttccttggacttggggtgactccgccgacggcggagtggggcgcattgctctctgagggacgtaattttctcgatagcgccccatgggtcagcctgctgcccgccagcgttgtcgcgctgtcggtgattgccattacgctgctgggccgacgtgttcaaacccttattgccaaaggcgggatcgcatga

SEQ ID NO: 222487 - DNA, 963 bp, Klebsiella pneumoniae
atgatgtctggatccaacgctaagctgctggcagcaggcaagcgcctgctgaccattttcgccgtgctgtggggtgcggcaacgctgacctttgttgcggtaaaactgatccccggcgatcctgtggcaattctgataggcagcgccaacagcgttgtggatgatagttttcgcgagacactgacccgccagttcggcctggataagccactgtggtggcaatatttgcgctactgtggcgaggcgctgacgggcaaccttggcgtgagttatcagtatcgccagcctgttgtgcaggtgattagcgcagcgttgaaagagacggtgccgctggccgtcagcgccctggcgctggcactggtactggcggtatttaacgcattactgacagccggacgtcatccgcgtctgcggtctctgcttgccgggttggagctgatgctgcttagcacaccggtgtactggatcggcatcgtgttgttgagcattttcagtttcaaactgcaatggtttccggtgaccggtaacgatggctggatcgcccttgtgctgccggtggtgacgctcagcctgccgctggctgcgacactcagccaggtgctgcgtgatgggctggaggaggcgctttcgcagccgttcgccatgaccgtgcgtacgcgaggggtgagtgaaactgcgctgcgcttacggcatgcgttgcgccatgcctcgctggcggtgtcgacgctgacggggacgctgctggccagcgtattaggcggctcaattctgaccgaaacagtatttggtcgggcggggctggggcaaatcactctcggtgcgattgagaaccgagacatgcccctggtgctgggggtggtgatgttctccgcgctgttatttgtggtgattaacctgctgattgataacctttatttactgatcgatccccgtctacgtctgcgagggcatgctgatgagtga

SEQ ID NO: 222488 - DNA, 1611 bp, Klebsiella pneumoniae
atgaaacgaagcatttattcacagaacagtttattgcgcatcagtctgctttccgcgctaacgcttactgccagcttcaccactcacgcacaggataaacctgtcgcggggggtgtgctgacggtcgctctgggcagcgataccccgattattgacccctctattaccgcttattccgtcaccgctctggttacgcgtaacgtggtggattctttggtcggccaggcggaagataacagctttacaccatggctggcggaacgctgggaaattaaaaacaataaccgcgaatacaccttccatcttcgcaaggatgtgacttttagtgatggcacgaaactggatgctgcggcggtaaaatataactttgaacgcatactcgatccgaaaaccacctccagttactccaaatcgttgttggggccgattgacgcgatcactacgccagatgagtacaccgtggtgatccgctataaaacgcctttcgcaccgctgctgcaggggctgagcttgccgtatctcggtattcagtcaccggcttatctgcagaaaacggcgaataccagcaataccgtggtcggttccggtccctttatcctcgaatcgtttgtcaaaggcagcgggagtaaactcagcaagcgcgccgattacaactggggtccgggctatgccacccataaaggcccggcatggctggataagatcgaatttaagtacctgccggagtcagcggtacgtcttggcgcgctgaatagcgggcaggtacaggtgatcgatgccattccgccggtgaattatgcgcaggtaaaaaataacccgaagctggatgtgatcaccagggaaaaccccggcgttccgcgcgtcctttatttgaatagcgacacagggatcttcagcgacctgaaagtgcggcaggccttccagagcgccatcgatcgcactactgccgttaaagccgcgttctttggcatcctgaaacctgccgacaatattcttggacccgctacgctggattacgatccggccattgccagccagtgggggtttgatctgcaaaaagcccgccgtcttctggatgaagccggctggcagcaaaccgatagcgaaggctaccgggtcaaggagggtaaacgccttactgtgcaatttacctattcttcaaacgatgtagaagccgctgacgtgacgctgttccaggcaattcaataccaggtaaaacaagccggttttgaactgaaactcgatccggtggattcaggcattctcagcagccgcacggcggctaaccagtacgacattatctcgaactattttgttcgcccggagccggacatcctgcgtaccgttttccattccaattatattccgccgaaggggaacaacttcagccgcgttaaagcgctggatagccaactggaaaccgctgtcggtgccagcgaagccgagcgtaaacgcatctactatgccatccagcaccagattatcgatcaggcctgggcggtgccaatttacatcccggcatatcagttagggaaagccaaacaggtgcagggcattagctgggccacgaacgcgaagccgaatttctatgatgtctggatccaacgctaa

SEQ ID NO: 222489 - DNA, 846 bp, Klebsiella pneumoniae
atggttgctatctcagcagaaaaaacgaatgcaatacaagctattttttcacgaagcaaggctgttattggtgttattcattgcgacccatttcccggctcgccaaaatatcgaggaaaatcagtctcggatattgttgaacgtgcgcttcgtgatgctgaaaattatatttcaggcggtgttcatggtctgattattgaaaaccatggcgatattcctttctctaaacctgaggatatcggccatgaaacctcagcgctgatggcggtcattaccgagaaagttcgtgaacgttttgctgtgccgctgggcattaacgttctggctaacgcggcgatcccggcaatggcgatcgccctggcgggaggcgccgatttcgtccgcgtcaaccagtgggccaacgcctatatcgccaacgaaggatttatagaaggggcggccgctaaggcgctgcgctaccgcagtatgctgcgcgctgaacatattcgcgtttttgccgatagccacgttaagcacggtagccatgccattgtcgccgatcgttcgattcaggaactgacgcgcgatgtcgatttcttcgaggctgacgcggtgatcgccaccggccagcgtacgggcgatagcgccacgatggcggaaattgacgagatccgcgcggcgacggaactaccgctcctggtgggctccggggtgacaccggctaacgtgatgcagatcctcgggcggactcagggggtcattgtggccagtacaatgaaggtcgatggcgtctggtggaacgatgttgagctggcccgggtgaaacattttatgtcggtcgcgcaggccgcgctggaggaagcttaa

SEQ ID NO: 222490 - DNA, 1143 bp, Klebsiella pneumoniae
atgaccacgacccttgagctcgcccggcagctgctgggctttaacaccattaacccgccgggcagcgaagctgactgcatgcggttcttcgccgactggcttgacgatagcggttttgaggtttcgctgtcgtcgttcggcgagggacgctgcaatcttatcgccagccttcccggggcgaagagcggtaaaccgctggcctttaccggacatctggataccgtcccgctgggaaatgcccgctggcagtacgatccttttggctcgcagatggaagacgggcgtctttatggccgcggatccagcgatatgaaagcggcgatagcggcgtttgccgtcgcctgcgttcatcagcgggaagcgatcctcgccggacgcggcgcggtattgctgataaccggcggagaagagaccggctgcgacggcgcgcgggcgctgatcgcctccgcaacgttgccggaggtgggcgcgctgatcgtcggtgaacccaccgccaactatccggttatcggccataaaggcgcgctctggctgcgctgcgaaacgcgggggaaaaccgcccacggcgcgatgccggagctggggatcaatgctatctatcttgcggcggatgcgttgggtaagattcagcatttttcgccaggcgcgccgcatccgctaatgaagcaacccaccctcaacgtcggacgcatagaaggcggactcaatattaattccgtaccggaccgcacgcgttttgatgtcgatatccgcagcgcgcccaatttacagcacgccactatccgggagcgcttgacgacgctgcttggcgaaagcgtcaccgtctccacgctggtcgacctgcccgccgtcctcagccgggaggatcacgcgtggattaagcaggtttaccaacgctgtcagccgctgcacgctgagccgattgcgccgcgcgtggtgccctactttaccgacgcctcgctgctgctgcctgcattgggcgatccgccatgtattattctcggccccggcgagccgtcgatggcgcatcaaaccgacgagttctgcctgctcagccgactggcggaggcagaacagctatacggtgacattattcgcgactggatggcatcaccgcccgcgacgaaagtaaaaaatgagtga

SEQ ID NO: 222491 - DNA, 1797 bp, Klebsiella pneumoniae
atgagcgatgaaaatgatagctcgctaaccatagcaacacattgtgctaaacggcgagaaaattttccagatgatgtaaaaaaaaccttttctacccggccctggggtatcgcactttccggtggcggtatacgaagtgctactttcagctttggcttattaaaggctctatcaaaaaataaaatatttcacagatttgatatattatcgacagtatctggaggtggatatattggctcgactattggtaaattattccatggaactaaagacccttttgctgttgaagaagcacttagtgaagctgatacaagatggtttgctgtctggctccgggctaatggccgatacttaataccaggaggaatgcaggatgttatattcgccacggctaattttggtcgaaatatcttagcaatccatcttgaacttgcatgtctttccattctgttggggagtatcattgtcagcatagatttattaacttggggattggcagataatatatacgctcaacgagattcattgcgaattgcatcccctttaattacaatccttggttttgtttctcaatggccaacaatatggctgctgttgataccattgctgtttttcagtctcgtattgtcatgtgcctactgggccttaccaacacaaaataaagaatcgttttctattggtatgcaaagctatctaacactattgttggcattttctggtgcttttattatcctttgtcaatttacacacagtttagataacactatcattaacaatcttgcagggtggctaaagatacctgcggaactgggttatgtactgctcaccatttgtatggtatatttttttggcgtgcttgttgctgtaattctcaatgcctgcaggaaagataaaaatcttgactgggctcgtaataaattgacgaccggattatcgctagtacttcgaatagcacttgttatcacggtaattggaggaactgattacttagcatggtcattgggtaacagcaatagtaatatacaaggaactctgggtgctgtacttgggcttatcgctgtagcattcaggattgcgctgcctaagatttctgatttacctaaaagtctgattactgttacacgtcgcgtagtattagaggtgataaatttcatcggcatccttggcttggctctgattgtaatattttggatgagtttagtccaccgtttgacctcgaatgctcttttcgatatgtccctaaaaaatctgacgttttccgcagcatggcaggtattaagttatctgttctttcctacccttttgatagttgtcatatcttctcgaaaccaggagtttctgaatcgttcatctctttatacattttatcgggctcggcttattcgtagttatctaggtgcgggtaatccacaaagattcaaatcaacagcaaacacgcaggctaactgtttatcgccagtggaaaataatggattatttacgaatgttactgatgtgcaacctcaggatgatataccaatgcagcaatatcagcctcaccatagtggtggcccggtgcatctcattaatgtttgtgtcaatcaaactcgtgatgctaaaggtggcttattcaatcaggaccgtaaaggaatactaatgactgttggtcctaaagcgcaagtatcaatttctaagaataaatggtaccaatgcgcatcaaacacagcgttgagtcttggctcatggatggctatatcaggtgcagcgttgcacctgggctgggggcttcaactcgtcctggcatatctgccttgttaa

SEQ ID NO: 222492 - DNA, 1704 bp, Klebsiella pneumoniae
atgatgtcaggtatacgtttaggttattggtgggatagctcaaacataacaagcaacagtgattcaaagaaaaataatcttgggaaatataagcaacttttgaatgaattatgtggtcgatttgatattaatagtcgacgggattggtttctaagtgacggggggcattttgaaaacacaggtgcatacgcattgcttcgtgaagaatgcgaaataatcatagttgcagattgcggtgcagatccacgctattcatttggcgatctggagaatctagttcgcaaagcacgaattgatttacaagtccaaataacctttctacgtccaaaacaaccgcatcctaacctgcctggtgtttttggatcgcttaacgaattagcttcatctgaaagtgaagcttgtcttgccattgcccgtataaattatatgcataataacacaactggttatatgttcatcgtaaaacccaatatgtgccagcaagcacccattgacctggttaattttaaagccgaaaaccccttatttcctcaagaacctacaaccgatcaattttttagcgaggctcaatgggaaagttactttcagctagggcaaacaataggcaataatatcacactcactcaattgactaacgcagcggtttttgctgatacctattttatagatgatgatggtgcgataatcataaaaacccctaatggcaagcaatctctacaatactctacaaaacgattatcttcacgaatagtagcaactggtgctgtatcagcatcaattagtcttggcgcttttgcatctataggtttggcgggttggcaggcgataagcagcgcaatgaacaatcagtcacaggattcctttgtcaaatcggccgatctcaaagagttatcagatatatttggtagcctacctgtatctgaaagtaatacacctgatttgtctggaaacaaaattggacaaatggctacagcattgctacgtgttggggattccgcatgtagctcaaaaaatttttctgaattcaaaaagtctaactttttaaactttatacttaaaaataccagagaagcatgtaagacaagtaattcatctcatccttcatgtaaggaactactcaatgagagcaacttctcaccttgcctacaacaaaatccacgtgcaacttgccaacatatgtactggactcgagactattcattgtcttccgaactaaatatccctaattgcatgcctattattccgttatctgacattagttccagtacagctatttcagcctcaggtaaagtgggggatatttactctgtgaagactcataatatcactcacaacacctctgatttcaaatgcaaaggtataacaatatacttacaaatatatggaccagaatggcgtgatgctgccagaatgtaccgtaaaccctggcgcgaaatgggagcctccgttccacctatagaagacgttgttgatacagcccgaagagacggccgccgtccgcctcaaccctacccggtaccgacggtcatctatcataatgcaaccgcaagatcctgtgccctcgctctccagccaccaggtactgaaccgagatggcaaatccatgcactgcctaacaaactggatgctgttcagggagttattgaagtatggctgccaccatcagcttttaaagttgaacatctcactgataatggcctctaa

SEQ ID NO: 222493 - DNA, 228 bp, Klebsiella pneumoniae
atgacctctctgttttttaggggttcatttaataccagcactaagcttatttcgaattttgattattacgaaaaatatacaaatactaaatttgttattttattgagtaaatctctcctgaggtttaaaaaattaattttttacaccatagaattatcgcctttgtatattgtcaccttcaaaacattagaggccattatcagtgagatgttcaactttaaaagctga

SEQ ID NO: 222494 - DNA, 1476 bp, Klebsiella pneumoniae
atgaaaatgagtgacacacttaacaagtccatttcatttttttgcaaaaataacttcactgataatgaagaaaaccattgtgcacattttgtatgccatgtgctacaaattgatactggttatgattgcaaattatttatgaatggacaatatcctggagcatgcctccgcgttcatgaactctttgctgcgtgccctgctgttggtgaatgggaacattccccaaccggattaaagatcgccttcataactgatagttttaatgttgatctagaatcacataaaatgaggaacgttcctaaaaaacatgttggaatattttcaaacggtctaatctaccattactcaaacattcaagacatggtcatttgccaatccgctgaggattttatgaatcgcttcaaaaaagcatatggtggcaaccttaaattatattatggcattattcctccatcagcaatattgccagactcagaatccgacacaaataatgaaggcgtgagcctacaaaattttgttagcgtatctaaaggaactgaaccaataattagaaaagaaaaggtttctgataaacaaaatgattactatgcaacttttgaaggcagtcaggaattttatattgcccgcagcgtacgatataaatcatttaaaggtctatatcagccacataataaaaaaaatggaccgcgttatttggtcaaggactatattaaagaatatggtactatggctggtgttatagctgtgatctcacaaagtgaaagtgagggttacttcaatacattaaatacatatgaccgagcttcatttaccttcggttttttccagtttgcagcgcatacaccggatgataacctcattttattaattcgacgagctgctcgggaacatgagatgtttaaaacaaatttccctgagttagtgctggttgatggtgtgctgcatcgtgatttaggtttacactctgttagtctcgaaagaaaatatccaagaaccggaaattcggaggagttaatattaaaagatttcatgtcttatcttaacccgaatgtgacggacattgacgacaaagagctatcgaatgcagccaaattaattcaattggctaacactaatattacttttaatcatttgcaagttaatgttgccgcacaaattacaatgagaaaaataagagagagatataatatttggtataaacttaatggtgcatctgatcttatatgtactgcaatcgccgatattcatcatcagggacgaggtactcgaaaagaaattagtggaatacttacttctaaactatcatccgatgaacagctaaaagctttatgtctggttgggattgagaataatctggagagatgtaagtctttaagtttagctcttgataaggctaaagaagatggttacttaggtgtttccaggttcgattctgcgagtggtttgttcaaacctaatcaaggctggccagaatga

SEQ ID NO: 222495 - DNA, 639 bp, Klebsiella pneumoniae
atgaaatattttatcggtatggcggtgacgttattgttgagcacgccggtgctggcggcgggcgagcttgagattaaccagtctcccctgacgctggtgttgagcgatcagaatcaggcacgggtctcttcctgtgccgatttcattgcgctgcgtaaagcgggagagaccgtcgatgcgctgcccgggctttccgacccggatggccgtgcggcggaagcggcgttattctcctgctggctacaggcctacaccatcgatcatacgttattcccctctgctgggccgaaaccaaccctggctgaggtggttcagcactttcctgccagtgcggcgtttatcgtcagcgatgacgaaaagcaggacgtcgccaaaaactatgtggggaaaaccatcgccgactataccccggacctgaaagccagggacgatcgtctggaatcagcggccagcgccagcggttatgtgctggatgagtattatgcgtttaccgataagcaagggcatcagctcaacattgtcgctctggtgggctacgccatcggcggtacggcaagcgtgaaaagctactatcgcatcgatgacacgcacgcccgcgtctggagcgtcaccctgctcgatgagaacagcccgttataa

SEQ ID NO: 222496 - DNA, 1797 bp, Klebsiella pneumoniae
atgatgcagcagacgtttgatttacgcctggcgaccctggcggcgaactatcgtaacggcaacaccaccccgcgcgccctgctggcggcgatccgccagcgggcggaagcgctgaatcccgagtttaatctgtttattcatctcctgagcgaagcggagcaggcgccgtttctggcggcgctggaaggccattcgccagagacgctcccgctgtacggggtgccgttcgcgatcaaagataatattgaccttgcggagatcgtcaccaccgctgcctgtccggcgtttgcttaccggccgacgcaaagcgcgaccattgtcgctcagctgattgccctgggggcggtgccggtgggcaaaaccaatctcgaccagtttgccaccggcctgaacgggacccgttcgccgtatggccgctgccgcaacgcgtaccatcccgcttatccctccggcggctccagcgccggctccgcgctggcggtagcgctgggcgtggcaagcttctcgctggggaccgacaccgccggcagcggtcgcgtcccggccgggctgaataacctggtggggctgaaagcgacgaaaggggtgatctctaccgctggagtggtacctgcctgccggacgctggactgcgtgacctttttcagcgccaccgccgacgaggccagccagctgctggccctggttgcccgatccgatcagcaggatagctacagccgccgcaatccccagtggaacagccgtcaggccttcggcaggccgtccgccgggtttcgctttggcgtcccgcgggagcttaacttcctcggctgccgcgtcagcgaagcgctgttcgcccaggccgtgcagcggctgacggcgctcggcggcgtgccggtagcgatcgatttcgcgccatttctggccgccgcccgcctgctatatgacggaccatgggttgctgaacgctatgcggtggctggcccgctgattgagcagcagccggatgccgtgctgccggtcattcgcgatgtgctggcgaaagcgcctgatatcgacgcgacggcgacttttaaggcgatgtatcagctgcaggggtataaagcgcagtgcgatgccattctcgagacgctggactgcgtgctgacgccgaccgttccgcgcccggtaacgctcgacgagctggcggtggagcccatcgcccgcaatgccgacctgggctactacaccaactttatgaacctgctggactatgcggcggtgagcgtgccgtgcgggtttatgcccgacggacttccctccggcgtcacgttgtttggccgggcctttaccgatcagtatttgctgagcctggccgacgccttccagcgcgcggagcggctaccgctggcaggcggcgcgcggctggaaagcccgccgcctgcgcatcccgcgggtcatgatcggatggctctcgcggtatgcggcgcacatctgtccggccagccgctgaacggtcaattgctggcgcggggcggcaggctgctgcaggcgacccacagcgcgccgcgctatcggttgtatgtccttccggatggcaagcgcccggcgatggtgcgtgacgagccagagggggacgcgatagccgtggaagtctgggagatccccagcgccgaggtggggtcgctgctggccgccatccccgcgccgctggggctgggacagattgagctggccgacggccgctgggtgacaggctttatttgcgaagccggagggctgggcgcggccacagagatcaccgcctggggcggctggcgtcagtggctggccaggtaa

SEQ ID NO: 222497 - DNA, 3606 bp, Klebsiella pneumoniae
atgtttgataccttactgattgctaaccgcggggcgattgcctgccgcattctgcgcaccctgcgcgccatgcaggtgaagggcgtcgccgtttacgccgaagccgacctgagcagtctgcacgtccgcgaagcggatgaggcgctcagccttggcgaggggccggcagcgcaaacctatctgatggtagagaagatcattgccgccgcgctgcagagcggcgcccgcgctatccatcccggctacggctttctgtcggaaaacgccgccttcgccgaagcctgtgaggcggcgggactggcgtttgttggcccgactccgcaacagctgcgaaccttcggcctgaagcataccgcccgcgccctggcgaaggcggagggcgttccgctgctggaaggcagcgaactgctggccgacagtgaggaagcctgccgggcggctgaggcggtgggctacccggtgatgctcaagagcacggcgggcggcggagggattggcatgcgcgtctgccgcgacgcccgcgaactgagcgaggcgtttgccacggtacagcggttggggcaaaacaacttcagcgacgccggggtgtttctcgaaaaatatatcgaacgcgcccgccatctggaggtgcaaatcttcggcgacgggaagggggaagttatcgccctcggcgtgcgcgactgctcgctgcagcgacgtaaccagaaagtgattgaagagaccccggcgccaaatctgccggacgggatggcgcaggcgctgtgtagcgcggccattgcccttggaaaagcagtgaactaccgcagcgccgggacggtggagtttgtctacgacagcgcggcgcagcgtttctatttcctcgaggtcaatacccgactgcaggtggagcacggcgtgacggagcaggtgtgggccgtggacctggtgcactggatgatcgccctggcggcaggggatttaccgccgctgagcgagctggccgccgggctacagccccggggccatgctattcaggcgcgaatttacgccgaagatcctggccgccagtttcagccttctcccggactgttaaccgacgtctggtttccaccggcggacggcgccaccctgcgcatcgatcgctgggtggaggccgggtgtgaggtgccgccgtttttcgacccgctgttggcgaaagctatcgtctggcgccccagccgcgatgaggcgatcgccggcctggcgcaggctctggcagagacccgcctgtacggcgtcgaaaccaaccgccagtacctgcagcagatcctcagctttgcgccgtttactgccggagaaccctggactcgctgtctggagcagttgcgctaccgggccgataccgtggaggttctgagcgccggcacccagaccagcgtccaggactacccgggacgtctggggtactgggcggtgggtgtaccgccctcgggaccgatggatgaccgggcgctgcgcctgggcaaccgtctgctgggcaatgccgagggcgacgctgcgctggagatcacccttaccggacccaccctgaaatttaataccgccgtacaggcggtggtctgcggcgcgccgctggccgtaacgctcgacggcgtcgaccaggagatggactgcgtattcactattccggcgggtgcgaccctcaggctgggggcgataagcgggccaggggtcagaagctatctctgcctgcgcggcggcattcaggtgccggattatttgggcagtaaaagcacctttaccctcggtcagtttggcggccacggcggacgggcgctgcgcgccggcgacgtgctgcatcttgcacctccggctgagaccacggaaagcgcggcgcttcctgcagggttgcgcactgagcttgcggcagtgcgaacgctgcgggtgatctatggtccccacggcgcgccggagttctttgccccggcgtatatggcgaccttttttgccaccgactgggaggtgcattttaactccagccgcaccggcgtgcgcctgatcgggcccaagccggtctgggcccgcgacagcggcggcgaagccgggctgcatccgtcgaatattcatgacaacccctatgccgtgggggccgtggattttaccggcgatatgccggtgatcctcgggccggacggcccaagcctcgggggcttcgtctgcccggtgacggtgatcgaagccgatctctggcaactgggccagcttaaggcgggggataaagtgcgctttgtggcggtggacgtccccaccgcccggcgactggcggcaggccgtcgcgcggagctggcgaccctgcaggcgcaggacgttgcctggcagcctgtgccgcttacctcgccggtggtgatgacctgcggcgacgctgacaaacgcctggtggcgcgcctctccggcgatacccatctgctgctggaggccggtgaggcggagctggatctggtgctgcgctttcgcatccatgccctgatgcaggcccttgaggagcaagcccgggaagggatcattgatatcacgccggggatccgctccctgcagctgcattaccagccggaaacgctggcgctggagaccctgctggcgtgggtccgcgaggagtgggccacggtctgcatgagcgacgatctgcaggtgcctacacgggtggtgcatctcccgctctcctgggacgatcccgcctgccgcaaggcgatcgacaaatatatgaccaccgtccgcccggacgccccctggtgcccaagcaacctcgagtttattcgccggataaacgatctcccggatgagcaggcggtgtggcaaacggtgtttgacgccagctatctggtgatggggctcggcgatgtctatctcggcgcaccggtggctaccccccttgatccgcgccatcggctggtcaccaccaaatacaacccggcgcgaacctggacggcggaaaactcggtgggcatcggcggagcgtatctgtgcgtttacggcatggaaggcccgggtggctatcagtttgtcggccgcaccctgcagatgtggagtcgctatcacgaggtggccgattttgctggcaagccctggctgctgcgctttttcgaccagttgcgtttctatccggtctcggcggaggaactgctggagattcgccgcgatttcccgctcggacgctacccgttgtgcatcgagcacagcacgctgcggctggcggagtaccagcagtttctagctcgcgaggcgcagagcattagcgcatttcgcgaccatcagcagcgggcgtttaacgacgagcgcgagcgctggatcgccagcggccaggctcatttcgacagtcaggagagcgcgacagaagaggcgggcgatgcgccgctgcagccgggggaacagggggtggaaagcccggtatctggcaatctgtggcaggtgcagaccgcggtgggccgccaggtacgtgccggcgatgtgctggtggtgcttgagtcgatgaaaatggagatcccgctgctggcgccatgcgatggcagggttcagcaagtcaatgtgcagccaggcagcgcggtgcgtgccgggcagcgggtggcagtgattattgaggagaaggcatga

SEQ ID NO: 222498 - DNA, 636 bp, Klebsiella pneumoniae
atgacccttatcaccagtaaccgacgcccggaagaggccgtctatcgccatgtgatccccgccggggagccgtggctgtttgaggtaaaaaaagggcaaaccctgcgcctgctcgatcttgaaggcaaccaggcgattgatactctgttttacaacgccgacaacccgcgcgagcgctacgatgcgcagcgcacgctgcgccgccagggtaacgcctacctgaccgccggcagcgtgctctattccaatcttggtcatccgctgatgaccatcgtggccgatacctgcgggcggcacgataccctcggcggcgcctgcgcccaggagagcaacaccgtgcgctacgctctcgacaagcgctatatgcacagctgccgggacaattttctctgcgcctgtctgcacgatggccgtctgcataaacgcgatatcggcgccaacattaacttctttatgaacgtgccggtgacgccggaggggggtctgaccttcgaggatggcatctcggcggcgggaaaatacgtggaactgcgcgcggagtgtaacgccatggtgctgatctccaactgcccgcagctcaacaatccctgcaacggctggaacccgacccccgccgaggtgctggtatggaactga

SEQ ID NO: 222499 - DNA, 729 bp, Klebsiella pneumoniae
atgactgaactgcttcactccacccccagcctgcgcgaagagcagcttcccggcggggcgcacacctcgctgattttgcgcaaagggcagatcctgcgcctgaccgatatcgacggcggggcgaacgtcagcatgatgatgctcaacccccatgagaaaagtgagcgcctaaacctgccggataccctcaaggggcagcataccgcgcgtctgaccgccgggcactgtttctactccgatatgggccgggtgctcgccgggatcgtcgccgacagctgcggctggcacgatccgttcggcggggtccttaacgccgaagagacgcacgacaaatatggcgccggacgctaccaggaattacgcaatggcttctaccgcaacggcgtcgataacctgctggtggagatggggaaatgggatctcggtctggaagatctgctgatggtggtcaacttcttcagcaaagtcaccgtcgatgacgaggggcgctttcagtttgtctccggcaacagccgcgccggggattacgtggaactgtatgccccgatggacgtcctgctggtgctcaccgcgctgccgcatccccaggatccggccaccgagtatgccccccgtccggtgcagctgagctggtatcaggccgacgatgaagacgcagccacccaggcgctcctgacccgcgatgagaaccagcgtgcgttccgcaatacccaactttttgccctgtaa

SEQ ID NO: 222500 - DNA, 777 bp, Klebsiella pneumoniae
atgagttttatcgacatcaaaaacatctggcaggagtacggcgaccacgtggtgctggagcgcatcaatctgcaggtgaaagagggcgagttttgctcgatggtcggcgcgtccggctgtggtaaatcgacctttctgcgcctgctgctcggtcaggaaaaaccgacccgtggtgccatcctgctcgacggccagccgctggcggcggagccggaccgcagtcgtggtgtggtcttccagcgctattcggtgtttccgcatctcaacgtgctggataacgtcgccatcggtctggagctgccggcgtccccgctgctggggcgcctgtttggcggcagaaagcgcgaggcccggcaacaggcccagcggatgctggagaaagtgggcctgggacacgccctggataaatacccggcgcagctctcgggcgggatgcagcagcggctggccattgcccaggcgttcgtgatgcagccgcgggtgctgctgctggacgagcccttcggcgcgctggatcccggcattcgcaaggatatgcatgcgctgctgctccagctgtggagcgaaacgcgcatgacggtgtttatggtcacccacgacctggcggaaggcttcaacctcggcacgaggctgctggtgttcgacaaagtgcgcatcgacccgcaggcgcccaacgcctggggagcgcgtattacctacgacatcccgctcaatgaagcgcggatggcacagctggccgccggtagcgacaccaacgtttacgcattaaggagataa

SEQ ID NO: 222501 - DNA, 816 bp, Klebsiella pneumoniae
atgcgccacattaaccgttatccccaaaaggggatgcgcctgacgctgatgctgctgccttttgtcgtgctgatcgccgcctggtttatgggatcggcggtgcggctggaagccaatccgcaggacaagttgctgccaggcctgtcgcagatggtggcagccattgaccggatggcgttcaccccggacaaacgcagcggcgagtatctgctgtgggccgatacgctgatcagcctgagccgtctgctgacgggcctggccgtctcgtcgctgatcggcctcgtcatcggcatcgccgccggcgtcttcccgatgtaccgcgcggcgctgtcgccgctgctgacggtggtgtcaatgatcccgccgctggcgatcctgccggtgctgtttatcgtctttggcctggatgagctgtcgaaagtgatgctgatcgtcatcggtattacgccgatgctggcgcgcgacctggagcagcgggcgcaggagatcccggcggagctgtttattaaggcgcagaccctcggcgccaatagttggaccctggtgctgcgggtggtgcttccccagctgctgtcgcggctgatcacctccctgcgcctgctgctgggctcggcatggctgttcctcatctccgccgaggccatctccgccaccgccgggctggggtaccgcattttcctggtgcggcgctatatggcgatggacgtgattattccctatgtcatctggatcactttgctgtcatggctgatggatctggcgctgcgccagctgcacaaggcctgtttcccgtgggcggaaggaggtcggggatga

SEQ ID NO: 222502 - DNA, 1059 bp, Klebsiella pneumoniae
atgaaaacatcgccgctcctccgctcactcgtcctgtcgctgacgctgctgaccagcgtcccgtcctttgccgccgtcaaagaagagttcaacgtctgctggaccatctacgccggctggatgccctggggcgccatcagcaatgaaaagatcattgataaatgggccagcaaatacggcatcaaaatcaatatcgttcagctcaacgattacatcgaatccatcaaccagtacaccgccgggcagtttgacggctgcacgatgaccaacatggacgcgttgacgatcccggcggcgggcggtgtcgacagtacggcgctgatcaccggcagctactccgatggtaacgacggggtggtcctcaaaggggtggataaaaagctcagcgacctgaaaggaatgtcggtgtatctcccggagctgtcggtatcccactatctgctggtgcgcggcctggaaaaagccgggctacaggaaaaagacgtcaaggtggtgaatacctctgatgccgatatcgtctcggccttcggcaccagcggcgtgcgggcggcggtggcctggaatccacagctgtcggttatcaaaaagaccccgcaaaccagcgaagtgtttagctcctcgcaggtgcccggcgagcttatcgacatgatggtggtgaatacccagaccctgaaagataaccccgcgctgggcaaagccctgaccggcgcctggtttgaaatgatggccaaaatgaaggccggggatagccaggcgttgagcgccatggccgccgacgccggtaccgatcttgccggctatcaggcgcagctgaaaaccacccatctgttctggacgcctgccgacaccctggcgtttatctcctcgccagatctggcgaaaaccatgcagcgagtggcgcagttctcgttcgataaaggcctgctgggtgaaggggcgcagagcgcggactttatcggcatgacctttccgggaaatgtcaccctcggcgatgccgccaaccgcaaactgcgctttgacgacagctacctgaagctggccgccgcgggccagctctaa

SEQ ID NO: 222503 - DNA, 1257 bp, Klebsiella pneumoniae
atgacgacactcagcgaaccgttggttaccccgaaatatggcaaatggcgccagctggtgctgggcttgatctgtatggccgccatctccagcccgcaatatgtctggacgctgctgacgaaacccctggccgccaggctgggcgtcggtctgcccgagctgcaggtcaccttctcgctgctgatcatcctccagaccttcttttcgccctttcaggggcggttagtggaaaaatttggcccacggcggctgatcgctatcggcacggtgatggccggaatgagctgggtgctttctgcgcaggtgaagagcctggcgacgctgtggctggtttatggctgcatgggcggcctcgggaccgggatcgtctatatcggcgttgtcggcctgatggttaaatggttcccaaggcagcggggttttgccgccggcgcggtggcggcgggctacgggatgggggcgatcataaccactttccccatctccctgtcgctgaccactaacggccttgaacacacgctgacaactttcgggatccttttcgccctcgtcggcttcctcgccagtcaggggctgaagctgccgccgcctgctgtctccctgcccgtcagccagacggtggcgcagagcagcagatcgtttacctcccgggaaatgctgcgccagccgctgttctggctgatgtttgccatgatggcgatgatgtcgacttccgggctgatggtcacctcgcagatggcggtgttcgccgaggacttcggcattagccaggcggtggtgtttggcatggcggcgctgccgctggcgttaacgatagaccgcttcaccaacggcttaacccggccgctgtttggttttatttccgaccgcttcggccgcgagcaaaccatgtttatcgcctttgcgctggagggagtggcgatgacgctctggctggcgtgccgggaagatccgctgctgtttgtcctgctctccggggtggtgttctttggctggggggaaatcttctcgctcttcccgtcgatgctcaccgatacgttcggcagcgaacatgccgccagcaactatggctggctgtatatttcgcagggcatcgggtcaatcttcggcggcccgctggcggcgctgctctatcagtacacccacggctggcatgtggttttcagctgcgccattggtctggattttatcaccgccgccctcgcgctgtgggtgctaaaaccgtggcgcgcgcgctttatccgccaacatagctga

SEQ ID NO: 222504 - DNA, 603 bp, Klebsiella pneumoniae
atgaagaagaacattgccttttttgacttcgatggcacgatcacccacgaagatacgtttaccccttttatttatcagtccctcgatgcgaaagccattcgtcagggcaaattgcggctgttgccgtatattctcgcctggaaaatgggctggctttccgcctctgccatccggcaaaaagtatttcattatgcttttgccgggaaatcgcaacctgagatcctgcagcgcgggaacgatcatagccaggtatttattccccatacactgcgggagaacgcgatgcagcgcatagcctggcatcaggcgagaggggacaccgtggtggtggtttcagcctcgctggatgtctatcttcgaccgtggtgccagcagcataatcttgagctgctgtgcagcgaagtggaattccaaaacgggacagcgaccggaaagtatcaggggggagactgcagcggtctggccaaaaaagcgcgtatcctggcgaactactccctggccgattacgaggagatcttcgcctacggcgatacgccggaagatttcgccatgctggcgctggccaccactcaaatctatcgctgggatgaggcttcgccatga

SEQ ID NO: 222505 - DNA, 1122 bp, Klebsiella pneumoniae
atgaaattcccgctgtccacgctggcgcttctgttcctgttgtgcccgcctggcgatgccgccgatctcttcgatgcggaagatggcatgctcgacatgagtcagtatctggcggaaaaccgttacggttttctgccggtgccgctggcgataaccgagccggccatcggctatggtggcggactgtttggcctgtttttacacggcaaaggtagccgggagggcgggcagtttattcctccgccgctcaccgcttttggcggggccgccacgcagaatggcacctggtttattggcggcggtcatcgtcacacctggcagcatgatcgcattcgttacctggcgggcgccggctacgctaacgtcaatctggatatctattccggcgacaccggcggcttcagccatgctaaaccggtgcagacgcagaccaaaggcgtcgccgcgctgcaaaagctgctgtttcgcctgggcgacacgccggtgttcctcggggcctcccaggtgtatgcccgggcggatgtctctaccgataatccacggctcaaccgggtgtggcagcaggtgctcgggcaaaacagcacctcttcggcgctgggggtggtggcggaatatgacactaccgataatattttctatcctcagagtgggttagcgctgaagggggaatatcggtttttccgttcgctgctcgggggcgattatcactacaacactttttcgctggacggaaaggtgtttattccgctcagccagacgctgaccctggcggtcgcgggcaattatcagtccttaacccaccatgataagcatctgatgccgatggcgcgtccttatatagcgttgcgcgggatttcgcgctaccgctatcagggcgactacgtggccacggcgcaaacccagctggcctgggcggttactccgcgctggatcctgcagggattcgttggcgccgggagcgccgctgacgcggcggatacgctatgggaagagtcagaggtggcatggggggccggttttcgatacctgatcgcgcgacagtacggtttacgtaccgggattgacatggcgttcagcgagcatgaacaggcggtctatttcaatgtcggttcgggtttataa

SEQ ID NO: 222506 - DNA, 657 bp, Klebsiella pneumoniae
atgatgaccgagtacatcctctctccctgctcgctggccgcccgtgggttgagccagctgatgcacaacgcggcgaagcatcccgtcatgctgccggtggagggcgtctctctgcgggagctggccgctgtgaagcggatcgtggtctttcttcctgacgatccactgtggatgctcaccacactgcgccaggcggccaggctgctcgaccaggcatcacgcccgttgccgatgctgatgcttagccgcagcccggccatctggctgtggcgaacgctgctttatcaggtgagccatccggatcgtttgcgcaacgtccatgccgctcctgccgacctcccctgcgcgcaattgatccatcggctgaagaacgcgccgcggcttgaacgccttgccagtgaagccgccctgatccaccgaaaacgggccgctggattaagtcatgccgagctcaaagcgctcctcgccctgctgcaagggcagacgataggcgagcagtcgcaacgtctcggattgagccagaaaacgctctacgctcagcggctggcgggggtgaaaaagctggtggaatatcacccgcatctggcccctcgctttccgcacaggcagccgcctcgttcatcagcaaactcacggtcggcgtttgtccaggcatga

SEQ ID NO: 222507 - DNA, 264 bp, Klebsiella pneumoniae
atgggcagacgcttaatggtctgtgtgttcgcgctggtggcgttttcagccactgcagcgcatggccatcacggccagtcggtaatatcgagcgccgacggcggcaacggttcggacggcggcagtagcgataactcctcaggcagggcagggtgcccgggcggcaccgatcccgataagcacggccatttttacctgcccggcacccgcgaaccctgcaatcctggccctcaggatgcagagaaagtcgggtcttcccgctag

SEQ ID NO: 222508 - DNA, 198 bp, Klebsiella pneumoniae
atgccaaaaaaacgtaaaaaatcgagcggaaaaaagggcgggctacctgcaatgttcatcacattcttgttgtcagtctcaggagcattgctagtgcacggcgaccagggaaaccttttagctaacccactgatcaatgtgacggttgttaatgttcacagtaatgtgactgttaacaacttaagttctgtaaggtaa

SEQ ID NO: 222509 - DNA, 3243 bp, Klebsiella pneumoniae
atggtcgttcgtcttattttatccctgattgtcgggctggcgctgagtctctctccctccgcgtttgccatgaagcaactggagctgaaaagccatgcccacattgcggcgatcgacattccgctcaacgataaggcaaaggcctggctggccgcccagccaacgctgatcgtcggcacttggctccctgagatgacgcccgtcgtctacgacagcgacgaagaaagctatcaggggattaacgccgactatctggcgctgatggcgcacagcctcgggctaaaggtggttatccgccaatatgacaccgagcagcaggcgctggccgccctggccgaccgccaggtcgataccctgctcactcaggtggcgcaccgggatgcgctcgccccgggcctggttcaatccgcaccgctgatcaaaacctggccgacgctggtcacctcgctaaaatcccccctgccgccgctaaccaccgaccgccgcgtcaagctagcctgcacccgcgattgcgcctttttcgatattattcaacaggcgtttcccaacgccaaaatcaccctttatgatagcgactatcaggccctcgcctcggtggtcagcggcgagaatcagtatttcatcggcaacaacatcaccaccggccactgcatctcgaaatatttctcgcaatcgctggtcatcacgcactattttcgtcagcaggagcagcacaaccgctttgtcacccgtgaagatcgaccggcgctgcaccagctccttgaccgttttatccacgccatcgacagcgataccgcgatgcggatcatgcaaaactggctcaaccgcggcgatctgtcgtttcttaataccccgttgccttttaccgctgaggagcagcgctggctgcggaagcatcgtcacatccgcctgctggttaacccctactttccaccttttaccctggtggatgacgaagatgagctgcgcggcatcatggccgatatgctgaatattttctcactacagaccgggctgcagtttgaccctattctggtgcgcaatcgtcaggatctggcaaagcgcatggaaaaagaggattgggcgatcatgcccgccgcgaccctgaccccgcagccgcaggcttacgtcaccctcagcgagccgctcattaacgtggcctttgtgctggtcgcccgcggcagcgcgcccgacccgcatctgctgacgcgcccggcacggatcgccctgccggtggggccgatcgccgcccacgacctgaaagcgcgctttccgcaggttaactgggtggagacggataacgttggtgtcgccatgaagatggtggaggaaggcgaggtggatgccgccgtggcctcggagctttccgcccgctatatgatcgatcactactatccgcaagatcttcactacacccgcatcgatggactcccggtcgccgccattcggctggcgatcccacgcgatgaaccggtgctggccgccgtgctcaacaaagcgctgcaggccattccgccgcgggacattctgcagatgaccgagaagtggtcgaaaatctccagccagcaaatagagaactggagccagtacagccgccagttttaccagctgatcgccttcgcgctggtgctgatcgccatcagcctcggctggggactctccctgtgccgggaagtacgcaaacgcaaagactctcagcagcggctggaagaggagctggcgcagaaggaagccctctcctgcgcgctggagcgggaaaaagacaaagcgattcaagcgacaaaagccaagagtcgctttctggccagcatgagccacgagctgcgcacgccggtgagcgccatcgtcggctttctggaactgctggcgaaaccagagctgaacgtcggtcagcgtaaagaggcgatcgagctggcggggtcgacggcgcaaaccctgctaggacttatcggcaatattctcgatatcgacaagattgagtcgggaaaataccagatcaccccacagtggagcgatgtggcgcaggtggtgtcgcagcagtgccacaccttcggcgcgctggcgcagcagaaggggatcgcgctgcatagccatctccctctgcaggaggggatcgcgctgtgggtcgaccctcaggcgctgcggcaaattctcaataatctcatcggcaatgcgctgaagtttaccgccgagggcgcgattcagatctcctgccggctggcgcaggcggatgagacacagggagagctgaccctcatcgttagcgacagcggctgcgggatcagtgaagcagagcaggccaccctctttcatcgctatgcccaggcgcgccagggacgccagcagaccggctccgggctggggctggtcatttgccaggagctggttacgctgatgcagggccggctggagatggtcagccgtccgggcgtggggaccactttcaccatcacgctgccggtcagggtgagtcgctgcgcgattcacgcgccacaggcattgcccgtcaggccgcaggccctgcccgggctgtcgatattgatagcggacgaccaccccaccaaccggctgttgctcaaacgccagctcaacactatcggctacagtgtcgatgaagcctgcgacggtgaagaagcggagaataagctcgccggcaaacattacgatctgctgatcacggacctcaatatgccgaagaaagatggcctggcgctggcggcgtcgttacgccgacgctacccgagcctggtgatttggggagtgaccgccagcgcgctgccgcagtcgcgggaggcatgtctggccagcggcatgaatatgtgtctgtttaagccagtgtcggttcagacgctgagccatgagctcagccgcttagcggtgggccacgcatcacctaacgccgcccggcatctgaagctcagcgtgctgaccgaaaatacggggggagaccaggcgctgatggctgagatgctggagacgttccgcgatgcgtcggccacagatttacaggccgccggacaggctatcgcccggcatgaaccgcagacctttctgcgggcgctacaccgtctgcacggttcagcacaaatcctggggattactgcgctacaacaactgtgcgccccttttgaggctaagcggcctgattcgctgacgccggcaagctgtctggaggtggtacagcgcatcaccggcgtcatgcgcgagatcgatggcgaaatcgacgccctcatcggccgctag

SEQ ID NO: 222510 - DNA, 576 bp, Klebsiella pneumoniae
atgtttatgtttagccattacaccttaaatgcgtttagcccacgcgtcttcattcgatataaacggcatgccggcatgatggccgccctgctgtttatctgcggagcctgttgtctggcctggccattggtcgccggctggtatctcgccacggtgaccggcatgttgttcatgatctgcggcttctattcgctatacagcctgattgttttccgtcagcagcactggaaatcacgcctggtggcgctgatcttcgccatcgcctggatcgtgctcggcctgagttttgtcgtcaatcccctcaacggcatgagcagtctggcctttttattcggctttttatttgttctcggcggtatttcccgcatcgtcagcggatgtaaaacccgaaaacaaagcggcgctggctggaatatttttatcggtctgctggatttaattatcgcctgcctgtggctggcaatgaacccgcagcaaagctggttatttattaccgcatttatcggcgttgaaatgatatttagcgccatcggctttctggtcctgagaaataagatgaagcatgctcgggcttaa

SEQ ID NO: 222511 - DNA, 1926 bp, Klebsiella pneumoniae
atgactgttcagactcaggataccgggaaggcagtctctgccgtcatcgcccagtcatggcatcgctgcagcaagtttatgcagcgcgaaacctggcaaacgccgcaccaggcccagggcctgacttttgactctatctgtcggcgtaaaaccgcgctgctgaccatcggtcaggcggcgctggaggacgcctgggagtttatggacggtcgcccctgcgcgctgtttattcttgatgagaccgcctgcatcctgagccgctgcggcgaaccgcaaacgctggcgcagttggctgacctgggatttcgcgacggcagctactgcgcggagagcattatcggcacctgcgcgctgtcgctggccgcgatgcaggggcagccgatcaacaccgccggcgatcggcattttaagcaggccctgcagccatggagcttttgttcgacgccggtgttcgataaccacgggcgcctgttcggctctatctcgctttgctgtctggtggagcaccagtccagcgccgacctttccctgacgctggccatcgcccgcgaggtgggcaattccctgctcaccgacagcctgctggcggaatccaaccgccaccttaatcagatgtacggcctgctggagagtatggacgacggggtgatggcgtggaacgaacagggggtgctgcaatttctcaatgttcaggcggcgagactgctgcatcttgatgcccaggccagccaggggaaaaatatcgccgatctggtgacccttccggcgctgctgcgccgggccatcaaacacgcccgcggcctgaatcacgttgaagttacctttgaaagccagcaccagtttatcgacgcggtgatcaccttaaaaccgatcgtcgaggcgcaaggcaacagctttattctgctgctgcacccggtggagcagatgcggcagctgatgaccagccagctgggcaaagtcagccacacctttgagcagatgtcagccgacgatccggaaacccggcggctgatccactttggccgccaggcggcgcgcggcggcttcccggtgctgctgtgcggtgaagaaggggtggggaaagagctgctgagccaggccatccacaatgaaagcgagcgggcgggcgggccctacatcgccgtcaactgccagctgtatgccgacagcgtgctgggccaggactttatgggcagcgcccccactgacgatgaaaatggccgcctgagccgccttgagctggccaatggcggcaccctgtttctggaaaaaattgagtatctggcgccggagctgcagtcggccctgctgcaggtgattaagcagggagtgcttacccgcctcgacgcccgccgcctgatcccggtggatgtgaaggtgatcgccaccaccaccgtcgatctggccaacctggtggaacagaaccgctttagccgccagctgtactatgcgctgcactccttcgagattgtcatccccccgctgcgcgcccggcgcaacagcatcccgtcgctggtgcataaccggctgaagagcctggagaagcgtttctcttcgcggctgaaagtggacgatgacgcgctggcccagctggtggcctactcgtggccgggaaatgattttgagcttaacagcgtgatagagaacattgccatcagcagcgacaacggccacattcggctaagcaacctgccggaatatctcttttccgagcggccggggggcgatagcggctcatcgctgctgccggccagcctgacctttagcgccatcgaaaaagaggccatcattcacgctgcccgggtgaccagcgggcgggtgcaggagatgtcgcaactgctgaatattggccgcaccaccctgtggcgcaaaatgaagcagtacgatatcgacgccagccagttcaagcgcaagcatcaggcctag

SEQ ID NO: 222512 - DNA, 1650 bp, Klebsiella pneumoniae
atgtctcaattcttttttaaccagcgcgccagcctcgtcaacgacgtgattgagggaaccatcatcgccagtccgtggaataacctcgcccggctggagagcgacccggcgatccgggtggtggtccgtcgcgacctgaataaaaacaacgtggcggtgatctccggcggcggcgccggccacgaaccggcgcacgtcggctttattggtaaaggcatgctgaccgccgcagtctgtggcgatctgttcgcctcgccgagcgtcgacgcggtgcttaccgccattcaggcggtgaccggcgaggcgggctgcctgctgatcgtaaaaaactataccggcgaccggctgaactttggcctggcggcggagaaagcgcgccgtcttggctacaacgtggaaatgctgatcgttggcgacgacatttcgctgccggataataaacagccgcggggcatcgccggtacgctgttcgtccataaggtggcgggctattttgccgaacgcggctacaacctcgccaccgttctgcgcgaagcgcggtacgccgccaaccacaccgccagcatcggggtggcgctggccagctgccatctgccacaggaggccgacagcgcgccgcgccatcaggccggtcacgccgagctgggaatgggcatccacggcgagcctggcgcctccaccatcgccacgcaaaacagtgcggacatcatcaacctgatggtggaaaaactgaccgccgccctaccggaaaccggccgtctggcggtgatgctcaataacctcggcggcgtgtcggtggccgaaatggcgatcctgacccgcgaactggctaacacgccgctgcaggcgcgcgttgactggctgattggcccggcctcgctggtgacggccctggatatgaagggtttctcgctgagcgccatcgtgctggaagagagtattgagaaagcgctgctggcggatgtggaaaccgccggctggccacggccggtgcagccgcggacagttaacatcatgccctccactctcgccagcgcacgcgtcgactttaagccctctgccaacccgcaggtgggcgattacgtcgcgcaggtgaccagcaccctcgtcgggcttgaagatcatctcaacgcgctggatgccaaagtgggcgatggcgataccggctccaccttcgccgccggggcgcgtgagattgccgacctgctgcagcgccagcagctgccgctcaacgacctgcccacgctgtttgcgctgacgggcgaacgcctgacggtggtgatgggcggctccagcggggtattgatgtcgatcttcttcaccgctgccgggcagaagctggagcaaggcgccagcgtggccgaggcgctgaacgctggtctggagcagatgaaattttacggcggcgccgaggaaggcgaccggacaatgatcgatgctctgcagccggcgctgacggcgctgctggccgaaccggagaacctgcaggccgcttttgccgcggcgcaggccggcgcggatcgcacctgccagtcgagcaaagccggcgccggacgagcgtcctatctcaacagcgacagcctgctcggcaacatggacccaggcgcccacgcggtggcgatggtgtttaaggcgctggcggaacgataa

SEQ ID NO: 222513 - DNA, 777 bp, Klebsiella pneumoniae
atgatgacaaaaaccaaagcagacaagtacccgcagcgtgtccgcaatgagctgcgtttccgtgagctgacggtgctgcgcgtggagcgcgcaggcgcggccttccagcgcatcgtgctgggaggcgaggcgctggaaggtttcgtttcccgcggctttgacgaccacaccaagcttttcttcccggagccgggcgcggcgtttgcgccgccgcaggtgaccgaggaggggatcgactggggtgagggcgtgcggcctgctacccgcgactatacgccgctgtacgatgccgaacgccatgagctggcgtatgacttctttatccacgatggcggaattgccagccgctgggcgctggaggcaaaagtgggcgataagctggtgatcggcggtccgcgcggctcgctggtggtgccggaggattacgcctggcagttatatgtctgcgatgagtccggtatgccggcgctgcgtcgtcgcctgctgggattgcgtcagctggcggtgacgccgcaggtgacggccatcgtcactatcgctgatgcgtcatataaagattatttggcggatctcgacggctttaacatcgagtgggtggtgggccacaatccggcgttcgtcgccgagcgtctggcccaggtgaaggtgccggcggaggattatttcatctggctgaccggtgaaggcgcggtggtgaaatcgctgctggcgcgctttgaagatgagagcatcgatcagcagctggtgcgttcgcaggcgtactggcacagcaagtaa

SEQ ID NO: 222514 - DNA, 333 bp, Klebsiella pneumoniae
atggataccgtagcttacgctgattttgccaaactggagatgcgcgtcggcaagattgtcgaggtgaagcgccatgacaatgctgacaaactgtacattgcgcggattgatgtcggcggccgcacgctgcagacggtcaccagcctggtgccctactacagcgaagaggagctgctggggaaaacggtggtggtgctgtgtaatctggcgaaagccaaaatgcgtggtgaaacttctgagtgcatgctgttatgcgcagaaaccgaagacgaaagcgaaagcgtgctgttgacgccggagcgcgtcatgccggcaggcgtgcgggtggtataa

SEQ ID NO: 222515 - DNA, 984 bp, Klebsiella pneumoniae
atggcaacgctaaaagacattgcgaccgaagcgggtgtttcgctggcgacggtttcccgggtgttaaacgacgatcccaccctgaatgtaaaagaagagaccaagcatcgtattctggagattgcggagaagctggagtataaaagcagcagcgcgcgtaaaactcaggtcctacctgtcggccatcatcatatcctggcgctgtatagctaccagcaagagctggaaattaacgacccttactatctcgccattcgccacggtattgaaacccaatgcgaaaagctcgccatcgagctcaccaactgctatctcaataacaccctgcccgagctgaaaaaggtcaccggcgtattgattattggccagccgacgcgcgagctgcgcgagaccgccagcgcgctgaccgacaatatttgctttattgatttccacgaagccggtagcccgtacgatgcggtggatatcgacctggtacgtatcgctaaagaggtggtcgacttctttatccagcaaggcgcgtcgcgtattggatttatcggcggccaggaccagcccggcaaggccgatattcgtgaagtggcgtttgtggagtacggccagttgaagggcgtggtttcagccgatgatatctggcgcggcggtttttccagctcgtccggttatgagctggcgaagcagatgctggcgcaagcggagtttccgcgggcgctgtttgtcgcctcggactccatcgccatcggcgtgctgcgcgccattcacgaacgcgggctggcgatcccggaagatatttcgctgattagcgtcaacgatatccccaccgcgcgctttaccttcccgccgctgtcgacggtgcggatccactccgaaatgatgggcagccagggggtgaacctgctgatcgagaaggcccgcgatggccgcgccctgccgcttaaagtttttgttcccagcgtgttgaagctgcgcggaaccacccgttaa

SEQ ID NO: 222516 - DNA, 3093 bp, Klebsiella pneumoniae
atgaatcgctgggaaaaccttcaactcactcatgaaaacaggctgccgccgcgggcgtatttcttctcttacgactcactggcccaggcgcggaccttcgcccgcgaaaccagcagccgcttcctgtccctcagcgggcagtggaacttccgctttttcaccaacccgctgctggtaccggagagctttacctcgtgctttcagaacgagtgggggccgattaccgtaccgggtatgtggcagatggagggccacggtcagctgcagtacaccgacgaaggtttccccttccccatcgacgtaccgtatgttccgaccgataacccgaccggcgcctaccagcgcctgttcaccctcggcgacggctggcagggcaaacaaaccatcatcaaattcgatggcgtcgaaacctatttcgaagtctacgttaacggccagtacatcggctttagcaaaggcagccgcctgaccgccgagttcgatattagcgcggcggtgaaaaccggcgacaacctgctgtgcgtgcgcgtgatgcagtgggcggactccacctatattgaagatcaggacatgtggtggtcggcgggcattttccgcgacgtctatctggtggggaaaaatccgctgcacgtgcaggatttcaccgtgcgcaccgattttaacgatgactacatcgacgcgaccctctcctgccagctgacgctggaaaacctggctccgcagacggcggcggcgacgctggaatataccctgttcgacggcgaaaaggcgctttattcgggcaacgtcggtcaactgcaggtcagtcagcagctgaacaccggcttcacgattgatgtgagcgcgccgcagcagtggtcggcggaatgcccgtatctctatcatctggtgctgacgttaaagaacgccgccggcgaggtgctggaaatcatcccgcagcgcgtcggtttccgcgatatcaaagtgcgtgacggcctgttctatatcaataaccgctacgtgatgctgcacggcgtaaaccgccacgataacgatcatctgaaaggccgcgcggtcggcatggatcgcgtggaaaaagatctgctgctgatgaaacagcacaacatcaactcggttcgcaccgcccactacccgaacgacccgcgtttctatgaaatgtgcgatatctacggactgttcgtgatggcggaaaccgacgtggagtcccacggtttcgccaacgtcggcaacctcagcgccatcactgacgacccggcctgggaacacatctacgttgagcgcatcgtgcgccacgtccacgcgcagaaaaaccatccgtcgatcgtcatctggtcgctgggtaacgaatccggttatggctgcaacatccgcgccatgtaccacgccactaaagcgctggatgatacccggctggtgcactacgaagaggatcgcgacgccgaggtggtggatatcatctccaccatgtacacccgcgtgccgctgatgaacgaatttggcgaacatccgcatgaaaaaccacgcattatctgtgagtacgcccatgcgatgggcaacggtcccggcggattaaccgaataccagaacgtcttctaccagcacgactgcatccagggccactacgtgtgggaatggtgcgatcacggtattcaggccaccgacgaaaacggcgcggtgtggtacaaattcggcggcgattatggcgactacccgaacaactacaacttctgcctcgatggtctgattttctccgaccagacgccggggccgggcctgcgcgaatacaaacaggtcatcgccccggtgaaagtacaggcgcgggatatctgccgcggcgaactgcgagtggaaaacaaactgtggttctccactctcgatgactacaccctgcgcgttgaagtgcgcgccgaaggcgaaacgctctccagtcagctgctgaaagtgaaagacctggcgccgaatagcggccgcgacctgcaaatcgccctgccgcagctcgacgagcgtgaagctatcgtcaacatcatggtgaccaaagattcgcgtaccccgtatagcgaagctaatcacgatatcgccgtctatcagttcccgcttaaagcgcgaaccgccgcgcgaaccccgctgttaaacgccagcgccacgccgctgcagattgtcgatgaacgcctcagctacaccatctgcggccataacttccgcgtggtgttcagtaaggtcagcggcaaactgagcgaatggcaggtcaacggcgtcgaccaggtaacccgcgagccgaagatcaatttcttcaagcccatgattgataaccataaacaggaatacgaaggactgtggcagccggcccacctgcagataatgcaggaacatctgcgcgaattcagcgccgaaatagagggcgaaacggtggtgatcaccacccgcagcgtaattgcgccgccggtgttcgacttcggtatgcgttgtacctatcgctggcagattaccccacagggccacatcaacgttgagctggccggcgagcgctacggcgactatccgcacatcgtcccgtgcatcggctttatgctgggcattaacggtgagttcgaccaggtgaactactatggccgcggaccgggcgagaactacgccgacagccagcaaagcaacatcattgatatctggcataccaccgtcgacgatatgtttgtcaattatccgttcccgcagaacaacggcaaccgtcagcacgtgcgctgggcatcgttcagcgaccgccacggcagcggtctgctggtcgtaccgcgcaatccgctcaatatcagcgcctggcattatacggcggaaaacctgcacgccgcccagcactgcaacgaactacagcgcagcgatgacatcactctgaatatcgatgcgcaactgctcggcctcggctccaactcctggggcagcgaagtgctggatagctggcgcgtctggctcaacaccttcaactatggctttacgctgctgccgctggagggcggatgcggcacctcgcaggtactggcgaaccatagcttcggcgccggtttcttttcccccgttgcacacagcgaggctgaacaatga

SEQ ID NO: 222517 - DNA, 450 bp, Klebsiella pneumoniae
atgagaattctcgataatttagaacagtttaagcaagtttatcatagcggccgcaaatggcagcgctgcgtggaagccatcaataacatcgacaacatccgcccgggcgtggcgcattccattggcgattcgctctcctatcgagtggaaaccgatagtacgaccgacgcgctctttgtcggcaaccgccgctactttgaggtgcactattacctgcaggggcagcagaaaatcgagtttgccgccaaagaaaatctgcaaactgtcgcctgctaccgcgacgaaaccgatcgcgaatacctgaaagggatcggtgaaacgatgaaggttcacgaagggcagatggtgatttgcgatatcgacgaagcctaccgctttatctgcgatgcgccggtaaaaaaagtggtgctgcgagtcacggttgaagacggctacttcctcaataagtaa

SEQ ID NO: 222518 - DNA, 1434 bp, Klebsiella pneumoniae
atgtccgaatctgtacgtgccaaaatcggcaagttcgcgctgttatcgatggcctttaccgccgtctttaacgtgcgaaatatcgtcaataacaacattgagttagggctcagttccgcgcctatcttcttattcgccactatcgtttactttatcccgttcgtgtttatcatcgccgaattcgtctcggccaataaacactccgaatccgggatgtacgcgtggctgaagcagccgctgggcacacgcgccgcctatcttggttccttcctctactggtttgtgaacctgttctttttcctctcgctgttgccgaacgtggtggcctacgcctcatacgcgatcaccggttacgcgatccccttctcgccgatggtgacctcgcttatctccatcgtgctgttcgccatggctacccatatatccaccaaaggggcgacctggctgggtaaaatttccgaatgcgtggcctacggcgtgttcgctttgttcgcgatttacgtcgtcggcgcgctgaccgcgctgggttccggtcacgtcccggcgcagccgattaccctggcggcgatggaaccgaccatcaactgggcgacgctcggtattatgtgctggattttccaggccgcgggcggcgcggaaaccgttgccgcctacctcaacgacaccaagggcgggcagaaatcctttattaaagtcatcatcaccgccggggtgctgattggcggtatgtatgccttaggttcgctgctggttaacgtctttgtcgcccgagagaacctgacctacgccggcggaatggtggaaatctttaccggtctcggcgcctacttccacatttctgaagcgctgatgggccgcttcgtcggcatcattctgtttatcgccatcttcggcagcatgatgatgtggaccgccgcaccggtcaaaatccacttctcggaaatcccgaaaggtatctacggccagaaaaccaccgagttgaacgctcacggcgtgccggtacgcgccgcctggtggcagttcctgttcgtcttcctgatgctgatagttaacggcttcggctccgccagcgtgcagcagatgatgaacaccgccattaatctcaccgccggtaccgccatgctgccgccgctgttcatcatggccgcctacttcgtcttccgctggaaacacgatgacacgccgcgcgacttccgtatgggctcgaggaaagtgggcatgagcgtggtatcgatgctgatagtgattttcgtggttagcatgactgcttcggccttcccgccaggcgtcgatctggttaacgctttctttatcaacgtctttatgaccgcggtcttctccggcctggcgtggtggtggatcacccgctttgaaaaaaagcagcaacgtctgcgcgccgcggcgccggttaacgctgccgccgccggtaaataa

SEQ ID NO: 222519 - DNA, 1434 bp, Klebsiella pneumoniae
atgtctgatactaaacgtaataccatcggcaagttcggcctgttatcgctgacctttgccgccgtttacagtttcaataacgtcatcaacaacaatatcgaactggggctggcgtcggcgccgatgttcttcctcgctaccctgttctacttcattccgttttgcctgattatcgccgagttcgtgtcgctgaataaaaactccgaggccggggtttacgcctgggtgaagagttcgctcggcggccgttgggcgtttatcaccgcctatacctactggttcgtaaacctgtttttcttcacctcgctgctgccgcgcgtgatcgcctatgcctcttacgccttcctcggctacgaatacattctgacgcctttcgccaccaccgtgttgagcatggcgctgttcgctttctccacctggatctccaccaacggcgcgaaaatgctggggcctagcacctccgtcacctcatcgctgatgctgctgctgacgctctcttatattctgctggccggttccgcactggtgggcggcgtgcagccagcggatccgatcaccgtcgaagcgatgatccctaacttcaactgggcgttcctcggtattaccacgtggatctttatggcggcgggcggcgcggaatcggtggcggtgtacgtcaacgatgtgaaaggcggctcgaaatccttcgttaaagtgatcatcctcgccgggatcttcatcggcgtgctgtactcgatctcctccgtgctgatcaacgtcttcgtcagcagcaaagagctgaaatttaccggcggatcggtgcaggtgttccacggcctggcggcttactttggcctgccggaaatgctgatgaaccgcttcgtcggcctcgtttcgtttaccgcgatgtttggctcgctactgatgtggaccgccactccggttaaaattttcttctcggaaattccctccggcatctttggtaaaaaaaccgtcgagctcaatgagaacggtgtcccggcgcgcgcggcctggatccagtatctgatcgttattccactgatgatcatcccgacgctgggatccaacaccgtgcaggatctgatgaacaccatcatcaacatgaccgccgccgcttccatgctgccgccgctgttcatcatgctggcctacctcaacctgcgccgcaagctcgaccatctgccgcgcgatttccgcatgggctcgcgtaccaccggcatcgtggtggtatccatgctaattgtgattttcgccatcggtttcgtcgcctcaaccttcccaaccggcggcaacatcctgaccattattttctacaacgttggcgggatcgtgattttccttggcttcgcgtggtggaaatacagcagatacgtcaaaggattaacccaggaacaacaacaaatagaagcggctccggcttcccatacctcttaa

SEQ ID NO: 222520 - DNA, 1059 bp, Klebsiella pneumoniae
atgaaaactaactcttacttatacggggcactcgttgccctggctttttgcgcccctgcggcggccgctgagaccgtccatccggccgagcacgacgataccaaaacgccggaattaaccaccacctcctatcgcttttacggcgagttgggggttggcggatacatggatttagaaggcgaggacaaacatagatacagcgatggcacctatatcgagggcgggctggaggtcaaaaacggccactggttcgggctgatttacggcgaagcctggacggtacaggccgatagccagggcaatgcctggacgcccggccacagctggggcggcgtggaaggcggccttaaccgcctctatggcggctataaaaccgataacaacaccgagatcatgctcagcctgcgccaggattcgtcgctggacgacctgcagtggtggggcgactttacccccgatctgggttatgtgatccccaatacccgcgacatcatgtacgcgctgaaagtacaaaaccgcagcggcgatttccgctatagcgtcaccgccacgccggccggtcatcacgatgaaagcaaggcctggctgcacttcggcaaatatgatcgctatgacgataagtacacctacccggcaatggtcaacggctacgttcagtacgacatcgtcaaagatgtcacctggatgaacggccttgaagtgaccgacggcaccggacagctattcctgaccggcgttctgtcgcccaatctggccttccgcgcctggcaccataccggccgcgccaaagggctggatgttcccggaagcgaaaccggctttatggccagcgccatgtatgaagcattaagcggactctacttctccaccgcatacagctacgccaaacaccgcccggaccacgccgctgatgaaaccaccgcgtttatgcaatttggcatctggtacgaatacggcggcgggcgtttcgccaccgccgccgacagccgtttctataccagcaacgccagcggcgacccgagcgacaaaattttcctgatgcaatacttctactggtaa

SEQ ID NO: 222521 - DNA, 2352 bp, Klebsiella pneumoniae
atgaacctcaccactacgctgacgccgctggcctgcgcgctgatgctgagtttttccgcccacgccgtcaccgcgcaggcgtttaaaaacgtcatcgaccgcagcggcccgccgcagtatatgcaggatttcgacgccgatgaccaccagcgcttcaaccccttcttcgacctcggggcgtggcacggccacctgctgcccgacggcccggcgaccatgggcggcttccccggcccggcgctgctgaccgaagagtacctcaactttatggccaccaacttcgatcgcctgacggtgtatcagaacggcaaaaaggtcgatttcaccctgcaggcctggagcctgcccggcgcgctgaaacaaacgctgaccgcccccggcgtgaaggtggagatgacgctgcgcttcgccagcgcccacacttcactgctggagaccaaaatcaccagcaacactccgctgaagctggtgtgggatggcgaactgctggaaaaactggccgccaaagagggtaaagcgctatcggacaaaaccattgatgaagccttcccggactatcagcgccgtctgagcgccacgcccgacggcctgacggtcagctttggcaaggttcgcgccgcctccgacctgatgacctccggcgaatcgcagtatcagatccaccgttcgctggtaaccgagacccgtatcgacggccaccgctttaccagcagcgcggagatccgcggctccaccatcctgtacactacctattcgcacctacttaccgcggagcaagcgcgccaggaaaaagcgcaaatccgcgatattctggcgcgcccggcgtattatctcgccgcctccgaacagcgctgggacggctatctgcaaaaagggctcattaatccggacgccaccgccgaacagactcgcgtagcggtgaaagccattgagacgctcaacggcaactggcgcgcgccgggcggcgcggtgctttaccacaccgtcaccccatccgtgaccggccgctggttctccggcaaccagacctggccgtgggatacctggaagcaagcctacgccatggcccacttcaacccggatatcgccaaagagaatatccgcgccgtcttctcctggcagattaaagccaatgataaggtgcgtccgcaggatgccggatttgtgcccgatctgattgcctggaacctgagccccgagcgcggcggcgacggcggcaactggaacgaacgcaacactaagccaagcctcgcggcctggtcggtgatggaggtgtataacgtcaccaaagataaagcgtggctggaagagatgtatccgaagctggtggcctatcacgactggtggctgcgcaatcgcgaccataacggtaacggcgtgccggaatatggcgcgacccgcgataaggcgcacaacaccgccgacggcgccatgctgttcacggtgaaaaaagggcaaaccgagcagacgctttccggcctcagcgcctacgagcaggtgacggccaaaggcgattacgacagcctcgaaatcccggcgcaggtagcggcatcgtgggaatccgggcgagacgatgcggcggtatttggttttatcgataaagaacagctggataaatatgtcgccaacggcggcaaacgcagcgactggacggtgaaattcgccgaaaaccgcgaccgcgacggcaacctgctggggtattcgctgcttcaggagtcggtcgatcaggccagctatatgtacagcgataaccactatctggcgcagatggcgaccgttcttggcaaagcggaagaggcaaagcgctatcaggcgctggcggcgaagctggcggattatatcaatacctgcatgtttgacccgcagacccgcttctattacgacattcgtatcgaggaacaaccgctagccaacggctgcgccggtaaaccgatcgtcgagcgcggcaaagggccggaaggctggtcgccgctgtttaacggcgcggcgacgcagcaacatgctgacgatgtgatttcggtgatgctcgacccgaaagagttcaacacctttgtgccgctgggcaccgccgcactgaccaacccggcctttggcgccgatatttactggcgtggacgggtgtgggtggatcagttctggttcggcctgaagggaatggagcgctacggtcatcgcgatgaggcgctgaagctggcggacgccttcttccagcacgccaaaggcttaaccgccgatggcccgattcaggagaactacaatccgctgactggcgcccagcagggggcgcccaacttctcgtggagcgcggcgcatttatatatgttgtataacgagtttttccataaggagtaa

SEQ ID NO: 222522 - DNA, 297 bp, Klebsiella pneumoniae
atgaacgtgacgctggtggagatcaatatcaaaccggagcgggtcgacgagtttctcgaggtatttcgcgccaaccacgaaggcgcgctgcgggagccgggcaacctgcgctttgatgtcctgcaggatccggaagtgaagacccgcttttttatctacgaagcctataaagacgatgaggcggtgctggcgcacaagaaaaccccgcactatttagcctgcgtcgaaaagctggaggagatgatgtcgcagccgcggcagaagcgcagctttatcggcctgctgccgcaggtgtga

SEQ ID NO: 222523 - DNA, 1014 bp, Klebsiella pneumoniae
atgaaaacaaaacgtatcctgcaggtcagcacgctggcgctggcgatgagcgtggcaaccgcgcaagcggcggaccgcatcgcctttattcctaagctggtcggcgtcggcttctttaccagcggcggcaacggcgcgaaagaggcggggaaagcgctgggcgtggatgtcacctatgacggcccaaccgagcccagcgtctccggccaggtgcagcttatcaacaacttcgtcaaccagggctacaacgcgattatcgtctcagccgtctcaccggacggcctgtgtccggcgctgaagcgggcgatgcagcgcggggtgaaagtcctgacctgggattccgataccaagccggagtgccgcagcatctatatcaatcagggcacgccgcagcagctcggcggcctgctggtggagatggcgaaaaagcaggtgacgaagcccgctgccaaagtggcgtttttctactccagcccgacggtgaccgaccagaaccagtgggtgaaggaagccaaagccaaaatcgaaaaagaacatccgcagtggcaaatcgtcaccacccagtttggctataacgatgccaccaaatcgctgcaaactgccgaggggatcttaaaagcgtatccggatctcgacgccattatcgcgccggatgccaatgccctgccggcggcggcgcaggcggcggagaacctcaagcgtcagggcgtggcgatcgtcggctttagtacccccaatgtgatgcgcccctacgtggagcgcggcacggtgaaagcctttggcctgtgggatgtggttcagcagggcaaaattgcggttaacgtcgccgatcgattactgaaaaagggcgatcttaacgtcggggatagcgttgaggtgaaagatatcggctcgctgaaggtcgaaccgaatagcgtgcagggctaccagtatgaggcgaagggcaacggtatcgtgctgctgccggagcgcgtggtgttcagcaaagagaacatcaacaactacgacttctga

SEQ ID NO: 222524 - DNA, 1035 bp, Klebsiella pneumoniae
atgaaaacgttattcaagaatcgcgaactgagcgccttttttgccatcgtggcgctgtttgccgtgctggtggcgctcaatccggcctatttcagcctgcagacgctggcgatgattttcgccagctcacaaatcctgtgcctgctggcgctgggggcgacgctggtgatgctgacccgcaatatcgacgtgtcggtgggctccaccgttggcctgagcgccatcgccgttggggtagcgctgaacaacggctacgggctggcgacggcgatcgccttcgcgctggcgataggcgcgctggccggggcttttaacggcctgctggtggtggggctgcgcattccggcgatcgtcgcgacgctcggcacgctggggttgtatcgcggggtgatgctgctgtggaccggagggaaatggatcgaaggcttgcccgacagcctgaaatcgctctcggagcccgcgtttatcggcgtgtcgccgctgggctggctggtgctggcgctgctgctggccggcggctggctgctgtcgcgcaccgcctctggacgcgatttctatgccgttggcgataacctcgccgctgcccgccagctgggcgtggcggtcaatcgcacacggatgctggcttttaccctcaacggtatgctggcggcctgcgccgggatcgtcttcgccgcgcagattggctttgtgcccaatcagaccggcagcggcctggagatgaaagccatcgccgcctgcgtgctgggcggaatatcgctgctcggcggcaccggtacgctgctcggcgcgtttctcggcgcctttttcctcacccaaatcgacaccgtgctggtgctgttccgccttcctgcctggtggaatgactttatcgccggcctggtgctgctcggggtgctggtgcttgatggacgcctgcgccaggcgctggcccgccatcagcgggcgctgaagtacagtcgtttccagcccggcaacaaagggggcaaacaggttgcccgctttcccgaacgcaaaagcaaagaggtggcttaa

SEQ ID NO: 222525 - DNA, 1131 bp, Klebsiella pneumoniae
atgagccaggcagagttaaacggtgagttattcacattagagcggttcccacctaacgctgaagaagaagcgcttcaggcgtgggaagcggcggatgaatatctgctgcaacaggtgaatgacgtcgacggcctgacgctcatcttcaacgacggcttcggcgcgctcgcctgcgcgctggcggagcgcaaccccgtcagcatcaacgattcctttatttccgagctggcgacccgccacaacctgcggatgaacggcattgatgaagagagcgtgcgctttcaggatagcctgagcccgctgccggccgcgccggcgctggtgctgattaaggtgccaaagcagctggcgctgctggaacagcagctgcgcgccctgcgccaagtggtgacgccggaaacccgtattatcgccgcggcgaaagcccgcgatgtgcataactcgacgctggcgctgtttgaaaaaattctcggtaccaccaccacctcgctggcatggaaaaaagcgcgtctgatccactgcgttttcaccgcccctgagctggctgatgcgccgcaaacctacagctggaagctggacggcacgccgtggaccatccacaaccatgccaacgtttttgcccgcagcggtctggatatcggcgcgcgcttcttcctgcagcatttaccgtctaatttagaaggcgagatcgccgatctcggctgcggcaacggggtgattggcctgcaggcgctggcgcagaacccgaacgcgcgggtcatgttcaccgatgagtcgcacatggcggtggcttccagccggttgaacgtcgagcacaacctgccggacgatatcgaccgctgtgaatttatggtcaacaactcgctctccggcattgagccggaccgctttacggcgatcctgtgcaatccgccgttccatcagcagcacgccattaccgaccatattgcctggcagatgtttaacgacgcccgccgcagcctgaaatacggcggcgagctgtacgtcgtcggcaaccgccacctcgattacttccgtaagctgaagcgcgcgtttggtaattgcacgacgattgcgacgaacaataagttcgtcattttgaaagcgaccaaggtgcgtaagcagcgctga

SEQ ID NO: 222526 - DNA, 168 bp, Klebsiella pneumoniae
gtgagtaagaagaaaaacagaaaaaaggcgtctccgacgccgctagccccgacgccgccggaaaccgtcggagtcgtcagctttggttatgatgagatgcttagcgaactggaagccattgttgccgaggcggagattcgcctgcgggatgaagaaagtctcgcctga

SEQ ID NO: 222527 - DNA, 1572 bp, Klebsiella pneumoniae
atggctgatatttcaattcgacaacaatcgcctaccgcgttttatataaaagttgacccgacagataatgtggcgattattgtcaacgatcggggattaaccgccggaacgcgtttcccggacggcctgacgctcatcgagcacattccacagggtcataaagtcgccctggtggatatcccagcccacggtgaaattatccgttacggagaagtcattggcttggcaatgcgcgacatccccaaaggaagctggattgacgagtcgttagtggcgttgcccaccgccccgccgttgaacaccctgccgctggccaccaaagtgcccgccccgctgccgccgctggaaggctataccttcgaaggctaccgcaatgccgacggcagcgtgggcaccaaaaatctgctgggtatcaccaccagcgtgcactgcgttgcgggcgtggtcgattacgtggtgaaactcattgaacgcgacctgctgccgaaatatcccaacgtcgacggcgtggtgggtctgaatcacctctatggctgcggcgtagcgattaatgcgccagcggcggtggtgccgatacgcaccatccacaatatcgcccttaacccgaacttcggcggcgaagtgatggtcattggccttggctgtgaaaagctgcagcccgagcggctgctgcaggggacggaagatgtcaaaagcatcccggtggacagcgccagtatcgtcagcctgcaggatgaaaagcacgtgggctttaaatcgatggtcgatgacattctgcaggtcgccgagcgccatctggcgaaactcaaccagcgtcagcgggaaacctgcccggcttctgaactggtggtgggtatgcagtgcggcggcagcgacgctttttccggcgtgaccgccaacccggcggtgggttacgcttccgatctgctggtgcgctgcggcgcgacggtgatgttctcagaggtgaccgaagtccgcgacgctatccatctgctgacgccgcgggcgatcaacgaagaggtgggtaaacgcctgctggaagagatggcctggtacgataactatctcgatatgggcaaaaccgaccgcagcgccaacccctcacccggtaacaagaaaggcggcctggccaacgtggtggaaaaagcgctggggtcgattgccaaatcaggaaaaagcgccatcgttgaggtgctttcccccgggcagcgcccgaccaaacgtggcctgatttacgccgccacccccgccagcgattttgtctgcggcacccagcaggtggcctctggcatcacggtgcaggtgttcaccaccggccgcggcacgccttacggactgatggcggtaccggtgataaaaatggcgactcgcaccgagctggctaaccgctggtatgacttaatggacattaacgccggcaccatcgccaccggcgaagagacgattgaggaggtggggctgaagctgttcgaatttattctcgacgtcgccagcggacgcaagaaaaccttctccgatcagtggggcttgcataaccaactggcggtattcaacccggcgccggtgacctga

SEQ ID NO: 222528 - DNA, 4461 bp, Klebsiella pneumoniae
atgttgtacgacaaatcccttgagagggataactgtggtttcggcctgatcgcccacatagaaggcgaacctagccacaaggtagtgcgaaccgcgatacacgcactggcccgcatgcagcaccgtggcgcaatccttgccgatggtaaaaccggcgacggttgcggtctgctgctgcaaaaacccgatcgtttcttccgcatcgttgccgaagagcgcggctggcgtttagccaaaaactacgccgttgggatgctgttcctgaataaagatcctgaactggcgaaagcggcgcgccgcatcgttgaagaagaacttcagcttgagaccctgtcgatcgtcggctggcgcgatgtgccgaccaacgaaggcgtgctcggtgaaatcgccctctcctcgctgccccgtattgagcaaatctttgttaacgccccggccggctggcgcccgcgcgatatggagcgccgtctgtttattgcgcgtcgtcgcattgaaaaacgcctgcaggaagacaaagatttctacgtttgtagcttgtccaacctggtcaacatctataaaggtctgtgtatgccggcggatttgccgcgcttctacctggacctcgcagacctgcgcctggagtcggctatctgcctgttccaccagcgcttctccaccaacaccgtaccacgctggccgctggcacagccgttccgctacctggcgcacaacggtgaaatcaacaccatcaccggcaaccgccagtgggctcgcgcccgtacctataagttccagaccccgctgatcccggacctgcacgacgccgcgccgttcgttaacgaaaccggctccgactccagttcaatggacaacatgctggagctgctgctggccggcgggatggacattgtgcgcgccatgcgtctgttggtgccgccagcctggcagaacaacccggatatggatccggagctgcgttcattcttcgactttaactccatgcatatggagccatgggacggcccggcgggcatcgtcatgtccgacggtcgctacgcggcctgtaacctcgaccgtaatggcctgcgcccggcgcgctacgtcattaccaaagataagctcatcacctgcgcctctgaagtcggcatctgggactaccagccggacgaagtggttgaaaaaggccgcgtgggcccgggcgagctgatggttatcgatacccgtgccggacgcattctgcactcggcggaaaccgatgacgatctgaagagccgccatccgtataaagagtggatggagaaaaacgttcgtcgcctggtgccgtttgaagatctgccggacgaagaggttggcagccgccagctggacgacgatctgctggccagctaccagaaacagtttaactacagcgcggaagagctggactcggttctgcgcgtgctcggcgaaaatggccaggaggcggtcggctctatgggcgatgacacgccgtttgccgtcctttccagccagccgcgcattatctacgattacttccgtcagcagttcgcccaggtgacgaacccgcctatcgatccgctgcgtgaagcgcacgtcatgtcgctggccaccagtatcggtcgcgaaatgaacgtcttctgcgaagcggaaggccaggcgcatcgtctgagcttcaaatcgccgatcctgctgtattccgatttcaaacagctgacgacgatggaagaagagcactatcgtgccgacgtcctcgacatcaccttcaacccggcagaggcttccctcagcgagacggtgaaggccctgtgcgacaaagcggagcagatggtacgcgatggtaccgtgctgctggtcctctccgaccgtaacatcgccaaagaccgcctgccggtgccggcgccgatggccgttggcgcgatccagacccgtctggtcgataaaagtctgcgctgcgatgccaacatcatcgttgaaaccgccagcgcccgcgatccgcaccacttcgccgtgctgctgggcttcggcgcgacagctatctatccgtacctcgcctatgaaacgctggcgaagctggtcgacagcaaagccatcgataaaccgtaccgtgcggtgatgctgaactatcgcaacggtatcaacaaaggtctgtataagatcatgtccaagatggggatctcgaccatcgcctcctaccgctgctcgaagctgttcgaagcggtcggtctgcatcgcgatgtctccgatctctgcttccagggcgtggtcagccgcatcggcggcgccggcttcgacgatttccagcaggatctgctgaatctgtcgaaacgcgcctggctggcgcgcaagccgctggctcagggcggtctgctgaagtacgttcacggcggcgaatatcacgcctacaacccggacgtggtgcgcaccctgcagcaggctgtgcagagcggtgagtacagcgattatcaacaatacgcgaagctggttaacgaacgcccggcggccacgctgcgcgatctgctggcgctcaacccgggcgaagatgccatcagcatcgacgacgtggagccagcgaaggagctgttcaaacgcttcgataccgcagcgatgtcgatcggcgccctgagtccggaagcgcacgaatcgctggcggaagcgatgaacagcatcggcggcttctccaactccggtgaaggcggtgaagacccggcgcgctacggcaccaacaaagtgtcgcgcatcaagcaggtggcatccggccgcttcggcgtcaccccagcctatctggtcaatgccgacgttatccagatcaaagtcgcccagggcgcgaagccgggtgaaggcggtcagctgccgggtgataaagtcaccccgtacatcgctaaactacgctattcggtaccgggcgtgacgctgatctccccgccgccacaccacgatatctactctatcgaggatctggcgcagctgattttcgacctcaagcaggttaacccgaaagcgatgatctcggtcaagctggtttcggaaccgggcgtgggcaccatcgccaccggcgtagccaaggcttatgccgatctgatcaccatcgccggctacgacggcggcaccggggcaagcccgctcacttcagtgaaatatgccggctgtccgtgggagcttggtctggtggaaacccagcaggcgctggtcgctaacggtctgcgtcacaagatccgtctgcaggtggatggcggcctgaaaaccggcctcgatatcatcaaagcggcgatccttggcgcggaaagcttcggcttcggcaccggcccgatggtggcgctgggctgtaaatacctgcgtatttgtcacctgaacaactgcgcgaccggcgtggcgacccaggatgacaaactgcgtaagaaccactatcacggtctgccgttcaaagtgaccaactactttgaatttatcgcccgtgaaacccgcgagctgatggcccagctgggcgtcaagcgactggtggatctgattggccgcaccgatctgctcaaagagctggatgggttcaccgccaagcagcagaaactggatctgggtaaactgctggagaccgcagagccgcatcctggcaaagcgctgtactgcaccgaaaataacccgccgttcgataacggcgtgctcaacgcccagctgctgcagcaggcgaaaccgtacgtggatgaaaagcagagcaaaacgttctggttcgatatccgcaataccgaccgctccgtgggggcctcgctgtccgggtatatcgcccagacccatggcgaccagggactggcgggcgacccgatcgtcgctcactttagcggcaccgcgggccagagcttcggcgtgtggaacgccggcggcgtggaactgcatctgacgggcgacgccaacgactatgtcggcaaaggcatggcgggcggtctgctggccattcgtcctccggtgggctccgctttccgcagtcacgaagccagcattatcggcaacacctgcctgtacggcgcgaccggtggtcgtctgtacgccgcaggccgcgcaggtgagcgtttcgcggtgcgtaactccggcgccattaccgtggtggaaggcatcggcgacaacggctgtgaatatatgaccggcggcatcgtctgcgtgctcggtaaaaccggcgtcaactttggcgcagggatgaccggcggctttgcctatgtcctggatgaagatggcgacttccgcaagcgcgtgaatccggagctggtggaagtgctggacgttgactctctggccatccatgaagagcacctgcgcggtttaatcaccgagcacgtacagcttaccggttcgcaacgcggcgaagagatcctcgccaactggccggccttctccgcgaagtttgcgctggttaaaccgaagtccagcgatgttaaagcactgttgggtcaccgtagtcgttccgcagctgagctgcgggtgcaggcgcagtaa

SEQ ID NO: 222529 - DNA, 1419 bp, Klebsiella pneumoniae
atgagtcagaacgtttatcaatttatcgacctgcagcgcgttgatccgccaaagaaaccgctgaagatccgtaaaattgaatttgtggaaatttacgagccgttttcagaaggccaggccaaggcgcaggcagatcgctgcctgtcctgcggcaacccgtactgcgaatggaagtgcccggtgcataactacatcccgaactggctgaagctggccaacgagggacgtatttttgaagcggctgagctgtcgcaccagaccaacaccctgccggaagtctgcgggcgcgtctgcccgcaggaccgcctgtgtgaaggctcctgtacgctgaacgatgagttcggcgcggtgaccatcggcaacatcgaacgctatatcaacgataaagcattcgagatgggctggcgtccggatctctccggcgtgaaaccgaccggtaaaaccgtcgctatcatcggcgctggcccggcgggcctcgcctgtgccgacgtcctgacccgtaacggcgtcaaggcggtggtgtttgaccgccatccggaaatcggcggcctgctgaccttcggtatcccggcgttcaagctggaaaaagaggtgatgacccgccgccgggagatcttcaccggcatgggcattgagttcaaactcaataccgaagtgggccgtgacgtgcagcttgacgacctgctgaaagagtacgatgcggtgttcctcggcgttggcacctatcagtcaatgcgcggcgggctggacaacgaagacgcccagggcgtctacgacgcgctgccgttcctgatcgccaataccaagcagatcatgggctttggcgaaaccgccgatgagccctacgtcagcatggaaggcaaacgcgtggtcgtgctcggcggtggcgacaccgcgatggactgcgtacgcacctccgtccgtcagaatgcggctcacgtgatctgcgcctatcgtcgtgacgaagagaacatgccgggttcaaaacgcgaagtgaaaaacgcgcgtgaagaaggcgtggagttccagttcaacgtccagccgctgggtgtggaagtgaatgccaacggcaaagtgtgcggcgtgaagatggcgcgcaccgagatgggccagccggatgcaaaaggccgccgtcgcgcggagatcgttcccggctctgagcacgtggtgccggcagacgccgtcgtcatggcgtttggcttccgtccccacagcatggagtggctggcgaagcacagcgtcgagctggactcccagggccgcatcattgccccggaaggcagcgagaacgccttccagaccagcaacccgaaaatcttcgccggtggcgatatcgtgcgcggttccgacctggtagtcaccgcgattgccgaaggacgtaaagcggcggacgggatcctgaattacctggaagtgtaa

SEQ ID NO: 222530 - DNA, 468 bp, Klebsiella pneumoniae
atgataatcggtgatgtaaacaatccattgttggctggcgtgtcgtcggggctacaacaggcgatatccctcgccctggatcatgatttattgagtctttctcccggaagcgttgaacttcaaggggataatgtctttatgaatgtgatgcagtttatgacggagtttccggcagataaaaaggctgaactacatacgaagtttatcgatatccagatattactggcgggcgaagagcagatttttttcggcgtagccggctccgcaatgcagtgcgaggagatgcacgttgaggaggattatcagctgtgcaacgcgattgatggcgaacagtcggtcattctgacgccaggtatgttcgcgatctttatgccgggtgaaccgcataagccaggatgcgtaataaccgagcccgcagagataaaaaaagtggtgattaaagtcagcgcaaatttgttaagcgcataa

SEQ ID NO: 222531 - DNA, 885 bp, Klebsiella pneumoniae
atgacgacgctggcgatagatattggcggtacgaagcttgctgcggcgctggtaacggatgacctgctgctctgcgatcgtcgcgagctacccactcctgccagcaaaacagcggatgctctgaacacggcgctggaggcgcttgtcaggcctctgtgcatgcgggcaaagcgcgtcgcgatagcctcgaccgggattattcgtgaaggaaacctgattgcaattaatccacagaatcttggcggactcatgcacttcccgctggtaaaaacgttacgcgaaataaccggtctgccaacgctggcgataaatgatgctcaggcggcagcctgggcggaataccaggcgatggctgataaggtcagcgatatggcgtttattaccgtttctaccggggttggcggcggcgtggtgagcaacggtactttacttaccggggccggaggcctggccggacacctggggcactcgttagccgatcctgacggaccgctttgcggctgcggtcgcgtcggctgcgtagaggccattgcttccggacggggaatcgccgcggcggcaactgacgatctctgcggactggatgcgaaatctatttttacttttgcggcgcaaggccacccgcaggcgcgtttactcattcagcactcggcacaaactttggcgcggatgattgccgatcttaaagcgttgaccgattgccagtgcgtggtcgttggcggcagtattggcctggcggatgggtacttaccgttggtgagggactatctggcgcaagaaccggctatttaccaggttccattatgcgcagcacactatcgccatgatgctggcctgctgggagcggcgctatggggcaaggagagaagccatgataatcggtga

SEQ ID NO: 222532 - DNA, 690 bp, Klebsiella pneumoniae
atgtctttgcttaaagaattggatttacgcattagcgctaacggcggtcttattgtttcctgtcaaccggtacccggcagcccattggataagccggagatcgttgccgcgatggcgctggcggcggagcaggccggggcggtcgcgttgcgcattgaaggcgtagagaatctgcgcgcggtacgcgcgcaggtaaaggtgccgattatcggcattattaaacgcgatctggatgattcgccggtaaggatcacgccctatctggaagatatcgatgcgttgatgcaggctggcgccgatatcatcgccgttgatggcacagagcgagcgcgccctgttccagtggcaacgctactggcgcgtatccaccagcacaagctagtggcgatggccgacagctcctctcttgaggatggcctggcctgtcaggctcttggcgcggaaatcatcggcactacgctgtcgggctataccatggcgtataccccggatgaaccagatctggagctggtgaaagcgctggcggaggccggctgcagggtgaatgcggaagggcgctacaacacaccggctcaggcagcggaagccatacgccacggtgcgtgggcggtgaccgttggttctgcgattacccgcctggaacatatttgccagtggtataacacggcgttaaaagagacgaagtcatga

SEQ ID NO: 222533 - DNA, 1488 bp, Klebsiella pneumoniae
atgagtacactgccccagaacatcccgtggtaccgccatcttagccgtccccagtggcgggctttttccgccgcctggctcgggtatctgcttgatggttttgattttgtattaatcgccctggtgctcaccgaagtgcagggggattttggcctgacgaccgttcaggctgcaagtctcatctcagcggctttcatttctcgctggtttggcggtctgatgcttggcgcgatgggcgatcgctatggtcgacgcctggcgatggtaaccagcattattctgttctctctcggtactctggcctgcggttttgcgccgggttacacaacaatgtttatcgcgcgtctggttatcggtatgggaatggctggagagtacggctccagcgccacttacgttatcgaaagctggccaaggcatttacgcaataaggccagcggttttctgatttccgggttttccgttggcgcagttatcgccgcgcaggtttatagcctggtggtacccgtctggggctggcgcgcgctttttttcatcggcattgttcccatcgtatttgccctctggctgcggaaaaatattccggaagccgaagactggaaagagaatcatgaaggcaaagaaccggtacagactatggtcgatctgctttatcgcggcaagcatcgggttattaacatcctgatgaccatcgtggcggcgactgccctatggttctgttttgccggtggcttacaaaatgcaggtatcgttctgctgctgggcgtaatgtgcgcggtgatatttatcagctttatggtgcagagcagcggtaaacgctggcctacgggcgtgatgctgatggtggtggtacttttcgccttcctttattcatggccaattcaggcgctgctgccgacttatctgaaaaccgagctggcctatgacccgacgacggtggcaaagattttgtttttcagcgggtttggcgcggcggttggctgctgtgtgggcggatttctcggggactggctgggcacccgcaaggcctatgtttacagcctgctggcttcacagttgttgattattccggtctttgcaattggcggcacacacatctgggttcttggcctgcttctgtttttccagcagatgttagggcaggggatctccgggatcttgccaaaactgattggcggctatttcgataccgatcagcgggcggctggacttggttttacctacaacgtgggggcgctgggaggcgcgattgcgccggtgctgggtgccttaattgcccagcgtttggatttgggtaccgcgttgggatcgctctcttttggtctgaccttcgttgtaatcctgctgattgggctggatatgccgtcccgcgtacagcgctggattcggccggaagcgatacgaactcatgatgcgatcgatggtaaacctctaatcggagcggtgccttttggtggtaacaaaagcggcttagttaagaccagataa

SEQ ID NO: 222534 - DNA, 894 bp, Klebsiella pneumoniae
atggcggtcaatttacgtggggttatggcggcgttgcttacgccgttcgatgggcagcaaaaactggataaagagagcctgcgtcgactggtgcgatttaatctgcgccagggtgttgatggactatatgttggaggatctaccggtgaagcctttgtccagagcggcacagagcgtcaggaagtgctggagatcgtagcggaagaggcgaaaggcaaaatgactcttatcgcccatgtcggctgcgtgagtaccctcgaaagccagcaactggcaagggctgcggtaggttatggctacgatgctgtctccgccgtcacgccgttctattatccgtttagtttcgaagaacactgcgcgcattatcaggccattattgagtcggctgatggcttgccgatggtggtgtacaacatcccggcgctaagcggcgtgaagctgaccctcgatcaaatcaataccctggtgacgctgcctggcgtcggtgcgctaaagcagacttcaggcgatctattccagatggaacagatccgacgggctcatccggatctggtgttgtacaacggttacgatgagatatttgcctcaggcctgttggcaggagctgatggcggtattgggagtacttacaacatcatgggctggcgttaccagggaatggtcgcggcgctgaaagtgggtgatgttgccaaagcacagcagctgcaatgtgagtgcaacaaggtaatcgacctgttgattaaaaccggcgtattccgtggtttgaaaaccgtattgcactatatggatgtggtctctgtgccgctgtgccgtaagccgtttgcaccggtagacgaaaaattcttgccggagctgaaagcgctggcgcagcagctaatgcaggaacacggctga

SEQ ID NO: 222535 - DNA, 771 bp, Klebsiella pneumoniae
atgagcgcatttgatccacaagccgaagataccccgtcctccattggcaacagccttggccgccgtcctctggcgcgcaaaaaactgtctgaaatggtggaagaagagctggagcagatgatccggcgccgggagtttgcggagggtgaacagctgccgtccgaacgtgagctaatgaccttttttaacgtcggacgtccttcggttcgtgaagcgctggcggcgctgaagcgtaagggactggtgcagatcagcaacggcgaacgcgctcgcgtttcccggccttcagcggacaccatcattggcgagctttccggcatggcgaaagactttttgtctcaccctggcggtatcgcgcattttgaacagctgcgtctgttttttgagtccagcctggttcgctatgccgcagaacacgccagcaatgagcaattggaaaagctgacgcaagcgctaaagatcaacagtcaatcgctggatgacaatgcgctgtttatccgctctgacgttgaatttcaccgcgtgcttgcggaaatccccggtaatccaatctttatggctatccatgtggccctgctggactggctaatcgccgcccggccaacggtgcccgagcgcgaactgcacgaacataacagcgtcagctatcaacagcatatcgctattgttgatgctattcgtcgtcgcgatcctgacgaagccgatcgcgccctccagacccacctcaatagcgtatccgccacctggcacgccttaggtcagaaagcctga

SEQ ID NO: 222536 - DNA, 291 bp, Klebsiella pneumoniae
atgataacccttctcgccgtgctcaaggcgaaaccaggccaaacagacgcgctgcgcaaggtcctgcagggtctgctcctgccgacgagacaagagccgggcaatcttgactacgcgctgttccagctgcgcgacgcgccggataccttctacatgcgggagtcctggcgtgaccagcaggcgctggatgagcatatcgaccaaccctactttcaggcctttattggcgagatggattccctgctcgccgagccactgcgcctggactatctgacgccagtcgccccctga

SEQ ID NO: 222537 - DNA, 1950 bp, Klebsiella pneumoniae
atggaagtcgatctgcacaaactgaaagttaacgatccgtttctgggtcagtatcagcaactggtgcgtgatgtcgtcattccctaccagtgggaggccctcaatgaccggatcgccgaggctgagcccagccatgcgatagaaaacttccgtatcgccgcaggtcagcaggcaggagaattctacggaatggtgttccaggatagcgatgtggcgaaatggctggaggccgtcgcctggtcattgtgccagaagccagatgcggaactggaaaaaaccgccgacgaggtgattgagctgattgccgccgcgcaatgtgaagatggttatctgaacacctattttacggtgaaagcgcccggggaacgctggaccaatctcgccgaatgccatgaattgtactgtgccggtcacctgattgaagctggggtggcattcttccaggcgaccagtaaacgccgcctgctggaggtggcatgtcgcctcgccgatcatatcgacagcgtgtttggtcccgacgacaatcagctgcacggctacccgggacaccctgaaatagagctggcgttaatgcgtttgtacgatgtgactcaggaaccacgctatatggcgctggctaattacttcgttgaacagcgtgggacacagccgcatttctatgacatcgagtatgaaaaacgcggcaaaacttccttctggaatacctatgggccggcgtggatggtgatggataaaccctacagccaggcgcatttgccgcttgccgaacagaccaccgctgtgggtcacgcggttcgctttgtttatttaatggccggcgtagcgcaccttgcgcgcctgagcaagaacgaaggcaaacgccaggattgcctgcggttatggaaaaacatggtccagcgtcagctgtatattacgggcggcattggctcacagagcagcggggaagccttcagcagcgattacgacctgccgaatgataccgtttatgcggaaagctgcgcctctatcgggctgatgatgttcgcgcgccgcatgctggaactggaagccgacagccaatatgctgatgtaatggagcgcgcgctgtacaataccgttctgggcggtatggcgctggacggtaaacatttcttttacgtcaaccccttggaagtgcatcctaagtctttaaaattcaatcatatttatgaccatgttaagcctgttcgtcagcgttggttcggctgtgcctgctgcccaccgaatatcgctcgtcttctgacctcactggggcattatatctacacgccacgcgaggaggcgttgtatatcaatctctatgtcggcaatcaggtcgagatcccggttggggaaaagacgttacgcctgcgtatcagcggtgactatccctggcgggaacaggtcaaaattgtcatcgaatcaccgtcaacagtgaaccatacgctggcgctgcgtctacctgactggtgcgagggtccgcacatcaccctgaacggcgcgccggtcacgcaggatattcgccagggctatctgcatatccatcatctctggcaggaaggtgacaccctgatgcttaccttgccgatgccggttcgccgggtatatggcaatccgcttgttcgtcaccaggcaggccaggtcgcgctgcagcgcggtccactggtctattgtctcgaacaagctgataacggcgaagcgctgcataacctgctgctgccacgcgatgccaggttcacggtgtttgaaggaaaggggctgtttgctcgcaacatgttgattcaggctccaggctacagaaaacatgcagaaaacgccgacgcgcagaatctctggagctacgatcacccgctggccaccccccattcacagacgctgacctttattccctggtttagctgggcaaaccgcggagaaggcgaaatgcgtatctgggtacgggaagccgaataa

SEQ ID NO: 222538 - DNA, 1401 bp, Klebsiella pneumoniae
atgactacggctccgattacgacaagcgacctcacgaagcacatgcaggacgacaaattatctctccgtgaaaaaataggctatggtctgggcgacgccggtggcacggtcatcacctgcctgatcatgaactttctcacttttttctatactgacgtctttgggctcaccccggcgctggtcggtactctgttccttgcgctgcgcgtgtttgatgctatttccgatccgatcatgggcgtcctcgccgatcggacccaaagccgatggggacgttttcgcccctggcagctatggattgcggttcctattgcagcgatcggcgtgctgacctttaccgtgccggatgccggcatgggggtaaaaatcgcctgggccttcggcacttacctgctgctttcagtcagctataccgcgattaacgtcccttactgcgcgctcattaatacgatgaccactcgccatagcgaggtgatctcctgccaggcatggcgctttgtactatgcggcgtggcaggattcctggtctccgtgggcctgccgtggttggtaaaagcgctcggtcaggggaataccgcccagggttatcagtatggtgtcggcgtactgtgcgccatcgcggcggtgatgtttctgtgctgctttttctgggtacgtgagcgtgtttccctggagatgctcggcaaattcaccctgcgcgaacatatcgccggtctgcgtaaaaacgatcagctgttactcatgctggcgatgtcattcctgttgatcaacgtgtttaacattcgcggtggcggctacatgtacttcattacctatgtactcggcggctctactggctatacatcgctgtttttcaccatggtcaccttttcctcgattctgggcgccgcgatcgtcaattggctgtcgcgccacgttgataccgtcaagctctattactacaccaatgtggtactggccttactggcggtcggaatgtggttcctgcccaccggtccgtcctggcaaacgctgtggctggcggtcattctcggcaatggcatcatcctgggctttaccctaccgctgcatttttcgttgatggccttctctgatgattatggcgaatggaagacgggtgtccgttcgtcggggatgaactttgctttcaacctgttctttatcaagctggcatgggcctccagtgcgggcattatcagcctggtatttatctacgtcgcttatcaacccggcgccagcaaccagactccatcctcactatcggggatcacggcgatggaaaccctgctgcccgcgctgttccatctgttgctggccttcgctatccgcgcctgcaagctcaacaatcccatgatgtcgcgtattgcagccgatctgcgcgcacgtcacgttcagtcttaa

SEQ ID NO: 222539 - DNA, 816 bp, Klebsiella pneumoniae
atgcttgaattatccatgtctcttccgattcgcgtacaaaatggcggcttatttatttcccgtggcgtcggcagccatccggcgcgtaaactgcaatcctgggaaattatttttgtcgaaaagggaacgttaacgatttgcgaagaggatgaaatatttaacgttaatgcaggggaaagtttattgctgtggccagaacgttctcatgttggggtgggggaatttcccgccgacctgaaattttattggctgcattttgaagtactgacggagagtgtccggtctctgccgccagcgctgcttaacgttccgcaacatacccgcgtcagcgatccacaatacattatttcgctgtttcgccagtttcttcgtgaacaggagaacattcaccgcagcctggcgctggagctcctgttattgctgatactgcagcagattgctgcggcggcaagcgaaaaaccggacgacagtcccggcgctgcgctggcctggaaagcgcagcagatcatccatacccgttaccacttgcctgtttcagcctcgacgctggcgaaagagctgcactgtaatgcggactatttaggacgcgtgtatcgtcacgttttccgcgtgacgttgaccgaagcgatccatcgtcagcgggtcagagcggcggaaaagctgttgatcagcgattcactgtcgttgaccgaagtcgcgggtcagtgtggctttaatgacgtcggttattttcgcaagatctttcgtaagcacaccagcctcacgcctgccgcctggaagcgccgctactgtaaggagcacattaattcagcgtaa

SEQ ID NO: 222540 - DNA, 642 bp, Klebsiella pneumoniae
atggacaaacagtatctcgccttaaacggcgccctttttttctggcttctcgcgctgatcgcctggtctgtcgatgcgatcgtgccggcgcgcctggcggccgcctgcgcgctggtcgccttcctcctccatagccaacggaacaagattaacgcgatgtttatcaagaaaaataaaacggaaccccagacttcagaagtggtcacgcctccggcaaataacccagaatccccaacggtcgccagtaaaaaacaagagaccacggtcatcgccagcggggtgcatttcgtcggcaatattgtcgccagcggccatgtctacattcacggccagcttaccggcaacattgaggctaaagaacatctgattaaggtgatgcgtgaaggccaggtggagggcaacatcagctgccgggagctgattattgacggcaaggtgcagggccagtgtcgcggcgacagtatcaccattgaggagcatggcaatttggatggcaccctcacctatcgctcgctggcgattaaaaaggggggcctgttcaccggcagcgccgaggtgctggccgcggcggaaagcaaaagtcatctcatcggcctggttgcggaagacggcgtgacgtccgccaggccgcaaagcgcctga

SEQ ID NO: 222541 - DNA, 534 bp, Klebsiella pneumoniae
atgacgcatgtcgttaatcttctcccctggcgtgacctgcgtcgccgccagcgcctgcgctacaccctgttgttagccatcggtatcgtgctgctggcggggatgaccctgctggtggggcgaacggctggtctacagcgcgacgccctggcgaggctccacgcgacggccgacgcagcgctgctcgcctcgctcaaacaacgtgaacaggcgatgcgcgaagcgtggcagcagcatcaacgccagcgcgagcagcaccagcgcagatcgacgatcgccgcctggcaaccccgactaatggcgctcgcggcggacctgcctgctcaggcatggctgacgcggctggagtaccagggggcgcgcctgacgctggatggcctggccctcaacctgcaggcgctggccggagtggaggcttctctggccagcgtcacgggattcgcgccggctaaagccggcggaacgcagcgcgacgccgaggggcgctggcggttcagtttcaccctgtcgggagcgcgcgccgatgaggattaa

SEQ ID NO: 222542 - DNA, 429 bp, Klebsiella pneumoniae
atgaggattaataccctgcacacccgggcggggctgctgatcctgctcgcgatggggctgacggggggcggcgtggcgctttggcgcgatgcccgaccgccgctggcggcgctgtcccgcgatggcgctctgcaaacgcagtggcggcggatcatggcgctgcgcatccctgacggtgaaagatccggggagcgcatcgacaagcagccgttctcgcccatagccattccgctcgccggggcgaagctaatcgcctggcatccgcaggggagcggcggcgagatggagctggctctctcctggccgacggtacccgctctgttttcatggctggcgcgcagcgggatgaacccgcgttcgttctcgctggagcgcgaggggcaggcgctgcgcatgcagctgcagctggaggcggaagatggtcggtaa

SEQ ID NO: 222543 - DNA, 378 bp, Klebsiella pneumoniae
atggtcggtaaatgctgggttttgctgtggttgccgttgtcgctgctggcggccgagcgcgatccttttcagccggttgaggatccctgccgcgcggcgcagctgtcgcaatggcgttatggcggcgcggccggcgatggcgcaggctggatgggttttttgcaggacggaagcggcacgtggcgacgggtgcgcctggatgagcaattgcccacgggctggcgggtgaaccggctgacggacagtgaactggacatcgtcacgcctccgggatgtgaaccgccagcgtggcgctggcaacgtaaaggaaaacaagatgatgcgatggataagcctgcttttgctgctaccgctggcggtggtcgccgcgcgaaatga

SEQ ID NO: 222544 - DNA, 2745 bp, Klebsiella pneumoniae
atgatattgacgccactggatacctcgccccccatcgcccggctggacaacgttggccagcgcttcggcgccaccgtggcgctgcgggatatcagcctggcgatcccggcgcggcgcatggttggcctgattggcccggacggcgtcggcaaatcgagcctgctctctctcatcgccggggcgcgggccattgagcagggtaacgtgatggtgctcggcggcgatatgcgcgacgttcatcatcgccgcgaggtgtgcccgaagattgcctggatgccgcagggactggggaaaaacctctatcacaccctctcggtgtatgaaaacgtcgacttcttcgcccgcctgtttggccatgataaagccgaacgcgaatcacgtatccacgagctgctgcagagcaccgggctggcgccgtttcgcgatcgcccggcgggtaagctctccggcgggatgaagcaaaagctgggtttatgttgcgcccttatccacgacccgcagctgctgatcctcgatgaacctaccaccggcgtcgacccgctttcccgggcgcagttctgggagcttatcgacagcattcgtcagcgccagccggagatgagcgtgctggtggccaccgcctatatggaagaggctgagcgctttgactggctggtggcgatgaacgccggcgaggtgctggcgaccggtaccgctgcggagctgaaagtgcagaccggcagccagacgctggagcaggcgtttatcgccctgctgccggaagcgcagcgccaggcgcataaggcggtagtaatcccgccgcgcgacgaccgcgaggaagagatcgccatcgaagcccgtgggctgaccatgcgctttggcgacttcgtcgccgtcgaccacgttaacttccgcatcgcgcgcggtgaaatcttcggcttcctcggctccaacggctgcggcaaatccaccaccatgaagatgctcaccggcctgctgcccgccagcgaaggcgaagcctggctgttcggccagccggtcgatccgaaggatatcgccacccgccagcgggtgggctatatgtcgcaggccttctcgctctatagcgaactgaccgtccggcaaaacctcgaactgcacgcccgcctgtttcatattccggacggcgaaatccccggtcgggtggcggaaatgagcgagcgcttcatgctcagcgaggtggaagacgccctgcccaccgccctgccgttgggcatccgtcagcgcctgtcgctggcggtggcggtcatccatcgcccggaaatgctgatcctcgacgaacccacctccggggtcgatccagtggcacgggatatgttctggcagctgatggtcgacctcgcgcgtcaggatcgggtgaccatttttatctccacccactttatgaatgaggcggaacgctgcgaccgcatctcgctgatgcacgccggcaaggtgctggccagcgatacgccgcaggcgctggtcgaacagcgcggtgccgccagcctcgaagaggcgtttatcgcctggctccaggaggcgcagccaaccgccgcagttcctgaggaacctgcgcctgctgcagcatctcatccagaacgcgcggccccgcgccaggccttcagtctgcaacggctgttcagcttcagccgccgcgaagcgctggagctgcgccgcgatccggtacgttcgacgctggcgctgctgggaacggtgatcctgatgtttatcatgggctatgggatcagcatggacgtcgaggatctgcgctttgcggtactcgatcgcgatcaaaccctcagcagtcagggctggtcgcagaatatcgccggctcacgctacttcatcgaacaggcgccgctgcgcagttacgatgagctcgatcggcggatgcgcgacggcgaactggcggtggcgatagagatcccgccgaactttggccgcaatatcgcccgcggcacgccggtacaaatcggcgtctgggtggatggcgcaatgccaaaccgcgcggagacggtgcgcggctacgtgcaggccatgcatctcgcctggctacaggagatggccgggcagcaaagtagcccgaatcgtgagacctcgctcatctccatcgagacccgttatcgctataacccggacgtgaagagcctcccggccatcgtcccggcggtgatcccgctgctgctgatgatgatcccggcgatgctcagcgccctgagcgtggtacgtgagaaggagctcgggtcgatcatcaacctgtacgtgacgccgaccacccgcagcgaatttctgctcggcaagcaggtgccttacatcatgctgggaatgtttaacttttttctgctgtgtgcgctgtcggtcttcgtctttggcgtatcacataagggcagcttcctgacgctaagcctggcggcgctgctgtatgtcaccattgccaccggactgggactactgatctcaacctttatgaagagtcaaatcgccgccatcttcggcaccgccatcattacgctaattccggcgacccagttctccgggatgatcgatccggtagcgtcgctggaaggccccgggcgctggattgggcaaatctacccgaccagccacttcctgtctatcgcccgcggcaccttctccaaggcgctgaatctcggcgatttgtggggctcctttattccactactgattgcagtgccgctggtgctcgggctgagcgtgctgctgctgaagaaacaggaggggtga

SEQ ID NO: 222545 - DNA, 2895 bp, Klebsiella pneumoniae
atggcacactacagcttaacgccgcgcgtcaaagtgctggcagaccgtttactcgcccagaaaagcacgctgtgcaccgaacatgccaccacgctgaacgccctggatggcgatatcgcgggcgttcccgccgccgttaaaccggcgcgccgtttctatgaactgatgcgccagctgccgctgaccatcagccccgacgaactcattgtcggcaaccagagccgtaaaccgcacggggcgattttccatgacgaaaacgcgacccgtcgcccatcggctttccagttcctcaacctcaacagcgatctggattcgccggactaccggctggtggtcgaaaaaggggtgctggcgattaagcaccagctggaagagaaaacccgcgcactcggcagcgcggtcagccgcagcggtatggatgaagtcaacggctgccgcgccgccatctacgcctgcgacgccctgctggcgctggcgcaaaatctggccaacagcgccgagcagctggcggcggcggagaccaatgcttatcgcaaagccgagctgctcgatagcgcagccattctccaccacgtgccggcccatccagcgcgtaatttcaaagaagcctgccaggcgttctatctgttccagctggcgctccagctggataacggcagctatgcagtcaacccggaaggggcggacaaggcgctgctgccttacttccagcgcgatatcaacagcggcgcgctgaatacccagcaggcgtatgagctcgtggagtgcctgtggttcaagctggcggaactgagcgaagtccgcgccgcctgcgccattgacggctatccgatgctcgacgccatgttgcatggcgccgcttttgatcatgccgaggtgaacgaactctcggcgatgttcatcagcgcccagcgcaatctcagcgcgttgaatctgccggtgcgtctgtttagcggcgcacaacaggtcagccatgcgccgttcgccgcctgcgccgacacgccggtgatggaagggttaaccccgcgtatgcagcgtctgcgtaaccactatctgacggtacgcccgagcgtctctatctatcgcgcgctggcctttaccgaagtggtgaaagctaacccaggcatgccgaccattctgctgcgagcgaaagccttccgccacgcctgcgaaaccgcgccgattctgattcaggacgatgagctgatcgtcggccatccgtgcggcaagccgcgcgcgggcgccttctcgccggatatcgcctggcgctgggtgcgcgacgagctcgacaccatgagcacccgcccgcaggatccgtttgagatcagcgaagcggataaaaaaaccattcgcgaagagatcgtcccattctgggaaggccgttcgctggatgagatttgcgaagcgcaataccgtgaggctggcgtctgggccttcagcggcgagaccttcgtcagcgacctctcctatcaccagattaacggcggcggcgatacctgcccgggctacgacgtgctgctgttcaccaaagggatgaacggcattaaagccgatgccgaggcgcatctggccagcctgagcatggaaaatccggaagatatcgaccgcatttactactacaaagcggcgattgaaacctgcgaaggggtggtcaactacgctcgccgcatcgccgcccatgcccgcgaactggcggctaaagagcaaaacgcccagcgccgcgccgagctgctgaccatcgccgacgtcaacgaaaacgtgccggccaatccgccgaagaccttgcaggaagcgctgcagagtatctggaccgtcgaatcactgtttgaaatcgaagagaaccagaccgggctgtcgctggggcgcgtcgaccagtactgctatccaatgttcgaagccgatatccgcgaaggccgcttgacccacgacaccgcactggagctgctgcaggcgtttatcatcaaatgtgccgaactgatgtggatgtcgagcgaactgggagcgaaatatttcgcgggttatcagccgtttatcaacctcaccgttggcggccagaaacgtagcggcggcgatgcctgtaacgatctgacctatctgattatggacgccgtgcgcttcgtgaaggtttaccagccgtcgctggcctgccgtatccacaaccagtcgccgcagaaatacatggaaaaaatcgtcgacgtggtgaaagcgggaatgggcttcccggcctgccacttcgatgactcccacatcaagatgatgctgcgcaaaggcttcgattttgaagacgcccgcgattactgcctgatgggctgcgttgaaccgcagaaatccgggcgcatctaccagtggacctccaccggctacacccagtggcctatcgctatcgagttcgtgcttaaccgcgggcggatggtgctgttcgatagctatcaggggctggacaccggcgacctgcgcgacctgcgcaccttcgaagcattcgacgcggcggtgaaacagcagatcgcccatatcgtgcgcctgtcggctatcggcaccgtcatcagccagcgcgtccaccgcgatgtggcgccgaagccgctgatgtcgctgctggtcgaaggctgcatggagagcggcaaagatgtcgccgccggcggcgcgatggtcaaccacggtccggggctgattttctccggtctggcgacctacgtcgactcgatggcggcgatccgcaagctggtgttcgaagagaagaaatacacccttgagcagatccgcgatgcgctgctggccaactttgaaggttacgaagcgctgcgccgcgactgcctgaacgcgccgaaatacggtaacgacgataactatgtcgaccagtacgcgctggatattaccgaatggaccgagaaagagtga

SEQ ID NO: 222546 - DNA, 285 bp, Klebsiella pneumoniae
atgggtgatgcattaggtctgattgaaaccaaaggtctggtggcctgcattgaagcagcggatgcgatgtgtaaagccgccaacgtcgaactgatcggctatgaaaatgtcggttccggcctcgtcaccgcgatggtgaaaggcgatgtcggcgcggtgaaagcggcggtggattccggcgtcgaatcggcccagcgcattggcgaagtggtgacctcgctggtcattgcccgtccgcataacgacatcaacaaaatcgtctcgcattacaaaattgcggactaa

SEQ ID NO: 222547 - DNA, 264 bp, Klebsiella pneumoniae
atgaataacacgctcaatatcaccgtcgatggcgaagcgctgacggtgccggaagggatcagcgtggcggcggcgctggcgttgaccggcgatcccaccacccgccaggcggttaacggcgacccccgcgcgccgttttgcggcatggggatctgccaggagtgccggatcaccgtcgacggcctacgggtgctggcctgccagaccctgtgccgggccggcatgcaaatagaaaggagccgctatgcacacgctgcgctgtga

SEQ ID NO: 222548 - DNA, 1638 bp, Klebsiella pneumoniae
atgtcactgccgttcaaaccccatattatcgccctgctttgtagcgctggtttactcgcggcggcgggaacactctatgtgcaaagccgtactccagagacggtcactgagccgacggcgcaggctgcgtcggcacccactccagccacacagccagtcgccgcgcagccggtggccgccacctacacccaggcgcagattgatcagtgggttgcccccatcgcgctctatccggacagtctgctgtcgcaggtgctgatggcctccacctacccggacaacgtcatgcaggcggtgcagtggtcccaggataacccctccatgaaaggggatgccgccgttcaggctgttgccagccagccgtgggatcccagcgttaaatcgcttgtcgctttcccggccctgctggcgatgatgggcgagaatccgccctgggtggaaaatctcggtaatgcgtttttggcccagccgcatgatgtgatggactcggtgcagcgtctgcgtgccatcgcccaggagacagggacgctgaaatctacgccgcagcaaaaagtgattgtcgccgcagcggcgcctgtgccggccaccacttcgaaaagcagcaccgtatcaacgtcaagcactaccgcggcggcgcctgcgccaacccaggtcataaaaatagaaccgaccgatccgcaggtggtctatgttcccaactacaacccctccaccgtctatggtacctggccgaacagcgcctatcctccggtctatctgccgccgcctcccggggagcagtttaccgatagcttcgtcaaaggcttcggttacagcctgggcgtggcgaccacctgggcgctgttcagcagcatcgactgggatgatgatgatgaccaccaccatcacgatgacgactaccaccgcggcgattactcgcataacggcgataacatcaatatcaatgtgaataactttaaccgcattaccggacaaaacctgccgggcgaccgcgtaaactggcagcacaaccccgcctatcgcggtcacgtgccataccccgataataccgtcgcccagcgctttcatcaggccaacgtatccggcggactgagcgcgacccagcatgcgccggtcgatcgtgaggcgcagcgccaggcggcgatgacccagcttcagcagcgcagcgcgccgaccgccacagcgggcaacctggcggcaaacaccgcctcgcgcgatgcccagcgtcaggcggcctcggcgcagttgaaacaagccacccagcgcagcaactaccgcggttacgacagcgagccgacatcgacccagcagcgtcgagacgcggcgaaagcgcagttgaaaaacccgacgccgcagcaacagcagcgtagggaaaccattaagagccgcgagcagaatactacaccgcagcagcaacagcgccggcagcagctccagtccgccacgccagcccagcgtcagcagacggtcagtcatctgcgcgccagcgcccttagcggcaacgaaagccgcgccccctcctggcaagcgcagcaagaacggggacggcagagtcgtcagttttccagcgtaaaccgcgagcagcgcgacggcgccagagagcgtctttctgaacaccatgaactacgccgccgctga

SEQ ID NO: 222549 - DNA, 729 bp, Klebsiella pneumoniae
atgaaagctaacgggttcgcggtggcgctgctgctggcgctctatctgctgtggttgaccgccaccgccccggcgcgcctgttagtcccgatgctgccgcccgaggtacaggtggccaacctcagcggcagcatctggcgcggcgcggcgcagtcagtctcctggcgcggggaacggcttgagcggctgacgtggtcgctcaccctggctggctggcagatcgcgctcagcgatccccgcggcgtggagggtcaggcccggctgtgggggatccgcgatctgcgcctgcaggaggggcggctcaccgccccagccagcctgctcggtcgctggctaacgccgaccatgcccgtcagcgccgaaggagaggtcactttcagcctggccgaagcgcacttcagcgaggggcgctgtcagcaaatcaccgccggacgcgcgcagtggcgtcaggccaggctgcactctccggtcggtagcctggagttagcccaggtcagtggcaccttaagctgtacggcgaccggcgccgtggcgctggccatccgccaggattctcatcagctgagcctcagcggccagggaaccctgtcgcccgatggccgctatctgtttcacggtacgctacagccccggcaggggataccgcccctgctggcgctgctggtcacccgcccgatggccaaaaacgaccaaggcccgacgccgtggcagctgcagggaaaatggtga

SEQ ID NO: 222550 - DNA, 1923 bp, Klebsiella pneumoniae
atgaaacaagctgtaactggcggcccggtactgaatgctattgcgacacataaaccggggatgacggcagcggacgacgattattcaacgtttattacggctgatggtcaggtctatcagttcgatatttctgcggggattgatttcaggctggcgggggcgctgcttgacggaagcaatgccggagcatgcataaagaaaatcgttgatactgaagtggcaaaagctattgctgctggcagtattgatgcatgcaaaaaaatgataacaatcagcccgctgggtaataatgatttaacgcagttaattctcgacacggacgaaacgtttgttattccgtcttttatgagcctatggcatgttggacaggtcagatataaattcaatggactgactaagccagccttcaggatatgcaatgaaattcctggactggcttccagcatggttgattttgtcgacaggcagggcgcagaggtcattaaaggaaatggctatctgatagaaataatcgggccaaacccggctacttatgatgagtggtacgcacttacccagtcaaacccatcagctgtaagttcagctgcaggtattgaatttggtaatacctattcctctaaaacgctgctcgactgccgcgacactattatcgagaacgtggcaattgagcgttttcacggcggtctgcggttgcatggctttgatacctatatcaacattttcaggaatctgaaaataacgtcatgcgtttataccttctacgaacctgacgcggataaatctaatgccggggagaacctgcgattcgagggtgggaccttcgggaactgttaccgttctcatttttatatcaaccaggtaggactgagcagaacgtacgttgggtgctcatttgattacgctcgtcagaatttcctggagttacgctcgtcaggtcggggaaatgatttcatctatgaaaattgctggatagaaggttttggcgattttcttattcgtcagtatccgattaccgatacctggagctttcgaaaaaataaaatcacttttagtggcggtaaaattgtcggcgctaaaggcagccagactgagtgggctccgcgtcgtaaaatcattctggcaccgacagataacaataaaattgagtttatcggcactcagatagagtggcccagcccgccatcagaaccccagattgcactgatgggatacaccgacgacaccattaaatacaatcccgggcgctacagttgccctggcactgcctatgaagatgagctgttaaactatgcgtatggcctcaagggcaatgcgtataaattttccggaactgaaggcgccagcattaaagacagcaaggacacagcgacaaatatttcgttcgataccaataacaacgctactggttttaaggtcgaatacggtccggtggatgatgatggattgcgttgcgtaaaaatcaccactacggccacaactgacctggtggagttaagcgataaacgcctgatggttaaagctccgcagcacactgttgttaatgccggtatctcaatcaagatggcggccgttactgcaggcgctgtaacgttcggtatgcggctccgggcctataacaacccggtatcgaaggctgactccactacgtttatcgtgaccaaaacgtacacgctgaatggttcgctggcgagcgacccctacaacgtgtcgtctctgctgggcgccacaggaaccccactgacaacggataagtatgtcggggtacagacttcacgcgacctggctttcgacagcactgtagccacccactttgttccgacaatgaccgtgaccggttacgttggcaccatttacctgaagctccccgtgtggtggatttctaacggctccgctcctgcggcgtactctatcgaggaatcgtga

SEQ ID NO: 222551 - DNA, 258 bp, Klebsiella pneumoniae
atgaaaatgtatatgagctgctctgccagcagcaatgaaagtgccgcagaacctcagcagtttaaggatggttcgaactatttcttttaccgcccctccagagagcttactcccctggagtttctggtttcggaatctgagccagataacgtcctggttgagattgaggccgaggacagaaacggcattatggagcaggccatttctgttgctgaactgcatgctaacggcgcacctcattcggtgcgttttgtttaa

SEQ ID NO: 222552 - DNA, 231 bp, Klebsiella pneumoniae
atggcgggagaaatgaatcaactgacagaaaaagaacagattgtattgtccttaatgaatttactggggatggatatgaatctgacagcgcaggcaatggagtttattggcgacagcgttctcaattatcagcttctcatcagatattttagtgccagtggtttaactgatgacgcgtctaaattgactgaggcaatagataaagccaccgccgcaaaggtattgttttaa

SEQ ID NO: 222553 - DNA, 1641 bp, Klebsiella pneumoniae
atggccaacatcgaaaaacttggctcgtcatcaccagaggtattgcttaagaatgcaactaacctcgataagttagtcaatggccgggaatcggaatcattacctgatcgctttggtgtactgcgcaatacctggcacggcatggagatgatcttcagccgctttatcgactatatcactggtcgtggcgagcaggcagttgcagctatcggctggcaggagcttggcaactgggctgttggtctggctgtagataatcgccagcagatcgtctactacaatggctcctggtacaaataccttggtgagcttgagcacgtcattgccggggattctcctgagaacgatggcggtctatggtcggctgcaaaccccacagggaaatggtcgaacatcggtgacgcggctcttcgctcaaacctgggttcaggcgaagggacctcactggtcgcaaagttaggtaataaacctcttgtcgcgatcagttattacaaaaatcaggggctgtccgaccaggatgctgtacaggctgctttcgatgaatccagcaacatcacttttgatgccaatgtcactctaagcagcgcgatagaatttgatcgctccgagccgtgcactgttattttttccccgggaattactgtcacgaataccaattttctgccgagactaacaacgcacccgaaccacaaaatatcaggcactacgttcagaacaaaacaatatagcgctgtgaatatcgatggaacgtcggtaaagcaccagactatggctgttgaaatggctgtccatgacacgctgtccagcgggccgaattatgagccgttcgtcgctctgatggctgcgatagaatcgtttaactgtgaacggcagaaattgtggggcatgaatatcctgacaaatgctcacaatctgaaggctggggacgaggtttacggaattgaagtcgacacgaatgtagatggtgtgctggatggggccggaaactattgcggggtttacattgcgggcgctggtgatttatccgggtcgtctgggtctgacggcgttcgtgttcagcgattgcgagatggcgtagccaagtggcagtacggccagcgcatttttgattccgtgaccgggctgggaatatatgacgcaagcaactactcaatattcgcatcgggtaacgcccctattgcccggcggcgcgatacgcaatctggtgtatggtcgtttatccactcggtttctgcatcagttataccctggggagtggatgattatggcgatacgtattcccggcggctgtatttgggtacgggcaacggaaaagcaaaaaacagggtaaacctcgacggtggtgtgaaattccataccacatcctcagctgtcgcgtgggggccaataagtgccggcgggtattctgaaaaagatgtgacgacactgtttggtatttctattgctgactggacgaactacacactggacgtgacgccagtcggatacgccgggtcaatgcctgttgtggctgttcaggtttatatcaacagcgcgaaaacgcaggcgtacgttcgaatcatcaacatcagcggcgtggctttgtccgagtgtaatgtaggactaaatgccaaactatgcggccactcatcaacaaactaa

SEQ ID NO: 222554 - DNA, 597 bp, Klebsiella pneumoniae
atgaaaaagaacacaggtcgattatataacatctacaaagagaacaaagctgttctggatacatctgcacctgtcgtccttagtattattggtatgattaccggcttttacgtcaagaaaaagttaacagaattaaatctagacgaagctgtgtcatcggcaaccatggccgcactgatagcattacctgtagcagtttataataaattaaccgtcacatacgcggcaaaaatacaagaagataaagattttgaggagctcaatgacacaaatgaaaaactgaaactagaaagaaaaaaaacagccagattttcaagagcactaagtaaattaaagcaagagaaaatcaagacttacaatgcccatgacaagttatcacgagacataaaaagttacttaaatggagataaaatagaaccagatgtaagggctgccatatgtaagatgctagacgatggtaatggtgatatattcgaattaaccatttccgttgatattgttataataaacgagatggatagccatgagattgaagaagatgaaagcgatactgtatatggaaaacaaacaaattcatcaggaatacctataaactag

SEQ ID NO: 222555 - DNA, 201 bp, Klebsiella pneumoniae
atgactgatatcaccggactggcgcagcggaacgtactgctgattgcaaacgggcagcagacagccgacctgctacgccacctggcagttaacgaaattgattcagactattttgccgttgtgtcggagtgcgaaagctacgggaaagaaactgacgatgagctctcaatcacggagtttgccctccgtgtcgctggttaa

SEQ ID NO: 222556 - DNA, 504 bp, Klebsiella pneumoniae
atggtagagcgtcgattcctgagccgcccagaggttccgagttggccttctgccagtacccggcagtgcaccagtgacctgaagcgcggacctatccagcgcgaggttagagcctatgcaaaggccaacgggttcaaggtcatcgttaactgcctgggcctgcgggctcaggagtcgccaggtcgcgcaaagcggcaggcgttccggaagaacgagacagactccaattccgttctgacctggtacgagtggctaccggttcatgagatgaaggccgaagaagtgttcgccaccatccgcgagactggtcaggaaccgcattacgcttacgcgctgggtaatgagcgtctgagctgcgtgttctgcatcatggcaagccgcaacgatctgaagaacggcgcaacgcatcaccctgacttgttggagcattatgcggcactggaggcccgtactggctacaccatgcacatgaatcggatcccgattaaggagcttgcagcatga

SEQ ID NO: 222557 - DNA, 165 bp, Klebsiella pneumoniae
atgatccccgacattagttcgttaatcactgctggcgcgctgtttgtctccaaccattctggaggcaaagatagccaagcgatgctcatccacctgcttgaggtcatcccgccgaagcagcttgtcgtcgtgcatgcgtcgcttggtgcgatggaatggccatga

SEQ ID NO: 222558 - DNA, 543 bp, Klebsiella pneumoniae
atgaacaaagacggattaacactcaaccaactggcagaacgtaatgccgcattggtcactgaggtcgagaaattacgtgccgagcgtgaccaactggctgcggagaatacctatcttctcaacggcgcagcccgtgaacttaacacttcatggatgttccacaaaacgatgcttggcgcacaggcggccctggtatgtcttgctcatggatatcaggctgcagctcgcgaatggctggaaggcaccaccgacgaagctggggctgcaatccctgatgatatttccgttggtgaactgcctgaatggttcgacagccagatggtcagcaatgacgggaaaagcggattcctgacccgggcagaagccgaagaggctatcaagaaggcatgccccgccaccgacgccttcctagccgggattaaggctgatgccattgatgaagccgcggtagagctcgaccgggtcgacactgtggcaagtaccagagtaatcgggttcaaactccgtgagtattcccagcagttgcgcgagggggctaaatga

SEQ ID NO: 222559 - DNA, 231 bp, Klebsiella pneumoniae
atgaaagctctcgacaaagccataaacattgcagggaatgccagcaagctagctgaaagtttagatgtttcagctatgacggttagtcactggaaaaatagaaattacggcgtggtaccgcaaagccgcgttctcactatcttcaaagcaaccggagtgacaccacacgaattgcgccccgatttgtacccgaaccctaccgacggtttgccgcaggagcagagggtataa

SEQ ID NO: 222560 - DNA, 561 bp, Klebsiella pneumoniae
atgctttctgaccgccttaccaaggtgcttaaaaccaggaagatgagtaagtcagaattagctagaagggttggcgtgactccgcaagctgtaaataactggttctccaggggagagctggggagagagtctgctcagcagattgcggacgtccttaaaatctcaatcgactggcttttgaatggtgatccgaatgacattttgactattgaacaagtcagaatgaaaaggctaaagcaatatgtcgagaacggctcgcttaagatagaagatgatcccttctttgaagaaatcctttcaggaaagaaaccaattaatgacaatgtcgcaaggcgtattgaacgcgacttcagtctccctttcggctctcttgattacgatccagaacgagcaccatctaatctagttggggacttatcttcgactgagatcgaacttgtacatcttttccgtcagatgccaaaatcggcgcaaaaggaaatgctgttactttttaacagcagagtgagtgagtactcgtctctttttagagaattacttgaactgaaagaacagaagtag

SEQ ID NO: 222561 - DNA, 309 bp, Klebsiella pneumoniae
atgagtaaggtaaaggtggcgcctattgaactcgaaatagacgccacggaagtaatcaatcaggtcgaggaactactggggttacttgagcttccagcccgttcccttgaaggcatccctgaggatgtcgtcaacctgctttttgacaacatccgtcccttgcttaacaacatcgtccttagtgatttctcgaccacagttggcacaactgacgccaacaaaatttgtatcaaagtcgaaatcatcgggacgcttgagcatctcgcttccgcaatcagggcaagcaactttcatagttgtcagttttga

SEQ ID NO: 222562 - DNA, 543 bp, Klebsiella pneumoniae
atgatggtcccttttcagctgtcgacgctccctgtcaccccgtggaaaaacggcggaggcgaaacccgggagatagtctgcgtgccgtcgcccgacgccccttttctctggcgcgcgagcattgccaccctgcaggccgacggccctttctccccctttcccggcgtcgaccggacgatcgtcctgctggcggggcaaccgctgcggctgcgcggggaggagatcgaccatccgctggcgctctggcagccgtgggcattccccggcgagtgcgtgctgtccagcgtcgggatcgttgagcctggactggacttcaatgtcatgacccagcggggtcgagcctcagcgaaggttgaagtggtgagcgaccggcagcgagcggccaccgaaggcgtcgcttatgtgctgcagggggagtgggatctggccgggcggcgctgcgccgccggcagcggtctctgctggcgcggcaacgccccgggcgagctgcggcctctcggtgccgatgggcgcctcctgctggcgacgattgcgctcaaataa

SEQ ID NO: 222563 - DNA, 909 bp, Klebsiella pneumoniae
atgcgtgttatcgactgtggtcgcctgctgctgcttgccgccctctggggtgccagctttctgtttatgcgcatcaccaccccggctttcagcgcggtaaacagcgcctttctgcgcgtgctgttcgccgccgtcgctttagggttgctggccggcgcgcgcggaaaatggggcgggtatgagggtaaattcatcgccactctgaagctgggggtcatcaattccggcctcccttttctgatgtactgccttgccgcgcaatggctaccggcagggtactccgccacgctcaacgccacggcgccgatgatgggggtgctgattggcgcactctgctttgcggaaccgctgaccctgcgcaaaggcgctggcgcggcgctgggcgctattggcgtggcggtgatcgcgcgcccgactaccggcctcggcgccgcccagctgctgccgggcgtcggcgcctgtctgaccgccaccgcctgctatggcctggccggctttctgacccgccgctggatccaacagcgcggcggcctcgaagcggagcgcgtcgcgttgggcagccaaatcggcgccacgctgtttttatgccccttttttctctggtcctgcgggcatgggctggctgtggactggggtcagggcctgccgtggatggcaatgcttatgctgggtgtcgtctgcacggcggcagggtatatcctctatttccgcctgatcgctgatattggaccgctgcgttcactgtccgtgacctttttgatcccgccttttgcggtgctgtggggctatctttttcttggagagattgtggagagtgggttaattctcggcgcgctgctggtctgcgtggcgctgtggatgatggtcgtgccgtcggggagaaaagagagggtaccaggcggcgcatga

SEQ ID NO: 222564 - DNA, 525 bp, Klebsiella pneumoniae
atgacgctatttttaatgttcttggctactcacgtctgccggcctggacagaaagctgggcaatgtggggagataaaaataatccggataaggcgttcagcttttgtatttgccctccttttgacggacattccgcaacggcgggaaacgggacaatgtttgcattccaggctgataacgcagagattgtcagacagttccatgccgcaggccttcttgcaggagggcaaaatgaaggcgcaccgggcacacgccccgcctatggccccgacttttatgtggcctacctgcgcgatcctgacgggaataagctggcatgcgtttgtcagcattattctcccgcaactgataagttcgtcaaccagaaacaggcgcttcgcatatagcatcttacggttttgcgcgtttacagcccctgacgtgaaatggggcgttccggcgacagctggcgcggtcggctacaggccaggaaccaacatctaccttgtatgggcagccagccaccgttgggtgaacgtggaatga

SEQ ID NO: 222565 - DNA, 909 bp, Klebsiella pneumoniae
atgggcaagctggaagatatggcgctgctggtggcagtcgccgaagcggggggactctccgccgccggcagacggttgtcactttcgccggccaccatgacggcccgcctgaaggcgatggaagagcgttaccagacccgcctgttccatcgctccacgcgcgctatcaccctgaccaacgcgggggaagatttttatcatgccgcgcggcgcgtactggaggaggcgcgccacgccgagtcgttgctgacgcaaaaagagggcgtcctgagcggcgatattcgcctttccgccccctccgactttggccgacaataccttagcccggccatcgtcgactttacccgccgtcacccggaagtgaccttttccgtctacttaggcgagcgcgtggaggatctggtcgccaaccggctggatatgagcattcgcgtcggtaatctgccggacagcagcctggccatccgccacatccgtcctaaccaccgggtgctggtggcctcgacggcttaccttgccgcccgtggaacgccggcttcgcccgaggcgctgcatcatcaccgctgcctggcgctggagcggcatggtgtggtgatgaacgagtggcgctttgaggaggcgggaaaagagcagatcatccgggtgacgccggcgatggtctgcgacgatggggcgctgctgcggcagtgggcgctcagcgggtcggggatcgccggtaaatcatggtgggatgtgaagagggatgtcgaggaggggaggcttcaggtgctgtttgccgatcgcttcaccggatttagccctttagaccgcaaggaggttgggctgcagtttgtctttccccagcgaaagctgcaaccgccgcaggtgtcggcgtttatggcgttttttatcgactggctggagaagtga

SEQ ID NO: 222566 - DNA, 1110 bp, Klebsiella pneumoniae
atgaacacgctctcactttttgatcgtcatcgcatcggtacgctgccgctgaaaaaccgtatcgtcatggctcccatgacccgggcgcgcgcgctgcagccgggaaatatcccctccgcgctgatggcggagtattaccgccagcgcgccagcgcgggattgatcgttacggaagcgacgcaaatatctcccgagggacagggatattcctggacgcccggcctgcattccgcagaccagattgccggctggcagttgacgacccgagccgtacatcaggccggcggcgttattttttctcagctctggcacgtgggacgcatgtcgcacgcccgttttcatgcggatggtcaacccgtggccccctcggcgctggcgccggacgcccaggtctgggtggtggatgagcagggccggggccagatggtggactgttcaccgccgcgggcgctctcccggtcggatatccagcgtattgtcgccgattaccgtcaggcggcgcgcaatgcgatcgcggcggggtttgacggcgtggaagtacacggcggcaatggctatctgatcgaccagttcctgcggcggaccgccaaccagcgtaccgatgagtacggcggcagcctgaacaaccggatccgttttgcccaggaggtgctgaccgccatcggcgacgcaatcggccgcgagcggacgggcatccgcctttcccccttcattacccagcgcgggatgaatgacccgcaggtgatcgacgccatccttgccctggcggcctggtgcgaacagcagggcatcgcctttatccatctggcggaggcggactgggacgatgccccagccgttccccgacgcttccgcgacacgctgcgcgcgaccttcagcggcacgctgatcgtggccgggaattacgatcagcagaaggcggagcgcattcttgacgccggtctcgccgacctcgtggctttcggccggccgtttattgccaatcccgacctgccgcagcggcttctgcaccgctggccgctggcgaccgtcagcgatcccggcacgctgtttggcggcacggcggcgggctataccgactatcccttctatacggagcataaagagtga

SEQ ID NO: 222567 - DNA, 594 bp, Klebsiella pneumoniae
atgacccgcaaaatgttacctgccggccgtggtgtcgcggttgcccgcacgctggccagacgcggcctcattcgccgtcgctgcgccaccgcgctgctgcttgtcgcaatgtccggctccgcgtatgcagcccaacaggatctgctgaagccggcgcaactcatcgctgacggcagccttcccgcggccactcgcgccgccaatgaatatgtcgccaggcagtatgccacgttctggaataccggtgatgccgcgctggcccgggcggcgctggcgaagaattttatcgataaaacgcccccggaaggccgccgacaggggccggaaggagcgatcctcgcctccagagcgtttcgccaggcggtgccggatttacgctgtgatgtcgaacaaatgatcgtggccggtgaccgggtggtctcacacttacattttcatggccactttaccgggaccttcggcacccggcagggtaagggacaaaatatcgattttatcgccaccgatatctatcagatccgcggcggtaaaattaccgccaactggcatattgaagataacctgacgctgatgaaacagctgggcgcgcaataa

SEQ ID NO: 222568 - DNA, 1266 bp, Klebsiella pneumoniae
atgttcgcgcactgtgatgtgaacgccttttatgcgagctgccagactgcattccggccagacctgaaggggcgcccggtggtggtgctgtcgaacaacgatggctgtgtgatcgcccgctcggcggaggcgaagccgtttgtgaaaatgggcgaaccctactttaagcagaaggcggcgtttcttcgccacggcgtcgtggcgttcagcagcaactatgagctgtacgccgacatgtccaaccgggtaatgaccaccctggaagagctcgccccgcgctgcgaaatttacagtatcgatgaagccttttgcgatgtcagcggcgtgcgccactgcaaagatctgaccgactttggccgggaaatccgcgccacggtgcagcagcgcacccatctgacgctgggcgtcgggatcgccccgaccaaaaccctggcgaagctggccaaccacgcggcgaagcagtggcagcggcagacgggcggggtggtggatttatcctgcccgcagcggcagcggaagctgatggcgctgttgccggtgagtgaggtctggggcatcgggcggcggatcggtaaaaagcttgaggcaatggggatcggcacggtactccagctggcggagagcgatatccgctttatccgcaagcacttcacggtggtgcttgagcgaacggtacgggagctgcgcggcgagccttgcctggcgctggaggagtttgctcccgctaagcaggaaattatctgcagccgctcgttcggggatcgcattacggcctatgaggatatgcgccaggcgatctgcagctatgccgcgcgggcagcagaaaagctgcgcggtgagcatcagtactgccggttcgtctccgcctttgtcaaaaccagccccttcgcgctgaatgaaccctattacggcaacagcgcctcactgaagctgctgacgccgacgcaggattcccgggatattatcgccgcggcgacaaactgcctggacgccatctggaaagcggggcatcgctatcagaaggccggggtgatgctcggcgatttctacagccagggcgtcgcccagctgaacctgttcgacgagcttgccccgcggcagaacagcgccaggctgatgcaggtgctcgaccagctgaatgcgaaaaacggcaggggggcgctctattttgccggccaggggggccagcagcagtggcagatgaagcgagagatgctatcgccgcgctacaccacgcgatacggcgacctgctccgcgtcagataa

SEQ ID NO: 222569 - DNA, 168 bp, Klebsiella pneumoniae
atgagtcacgctgaagggggaacccttttattttttcgcggcacagacgaagagcttggagatgcgggcaggctgcgggccgtgtggctgagcgggcatcagaccccggcagacaaggcgttctcgcgtcgggtttcgattatgtccggtagtaacgctgatgattag

SEQ ID NO: 222570 - DNA, 546 bp, Klebsiella pneumoniae
atgatttcatctgagcatgccctgttaattatcgatatgcagcaggggcttttccgtggcccggtttccccgtatcaggccgatgcgcttctggcgaacgtttgcctgctgattgaaaaagcgagacaggctgaggtgcccgtcttctttgcccgccataccggagctgacgactctccgttctccgcgcaaagtccattaactcaactgctgcctgagatgggtgttaacggcgagcgggatatcgtctttattaaaaagtacccttcctgtttccagcaaactgaccttgcgcatcagctcgctcaggccggcgtaaaacagctggttattgccgggatgaaaaccgaattctgcgtggacacgacctgccgagcggcatcggcgctgggattacggacggtgctgatctcagatgcgcactcaaccatggataacgaacgtttatcagcgcctgacatcattggccatcacaatgtcacccttgccgggccatttgtgacgctgtcgaccgccgcagagtggcgcttttcggcagcgaaataa

SEQ ID NO: 222571 - DNA, 474 bp, Klebsiella pneumoniae
atgcaacatgcttataccagcaatatcacatggaccggcaatcagggcacgggtacctcgggttacaaggcttatgcccggacctgggatatcgcggtaaagggaaaagaacccattcattgttcaaatgatccattactgggcggcgatcccggcaaaatgaacccggaagatctcctgctctcttctctctctgcctgtcacatgctgtggtacttacatctggcctcagatgccggcattacggtcatggaatatcaggactcgccggtggcaacgggtgaagtatttaaagggggcgcgggtcgctttatttctgccaccctcaggccgaaaatcaccgtattaccaggaaccgatctcgacgccgccacggccattcatcagcagatccatcacgtctgttttatcgcccgatcggtcaatttcccggtcagttaccagcctgaatttattatttttaacgcagagtaa

SEQ ID NO: 222572 - DNA, 582 bp, Klebsiella pneumoniae
gtgacgcgtaaaaaagagatcgataaagaaaaggtgttggatgccgcggaaagcctgattcttgagtcgggtggccgattattcaccctggatgccgtcgccgagcgtgccggcataagcaagggtggcctggtatataccttttcttccaaggacggtctgattcacgctgtcctggagcgtgaagtggcccgttttcaggaggcagtccggcagcgtcttcctgccgctccggtgggaccgatcgaactcgtactcgcgcatatcgaagaggctttggcggaagaggacgtctccacccaaatggcggcgtttcttatcaccgcgctcgttcatgctcccggcatgctggaacccgtccgaagtctttaccgatcactcctcgatccgcttcgttcggtgagcggggagtacgttgccgtgcgccacgcgtttcttgccgtggaaggcgcttttttgctccgtgggtttggcctggcagatatctctgccgacgagataaaatcagtattacgctatgcccatacccaggttttgtcagccttagcggcatccaccggcaaggcctcgcatgcttcctga

SEQ ID NO: 222573 - DNA, 432 bp, Klebsiella pneumoniae
atggaagaatttgtaccatctgcagccatcgcacattttgtcatgaaggtgaaagacgttgagtcgagttatgccttctaccagggcctgggactacgcggtatcgacaaatttccggaaatggcaatcattgagcttcgcggcggcacccatctcctgttagccgcgaaagacgatcccatggcgggtgcgcttcacgccagccgcgttggccagcgtcctgattttattagcgaaaagattgatctgatgatcgccggacacaccagagccgatctcgaaaaatatcgtgccgaattaatggctaacggctactcccctgcggatattgccgaagcaccgctgtatgggcatgattacttctcaatgctggatcctgatggccatggcgtgagcgtctataccagccactgtggcgataagccagtgtga

SEQ ID NO: 222574 - DNA, 153 bp, Klebsiella pneumoniae
atgcagtggttcgaagccgcagacctgatcgttaaaggcatggaaggcgctatcgccgccaagaccgtgacctatgacttcgaacgtctgatggaaggcgctaaactgctgaaatgttcagagtttggcgacgcgattatcgcgaacatgtaa

SEQ ID NO: 222575 - DNA, 273 bp, Klebsiella pneumoniae
atggctgtgaaaaataagtccgtggaaccggaagaaacggttgcagaggatagccatgcgaccgtggtcgcacaggcggtaagtagcccagaacgcgaagcagtggtgtttcttggaccgcatcatcgttattcccgtggtgatgttgcgtgttttgaacgccagcgtgcggaagagctggttaagcgccgtatcgcggtatggccaaaggatgccgaacgcgcgctgaaaccgaaaccgggagacagcgattttgatactgacattggatga

SEQ ID NO: 222576 - DNA, 675 bp, Klebsiella pneumoniae
atgattaatagacctattgtatacagcgcaacagctcaggaatttgtcgatacattcaatggagacgcctcgcattgggatggtacgtgcgcagtgcgtaaagccttccgaaaagaagttagagattattatcgcgatgaacaagagttcacatgtccttattgtgggagattaagagaagaatttcatggtgggcaatgggatattgatcatattatccccaaatcttcttacccacaatatctctacaccccaagaaatcttgctgttacgtgcaaagactgtaatacgcataaatccaaaaaaaacccactactaattacactcgacagcggagcaccctaccctgagaatactgtgtcttacaaaataatacatccgcattttgactcttacaatgaacatattacgctaagaaaagataaaaaaggtcgatcatatcatgaggtaattacagataaaggccgcgaaactttccttatgtgcaatttgattcggttcagcgaagtgatttgtggcacctctgagtttattcctgagttgggaactgaaattggtatcactaatagctttagtgagtcagttcaagtatggttggcggattatgacgatctaaatcctgtcgatgcggaaatcgccttacaggctctgatgcaaaaaataagcctgcgttga

SEQ ID NO: 222577 - DNA, 1524 bp, Klebsiella pneumoniae
atgtttagaataaattcaatcatgaacgacagtcgagacaaggtaagagtccatgactttagtgaagactcacataacaattattacacaattctcactggcgataatgcaagcggcaaatctagtttattaagtaaggctataaatttctttctgtttagcaatgtaaataacaacgatcgcaaccccgctgttgaacttgaatgtttatcagagaggaatcctagcaaaatcattgccatatgcaactcaaagtttgatagattcacatccaataaaatcctcaatgataaattaaataataaagaagcaactcaaattacaatgagttacattcacccagaggtaaatgacaataccaggagagggatatcgggtattgttgaccaatgcattaaaaattcattgcgtcataaaaacataagaggtttgcaagacgctaatagagtgagagaagcatttatgatgtttgggttgcaatctgatttgcaccttaagtgtactttgaatacacaaaacataaagtatgtcttgtctatattaagcagtctggttaatggtggggtgatactgtctgacgaaggtattacgcataccaagaaaattgattattcaaaaaacgaagagttgaaaaataaaaacttcaagttggacaagtctattgaaattattttaagagaaagtgaatataaaaaccatttggatggattatacgacacgttgctaatgttagatgcagggaagtttacacagggaaattttagtagtatatatttttctgttgcagaaggaacaattagcacggaatctaaatatctatttgatgatctaaatgaagctgaaataattaatattttatttgtattggatgtgattaatgtttctgatattcaggttatgcatcttaactcaaaaaaagaagtcaacatagtttcactgagttctgggcagagaacattattcggcaatgcaattgtattaagtggatatgtagaaaaaaactgcatgatatgtattgacgaaccagagaatagtttacatcctgaatggcaacttaattttatgcgtttcatctctcttttatgccccgacactcttgaagctcatatacttattgcgacgcattcacctcaaattatttctggtatgcagtttgataatggttgtgtgctgtccctagaaaatagagataattttgattcaataataagaaaagaaaaaaaatatgaagaagatgggttttatgaactacagcctttgaaagcctatagagagcagtctgctggaaaacaacttacaggtgtttttaaaagccctgggtataaaaatgactttatcataaaaaaattactcttaatactgtctaagatatcaaaaaaaatcgctcttacaaaagatgataatgaatttatggacgaaatcagcatactcattgataaaaagagaataccggaaggagaccctgtacaactgatattcaagcagatccttagctttgagtatgcaaggagctctgatgattaa

SEQ ID NO: 222578 - DNA, 1770 bp, Klebsiella pneumoniae
atgacagttcgattgaataaagtatcaataactaacttcaggtcttgcaaatacaccgaagcttttctaaggccatatacagcattggtcggctataataacgcaggtaaatcaaatattatattggctataaaatggctcttagatggctccctactaagcgatgctgatatgtacgacccacaaaatccagtgcgagtagagggagtcattgaagggattactgatgatacgctgacgttacttagcgaagaaaatcagcaaaaaattgcaccattcatcatagataaaactttgaggtttgcaagaaagcaggacagagaagttgttgatggtgataagttaaaagtcaaaaaaacacttgaggtttttgatggtaccacatggaaaaaaaatcctggtggaatcgatggcgctatctcgaatcttttccctgaaccaattcatattcctgcgatgtctgatgctgtagaagatgcaaccaaaaacaaagccggtacaacaatcgcgaaaatattagctgcaattgttagcgaaataaaaaaagaatatgaagtaaaattctctgaaaacatctcggaaatcggtaaatatcttgctcatgatggttctactaggttggatggtttgaacaaaatagacagtggcgttagtcagaaagtaaatcagtttttccccgatgtgagtgtgaaactacactttcctacccccactctggatgaaatattcaaatcaggaaccttgaaagtatttgaagaacgagctggttcctcaataatgcaagacatcagccgattcggccatggtacacagcgttcaatacagatggctttgattcaatatttagctgatattaagaaaagaagcgatgatacaaaaaaatcaaacactcttattttcattgatgaaccagagttatacttacatccatctgccataaactctgtgagagaatctctggttgctttaagcgatcttggattccaagtcatcatctcaactcactcggccagcatgctctcagcaaaacatgcctgcaatgctatacaggtctttaaaagttccggaggtactatagcccggaaaaccatttcggaaaaaatacaagaattatatgaggcatcctcaccacaacttcactctgcatttaccttatctaattcatcatttttcttattttcagaagaagttttattagtcgagggcaaaacagaaacgaatgttttatgcgcactttataaaaaaattagaaacaatgaactcaaccctaccaagacaagtattgtagctgtagatggcaaaggcagtcttttgaaaatggccaatgttatcaattcaataggtataagaacgcgaatccttgccgattgcgattttctatcaatactactgacaacctctcataatgaagtattaagtagtgaatgcgatgaattactctcatctttaatcaatttgtctgatccacaaagcttgcaacttactaaccccattatttctatagactcactaaaaagcagttcaagcaaagactttataaaaatctgcaatcatcatgaagtaaaagcctcaatcaaaaaaattcatgataaattaaagagtgatggaatatatatttggaagtcaggggatattgagcaagtatacgggtttggaaaaaaacaaagcgaatgggataatttattagattgcttaagcgatgatgaaaaagaggtccgtgccattattaagaactatgatgaaatggaagatttcatcttatggatttga

SEQ ID NO: 222579 - DNA, 672 bp, Klebsiella pneumoniae
atgtgggagtacgagcagagccagcagcatccagagctgttcaacagattcgagccgcccgtgagcaacggttgcgagttgcaggaacagacggccgtagaaacggcgtggcgcctatgggaagtgatgggcgaaatcttttcgaaccgatggatcctgaagaacggagaggaaccatcagagctctggatcgctcagattgggtcgatgagtgaagcccagattacgctggtttgccggcagtgcatggagcgttgcgccgcgggcagcacatggccgccggatctcgctgagttcgttgcgctggtatctgccagcggtgctaacccattcaatctgacatccgatgcagtgatggcggagtacaaacgctggagaaacgagtcttaccgatattcgggaagcgacaaatacccatggaaacaggatgttctgtatcacatttgcattgagatgcgcagaactggagttgagaggaacctgacggagggagagctgaaaaaactggcagaaaacttactcacgaaatggaccaaacacatggctaacgggttttcgattcccccgattcgtcggcagttggcagcaccgaggcatccagcagggccgactccagcgcaggttctgatggaagagtacaaacgccgcaaggcggcaggtttaaccgagtaa

SEQ ID NO: 222580 - DNA, 345 bp, Klebsiella pneumoniae
atgcataatcccctggtcattgaatcgatcgccttgatcgcggccattctcgttggcgtctggagccagcgtgctttaccgctacacgccgacagccgaccgatcctcttcctgctgtgtctgttcgtcggcaccggcagcgcattgtgcctgctgctggatggtttagccctgttgctaaccggccagatagcgaccggcggtgtgcgaatatacggcccgttgctgctgctggtggtgctgtggaaacccctcaacggggttgtcggcatcatggagggggttttgcagcggcgagccgcaaaagggaagggtaaaggccagcgcgacggcggacgacgctga

SEQ ID NO: 222581 - DNA, 1284 bp, Klebsiella pneumoniae
atggcacaacagaaaccacacgacgtgaacgagccgtcacgtcgtcgcttactgaaagggatcggcgcgcttggcggcgcgctggccatcaccggcggctgcccggtagcgcatgcggcaaaagcggaaagttcccccgggacgctcacacctgacgcgcgccaggaaaaacagccattctatggcccgcatcaggcgggtattctgacgccgcagcaggcctcgatgatgctggtggcgttcgatgtgctggcgtcagataaagccgacctcgatcgtctgtttcggctgctgacccagcgtatcgcctttttaacccagggcggcccggcgccggatacgcctaatccgcgtctgccgccgatggattccggcatcttagggccgtggattgccccggataatctgaccatcaccgtctcggtcggccattcgctgtttgatgagcgctttggtctcgcggataaagcgccgaaaaagctgcagccgatgactcgcttccccaatgattcactggatgccgccctgtgccatggcgacctgctgctgcagatctgcgccaatactcaggacacggtgatccatgccctgcgcgatgtcatcaaacatacgccggatttgctcagcgtgcgctggaagcgggaagggtttatctccgatagcgcggcgcgcagcaaaggcaaagaaacccccatcaacctgctgggtttcaaggacggtaccgctaacccggcgagccatgacagcgcgctgatggatcaggtcgtgtgggtcacggcggatcaggacgagccgacctgggcggtgggcggcagctatcaggcggcgcgcatcatccagttccacgtcgagttctgggaccggacgccgctcaaggagcagcagaccatcttcggccgcgacaagcacaccggtgcgccgctggggatgaaaaacgaacacgataccccggactacagtaaagatcctaacggcgagacgatcgcgctggatagccatattcgtctggccaaccctcgcacgccggaaacccagtccagcctgatgatgcgccgcggctacagctattcgctgggagtcactaatgccgggcagctggatatggggctgttgttcgtttgctatcagcacgatctggaaaagggttttctgacggtgcagaaacggcttaacggcgaggcgctggaggagtacgtcaaacccatcggcgggggctacttctttgttttacccggcgtggtggatgataagcactacctgggacagacgctgctgcaggcttga

SEQ ID NO: 222582 - DNA, 222 bp, Klebsiella pneumoniae
atgactgccgctgacgatggcaaatgtcacattcagaaacaaagcctggcgaaaaaaatcccctcgcgccgcctgatggcgctaacctgctctgctgccgaagaaaaaatagtcagcaaaaaatgtatcctgatgctacatcctcgccgcaccggccagtataacggaggcatcgcttcccgcttctcagccgctcaggccgcgctgcgcaaggaaaagtaa

SEQ ID NO: 222583 - DNA, 1122 bp, Klebsiella pneumoniae
gtggtcaaacatcatcgcttaaaagtgagaaccggaatgaaaaaaacctatcgtattgccgccatcccgggtgacggaattggcaaagaagttctgcctgaagggattcgcgtgctgcaagccgccgcacagcggtgggatctgtcattgagcttcgagcagatggagtgggcaagctgcgaatattatgcccatcacggcaagatgatgccggacgactggcgcgagcagctgcagggcttcgatgccatctacttcggcgccgtcggctggccggataccgttcccgaccacatttcgctgtgggggtcgctgctgaagttccgccgtgagtttgaccaatacgtcaacctgcgtccggtgcgtctgttccccggcgtcccctgcccgctggcgggcaaaaaggccggcgatatcgatttttacgtggtgcgcgaaaataccgaaggcgaatattccgccctcggcgggcgcgccaatgaaggcaccgagcatgaagtggtgattcaggagtcggtctttacccgccgcggcgtggaccggatcctgcgctacgccttcgaactggcgcaaagccgcccacgcaaaacgctgacctccgcaaccaaatccaacggtctggcgatcagcatgccctactgggatgagcgggtggaagagatggccaaaaactatccggatattcgctgggacaagcagcatatcgatatcctgtgcgcccgcttcgtgctgcagccggagcgttttgacgtggtcgtcggctccaatctgttcggtgatattctctccgatctcggcccggcctgtaccggcaccatcggtattgcgccatcggcgaatctcaacccggagcgcaccttcccgtcgctgttcgaaccggttcacgggtcggcgccggatatctatggtaaaaatatcgccaacccgatcgccaccatatgggccggggcgatgatgctcgattttctcggcaacggcgatgagcgctatcacgccgcgcacaacggcattctggcggcgattgagcaggtgattgccagcgggccgaaaaccccggatatgaaaggcagcgcgtcaacgcaacaggtcagcgacgctatctgccaggccattttgtcttaa

SEQ ID NO: 222584 - DNA, 342 bp, Klebsiella pneumoniae
atgaacgttgaattacatactgagcagggcgtcaaggtcattgtccccctggttcgccggctggatgcttccgtcgcatcagcgtttaagcagcaggttcttgtggcccttgacggtcagacgaaaaacctggtgctggacctgagccacgtcgatttcatcgacagtagctgcctgggcgccctggtatccattctcaagagcgtcagtgggcagggagagctggtgctctgctcggtcaatgggacaatccaaaacctgttcaagctcacccgcatggatcgcgtcttttcgattaaagagactcgtcaggatgcactgaacctgttgactgcgaaatga

SEQ ID NO: 222585 - DNA, 2427 bp, Klebsiella pneumoniae
atgcctgtcattaacccgcaagatatcaaagcattacgggcgttggttgaacagaaattaaaatacacgctgtgtgttagcttaaataaagcgacaaatggcgatatttttaacgcggtggcgctagccattcgtcattttcagcaggaccattttctgacgagccaggcgcggcagcgcgaagagcgaaaaaagcgcgtttactacctgtcgatggaatttttactcggccagtcgctgcgtaataacctggtgaatatgaatttactggacgagatgcgcctggtggtcaatgacctggggtttgatcttgaactgatccttgacgaggagcctgacgccgcgctgggtaacggcgggttaggccgtttagccgcttgctttatcgactcgatggccacccttgatattgctgcatccgggcatggcatcaaatacgaatatgggctttttcgccagtcctttcaaaacgatcagcaggtcgagcatcctgatgactggcactccatgcattccccatggctggtggagcatcacgctcagcaaattctgatcccgctggggggatatattgagcacagcgaagatattgatggcaactacaatccgatgtggctcggttggaaaaccatcatcggtattccccatgattattttgtttccggctaccgggatacatcaactaacacgctgcgcctttacagcgcggtggcctctgactcctttaatatccatatttttaatcgcggggattatattaaggcagtaagtgagaaaatcgcctcggagaatatttcaaaaatactctatccttccgatgaggtcctgaccggaaaagagctgcgtctgacgcaggagtattttttggtggcctgtacgctacgggatatttttcgtgactatgccgaggttaatgacgacattactttgctagcgcagcatgtggctatacagcttaatgacacccatccggcattagcggtggtggagctgatgcggatcctggtcgatgaataccgactgccatgggagcaggcgtgggagataacgcaaaatacctgcgcctataccaatcatacgctgatgccggaagcgctggagacctggccggtgtcgttgtttgagaaactactgccgcgtcatttgcagattatctttgagattaaccatcgtttccttgaagaggtggcccggcgctggccggataaacctcatctgttatcttcactgtctttaattgacgagcatcacgataagcaaattcgcatggctaatctggccattgtcggtagccaccgcgtcaacggagtagcgtggctgcattcggaactggtcaaaaaacagttggtgcccgacttctattttatgaccccggagaaattcattaatcagaccaacggtgtcacgccgcgtcgttgggtgcagcaggctaacccgggcctggcagaatttttacagcaacaactgggggaagggtggccaactgatttacccctgctttcccgcctggaggagctggccagcgagccagccgtgattgagcgtatccgggccataaaatttgccaataaaaccgcactcagcgagctggtggctcaacgctacggcatcgcgctggatccgctggcgatgtttgactgtcaggtcaaacgtattcatgaatacaagcgccagttgctcaatattctgcacgtgatcgcgctgtatctggatatcaaagagaacgggcgcactatcgcgccaaaggtgcatctgtttgcgggtaaagcggcgccaggctatcggatggcaaagctgattattcagttgattaataccgttgcccgaaaaattaacagtgacccgcaggttgccgggcagcttaaagtggtattcctcgaagattataaagtctcgctggcggagaaaatcattcccgccacggatctctctgagcaaatttccaccgccggcaccgaggcgtccggcaccagcaatatgaagtttgccatgaacggggcgttaactattggcacctatgatggggcgaacatcgaaatccgcgaggcggtggggagcgagaatttttatctgtttggcgcggtggcggaagagattgaagagagccgacgccttgggcggcatcatgggttctatcatgacaacccggctatcgcgcgtgttgtcgatagcctggtgtccgggctgttttcagccgatcgcgagctgtttgcgccgctgcatcagatgctgacaggggccgatcattactgccatctgctggatttcgacagttattgtctggtgcaacggcaggcaatggccgattttgaacagccggatcagtggcatcgccgggccttgctcaatatttgccggatgggggaattttccagcgaccgaaccatccgcggctacgccagggatatttggggtatcaggtgctaa

SEQ ID NO: 222586 - DNA, 2616 bp, Klebsiella pneumoniae
atgacacaacagccccaagccaaataccgccacgactatcgtgcgccggagtatctgattagcgatatcgatttgacctttgacctggatgccgcaaaaaccgttgttacggccgagagcaaggtctcccgccacgcggcagcgtctgatgtgccattgcgcctggacggcgaagatctgactctgatttcgctgcaggtgaacggacagccgtggagcgactataaagaagaaaacaatcagctggtgatcggcggcctgccggagcatttcaccctgaccatcgtcaatgagatcagcccggcggcgaacaccgcgctggaaggcctgtatcagtcaggcgaagcgctgtgcacccagtgtgaagcggaaggtttccgccacatcacctggtatctggaccgtccggacgtgctggcgcgctttaccaccaaaattatcgccgataaagccaaatatccgttcctgctctccaacggcaaccgtatggcggaaggggaactggagaacggtcgtcactgggtacagtggcaggatccattcccgaaaccgtgctacctgtttgcgctggtggccggtgatttcgacgtcctgcgcgacacttttaccacccgctccgggcgtgaagtggcgctggagctgtacgtcgatcgcggcaatctcgaccgcgcgccgtgggcgatgacctcgctgaaaaactccatgaaatgggatgaggagcgctttggcctcgagtatgacctcgacatctatatgattgtcgccgtcgacttctttaatatgggtgccatggagaacaaagggctgaacgtctttaactccaaatatgttctggcccgtaccgataccgccaccgataaagactacctcgatattgagcgcgtgattggtcatgaatatttccataactggaccggcaaccgcgtcacctgccgcgactggttccagctcagcctgaaagaggggctaaccgtgttccgcgatcaggagttcagctccgacctcggctcgcgggcggtgaaccgcatcaacaacgtgcgcactatgcgcgggctgcagtttgccgaagacgccagcccgatggcgcacccgatccgtccggatatggttatcgagatgaacaacttctataccctgacggtctatgaaaagggggccgaagtgatccgcatgctgcacaccctgctgggtgaagaaaacttccagaaagggatgcagctctattttgaacgtcatgacggcagcgccgccacctgcgacgatttcgtccaggcgatggaagatgcctcgaacgtcgatctgtcgcacttccgccgctggtacagccagtccggtacgccgatcgtcaccgtccatgacgactataacccggaaaccgagcagtatacgctcaccatcagccagcgtacgccgccgaccgccgagcaggccgagaagcagccgctgcatatcccgtttgccatcgagctgtacgataacgaaggtaaggtgatccccctgcagaagggcggccatccgctgcacccggtgcttaatgtgactcaggctgagcagaccttcgtctttgataatgtctatttccagccggtaccggccctgctgtgcgagttttcagcaccggtgaaactggaatacaagtggagcgatcagcagctcaccttcctgatgcgccatgcgcggaatgatttctcgcgctgggatgcggcgcagagtctgctggcgacctacatcaagctgaacgttaaccgtcatcagcagggacagccgctgtcgctgccggtgcacgtggcggacgccttccgcgcgattctgctcgacgagaagattgacccggcgctggccgccgagatcttaaccctgccgtcggccaacgaaatcgccgagatgttcgccattatcgatcctatcgccatcgccactgtgcgcgaggcgctcacccgcaccctggcgaacgagctggcggacgaattcctcgcggtatataacgccaataagctcgacagctaccgggtggagcatgccgatatcggtaagcgcgccctgcgcaatacctgcctgcgctatctggcattcgcagaaccgacgctgggcgataagctggtggcggcgcagtatcaccaggcggataacatgaccgacgcgctggccgcgctgtcggcggcggttgccgctgagctgccgtgccgcgatgcgctgatgcaggagtatgacgacaaatggcatcaggacggcctggtgatggacaagtggtttatcctgcagtccaccagcccggcggccaatgtggtcgaaacggtacgcggtctgctgaaccatcgttcgttcagcatgagcaacccgaaccgcgtgcggtcgctcatcggcgctttcgccagcagcaacccggcggcgttccatgcggaagacggcagcggctaccagttcctggtggagatgctgaccgagcttaaccagcgcaacccgcaggtcgcatcgcgactgattgagccgttgattcgcctgaagcgttacgatgtgaaacgccaggcgctgatgcgcgccgcgctggagcagctgaagggtctgaaggatctctcaggcgatctgtacgagaaaatcagtaaggcgctggcgtaa

SEQ ID NO: 222587 - DNA, 1239 bp, Klebsiella pneumoniae
atggaacgctccagtgagaggatgctactgcgcaccatgacacaattcacttctcctgtactgcactcgctgcttgatacggatgcctacaagctgcacatgcagcaggctgtcttccaccgctacggcgatgtacatgtggcggcggagtttcgctgccgcggagacgacctgctcggcatctatgccgacgcgatccgcgagcaggtggagtccatgcgcgacctgaggctgcgggatgatgaatatcgctggctgtccacccttcctttttttcgccaggattacctcgactggctgcgcgattttcgctatgacccacgccaggtcacggtcaccaatgacaatggcaagctgaacattcgccttaccggcccatggcgggaagccatcatgtgggaagtcccgctgctggcggtgataagcgagctggtacatcgctaccgttcacccgagacgggcgtggaacaagcgctaaacgcgctggaacataagctaggcgacttcgccaccatgaccgctggcctcgacatgagcgccttccgtctgatggatttcggcacccgccgtcgtttttcacgcgaggtgcaggaagctattgtgcaacgcctgcagcaggagccatggtttgttggcaccagcaactacgatctggcgcgccgtctcaacttaaccccgatgggcacccaagcccatgagtggttccaggctcatcagcagatcagcccgaacctggccagcagccagcgggcggccctcgccgcctggctggaagagtatcctgaccaactgggcatcgcactgaccgactgcatcaccatggatgcgttcctgcgcgatttcggtccggagttcgccacccgctatcagggtttgcgccacgactccggcgacccggtggaatggggtgaaaaagccatcgcccattatcagaagctgggcatcgatccgctgagcaaagtgctggtcttctccgataatctcgatctggcgaaagccgtcgacctgtatcgccacttcgcctcgcgggtgaagctgagctttgggatcggcacccgtttaacctgcgatctgccgcaggttaaaccgctcaatatcgtgattaagctggtggaatgtaacggcaagccggtggcgaaactctccgacagcccggggaaaaccatctgccacgataaggccttcgtccgcgccctgcgcgaggcgttcgacctgccgccgattaaaaaagcgagctaa

SEQ ID NO: 222588 - DNA, 1002 bp, Klebsiella pneumoniae
gtgatcgatctgcgcagtgataccgttacccgccccgggcgcgccatgctggaagccatgatggccgccccggtcggggacgatgtgtatggcgacgaccctaccgtcaatgaacttcagcgctacgccgccgacctggccggcaaagaggcggcgctgtttctgcccaccggcacccaggccaacctcgtcggcctgctcagccattgccagcgcggcgaagagtatatcgtcggccagggggcgcataactatctgtacgaagccggcggggcggcggttctcggcagtattcagccgcagccgattgacgccgcggcggacggttcgctgccgctggataaagtcgcagcaaaaatcaaacctgacgatatccattttgccccgacccgcctgctgagtctggaaaacacccataacggtaaggtgctgcctcgcgactatctgcaggaagcctgggcgtttacccgccagcgcaatctggcgctgcacgtcgacggcgcgcgcatctttaacgccgtggtggcctacggctgcgagttacgcgatatcgcccaatactgcgactccttcaccatctgtctgtcaaaggggcttggcgccccggttggctcgctgctggtcggtagtgaggcgtacattcgtcgcgccgttcgctggcggaaaatggtcggcggcgggatgcgccaggcgggcattctggccgccgccgggctgtacgcactgaaaaataatgtccagcgcctgcaggaggatcatgataacgccgcgtggatggcggatcagctgcgcgccatcggcgccgacgttactcgtcacgataccaacatgctgttcgttcgcgtcggtgatgagcaggcccgggcgctcggcgagtttatgcaggcgcgcggcgtgctgatcaacgcttcgccagtcgtccgtctggtcactcacctggatgtcgaccgtcagcagttgagcgaggtggtcgcccactggcaggcttttttacaacgctaa

SEQ ID NO: 222589 - DNA, 681 bp, Klebsiella pneumoniae
gtgttaactcgtgatttcttgatgaatgcggattgtaagacagcgtttggcgctattgaggaatcgctactctggtcggcagaacaacgcgcagcctcgctggcggcgacgctggcctgccgcccggatgatggctcagtatggatctttggctacggttcgcttatctggaacccggcgctcaattatcgcgagtcctgcaccggcacgctgccgggctggcaccgcgcgttttgcctgcggttgaccgccgggcgcggaagcgcctgccagccgggacgcatgctggctctgaaagagggcggccggactaccggcgtcgcttatcgtctgccggacgacacgctggaagaagagctgactctgctgtggaaacgagagatgatcaccggctgctatctgcccacctggtgcaagctggagctggacgacgggcgaacggtaaatgctttggtgtttattatggatccgcgtcatccgctgtttgagccggataccagcgcccaggtcatcgctccgctgatcgcccgggccagcgggccgctcgggaccaacgcccagtacctgttttcgctggaacaggcgttaagtaagctcgggatgcacgacgccagtcttgatgatctggtggccagcgtccgcgcgctgttgggcgagagcccgacgccaggcctggcctga

SEQ ID NO: 222590 - DNA, 177 bp, Klebsiella pneumoniae
atggcctcctgtttgagcataaagtttaagtctggaacgcaggcggcaggctatcaagccgatgatgagttaaaaatgaattttagtaattatctgaataataataataaaaatagagtaatcgcaaattataataaactaatcaagatatctctagacacccgtaaatttaagtaa

SEQ ID NO: 222591 - DNA, 813 bp, Klebsiella pneumoniae
atggggtcattagcggatttcgaatttaacaaagcgccattgtgtgatggcatggtcctcatttctgaacaggttcgcgacgattttccgacgcgttttgtcgaggaagagctgcagcggctgctgcgcctcgcgcaggaggagattgcgccttcgtgggaccaggaacgccagatagaacgcctgctggcgctgttttacgaggagtggggctttggcgcctcgcagggcgtttatcgtctttccgacgcgctttggctggataaagtgctggtcaaccgtcaggggagcgcggtgtcgttaggcgcgatcctgctgtggatcgcccagcgtctggggctgccggtggtgccggtgatcttcccgacccagatgctgctgcgcgcggacccggaaaccagcgaagagatgtggctgattaatccgttcaatggcgaaaccctcgacgaacatactctggaggtatggctgaagggcaacatcgggccggtggcggaactgtttaatgaagatctcgacgaagcggataacgccgaggtgatccgcaagctgctggacaccctgaagtcggcgctgatggaagagcggcagatggagctggccctgcgcgccagcgaagcgctgctgcagtttaacccggaagacccgtatgagatccgcgaccgcgggctgatatatgcccagctggattgcgatcacgtggcgctgctggacctgagctattttgtcgagcaatgtccggaggatccgattagcgagatgatccgcgcacaaatcaacacgatttcgcacaaacaaattacattgcattag

SEQ ID NO: 222592 - DNA, 1416 bp, Klebsiella pneumoniae
atgatgacaacacataaagaccaccgctatcaaaccggtggcgacccgcgcacgctggccgattttattgccctgcgtgcggaaatgaacaaactcagccacccggcgcggccggacattaactggccgtatgccgagcagcttgcccgctcgctgctggagcatcatggcgcggatctgcagactgtcgcctggtatacgctggcccgcgcccggctgggcgggctggcagggatcaacgaggggctgacgctgatggaaacgctgctggttcatcaggggaaaaacttgtggccgcaggcgctcccggtccgcacagagatcttccgcaccctgagcaagcggctgcggcaggtgatccgtaccctgaatctcaccccggaggatgttgagtcgcttgagcaggctgaacgttcgctgcaaagcttcgacgcggtgctccagcgccttgagatcgctcctgaaaaccagctgagcgacctgcgggcgctgctgcacagcacggcaactcgcttcgagagcctcgaccctgcgccagcgcttcccgctgcgccgccggtggtggtgtctgcagtacaactttccggccctctggtcagcgaagaggatgtggcgaaggttgaaccagtgccagaactaaaacgtagaccaaaggctgagccgctggcgccgccttcgccggcaaatcggcccgtgccggtgaaggcatcgactccggtacctgcgccgcgctggaagccatttatcgccgggatggtcaccatgctggcggtgtcgggcatcgccatcggcggatggctagcgctgcgtcagaccgatttgccgtcgactgcgatgacgcaacaggccgggccgctagcggacctcccgggggcaacccccctggcgccggtcgatctgcgccaggcgcagcgccagcttgacgttctcgcccgcctggacccggactgggcgataagctacggcgaccggctggtccggctggcactgaaccgctggccggaacaggcaaaaccgctggcgcagcagtggcaacggcagctaagcgctgcggcactgcccgcggaacacctcaccggctgggcggagggcatgcggcagctgcaacggctcgccggccagctcaatgccctcgacgagcagaaggggaagtacctgacggtgagcgaactgaaaacggcggtgtttgccatcatgcagtcgcttaaccgtgccgttccgctggaggagcaattgcgcgagctggccgcgctccccgcgggtcaaccctggcctgccgcccgcggcagcctcgccgaactgcatctgcaacagctgatcgtggagtatgccctgctgaagcgaaatcagccggcgtcgccgcccgctgcgctccccgaaaccggtgagccctcggtgagtgaggcggtgaaataa

SEQ ID NO: 222593 - DNA, 1014 bp, Klebsiella pneumoniae
atgaggcaacacggcaaggtatcggaagtgacggaaaagaagacggctgtctatgtggatgaccaacagcgcatcctgatccgccagctggcgcgcagctggctgtggcgcagcgagctgccgacctggctgctgttggtgacggtttacggcggctggtttgcctgcgtggcgggctggcggacgctgggcctgtttccggccacgctgctgctgatctggtttaccgcctggtatatgtccttacagcatgagctgatccatgggcatcccacccggctggcatggtttaaccagctgctggggacgctgccgctggcggtctggtatccctatggcgtctatcgcgacagccatctggcgcaccatcgcaaccatctgctgacgcaccccgaggatgatcccgaatcgtactacgtgaccgcggaaagctggcagcgcttctcagcctggcaacgccgccttatccacctgcgcaataccttctgggggcgtctgctgctggcgccgctgatggatatcgttcacaccctgcgcagcgcgctgcgggctttccgcgagggcgaccgccgcgccatcgccatgtggagcctgcatctgttgctgctgacgggcctgctggcctggatggcggcgcagggtttatccccgctgtggtttgtgctggcggtgagctacccggcgctggccctgaccaaagtgcgctcttttctcgaacaccgggccgcggatgacccgctggcccgctcggtgatcaacgaggccgggctcccctggcgagtgctgttcctcaatctcaactaccatgcggtgcatcatgacctgccaggggttccctggtacgctttacgtcagctgtatctgcatcgccagacggcctatctgcagcgtaatcaggggttcctggtgcgtgggtacggtgagtggcgacgccattttagccgccgggcggtggcggtgaacgcccatccgggctttggcgagcaggcgcaggcgggaggagaacatggctga

SEQ ID NO: 222594 - DNA, 1209 bp, Klebsiella pneumoniae
atgaaaacatcaggtacaaaccttgaacatgcccgggtgcataaccgccgggtgatcattgaggcggtgcgtttacatggcgagctgacccgcgccgagctggcgcggctgaccgcgctgaccccgcagaccgtgtcgaatattgtggcggagctggagcagatggatatcctgaccagccaccaaccgcggcgcgccagcggccggggacagccagcggtgccggtgagcctcaatcccgccagcgcctggtcgattggcatccatcttgatcatcagacgctgattgtggtgctggtggatctgactggcgaggtccattttcgccgactcattctggtgcaaaagccccagcctggtgcgacctttgcccgcctcgctgaggtgctggatgagatccgtgcgctgccggcgctggactggtcgcgggtgctggggatgggggttgtgatgccggggccctttggcgtggaagggatttcgtcgacgggacccacgacgcttaacggctgggaaggggtcgacgtggcggcggagctcgggcgactgagcggcctgccggtgaccctcgaaaacgacgccacggtggccgccattggcgaacgctttcacggcgtggcgcggcagctcaactcctttgtctatctctacataggcaccggtctgggcgccggaatttttaccgatggtcatgtgtataccggccatgctcataacgccggcgaggtcgggcatattgtggtcgcgccgaatggtcgcccttgctattgcgggaatgagggatgtcttgagcgctatgtttccctgcaggcggcctatgagttttgcggactcgatccctatcgcgccctgccggaggatctgctgtcggtggacgctgcgcttttcgaccagtggatcacgagcatcctggcgccgttgcgtcaggcgatcaatttgctggagtgcgtcttcgatgccgagacggtagtggtgggcggcatgatgcccgccccgctgctggagagagtgctggcgcgtctgccgccgctgtatcagtccgtccgcgggcgttacctgccggcccagcgtgtcaaaatggggatgaccggcactgataccgccgcgctgggcgccgctgcgctgccgatctttgacgaatttaatccgcagtttcaggtgttgatgaaagcggtaaatacaaacgcgctttttggcaaagctaagtaa

SEQ ID NO: 222595 - DNA, 1245 bp, Klebsiella pneumoniae
atgaaataccacagcgcactacgggtcaacgcctgtctgctggcgatgctcgttatcagtgggagcgtcagcgcagcgacccagattaatgccctgtttatgacccaggcggcctatagcgaaaacgacattcgcgcgatgaccagcgatttcgaaaagcaacatcctgatgtgaaggtcaacctcgaattcgttccctacgaagcgctgcacgacaagatcgtcgccgcccgcggcgcggggggtaacggctacgacgtggtgctgttcgacgcgatctggccggcggagtttagccgcttcgatctgctgcaggatgtctcttcacgaattgccccagacgagcgtgagaagattttccccggggcgatgaataccgtggtgtatcaaggcaaaaccctcggcatgccgtggatcctcgacaccaaatatctgtactacaacaaagccatgctggacaaagcagggatcaaaacgccgccagtcagctggcagcaggtgatggacgacgctaaagtgcttaaggacaaagggatcgttaaatatccgctggtgtggagctggtcgcaagcggaagcgctggtctgtgattacaccaccctcgtctccggcttcggcgggagcttctaccagaacggcaagctcgatttttcgacgcccgcctcgctgaaagcggtcacgctgatgaaaacctcgctcgatcaggggctgagcaacccggcatcacgtgaataccttgaggaggatgtgcgtaaggctttctccaatggcgacgccgcctttgcgctcaactggacctatatgtacaacatggccaacgatccgaaacagagtaaagtcgcaggtgatgttggcattgtccccgccccaggcgataccccggataaacccggcgctgtcaacggttcaatggggctgggcatcgccaaagccagtcagcattcggaagaggcctggcagtatattcactacctcacctcccagccggtacaggacaagtatgccaaactgagcctgccggtatggaaagcctcgtaccaggatcctgccgttgccaaaggccaggagagcctgatcgccgccgccgacaagtcgttgaacgtgatgctctctcgccccgaaacggcagattactcgcgcctgtcaaacaccctgcaacagcagcttcaatcggtactgcagggtaaagccacgcccgacgtcgccctcaaggcggtcgacaccagcgcggcccgtctgcgttaa

SEQ ID NO: 222596 - DNA, 909 bp, Klebsiella pneumoniae
atgctgagtctgcaacgacgcgagcatcgtcaggcatgggtgctgttagcgcccatgcttatcgcgatgtttatcctcactgcgtggccgctggcgcgcaccctgtggctgagtttcactgatactgcgctggcgggaagcggcgaggcgacccactacgtctggctggataattatctttatgccctgaccgacccggactttcgcgccgccttcgcgcgaacgctctatttcaccgtggtctcggtggcgattgagggggcgatcggcgtactggtggcgctgttgttgaatcagcgttttgtcgggcgtaatgtcctgcgggtgctggtgatcctgccgtgggcgttgccgacgatcgtcaacgccatgatgtggcggcttaactttaatcccgactacggcagcgttaacgccctgctcagccagctggggctgattgacagctatcgcagctggctgggctcgccggattctgcgctgcacgcggtgatgctgacggatatctggaaaaactacccgctggtcactctgctggtgctggccgcgctgcagtccgtccccgacgatctatacgaggcggcgcggctcgacggcgcctccgcctggcggcgctttcgcgccattacctttccggccattgtgggccctcttggcgtcgcgctggtgctacgcaccatcgatgccttcaaagtgttcgacattatctatgttatgacccgcggcggcccgctggacagcaccaaaacgctgagcttttttgtctatcaggagtcattcagctatctgcgcgccggcagcggcgcggcctacgccatgctgatgagcctgatgtgcgccgtactgatcgccctgtatctgtttttgctgctgcgtcagcggcgccggagtattgatgatgaagcgtaa

SEQ ID NO: 222597 - DNA, 843 bp, Klebsiella pneumoniae
atgatgaagcgtaaagggtacatcgtgctgcgttacatggcggcgctggcggtggcggtctcgatcctcgccccgatgctgtggctatttttgatgagcgtcagcaccaccgcggacctcacccgcgtcccgctggcgtggatcccgcggcagtgggactttagccgctatggccatctgctgtcgctggcccctggcgaacccggggcgctgtttctccccgcgctgggcaacagcgtgctggtggccgctggcgcgacgctggtctcgttgttgctggcgatccccgccgccttcagcttttctcgctaccccggacgcgacggctggctgtacgccggcctcggcatctatatggtgccgcccgtagcctttgtgctgccgctctattttattctcgaacactttggcctgctcaacacccgaagcggactggtgctggtctattgctcgctgatcgtgccgtttctgacgtggatggtaaaaaaccagttcgataccctaccgcaggatatcgaacaggcggcacggcttgacggtctgcgcatctggcaagtcttgctgcgcatcaccctgccgctggcgaaaccgatgcttggcgccgccgcgctgttcggttggctgctggcgtgggatgagtttttctatgcgctactgtttaccagcaacctcgccgcccaaacgctgccggtgaccatcgccggcttcaccgccggccgcgccaccgatgacggactggtggcggcggtaggcatactcgcctcagtccctccgctgctgattgcaatctggttgcaaaaatcgctggtcagtggcctcaccaacgggggaagtaaaggataa

SEQ ID NO: 222598 - DNA, 963 bp, Klebsiella pneumoniae
atggataacaccaggacacctgtgctctatatcgtgggcaattacaatattgatttagtgatgggaaccctgccccactggcccgcgcagggaactgagatgatgctcgagcacagcgctctgcggcccggcggctctgctggcaactgcgcgctggccgccgccgccatgcacctgccgcactgcgcggtcggctgtcagggcgacgacgcgtttaccccgtggctggcggcacagtttcccggcgatagcgcgcgctggccgcagtatccctgtgaaacctcgctgacggtggcggtcacccatcccaacaaagagcgctccttcctcagcaaccacggacacattacccgcctgaccgccggggatgtgctggaccagctgcctgccgccgctggcgagggcgatatcgtgttgctctgcggcacctttctctgtaccaggctgctgtccgactatccgcagctgctcgccacgctccgccagcgcgggtttacccttgccgtcgataccggctggccgccccagggctggagcgacccgctgcgtcatgaggtcgaccgctggctgggcgactgcgactggctgttgctcaacgacgttgaaacccagcagctggccgcccgcccgaccctcgccgaagccgccgcagcccttgcggcacggctcagcggcagcggcgggtgcgtggtgaagcgcggcgctgacggcgcggactgctggacgaccgacagccatcaccatgcgccaacccggcccgtcaccgtcatcgataccatcggcgctggcgacagctttaacgcgggctttcttgccgcgctgctaagcggtaaaccggtgccagaagcgctgcgctggggaaataccgtcgccgcgcaggcgatcggcacctccccgcgccgctatcccgactggcataccctgcaacatcaccttgaggaggccaccgatggccagtgttga

SEQ ID NO: 222599 - DNA, 1086 bp, Klebsiella pneumoniae
atggccagtgttgaactgatcgatgtcgccaagcgatacgggaaacagacggtgctccagccgctggacctcaccatccccgacggcagctttaccgtgctggtgggcccttccggctgtggcaagtcgaccctgctgcgcctgctggccggtctcgaaacgctttccggcggcaccattctgatgaaccagcggccggtcaacgatctggatcccgccgaccgcgatgtggcgatggtctttcagagctatgcgctttacccccacctgacggtggcggaaaatctcgcctttcatatgcaggtggaaaaggtggataagcagttacagaaaagcaaagtgcagcaggtcgccagcctgctggggattgataaactgctggctcgctatccgcgtgcgctctccggcggccagcgccagcgggtggcgatgggccgggcaatggtcagggacccgcaggttttcctgttcgatgagccgctgtcgaaccttgacgctcagctgcggatggagctacgcgcggagatcaaatccctgcaccagcgcatcaataccaccatgatctatgtcacccatgaccaggtggaggcaatgactctggccgatcagattgtggtgatgcgcgacgggcagatcgtccagcagggggcgccgctggccatttacgaccagccatgcaacaccttcgtcgcccgctttatcggctccccgccgatgaacctcctgcccggtcagcgagacgtgcgcaatggccagcccggcgtcgcctgcggcgcgctgtggtttccgctggccgaacgctggcatcaggcggtggcgaaccagggcgatgccccgttgattgtcggcctgcgcccgcaggatattctgccggatgcgcatggcgcgctggcaacggtaaacattatggaggtgacgggggagtccaccctgctgcatctcgactggcagggttttccggtgcatgtgcaggttgccggcagggtggcggtcgcggcgcagcagacgctggggctgactctccgctgcgagagcctgcatctgtttgatgccgccagcggcgagcggctggcggagacgcgttaa

SEQ ID NO: 222600 - DNA, 930 bp, Klebsiella pneumoniae
atgctaagtcgtacggcgagtgaactgttctggatggcccgctaccttgagcgggcggagagctacgcccgggtgctggacgtgacctggaaattatcaatgatcccccgccacagccagcagtcgcgggatctggcgctaccgctgaatttgtcgatgacccacgagctgtttcaggcgcgccatgcccgctttaccatgagcaatctgctcaacttttttgccctcgatggcaacaacccctgcagtatttacagctgcgtggagatggcgtggaacaacgcgcacgcggtgcgcggcagtctgtcggccgaagtgtgggagagcatcaatgccacccgcatcgaactgcggaccctccgccagcaggggctgggcgaactggggagcgacggctttttcgagtgggtgaaagagcgggtgcatctgtttcgcggagcggtgataggcacgctgctgcgcaacgacgccctgagttttatcggtatcggcacgctgatcgagcgcgcgttcgccaccacccagctgctgctgattaaggatcaacagctgaccaacgatccggacccggtgcgcgaatactaccggctggatactctgctcaatgcggtcagcgcccgcgaagcttacaacagcctctaccgccagccggtcagtcgcgaaacggtgatggagctgctgatcctgcgtaacgatattccacgttcgctgcgcgccagcattgccgacctggtgggcgaactggagaagatcgccaacgatcgctcttatcagccgctgcgcctcgcccatcagctcaacgttgacctgcgcttcagcacccgtgacgacctggcgcaggcggacctgcagaccacgcttaacggactgctggcgagaattaacgccctgtccgacagcatcagacaaacctatctggaggccttatga

SEQ ID NO: 222601 - DNA, 1392 bp, Klebsiella pneumoniae
atgaaagtaaactatatggctctgattatgagtggtctgttctcctctggcctttgggccgcgacgaataatcacccgacggatattgaaaaacgtttagcgcagctggaacagcgcgtaataaatgctgagcaacgagcggccgatgcggaagcgaaaatccagaccttaacccgacagcagagcgtggtggcgaaaagcacgccaactgtcaaagtggagtccgccgagcccgtggcaccgggcgcggagccgacaacactaacgctgtccggctatggggatatcaaattttatggtgatgtcgaatttaacatggatggcgccagcagcagcgggagcctgacttcggtaaaaaccacggcaaataaagactgggcgccgggcaataatgaacgctgggatattaatggccgtctgctgttaggttttgacggcatgcgcaaaatggataatggccgttttgccggtttttccgtccagccgctggccgacctgaacggcaaaatgaatcttgatgatgcggtattcttttttggccaggagaacgactggaaggtgaaggttggtcgtttcgaagcctacgatatgttcccgttgaatcaggatacgttcgtggaatactccgggaacaccgccaacgatctgtacagcgacggttacggctatatttacatgatgaaggaagggcgcggtcggagcaacagcggcggcaacttcctgatgagcaaaacccttgataactggtatttcgaactgaataccctgctggagaacggcagcacgctattccaggaccagcagtatcatggcaccgcactggaaaatgagaaaaatgtggcctatttgcgcccggttatcgcgtggaacagcgggcgcttctccactgccatcgccatggaaagcaacgtggtaaataacgcctatggctatcacgatgcgaaaggacgctgggtcgaccagtccagccgtaccggctatggctatacgatgacgtggaatgggcaaaaaaccgatccgcaggacggcgtggtgaccaaccttaacgtcgcttatatggatgccgaagatgagactgactttaccacgggcgttaactccctgtggcacggttttgagctgggctacatttacgcgcataacaaaatcgacagctttaacaccgctgattttatcgctaactgcgacgataattgctggatcgccgatccgggcaactatgatatccacacaatccatgcgtcgtacctgtttccgaacgtaatgaatatgaagaacttcaacatctatcttggggcctacgcatcatggattgaatccaacccaaacaacggcgacggccaggaagactcccgctatggcggccggctgcgcttcaagtatttcttctga

SEQ ID NO: 222602 - DNA, 1359 bp, Klebsiella pneumoniae
atgtctgctggcgaaaaaatttctgtcagagagaaaataggttatagcctgggggacgcagccagtcacatcgtatttgactcgtctgtggctattctggcttatttttataccgatatttatggcctgccgcccgccgtaatggggacgatgtttttgctggtgcgtctgctggatgcgattaccgatccgattatgggcgcgattgctgacgccacctcaacccgctggggccgctttcgcccctggctgttagcgatctgcgtgccctttgcggtgagctgcgtgctggtgtattccattccctccttttccgactccggaaaaattgcctacgccgtggcggcttatatatttatgacactgatgtatacggcgattaatattccgtactgctcgctgggcgcggcgctgacctccgatccgcgcgaaagcctctcgctgcagtcctggcgtttcgctatcaccccaatcggcggcgcgctcggtactgcgtttattttaccgctggctgattttctctatcccggcgatcgcgcgaccggtattcaggtctcgatggccctgtttggcgttatcggctgcctgatgtttatcacctgtttcgccacgactaaagaacgcgtgcagccgattaaagaacagaacctgaacatcgcgcgggacgtgaaaatactatttcgtaacgatcagtggcgtattctttccgtttacaattttatgatgctggtcgcggtggtaattcgcggtggcgccgtcgtctattatgttaacagcgtcctgcataaaggcgccgacgtgattaccatattcatgctcggcggtatgtttgcctccatgctgggttcggtgctggccaagccctttgggacgcgcttttgtaaggtccgattctctttctggattaatcttctcaccgccgcgctgggcgtggtctgctttatcgtcccggtacaatattggattgcggtgctcggcgtgcatattctgatttctatcattcagggcggcaacggcgcgttgcagtggtcgatgattaccgacgtgaataactatggcgaatggaaaacccagcggcgtattaccggtatgaatgtcgcagcaaatatctttgtcatcaagctgggcgtcgccgtcggcggggccatcctcggctggatattggcctatttccattacgccgctaacaccacggtgcagtcggcttcagcggtgcagggcgtggtgctgttgtttactctggtcccttccgtgttttatgtgcttaccgccgtctcgattaaattctacggcttaacggaaaacagaatgaacggcatcgttgatgatttaaaacacggcactttcgccgaatcctga

SEQ ID NO: 222603 - DNA, 852 bp, Klebsiella pneumoniae
gtgaaccctgtcattagctatctcaccaatttacatccgttatcatttatgggttaccatatattatccaccacagtgatatatattctggtaaatataattattgcgaagacccgccctactgaaaataccacagccgttccggcgccctattctatctcaccctcttttttagcctggctacgtaatagcgccaccagcatcattcagctggccatgttcaggctgttaagaaaaaactatgtcactctcatccattctgcggacaatattcaactctgcgccaatcagcagtacgcagaatgcaaaatgacctgtgtggaaaaaatactgtttgaccatttcgctacgccaaaatccagtgaccaggatctgccgctttctctgcacgtcgccgaaaagaaccactgggcgaccgatcctcactgccaagggctgcggctcagcccgacgcaccaaacgtggaatatgatattgattgccgcgccctccctgctattgatcgccgcgctcgcctggaaaacgctttttgataatcaggcgataattcactccagcgtgttcagctggctgacaatggggatggtttccggcctgtggtggctgtggctgttatgcatcaccttaaatgccacccggctggaccgggaagggatcgccgttaatatctttcatcactatattgataccctgaaggagacgcttattgctgactcagataccctgaccgatgaaaacgccgattattgcgtggcgatcggtaaaaccgccctgcttcccgaaagatttgctgaatatgtaaaaatcatcaaccttattaagtatcccttttgtctgcagaggctggattaa

SEQ ID NO: 222604 - DNA, 825 bp, Klebsiella pneumoniae
atgtggaattttataatgcatctgcatccactgctgtttctcggcggttttatacttatcgtcccgggtatctatattgctattggtataatgattatcctgtcgcggccagcggctcagccccagccgcacgcgatggaggttagcccctggctgctggcgtggctgaccggagaagggacccgggtgattcagctggcaatgttcagcttactcagtaataagcatctgtgggtcccggagcccgggcaggttttggctaacggacgctatgcaaaccacgaaatgaacgtcattgaaagcatactatttgaccattttgcggtgcgaaagccgtgtcatgaagatctgccctgctgcctgagtatcgccggacgtaacctctggcaggaacagatagcaagtgcgggtttagccttaagtccgctgcgccgcggatggaatatgctggccatcagcatcccttcggtcgccctcggcgttatcgttgccagtaagacctttatctggctcgacctcaccgcatacagcatcttcagttgcctgctcatgccctcgggttgcgttctgtggggcggattatggatagaggccattagcaaaaccattcgtctcgatatcaacggcatttcgcatcatgacgcccatgcctgcatcaatgcgttacgagaaacgttagcgtataaaggcgcgcaggaggatgacgcgacggccatgctctgcgtggtggtaaacggcgtggaatcgcttcccgagcgctaccgggaatataaagcgttaatagcgccgattagcgttatcacgtcgctgcgcacagaggattag

SEQ ID NO: 222605 - DNA, 147 bp, Klebsiella pneumoniae
atgataagtaaaaccgaaattttcctgctgattattctggcggtcgtgctgctgggcagcatatggtttattttcagcaatgaaatttggcttctactctgctatctggaaagtcagatatttcccaccttcagcgttccggaataa

SEQ ID NO: 222606 - DNA, 1335 bp, Klebsiella pneumoniae
atgaaaaataattcactcaaccaaccgatagataaaacattgccgaacgggcaagcgactcgacttttcgccaatatcgaagtcggcgctgtgccattaacgctgttcatcggtatcgccgcgatagtggcgctctccgcgggcgcggggttgttgccaaaaaacatgattggcggactagcggtcatcatgaccctggggttcgcgctggcgaaaattggccgcatggtgccggtgttaaaagatattggcggtccggcgattttgtgtttgatgatgccctcagtgctggtctactttggcgtgtttgaagcgcatacgctcgataccgtgcatttgctgatgaaggaggccaatctcctctatttcgtcatcgcctgcctggtggtcggcagtatcctgggaatgaaccgcacgattctgatccaggggatggtgcgcatgtttgtcccgctggtggttgggaccggcgcggcaatcgccaccggcctgctggtgggcagcttattcggctacagtctgtatcacaccttcttctttatcattgtgccgattatcggcggcggcattggcgaagggatcctgccgttgtcgctggcttattcggcgatcctcgggcagacgcctgatgtctacgtggcccagctggcgccggcggcggtggtgggtaacatcttcgccattatctgcgctggctttctggcccgcatgggcgcccgtcgcccggcgctgtccggcaacgggctactgatccgcagccatgaagataacagcgtctttgcgcagaatcagagtacgcagccgaccgattttcagctcatgggcgccgggttgctgatgatttgtgccttttttattgtcggcggcctgctggagaaggtggtgcatattccggggccggtgctgatgattctggcggcggtattctgcaaatataccaaagttatcccggcggcgatggagctgggggcgcacagctgctacaagttcgtctccgccgcgctggtgtggccgctgatgatcggcctgggcatgctgtatgtaccgctggagagcgtggtatcggtcttctccgttggctacgtcgtggtgtgcggctcaattgtcattgccatggcgctgagcgggttctttatcgcttcacgtctaaatatgtatcctgtggaagccgccattgtcaccagctgccacagcgggttaggcggaacgggggatgtggccattctctcggcctcaaaccgcatgggattgatgccgtttgcacagattgcgacgcgtatcggcggggcgtcgacggtgatcgccgcgacgctattactgagctggatggtgtag

SEQ ID NO: 222607 - DNA, 948 bp, Klebsiella pneumoniae
atgccttcactgctcttgcaatctcttttcccgttggtatttatcatgctgctcggatggcttagcggcaaactcggctatactcgccgtgaggacgcatccgttctcgccacggtagttatccgctttgcgcttccttttcatctttttatcggcgcattacataccagcccggataaaataaaaaacttcacctttatggcggtgctggttatcggtctgatggggtcgtattttcttacactactgatctcgcgctatgtttttcgtcatgatattaaaactagcgcgattcagtcgctggtttgcgccttccctgatatggcctacttcggcgcccccgtgctggcggtgctgataggtccggagggctttctcggggtgcttatcggaaacctggtgaccagcgtgttgatgatccctctgaccatcatactgatccgcatgggagaccagcccggagacgctggggctccccagctccacgccgggcagttgatcctgcaaaacctgctgaaagccgtgagaaaccccattgtctggatccccatttccggagtactgctcagcctggccgggatccagctgccgcatctgctcagcgtacccgttgaaatggtgggtaaaatcgccggcggtctgtcactcttcgcccttgggctgctgttttacggtgaacgtccgacggtcaatattcaaacctgcaccaacatcagtattaaaaacctgatccagccggccataatggcgctggccgggctagcctttgggctcagtcataccctgatgcaacaggttattatcatcggcgcgacgccttccgctatcgcggcagggatgtttgccctgcgcagcgatacctatattgaacccgcctcatcttctattttgctgggcaccgccatcggcgtggtcaccgaaggcgtcatgatttatctcatttcgtaa

SEQ ID NO: 222608 - DNA, 1686 bp, Klebsiella pneumoniae
atgttagccacagaaaccttatacaccccctataatggtgccgtcctgctggaaaacccgttattaaataaaggcctcgcgtttacggaaagcgaacgcacagcgtttaatcttcagggactgttaccgcacaatgtggaaaccattgaagaacaaaccgagcgcgcatggggccagttttgccagttcaaaaaaagtatttcgcgccatatttatctcagaaatattcaggacaccaacgagacgttattctataacctgctgcgcagccatatgaaagagacgctgccgattatttataccccgacggtgggtgaagcatgcgaacatttttcagaaatatatcgccgaggacgcggcctgttcatctcctggcccaaccgtcaccatattgacgagatgctgcagggattttcccgcaacgatatcaaagtcatcgtggtgaccgatggcgagcgtattctggggctgggcgaccaggggattggcgggatggggatccccatcggcaaactctcgttatataccgcctgcgggggtattcatccggcatcaacgctgcccattatgttagatgtcggtaccaacaatccgcagcatctggaagatccgctgtatatgggctggcgacatccgcgcatcagcgacgagcaatacctggagtttatggacatgtttgtccatgccgttcaacagcgctggccgaatgtcttgctccagtttgaagattttgcccaaaaaaatgccacgcgactgctcaaccgctatcgacaccagctgtgctgttttaacgatgatattcagggaaccgccgccgtgacatcggggacgctgatcgccgccgctgccgccgccgggacgccgctccgcgatcagcgggtggttttccttggcggcggttcggccggatgcggcattgcggaaaaaatcattgcgctgatggtggatgatgggctctcagagacggaagcacgccgccgcatctttatggttgaccgctttggtctgctgactgatcagatgcctaatctgctcgattttcagcgcgagctggtcaccccccgagccagtatcgcccactgggataccgaggcggcccagctgtcgctgatggatgtcgtacgcaacgtccaccctaccgtgctgatcggcgtgtcaggccagccggggctgtttagcgaagagatagtgaaagagatgcatcggcactgcccgcgtccgattattatgccgctctctaaccccacttcccgggccgaggcccagccgaaggatctgctggagtggactcggggtagcgcgcttatcgccaccggcagcccgttcgaccccgtcttctatgacggcaaaacctacgacatcgcccagtgcaataacgcctatattttccccggtctggggctggggatccttgccagtaaagccgagcgcgtcaccgaagcaatgcttatcacctgcagtaaaacgctggccgcccactcgcctctggcgacccgcgaaaccggcgggttgctgccgccggtagaagagatcgaaatgatttcccgggccattgccgctgatgtcgcccgcgcggctcagcaggacggcgtagcgccgcagattgacgaggtgcaactggcggcgaatatcgataaaaccttctggcgagcgcgctataccgcgtataaacgttcgtcattgtga

SEQ ID NO: 222609 - DNA, 717 bp, Klebsiella pneumoniae
atgttcaatgtgctgattgtcgatgatgatcccatggtggccgaactgaaccagttatttatcagccgggtagctgattttcactgctgtggagtagcggcgacgatcgccgacgccaaagcgatgctaagccatctggcgcaggtcgatctgctgctgctggatgtctatatgcaccaggagagtggcctggacctgctgccagcgcttcgcgctgaggggcggaatattgacgtcatcatgatgacgtccgctgccgatgcgctcaccgtccagacggcactgcgctatggcgtggttgattacctgattaaaccgtttcagttgtcgcgctttgaggaggcgctgcggacctggcgcaataaacgcgatgcgaagcaagcgaaatcctgctacgcccaggcggatatcgacaccctgctacgccgcggggttctgcaacaggacggtccccgccgcttgccgaaagggctgacgccgcaaacgcttcgcctggtgtgccggtggataatcgcgcatcaggcgcgggatttttcaaccaatgagctggcggcggcgctgcagatctcccgagtatcgtgccgcaaatacctgatctggctggagcagatcaacgtgctcttcaccagcaatcactacggcatcaccggccgcccggagtatcgctaccggcttgtggccgagagcgtgatgttgctgacgcaatatagccagtga

SEQ ID NO: 222610 - DNA, 225 bp, Klebsiella pneumoniae
atgctaatgggaataacacgcattggcaatttaataataaatgagaatggttttaatttattattagttttttgcggaggcgaaacgacgccctctgcgggttgcctggtggggagcgccatgcggagtggtcctgatgaggggcgacacggtaacctgagcggcagaggcggtgaaagtgtgaagcgctgcgtaatttttaaaacaacttttcataaaatttga

SEQ ID NO: 222611 - DNA, 1143 bp, Klebsiella pneumoniae
atgccattggccgccgcaggcgtcgggtttaccgtcacgctgggtttacttttcaccctgtgggcattgatgtgctataccgcccttttgctgctggaagtctaccagcatgtccctgccgatatggggctcggttctctggcggcgcgctatctgggccgttacggacagtggatcaccgggttgtgcatgctgtttctgttatacgccctcacggcggcctacatcagtggcgccggcgaattactcgcttccagcctcaaccagtggctggactggcagctgccgccggccgcaggcgtactgatcttcaccctgctcggcggggcggtggtgtgcattggcaccgcgctggtcgacctgttcaatcgcttcctgtttagcgccaaaatcgtcttcctggtgattatgctggccctgctgatgccgtacattcatcaggtgaatctcctcacgctgccggttgagcaaggcctggcgctgtcggccattccggtgatctttacctccttcggctttcacggcagcgtgccgagcatcgtcagctatctggggggcgatatccgtaaactgcgtcgggtgtttattatcggcagttttattccgctggtggcctatattttctggcagctggcgacgctgggcagtattgacgccccagcctttaccgccctgctggcgcaacatgccggtctgaacggtctgctggaggcgatccgcgaagtggtagcgtcaccgcacgtggagctggcagtacacctgtttgccgaccttgcgctggcgacctccttcctcggcgtctcgctcgggctgtttgattatctggccgatatgtttcagcgcaaaaacaacgtcagcgggcgtctgcagagcgggatgatcacctttttgccgccgctggcgttcgccctgttctatccccgcggcttcgtcatggccctgggctacgccggggtggcgttggccgttctggccctgatgttaccggccatgctggtcatgaagagtcgccgactgcatccgcaggccgcctggcgggtggccggcggcgccccggcgctgtggctggtcctgctgtgcgggatcggcatcgtggcgatccagttctgcatcgtcgccgggctgttaccggcggtgggataa

SEQ ID NO: 222612 - DNA, 246 bp, Klebsiella pneumoniae
atggagtggtgggtaaaaaaagtgagaaaaaattcaatgaccagcccctgctgcgtcgtgcttcagagcggtacattagcgatgattgctgaaattgaagcctgtcgccttgacctgcaggaaggcgataaacttactccgctggccgatgcgcgttattgtctgaataataacccgacacagacgttgaagatcctcaaagcaacccattatagcagtgagcgctgggcaaacgccggcaaataa

SEQ ID NO: 222613 - DNA, 816 bp, Klebsiella pneumoniae
atgcttgctcgtgaaggttgggatttatcaccctgccacacaaaaatactcatgctaacgcataagcttttagcaaatcagcaaggctattcaaatttagcggcaatatttagatacaacgaatcatttacgaagaaggagaaccaacatattgctttctttgtagataagctggaaccagcatgcgatgctttcgctgcccataaatacggaatgatgtttgaagcacttggaggcatctcacctctgttgcgtagccatgcagacaaagcaagctggcacaatgccatgacacaattgcttgctatacgtgaaaccgggactgtaggtgatgtaatcaaacacttacgtacctggaagaaaccgagactcccagattctgttgaaaaacgtgagcaagaattgcgtaattttgacaaaatggcgggtgttgaaatgccacgagttttggaggaattagagaaactccatcagattgcttattctgaagtaaaagcactccgccattatcttgatggtcactcaccattcgaaacgaaacacggcgtcaaaggggcagagtttgaaaatgttctggtcgttatagggcgaggctggaatcaatacaacttttctgaaatgctggaactcgccggtgcacaagtgattcctgctgtaaaagaagaagcatatgagcgtaatcgcaatttattctatgtcgtctgttccaggcctaaaaaacgacttgctatcctgtttactcagagcctgtcgccagacgcgatggctacacttgaaagttggttcgggaaagagactattatgccagtcccatag

SEQ ID NO: 222614 - DNA, 222 bp, Klebsiella pneumoniae
atgggtagatacgacgaactgaacaggccaagatcgtttgtcttcagtgctgtcaaccaactgctgtgctatcttggcaagttgtcggataaagacctcttgcatttgtggatgcaagtgtgcttcaggttcttcaatgaagatcagatgtacgcctggctcagcaacctcagcacgaaacgccttatagaagccagccaattgcaaaaggatgaatattaa

SEQ ID NO: 222615 - DNA, 885 bp, Klebsiella pneumoniae
atgtgtattcatcaaattaaaatcaagaacttccgcctgttagcagacgtggagcttatgttagaagatcaaacaacagttattgttggtcgaaataacagtgggaaaacgtcactatcagaattaatgcgcaggtttttggtagataacagcgcctcctttcagcttgaagatttttccagtgtttgttacgagtctttcgagaaggcgcttaattcactaaaccaaggtgcagaagaggatgtaattcgtaagctaattcctgctattgagctcaggctgaaactccagtacgaccctgttcggcctcaatttgggccattagccccttttgttattgatttagatcctgactgtacaaaagcacaggtagtagtacgctatgaattgaaagacggtcaactggcgcagtttttcgaaaaccagcccaagaaaccgctaacccaagagactcgtattgcattcttccgaaccctgcgggagcgtgtccctggtaatttctgtatgaaaatctgggccgaagacccaaatgatcaagataatcgccgtgaattgcaacctggggcgttacgcagcctggtcaaaaccggatttatcaacgctcagcgggggcttgatgatgtaacatatcgagaatctgacatattggcgaaaactgtagagggactttttgctatagcttcttcagcatctgcggattcagcagacaaacaaattgccgaagctttaaaggaggccgtcgaggacattcaaacccaaatcgacacaagctttggcggtcagctaaaaagcttaattccagcactgaaaacctttggatatccagggctgggaggacaagaactacatactgagactcagttagatgttcgaaagttactataa

SEQ ID NO: 222616 - DNA, 2451 bp, Klebsiella pneumoniae
atggcgaaacgtaatgacgaaataatccgttctctccccctttcacatatgatttaccgggacgacgagatcgatcaggagaaagctgaaaaactggttgtttatcattatccgttaagtaaaaactatcgctggaaagaatggcaaacccaaattgatgatgagttaggtggacgttattacccttatttgatgaagtctcataaagatcaatttggactatacgttgctttggactctgagcaggataatccaccagtaataaaaaatggtgatgggattattgttgaaccaacgcgtgtccattacaaggctatgctgaatccagtatggatccggcttatcatgcgtaaagtctccgcctttggttcgcattgcaaaggtagtcatactctgggatgcccattactacagactgacgtctggaaaagtaagaacagtttcggtatcaatgcaattagtctggactgtcgcactcaacaaagaagtgataaaaatataactgaggttatattatttcataaaaacgtcccactacgaccagtcgatataaaaaccgaatcatttaatattaatcaaccattatggatatatgataaaaataatgttcttgtccgctggaaagcggaaaaaacaacaaaacctaaatctcagatttaccgggaagtagccaaaaacaaagataaacgcatgctacgcccttttctcgacctttcatcctcaacctcacttaaaaatagctggccctggatccttcaacccgtacaaaatgaatttattgagcaagcaagaaaatttggcttcggattatctccagtagtacttaagttacgccctttaccgcttaaaacaaaattcaaaacaactgacaaggctaaattcccaagtgtacagcttgacaaagagataaaggtcctcgatctacgtttttcgaaaaatgtatccccacaatatattgttaataacattcagtcgcttctgaatgaaaaatatcctgaagcacgcatgtcattactacctgatatagaacaggatcagattgtaaatatagaaattgatagatcacagtgtctacttgttttgctggatcagactccaggtatcattgacgatcgctatccattgacaacaatgttaagaaccaaagttgcctgccagcatattaatgttaatccttttgatctcacaggtgacccagttacggataacttactaatagaacagtctacttctgacggtgacacaaggcttattcctgccacggattctcgttactataattatagtatcagtgattttgagaaaaaagcggctcaggaagctctggcacgtaatgttgaaattgtatataaggagttagcactgaaacatttgctgctatgcaatgagaccaaaattagtgtgacgcttccgcagcagaaggatctgctcactaacagtctcgctgtaatcactaatggctgtttgtttactgttaaacaagaccgtccaataatattacctttccacccagctatgccagatgctgtttcagcctgtgataatatactccgttcatttgatacctccgtaacagcattactcgctctacttaaccaaaagtggccttaccattatcgccctcaggatattactcaagggatttggaatgaagcagataagttgacccggtttattaatcggttgacaataataattcacaaaacggaagaagtgactatcctcctacaggatccacaatatggggcacctcatatgcttccggagaaattaaacgatttaatgtctattctggattctcaacggcaacagctccctcttaatcaatggttattacctgaaatggatgaactaacttttcatatagagcaacttactgaagagggtgaattatccgatacaaatagaaatacgttacttcgtgaactagaattgttgtgtaagttatgggaatgtgctttaaaaaaacattattccgacaatgaattcaatgtcacttatgatattttaaaaagttttgttttttcccaatggcctgaaaagaaaaatgcgcttatggtaggagtcgctaaaaaatcagtaaaaagagccagtacatcgttaatagcatcatggaataaattattatcgcgtgtcttcgatttacctttaggcgatccccgcaactggctcaaaaacgtacctggtattacacggctctggcatgatccagaacaaaattatgtcatcgttggcagcctttcctctcctcaacctcttattcaacgtcagcccagtattcggcagtggcatgcattacaaggggaacttaattacgaactccttgcaggactggttgacgttgactgggtcagaatgaatcaactggcgggtaatccctgtgtggctacgcttgttcgtcggtggcaggaatgccagggtcatccaaatgaggtgccatgtgttccgtaa

SEQ ID NO: 222617 - DNA, 3900 bp, Klebsiella pneumoniae
gtgagtgcccctttattacgttcctacaatgccgttattgaatacaccctttctcgggcaaaaaaatccaaaacctcccgtcgtatcgcaggattttgccagcttcaggggccaacaggtagcgggaagacgagctcgctttatcgtcctggtcatgaagacaacgcacttccggcactggaatccattaaaaaggcaggctttcaggccattctggttacccaccgctggaacatattgcacgatatttatgagaaaacagcggagcataaagacagtaacggagaaccattcagggtcagtgtgctttatgcacaagaggaccagattgtttctgccgtagaagcgacaccgttacctcatgagaaaaatctctctccagcttcgctacccaatccttttacgtctatcgatgagctgcatgccactaatctgtttgcctgtaaggatacggctgaaaaattacgcaaaagttgcaacaatatactccatatcaacagaacgctaaaaaattatcacccacaatttcgggctgccatcgccagtgagaaagaagcgttaatcaattcgtgtacagcgatagaaataacgctgattcagaacattaagtctctggaaaaagaggttaaaaagcaaaaagaaaaatacggcgaaatgaatgaacttactcaggcagcgaagcagcggcttgatgatttccgtcgtcatgcctgggttcgacgcattcttcccgccattgcctggcgcgacgaaaagcaacatctgctgatcatgacaacccaaaagctggtttcatcatttttcgatgggcggcgcaaagtacgtatgtccagtaaagagttgcgtaatcacatcatttttattgacgagtttgattatcaggccgaggtattgcaggagtatctggctcaggcccagtgggttcaggagccgccagaatgtctgggccagttgctggatggggggcgcaggttgttgcaacgtatgcagcatgttgcaacggagccagctccgatgatccgtgtacgcctagctgagtttcttgaaaatctggacaatacattagttgacaaagatatcgatttaacacacgccagatcattggttatgccactacaacaatatctgacaggtgagtcattcggtgagcattacttatttcgctctgatcatttagtcaccagcgagcggctcattatgcgaaaagcggagcatggatatgaaattataaaacccaacgctttacctcaggacaatgagtcaataattgatatcagcgattttttacgtctgatggaaaaatttattcggcagtttaacctgatgctaacagatctgacagccagtgaagacgaagcgcatgaatacataaaaaagttaacccgacttctgtttgacccggttaatgactacagaccgtcatattatggctcaaccctgccaaatatgtcccggtttttgttaccacgtaccgatctgcctgaactgcgggaactaagaaaaagtaatattttgcccaatacacatgccagtatttttgggttaactaactggttgctgaaacaaaatattgcggatatcgatatcgatccattacgaatacagatcaagcgtgcgttcttgcccacaacagcagaaggattactactgtcactagccagccgtaatctcgtttttgcactgtcggccacatcatatattgaaagggcctgcaaccactttgatgtccggtggataaactcagccttacgctatattgcagaagcacgtaaccctacagttacggaaagcttcctcggaactacttttgaaaaccgacctgattcctggtttaaagaaccgataccctatgttcagaccgatggtgacattcagttacagaataccgcgattgaaaagatcaataacagcaaggaaagcatcagaaagacacaactgaatactgaaatccatgattttaataaaataaagaacagcccgcattcagcggatctgcttgcctctctgccccccgattttttccagaatgatgatgaacccttaacagatttcgaatcagaatatcgccagaatattctacttaaactgcttgatgtgctggatcttgcgggaaaaagacctcaacaccgagggcatctggcttttgttaattccatatcttatttaagaaaatggctgactactgcaatagcggcacaaagcagggattgcctcacatggttaaaactggatccacctttatccgacaatcttctgctaaagaattttactgatgtgtttatcccggtgaccatacataacgagcctgcgttgatttgtctgttaaccgccgaatgtcagaagaaagaggggttcagtgatgcctatcaggccgcattcgattcccgacgtactgttattgtactgacacaaactgcctctgccaccaacggtgtgaatctggatttcagcctgcctgaatccggcaaaaatatggatttgacctgtttatatttactggaatcacgacattattacttttccgcttttcaggccagtgcgaatagtaatgatgatatggcacatgcaggcttccaattgcgcaatctggaaaaattgctccgtgcaggagaaatttcacgtaaacagcatcagcgcttcgtcctcccactgatgctgaaccggaagaacgaaatttcccgattaaacggggagtataagagaaccagcgattatataaaaaatacggcagccaatgttcaacagcaggttggtcgtattgagagagcctggtgtgaagtacccaacgctgaaattcatcttgattctgaactggcaaaacatctgtcccgctttgcttcactgcctatttatacatcaaatcgtcgacagctttcggcactcaatcgtcaattactggatacacttcgggagcgtgatgaactgacacagaacaatttcttcagccagctcatgacgccgacacaacctgggaaactagcattggattatatcgatcagcggctggttcctgctattcggttattacgagaacagtcaacaccaagagatgacatcccattactctggcgacaactcggtaaagcagtacttcaacatgatttagcctgggaaccaggaaaaaacgctttcgacattgatcttgaattatataaatgggcttgctttgaaaaaccgaaattagctaatactgacggcaaaatctggtactccccacagacatggcagttttttgacaaagcagcagaagggctgctccaatacaaccctcagagactgtaccagtatatacaacgtcatcctgtaattactgactggttcaaccgtaaaggttacagaacgtctattatgcccttcgcgaacgatttggaagaacgttacgcatttcatccactagttgtacaacgcctactgatgggacgtcttggagaagaggctatccgggcgcttctttattcagagagcatcattaccaccagccaggtgagcaatcaccgtctttttgagcagtatgatttcagcataaaaaattctgattatcgtgtggatgctaagttttggagacaagatactctcgataaggcagatgaagaatatcaacaatggttggcatctggcgcaaatcaagagcatacccctttgggtctgagtaaaaaactggcacaaattcgcgctatcgaaggtaataaaaccagattggttatcgccaactttgtcgctccacatgctgatagccaattactgggtttctctcaccagttgacccctgttcaaaatccttatgatgcagacattctgattctcggagaatgcgtgactccggataccatttcagtggaaacccccggattcgggcaactcaaaaaagtcatcaatcaaaacattatggaaagagcataa

SEQ ID NO: 222618 - DNA, 354 bp, Klebsiella pneumoniae
atgtggacaattaaaacaacggatacgtttgatcgctggtttgcctcgctcagcgataccgacagggtcagcatgcttgcagcactgctggtcctgcgggaaaagggaccaggtttgtccagaccttatgccgatacggtcagaggttcccgctacagcaacatgaaagagctacgtattcagagtcggggcgctccgatacgggcgtttttcgcttttgacccgacccgtaccggcattgtgctttgtgccggaaataaggtcggcaatgaaaaacgtttttacgatgagatgctccctgttgctgacagggaattcacaaactggctgaacacattaaaagagaaggagtaa

SEQ ID NO: 222619 - DNA, 303 bp, Klebsiella pneumoniae
atgggcagaacgctggaacagcttattgcggatgaaaaacctgaagtcgtggccaaagctcaggcgatggcaacggacatactgctcaacattcaccttgccgaactgcgtgagaaagtacagaaaacgcaggtggagatggcgcaggcgctgggcatcaggcaacctaccgttgcaggaatggaaaaaccagggcgcgatctgaagctttccactctcaaacgctacgttgaagcgactggcggcaagctacgtcttgatgttgaactgccggatggttctcactacggatttgtactgtaa

SEQ ID NO: 222620 - DNA, 591 bp, Klebsiella pneumoniae
ttgttaaaaacacagcatttcacggcgttgctgaaagttatcgaggacaaaggctttcttgaagtcgcgtcccgaacccggcagctactctgcaacatcatgcgttacgccgttcagcaggggctgactgaaaacaatccggcgctgcatctggaaggcgtcaccgcgccgccggttaaaaatcactatcccgccctgccgctggagcggttacctgaattgtttgagcgcattggtgattatcagcaggggcgacagcttacaaggctggcggtggtgctgaccctgcatctgtttatccgttccagtgagctgcgcttcgcccgctggagcgagattgatttcagacacaaaatctggaccattcccgccacacgggaaacgattgagaaagttcgtttctctggccgtggcgcaaaaatgcgtactccgcacattgtgccgctttcccgacaggcaattgctattctgaagcagatacaagagatttccggccatctggaactggtgttccccggcgcacaggccaatagcccttgttttttgttggggctgcgaacgatacccgagcgctggggcggcagccgttga

SEQ ID NO: 222621 - DNA, 420 bp, Klebsiella pneumoniae
atgtccctgtccgacgcgaaaatccgcagtatcaagccttctgataaaccctttaaactgaccgattctcagggtctgtatctgcttgtcaatccgggcggttcacgcctctggtatctcaaatatcgcttcaaccgaaaagaatcccgcatcgcattaggctcatacccgcaggtctcgctttccgacgcccgccaacagcgcgacggtatccgtaggctactggcgcagaatatcaatcccgcgcaacagcgcatgactgaaaaagctgccgcgtcaccggaaaaatgctttgaggccgttgcggtggcatggcacaaaaccaacaaaaagtggtcggctgactatgcagagcgcatccttgccagcatgaaaatcatatctttccggcgattggtcatctgcccgtcacgttgttaa

SEQ ID NO: 222622 - DNA, 1437 bp, Klebsiella pneumoniae
ttgaacgtcacctccgccgtacgccaggccgtcgaacggacatcctggtttaaaaaacgtcagcgttatcgtgtgctgtactggcgcgaaatcagccccctcgctttgccgattctgctggaaaatgcctgcgtattgttgatgggggtgttgagcaccttccttgtcagctggctgggaaaagaggccatggccggggtgggtctggccgatagctttaacatggtgatcatgtcgttctttgccgccatcgatctgggtaccacggtggtggtggcctttagcctcggcaagcgagatcggcggcgagcgagagcggccgcgcgccagtcgctggccattatgaccctgttttccattgtgctggcgggggtgatccacgcctttggtcaggaaattattaattttgtcgccggcgatgccaccccgcaggtcaaggacctggcgctgacctatctcgagctgacggtgctgagctatccggcggcggcgattgcgctgatcggcagcggggcgctgcgcggggccggtaccactaaaatcccgctgttgatcaacggcgggatgaacatcctcaatatcctaatcagcagcgtgctcatctatggcctcttctcctggccggggctgggctttgtcggcgccggtctcgggctgacgattgcccgctatattggcgccatcgccactatctgggtgctgatggtgggcctcaatcccgcgctgcggctgtcgctgaaaggctacttcaaaccctttaacttctccattatctgggaggtgatggggatcggcatcccggccagtatcgaatcggttctgttcaatggtggtaagctgctgacccagatgttcgtcgccgggatgggcaccaacgttatcgccggcaacttcattgctttttcggtggcgtcgctgattaacctgccgggcaacgccctcggctccgcctcgacgatcatcaccggcaagcggctggggaaagggcagattggtcaggcggaattccaggcctggcatgtgttctggctgtcgaccattattctgacgctgattgcctggggcagcgccccgttcgcgggctttatcgcctctttctatacccatgaagaggatgtaaaagaggtggtgaagcagctgctgtggctcaacgccctgtttatgccgatctggtcgctgtcgtggactttaccctgcgccttcaaaggcgcccgtgacgtacgctataccatgtgggtgtcgatgctcggtatgtggggctgccgggtggtggcgggctatacgctgggcatcgtgctggggatgggggtgatcggcgtctggttagggatggtgctcgactgggccgtgcgcggcgtgctgttttacttccgcatggtgagcggtcgctggctgtggaagtacccgcgggttaaggcctcaacgccggaaacctga

SEQ ID NO: 222623 - DNA, 576 bp, Klebsiella pneumoniae
atgcacgttttacaccaccatgccgccgcggacgcggcgggaaccatcgacccgcgcggccgcgccatcgctctcagcgtgctcttcgccgccggggccttgctgttaatcatggctcccgttatcggggcgagcggcacgctgggtctgctggcgctcctgatcgcggccttcggcgccggatggggattcgcgcgcgcgcagcccaggctctatcgggcgcccctggcggcaacgcgctgggctttcctgctgtcggcggccggctggctgctggcgctggtggcgtggtatggcggccaggcctggccggcgctgctccccggcgtgacgttcggcagcgcgggggcggctgtcgcctggcgcgttgccgcgggacgggcggcactgtcgggtagccgcgtcagcggcgccacggcgctgagcgtggctgtcgccatcgcggcgacgctgctgacctggcacaccgccggggcaggacgcggcggcgtgtgctttgccttcgccgtgctgctggactgggcgctgctcggcgcgctgattgtgcggatccgtcagcaggagagtgcggcgtag

SEQ ID NO: 222624 - DNA, 1416 bp, Klebsiella pneumoniae
atgttacttcctgtaattatggctggtggtaccggcagtcgtctctggccgatgtctcgcgagctttacccgaaacagttcctccggctgtacgggcagaactccatgctgcaggaaaccatcacccgactctcgggccttgaaatccatgaaccgatggtcatctgtaacgaagagcaccgcttcctggtggccgaacagctgcgccagctcaacaagctgtccaacaacattattctcgagccggtcggacgcaacaccgccccggccatcgccctggcggccctccaggccacccgccacggcgacgacccgctgatgctggtcctcgccgccgaccatatcatcaataaccagccggtcttccacgacgccatccgcgtcgccgagcagtatgccgatgaaggccatctggtcaccttcggtatcgtgccgaacgccccggaaaccggctacggctacatccagcgcggcgtggccctcaccgacagcgcccacaccccgtaccaggtggcccgcttcgtggagaagccggaccgcgagcgcgccgaggcctacctcgcctccggggagtactactggaacagcggcatgtttatgttccgcgccaaaaaatacctctccgagctggccaaattccgcccggatatcctcgaagcctgccaggccgcggtcaatgccgccgacaacggcagcgacttcatcagcattccgcatgacattttctgcgagtgcccggatgagtctgtggactacgcggtgatggagaaaaccgccgacgcggtggtggtcggtctcgatgccgactggagcgacgtcggctcctggtccgccctgtgggaggtcagcccgaaagatgagcagggtaacgtcctcagcggcgacgcgtgggtgcacaacagcgaaaactgctacatcaacagcgacgagaagctggtggcggccatcggcgtggaaaacctggtgattgtcagcaccaaggacgccgtgctggtgatgaaccgcgagcgttcccaggacgtgaagaaggcggtcgagttcctcaagcagaaccagcgcagcgagtacaagcgccaccgcgagatttaccgtccctggggccgctgcgacgtggtggttcagaccccgcgcttcaacgtcaaccgtatcaccgtgaaaccgggcggcgccttctcgatgcagatgcaccaccaccgcgccgagcactgggtcattctcgccggcaccggtcaggtgacggtcaacggcaagcagttcctgctgaccgagaaccagtccacctttattccgattggcgccgagcacagcctggaaaacccgggccgcattccgctggaagtgctggagatccagtcggggtcgtacctcggcgaggacgacattattcgtattaaagaccagtatggtcgttgctaa

SEQ ID NO: 222625 - DNA, 1167 bp, Klebsiella pneumoniae
atgaaaattactatttccggtacaggttatgttggtttatcgaacggtgtcctgattgcgcaaaaccacgaagtggttgccctggatattgtacaggccaaagtggatatgcttaaccagaagatctctccgattgtcgataaagaaattcaggaatatctggcagaaaaaccgttaaatttccgtgccaccacggacaagcacgacgcctatcgtaatgccgactacgtgattattgcgacgccgaccgattacgatcccaaaaccaactacttcaacacctctacggtggaagcggttattcgcgatgtcactgagatcaacccgaacgcggtgatgatcattaaatcgaccatccctgtggggttcacccgcgacatcaaagaacgtttagggattgataatgttattttctctcctgagttcctgcgtgaaggccgtgcgctgtacgacaacctgcacccgtcgcgcattgtcattggtgagcgctctgcacgtgccgaacgtttcgcagacctgttgaaagaaggcgcgattaagcaggatatcccgaccctgtttaccgactccactgaagcggaagcgatcaaactgttcgcgaacacctatctggcgctgcgcgttgcctatttcaacgagctcgacagctatgctgaaagccaggggctgaacagcaagcagattatcgaaggagtatgcctggatccgcgtatcggcaaccactataacaacccgtcctttggctatggcggctactgcctgccgaaagataccaagcagctgctggcgaactacgaatcggtcccgaacaatatcatcgcggctatcgtggatgctaaccgtacccgtaaagactttatcgcggattctattctcgcccgtaagccgaaagtggtgggtgtgtatcgcctgatcatgaagagtggttcggacaacttccgtgcctcttctattcagggcattatgaagcgcatcaaggcgaaaggtattccggttattatctatgaaccggtgatgcaggaagatgagttctttaactcccgcgtcgtgcgcgacctggatgccttcaaacaagaggcggatgtgatcatctctaaccgtatggcggaagagctggcggatgtggcggacaaggtatacacccgcgatctgtttggtaacgattaa

SEQ ID NO: 222626 - DNA, 945 bp, Klebsiella pneumoniae
atgccatttgagcctggctattattatgtcatggtattattttcatattttagtgctcctttttcattactgactttttttactactgttttcttttttgtagtaatttataagttttgtattgaaacaaaaaacccatcgttgaatttctttactatttttgctttcatggggttttttatgttctcggagcaaatcagacaaggtgtcgccgtttgtataataatgttagcgataccttattttgagagaaatgaaaaatggaaagcatgtatctttatcgctttagctatgttattccatgtttcagcaattttttgcttcctatatttttctatcatgaaaacggaaggaaactttagtaagttaaaattcatatctggtagtttgctctttgtaatgctggctctgtatgtttggaataatccgggtgtcttatcattcattccctttttgtatgataaaatgtctgcttataatgagtcttatggtgaagatgctgcttcagtattgaaaatattcctttctaaagcagcctttatttatatttttgtttttttaatatgctttcttttcctaaaagatggtggaggcaaagaaatcgatcgagctataaaatcatccttttttatggtattaacaaaactaactttctttttggccagatttcaattttatgcagtgccaaccatggttatggggctagatgaatatttctcttcgaaaggtaggaacggaaggatttcgatttataaaactgcttacttatgtgtgatttttttgatatcgttggtaccctattggtctgaaatatatagcagatcgcttgcatcacctctctatataatttcttctcagagcgatattgaacatactatcggtcgcaggtgtatggacctgttcaactatgataaagaaaataatgcgataaaaagatgtttataa

SEQ ID NO: 222627 - DNA, 768 bp, Klebsiella pneumoniae
atgaaaagattagttatatatacagccgttacaggttcttacgataatttaaatgcagtaaatgagcctgaaaatatatgcgattatatctgttttacagattacaaattctcagggaatattccgaagccatggagacatatacgtttacctccgtcttctctaaagaataaagatcttgcaagattttgcaaactcaatccacatttattacttccacagtattcttcaagtgtctggattgatggtaatatcaccataaagaataaaataagtaattttgttttgaatgtgctaaacgagcataatatagcgtcctatcaacattgggggcgtgactcaacagagcaggagttttatgaatgttcacgatatggatttgattttgcttggaaattaaaaaagcaaattgaaagatatgaagctgacggatatgcatctgttgatttttttgagaataatgtaatattccggaatcatatgctggaaaatataattaaaatgcacaatatttggtggtctgaatattgtagaggtgggaagcgagatcaatattcttttacctattctgcattcaaagttaacgaaagtattttttctttaggtgagcatgatcctcgagtagtaaaaaaattctttgattaccaaggtcacgcaaagaaaaggcctatcctgcaaacctttattaaaattataaaccgagtgtatattttttttataggatggagggttgctccgccgaaacgaaagaacttgcttgatgattaa

SEQ ID NO: 222628 - DNA, 879 bp, Klebsiella pneumoniae
atggaaaagaaactattttacgataacttattattgattgttttgtacgataaatatccaaaagacagtaagacaatatcttctattttacaaaatgattctttagacaacacaatggtaatattgtggaataatggtccatccagaattgatattgctgatgcaattactgaatttcggcaacatggttatctatgtgattttatagagaccattgaaaataattccctggcatatatttataactatgttatcgctaatttttcctctaaacgttacatattacttgatcatgattcttctttaacaactaattaccttcaagatttgaaacttgtcgaagcagatcaggttggtatgcctcaaattttctttaaaagaaagttagttaatccctgtttagactttattccgtatgctgaacttaatactcgaaaatcattttctggcccgataatgacaatcggaagtggcttggttataggccggtcattaattgacaaacttgaagtaaattttcagaaagtgtttgatgagcggttttatctttatggagttgatactactttttgcttaagattacataaagcgaacttgtcaaattctattgttttcatcagggggtttgaacattctttatcaaggctggaatcagagactggcttaattaatgaatttagaagaaaagaaagatcctgtgatttagcattgaggataaggtattatacacctggcacaaaatgggccaaggaattaggtcgagtatttcttagtgcattaaagaaaaaaatcctcggtataaatcagcaatatgacctgaaaatatttagtactgtatttattaaaggcaagcatttaagggatctaaaccacttttaa

SEQ ID NO: 222629 - DNA, 1029 bp, Klebsiella pneumoniae
atgaagaatataatatatctaagtttgcttttattattatgcttcagccaatctactaacgctgaggaagtagctgaaactcaatcaaatattacattaggaattaatgcacacattttagacaagaatgatgcggaggtagaaaaaatgattaattctatgaccgcactaggttttaatatggtaagaatagatgtgccttgggacatggttgaaataaaaaaaaaccagtacattgttccacccaagtgggataaaatcataaataatattatttcgagaggaattgaaccccttttaatactggactatggcaacattctttataatcatggggataaacccatcacggacgattctagagaaggttttgctaaatatgctgcttttattgtgagtcattatagtaatgtaaaatattatcagatctggaatgaatgggatgctccaagcgcagggacaagaaaaggtactattgaaggttataaggaattggtaaaagcaacatatccactcataaagaaagctaacccaaatgcttttgtactcacaggtgctttttctgcagcgggttttgataaaaagtttgatattggacttggcgattattacaggcagtatcttaccagcgaaatgtcgaattttacggatggcgtggcggtacatccgtatactacttaccggccttatcccaaaaatgagtattggttttatttagcccaacttaaatattttgtggatttagtaaaaaatagcaatggattttctgataagccaatttttgtgactgaaataggatggagcacttcgctcactaaagatggtttttctgaagaatatcaggaaaaatatttaaaatcagcaatatgtgatgctggaaaattaggtgtcaataacatcttcctatatgatttaaaagatgactatcctgatcgtcacaagacatcttctggattcggtctttatgattacaagtggaaacctaagcctattgttagctcactccgtcaattgaaatgcaataaataa

SEQ ID NO: 222630 - DNA, 1470 bp, Klebsiella pneumoniae
atggatattctatccaatactaaatgggtcgctttctcgcaaatattcaaaattgcagtgcaattgttaaatattgtagtgctagccaggttaatacctccgcatgattatggtataatggctatggctttagtagtcacgaatttcgcgacattggttagagacttaggtacttcggcagccataatacagaaagagcatattgaaaataaaacaattaatgcgattttttggttaaatatactaatgggatgtagtgttgctatagtaatagtaatattatcaccatttatagcatatatctttcacacaaaacagttgttgttcgttttactgcttttagctgttagtttccctttgtctagttcatcctcggcacatttagcgttacttgagaggaactccttttttaaaagtattgcgtatatcgaaatgacatcttcagggatcgctgtttttattgcaattataactgcatacctaggctggggtgtatatagtttagtcgtacagacgttgctaatgtcatcaatctccaccgttcagttatggttaaagtctggttggagacctgaaaaaacattaagaattgattggaaggaaattcgtggtttacttggatttagcggtaatttgactttatttaattttatcaattatttttcaagaaataccgatacttttgttatcggtagatatatgtctgcatctgtactaggtgcttattctttatcttaccgattaatgctatttcctattcaaaatcttacatttgttgtaaatagagctttgtttcctgtaattagcagatttcaacatgataatattaaacttaaagagtcgtatctcaatactgtctattatattctattgttagtactaccgctcatgacagggttgatagttttaaatgaaccatttataaggcttgtatttggacctcaatgggatattactgcaaaagtgttaatttggttagcacctactggcattattcaggcagtactaagtacttccggtactgtttttatggcaaaggcaagaaccgatatattaatgaaattaggaattgttggtgcattgttgcaaattagtgctttttgtataggtgtacattttagcataattacatttgcgatgttttattttattgcgaatgttttaaattttttcccagtaatgttatgtgttatgcattgtcttaattcaaacttgctagacttattcaaaaaaatcacaccgctaattatgtgtgctggtgtattatatggagtgttaatatttattttaaacaatgtcccatattacagatatatcgatgattttcttaagttaataactattagttttatcggaggatttttttatgaaaaagttttcaaaagcaatataactaagcattggaattatcatgaagaatataatatatctaagtttgcttttattattatgcttcagccaatctactaa

SEQ ID NO: 222631 - DNA, 888 bp, Klebsiella pneumoniae
  misc_feature (751)..(760): n is a, c, g, or t
atggataatatcaaagtttcagctatcatcgtcacattcaatccagaacttgatgttttaagtgagttaatttcttcgctaaatagtcaagtagaaaacgttgtaattgttgataattgttcaaaaaatatattgcaaatcaaagagcttaaagaaaaaaaacgttttgttcttattgaagaaccaacaaatattggcttggctgctgcacagaatcatggtataaaagaggcagttaataatagtacgcatatagttatatttgatcaagacagtagcattacttcttcctttatcgagaatcaattgaaatgtgaaaagttattgcttgatagaggtgagaaggtatcagcagtaggaccaaagttctgtgataaaatttcgggatatgagtaccctgctactttatatcatggaccatttataaaaaacaccaaagttaatgctcaacctgttgaggcaacctttatcattgcttctggttccttgataagaatttcagtattgaaagaagttggtttaatgttagatgattttttcattgattttgttgatgtagaatggtgtctacgcgcaaattcaaagggttataaatgttttataaatccatttgaaacaatgcaacattctattggggatttaagagtaagaattttcggtcgaatgatttcactacattcagattttaggaagttttatatttatcggaatggtatgtttatgattagattgaattatgtaccattaggannnnnnnnnnttatttttaatatgattagaacattgctgggattgtgtctcagtgatgctaaaaaaaatacactaaaagtttctactaccggttggttatcaggttttaagaaatttaacaataaatatactttttag

SEQ ID NO: 222632 - DNA, 813 bp, Klebsiella pneumoniae
atggagtattgctctctcccccgggcgcaaaaattattaaactgcgaaattgaagacattcttcactggcatgatatcggcgcgatcaatctatgcctgaagcttaacccgacgcggggaaccttaaaactcgccgtcctttctcatcaggaaaaagaagtaaccagcacatttaatccactcaattcatcggagacggtggaaaccttctggtcgccacactctcatatccatagcattctgcggcttgatggcgatattcccgtcatggaaaccctgcgcgggaataccgtcacgcagttcaacgtcaaggtcactgcgtcaggactctggcatccgcacagccggaatttaatggcgttactggaggcgcctgacgatattcatcatgaaaacaggctcagcatgatgctgcctgagaaaccgtttgtatattgtcacttcattccgcaggaggcagaaaaccccaccctgtcattgaaccggctctatattaccagtcaggcaattgagaaaatatttgcccatagcattagcgcccgaccgatggatgtcacaaaaaatccgctacggcaacaaaccggttatatccatcaggaattaacctcccttccgcaaagtgaggtactgctggaatttatccacgatctaattcagtcccatactttatttaatgtgaaattgcagaagatggctgagccagacaagacccagctctttcatcacgtgctggaaaggcttaaggaggaagtcatgctgagagaggatgtcctgcccaatgaggccgacttcagcagcgcaacccaccgttag

SEQ ID NO: 222633 - DNA, 1338 bp, Klebsiella pneumoniae
atgaacaggccttcagcctcatcaacgctccggacaccgttgttttttatagtatctatactggcgctattttgcttaattaattttaccacaacctacattaacacgataacgaccccggcgccgttgttgttttacggcatgacccttattattctgatattttactttttaatatcaataactatcgctttaaaatacttaagtgataaacgctgtctgtttctcatacccgtagcctgtgcctttattggctctgccataatgatgattcttgcgttacaaaattacagcaaactgttttattgcaatctcaacgactcaatctcatacaatgaatttctgcgatattacttttaccgcaacgccttaacactcacccaaatcaccaccgcggcattagtatccagatttcgttcgcatcgcctgctggcctcccataatcacattattattacctttgcctgcataagccttactttagctatcgtcctgattgttggattttcctcaacgcacttgtatgaaccaacgattcgcttagccagtaatataatggtttacatgtggacgctcctctttttcacgacgattgcattaacccgcttcagaaatatattctggacaggaatctatttttactgcttcgtttatatcttaaccttctctttcttaacaaccgcagatgtcgctagcgaaaacacatggtataaagcgaggcttttcgaaacgctgggcactctgatctttattattattattttccttaatgcgtttaagctatatcaattatccaacaataaatatgagaatgcctatcagaactcgattcgtgattatctgacgcagctgtacaaccgtcgctatttttaccttgcgctgacaaaaaaaatgcaacgggtctctgtgcaaaaaccattgtctatcttgttatgcgacatcgatcatttcaaacgcataaatgacaaatatggccactttcagggagatcttgttattcagtatgtagcctgggttcttcaggatcaggttcgaagagatgatattgtggccagaacaggcggcgaggaatttgcactattactgcctgacgtcggccaacagcaggcgcaactcatcgccgagcggattcgccaggctattatctccccaggcgacgtcagcagcagggttaaactccccgagagcgtcacgatcagtatcggccttgccactacggaggatcctaaaacggtagagactgaattacttaaccgcgccgacgacgccctgtaccaggcaaaaaaagcaggaaggaattgtgtggttgcctggcagaagtcctcctgtactcgatag

SEQ ID NO: 222634 - DNA, 1671 bp, Klebsiella pneumoniae
atgtcagtaagcgcatttaaccgacgctgggcggcagtgatcctggaagctttaacgcgccacggcgtgcagcatatctgcatcgcgccgggctcgcgctcgacacccttaaccctggcggcggcggaaaaccgcgcctttatccatcatacccattttgacgaacgcggcctcggccacctggcgctcggtctggcgaaagccagtcgtcagccggtggcggtcattgtgacctccgggaccgccaccgcgaacctctatccggcgctgattgaggcgggtctcaccggggaaaagctgattctcctgaccgccgaccgtccgccggagctgatcgactgcggcgccaatcaggcgattcgtcagccggggatgttcgcctcccatccgtcgcagacgatttctctgccgcgtccctcgcaggatatttccgcccgctggctggtctcgaccatcgaccaggcgctgggcgagctgcatgccggcggggtgcatatcaactgcccgttcgccgaaccgttgtatggcgatatggatgataccggcgtggagtggcagcagcagctcggcagctggtggcagagcgataagccctggttacgtcaggcgctgcagagggaaagtgagaaacagcgcgactggttcttctggcggcaaaagcgcggcgtggtcgtggcgggcagaatgagcgctgccgaagggaaaaaagtggccgagtgggcccaaaccctcggctggccgctgatcggcgatgtcctgtcgcagaccgggcagccgctgccgtgcgctgacctgtggctgggtaatggcaaagcggtgagcgagctggcgcaggcgcagatcgtggttcagctcggcagcagcctgaccggcaagcgggttctgcagtggcaggccacctgcgagcctgatgaatactggctggtggataatctggccggtcgtctcgatccggcacagcaccgcggccgccgtctgctcgccagcgttgaccgctggcttgagctgcacccggcggagaaacgccagccgtgggcgacggccattcctgaactggcccgtcaggcgtgggaggcggcggtcgccagcaacgaaccctttggcgaagcgcagctggcgcagcgaattcgccgctatctgccggaacaggggcaactgtttgtcggcaacagcctggtggtgcgcctgatcgacgccctggcgcagctgccggccggctacccggtttacagcaaccgcggcgccagcggcattgatggcttgatcgccaccgccgccggcgtgcagcgcgccagcgccaggccaaccctggccatcgtcggcgatctttcggcgctgtacgatctcaactcgctggctctactgcgccaggcgtcggcgccgctggtgctgatcgtggtgaacaacaacggcgggcagattttctccatgctgccgacgccgcaggacgagcggcgccagttctacttaatgccgcaggatgttgatttcagccacgcggcggcgatgttcggtctggcctatcatcgcccggctgactggcaggcgctggatgaggcgctggccggcgcctggcgcagggcaggggcgacggtgattgagctggcggtcaatgagaccgacggcacacagaccctccagcagctgctggcgcaggtaagccgcctgtga

SEQ ID NO: 222635 - DNA, 759 bp, Klebsiella pneumoniae
gtgactctcagcgcggctgtcgaacatggccagccgggttatccctggctggtctttctgcacggtttttccggcgaccgcaatgagtggcgggaagtgggcgacgcgtttcgcgcctggccgcggctgtatctcgatctgccgggccacggcggctccgcgaatatcgcagtgcaggactttgccggggtcaatattctgctgcaggctacgcttaatagttacaacatacttaactactggctgatcggctactcgctggggggccgggtggcgatgaacttcgcctgccagccgcgcgcgggtctgcgcggcctgatcgtcgaaggcggccatcctggcctgcaggatgccgaagcgcggcgggcgaggcgcagcaacgacagcgcctgggcggaccgttttcgccatgagccgttggcgcaggtctttgccgactggtatcagcagccggtcttcgcttcactgaacgccgggcagcgcgcggcgctggtcgccttacgcagccggaacaacggcgcgacgctggcggcgatgttgcaggcaacctcccttgccgggcaggccgatctgcgcgcatccctgcaggcgcgcgatttcccctttcattacctgtgcggcgagcacgacgcgaagtttcacgccatcgcccaggcgctcgcggcggatctccatcttattcaccatgccggacacaacgcgcaccgggacaacccggcggcggtgattgcctgtctggcgcagattttggcaagttaa

SEQ ID NO: 222636 - DNA, 966 bp, Klebsiella pneumoniae
atgcgcgtatcgcaggtttaccgctggcagataccgatggacgcgggcgtggtgctgcgcgaacggcggttaaaaacccgcgacggcttgttcatccgcctgcgggagggtgaacgcgaaggctggggggaaatttctcccctgccgggattcagcgcagagtccctggaggaggcgcaggcggcgctattggcgtgggcgcaggcctggcgcgacggcgcggagccggcgcttcctgcgctgccttctgtcgcgtttggcatcagctgcgcgcaggcggagctcaacggcgagctgccgctggccgcggattatcgcgcagcgccgctctgctccggcgatccggatgagctgttcgccagactggcggcgatgcccggcgagaaagtcgctaaggtgaaagtggggctctgggaggcggtccgcgacggtatggtggttaatctgctgctggaagccattcccgacctgcagctgcgtctggatgccaaccgggcctggacgccgctgaaagcgcagcagtttgcgaaatacgtcaatccggcgtatcgccagcgcattgcgtttattgaggagccctgtaaaacgcgggaggactcgcgggcctttagccgcgaagccgggatcgctatcgcctgggatgaaagccttcgcgaggcggattttcgctttgtcgccgagccgggcgtgcgcgcggtggtgattaagccgacgctaaccggcagtttacaccaggttcagcagcaggtcgccgcggcccatgcgctggggctgagcgcggtgatcagctcgtcaatcgagtccagcctcgggttaacccagctggcgcgggttgccgcctggctgacgccgcagaccatccccggactggacaccctgtcgctgatgggcgcccagctggtgcggccgtggccggaaagcaccctgccgatgatcaacatggatacgctggagccgctgctgtga

SEQ ID NO: 222637 - DNA, 1362 bp, Klebsiella pneumoniae
gtgacctttcacgactggccctggcgccactggcgccagcggcgcggagaggcgcaggcgctgcgcctgaatgaccagccgctgacctggcgcgacctgtgcgcccacgttgacgcgctggcggccggctttgccgcgcagggcgtaacggaaggtcacggggtggcgctgcaggcttttaaccagccggcgacgctgctggcctggctggcgctgctgcagtgcggcgcgcgggtgctgccgctgaatccgcagctgcccgcagcgttgctgcaggaactgctgccagcgttgaccgtccagcatcagctggtgcttaacggcgatgcgctgccgggggatttaccggcgttaaccctgcaggcggcagcgggaacccatgctgtgccgtggcgcggggatcgtttcgcttcaatgacgctgacttcggggtcgaccggtctgccgaaggcggcagtgcatgatgccagcgcccatctggccagcgccgccggcgtgctggcgctgatgccgtttgccgcagaagatgactggctgctgtcgctgccgctgtttcatgtctccggacaggggattatgtggcgctggctgctggccggcgcgcggctgacggtgcgcgataaacagccgctggcgcagatgctgcagggctgcacccacgcttcgctggtgccgactcagctgtggcgcctgctgaatgacggtgctgcgctctccctcaaggcggtgctgcttggcggcgcggcgatcccggtcgagttgaccgagcgggcgcgggggcagggggtacgcacctactgcggctatggcctgaccgaatttgcttccaccgtctgcgccaaagaggccgacggcgcggcggatgtgggcgcgccgttgccggggcgggagatgaaaatcgttgccggcgaggtctggctgcgggcggcgagtatggccgcgggctactggcgcgacggtcaattgttgccattgaccaacgacgaagggtggtttgccacccgcgatcgcggcgagatcatcaatggacggctcactctcctcgggcgcctggataatctctttttcagcggtggggaagggatccagcctgaggaggtggaacggatcatcgtggcgcatccgcagatacaacaggcgtttgtcgtgccgctggacgatgcggaatatggccagcgtccggtcgcggtggtggaatgcgatgacggctgcgagatgagcgtgctggcggcatggagcgcggagcggctggcgcgtttccagcagccggtgcgttggctgcggctgccggaaacgttaaagaacggtgggattaagatctcgcgccgggcgctgcgcgaatgggtcaattcgccggcttag

SEQ ID NO: 222638 - DNA, 1518 bp, Klebsiella pneumoniae
atggatacctggatctatctctcgcagggcttcgccgtcgccatgacgccggagaacctgctgatcgccctgatcggctgctttgtcgggacgatcgtcggcctgctgccggggctgggccctatcaacggcgtggcgatcctgctgccgctggctttcgcccttcacctgcccgcggaatcggcgctgatcctgctggcgacggtctatatcggttgcgaatacggcgggcgaatctcatcgattctgttgaacgtgcccggcgatgccgccgccattatgaccgccctcgacggctatccgatggcccagcagggtcgcggcggcgttgcgctgtcgatttccgccgtcagttccttctttggctcactgatcgccatcggcggcattattttgttcgcgccgctgctcgcccagtggtcgctggcgttcggtccagcggaatacttcgcgctgatggtcttcgccatcgcctgtcttggcagcatgatggcgcagaacccgctgaagtcgttcctcgcggcgttaatcggcctgggtctggcgacggtgggagtggacgccaataccggggtttaccgcttcaccttcgacagcgtccatctctccgacggcgtgcagtttattgtggtggtgatcggcttgttctcggtttcggagatcctgctgatgctggagagcaccagcggcggacaaaccctggtgcggaaaaccggacggatgctgtttaacaccaaagaggccgcacagtgcgtcggcgcgacgctgcgctcctcggtggtgggtttcttcgtcggtattctgcccggcgccggggcgaccatcgccagcgccattacctacatgacggagaaaaaactcagcggtaacagcgataacttcggcaagggagatattcgcggcgtggcggcgccggaagcggccaataacgcctccgcctgcggttcctttattcccatgctgacgctcggcgtgccagggtccggcaccaccgcggtgatgatgggcgcgctgacgctgtataacattacgcccggcccggcgatgttcaccgaacagccggatatcgtctgggggctgattgccgccctgctgatcgctaacgtgatgctgcttatcatgaacattccgttgatcggcctgttcacccgtatgctgaccattccgctgtggtttctggtcccggccatcgccgcggtctccgccgtcggcgtttacgcggtacacagcaccacttttgacctgttgctgatggtggggcttggcgtgcttggctacatcatgcgcaaaatgcacttcccgatgtcgccgctgatccttggcttcgtgctgggggagatgctggagcagaacctgcgtcgcgcgctgtccatcagcaacggcaacctggcgatcctgtggcaaagtggagtgaccaaaacgctgctggtgctggccatcgccgtgctggtggtgccgccgctgctgcgtctgcggcgtaaacagcgccagcgtcgcgccgaagccaatatcggctaa

SEQ ID NO: 222639 - DNA, 432 bp, Klebsiella pneumoniae
atgagcgatcgtatttttgccggagtatggctgttgttatgtactggcggtctgtttatcgcctggcagatccatagcgaatactcctatgaacccgtcggcccgcgccccttcccgctcgggatcatcggcctgatgctgctgtgctcggcgttaatgctgttgcgtcgcccggacgccgtcgagtggccgggacggcatgtgctgcagcgtctgctgaccatggtcgtggtgctggtggtgtacgcctgggggtttgaatggctcggttttccgttggccaccgcgctgctgacggcgatcattggtctgctgttcggcgcgacgctgccggcggcgggcattgccggcgtcgcgatgggcgtgtcgttatggtacgccttcgacaccctgctcgatgtcaccctgcccctcggcatctggtttaattaa

SEQ ID NO: 222640 - DNA, 981 bp, Klebsiella pneumoniae
atgaaaacgccatttctccgtcatctgagcgccatcgcgctgtgcctctgtaccacatccgccttcgccgcggaggccccgtcccgcaccgaatgtatcgcgcctgctaaaccgggcggcggctttgacctgacctgtaagctgattcaggtgagcctgatggaaaccggcgccatcgaaaaaccgatgcgcgtcacctatatgcccggcggcgtgggcgcggtggcctacaacgccattgtcgcccagcgcccggcagagccggggaccgtcgtcgccttctccggcggctcgctgctgaacctgtcgcagggtaaattcggccgttacagcgtcgatgacgtgcgctggctggcgagcgtcggcaccgactacggcatgatcgccgtgcgcgccgattcgccatggaaagatctgaaatcgtttatgaccgcgttggagaaaaacccctccagtatcgtgattggcgccggggcctctatcggcagtcaggactggatgaaagcggcgctgctggcgcaaaaagccaacgtcgacccgcataaaatgcgctatgtcgcctttgaaggcggcggcgagccggtgaccgcgctgctcggtaaccatgtgcaggcagtctccggcgatctcagcgagatggtgccctatctgcagggcaataaaatccgcgtgctggcggtcttctccagtgaacggctgccgggggcgctcgccgatgtccccactgcaaaagagcagggctacgacctggtctggccgattattcgcggcttctttatgggcccgaaagtcagcgacgccgagtaccagtggtgggtcgatgaattcactaaactgcagcaaaccgaagcgttcaaaaagcaacgtgaactgcgcggcctgtttgaattcaatatgaacggcaaggcgctcgatacctacgttaagcagcaggtcagcgactaccgcgaacaggcgaaagcctttggcctggcaaaataa

SEQ ID NO: 222641 - DNA, 678 bp, Klebsiella pneumoniae
atgcgtctcttattagccgaggataaccgtgagctggctcactggctggaaaaagcgctggtgcagggcggttttgccgtggattgcgtcgctgacgggcgtgcggccgaccatctgctgcaaagcgagcaatatgcgttggcggtgctggatatcggtatgccggggtacgatggccttgaagtggtccagcggctgcgcaagcgcgggcagactctgccggtgctgttgctgaccgcccgcagcgcggtagcggaccgggtgaaaggtttaaatgccggcgcggatgactatttacccaagccctttgagctggaagagctcgacgcccgcctgcgggcgctgctccggcgcagcgaagggcaggtgcatgaggtgcagcagcttggtgagctggcgtattgtgacgaaggctattttttactccgtggccagatgctgtctttgacgccgcgtgagctggcgttattgaaggtgctgatgtttcgccgcacccgcccggtttcgcgccagcagttattcgaacaggtgttcagtctcagcgacgacgtcagtccggaaagcatcgaactctatattcaccgtctgcgcaagaaacttcaggcgagcaatgtgcgtataaccaccctgcgcgggttaggctatctgcttgagtgcgagcgccatgagatggggtaa

SEQ ID NO: 222642 - DNA, 1407 bp, Klebsiella pneumoniae
atgagatggggtaagccgcaatcgctctatgcccaactgttgctgtttctcggcctgccgctggtcctgctgtggggactctccgcgtttaatagctacgtcagcgcgctgcaggcggcgacgcaagcctacgatcgtaccctgctgtcgtcggcgcggacggtggccgaacggctggtggtgcgcggagggcaactggaggtgaatgtgccctgggtggtgctggacagcttcgagctcaacatgaacgatcgcctctattacaaggtgcttgacccgcaggggaaggtcatttccggctatgacgatctgcccgcgatgccgccctccacctcgcgaactcagctctatccggcgctggcatggttttatcataccgaatatcgcggtcaggcaattcgcgtggcgcgcctgctgcagcccatcaacgaagggggcatcgtgggcatggcggagatctatattgccgaaacgctgcagtcccgccgctggctggctggacaattactcttctcatcctgggtgtcgcaggggttactggtcctgttgacgctggtgctggcagcctggctgctgcgccgcgtgctgcggcccatgcgccagctctccgcgctgatggtgcgccgtgaacccggcctgctgacgccgctgccggagctgctgccctggtcagaaacgcggctgctgattgtcgcgttcaaccgctatatcgaccgcctgcgggtgatgatctcccgccaggagcgcttcagcgccgatgcgtcccatcagctgaaaaccccgctggcggtgctgaaaacgcaggcttcggttgcgctggccagcgacgatccgcaactgtggcgcgaaagcctgcaggcgatgcgcgccacgctggacgatacggtcttgttaacggagcggttgctgcagctggcgacggtaaaacagcgggatcaggcgtttgcggtgattaacttgccggaaattgtgcgcaacagctgcttttcgcgtattgcgcaagcgcggagcaaacatatcgatcttggctatgagggcgagcagtcggcggtacaggtggcaggcgatagcgttctgctgggggaactgtgcgctaacctgctcgacaatgccattcgctataccccggaatatggtacgatcacgcttagcctgcatcgcgacggcgacgccgtgctgctcagcgtggaagacagcggcccgggaattgacgaccagcaggtacaccaggcgctgatgccgtttcgccgcctcgataacgcgggcgcgatacccggcgccgggctggggctggcgctggtaaacgatatcgcgcgtctgcatcgtagccacctgcagctttcgcgcagcgaaagcctgggcggactgaaggcgacgctgcgcctgccgaccgtggcgttagagtag

SEQ ID NO: 222643 - DNA, 426 bp, Klebsiella pneumoniae
atgcgccaaaggacgattgtttgcccgctaatccaaaatgatggccattacctgttgtgcaagatggctgccgaccgcggggtttttcccggacagtgggcgctggccggcggcggcgtgaagccaggggaacgtatcgaagaggcgctgcgacgcgaagtccgcgaggagcttggcgaaaaactgcagttgacccgtatcacgccatggagcttccgcgacgatacccgcgtgaaaacctatcccgacgggcgccaggaaacgatctatatgatctatctgatcttcgactgcgtcagcgccaatcgtgacgtgacgatcaacgaggagtttgacgattacgcctgggtgaaagcggatgagcttaaaaactacgatctcaacgccgccacccgcctgaccctgagcatgaaggggctactctaa

SEQ ID NO: 222644 - DNA, 228 bp, Klebsiella pneumoniae
atgacctggcgaaatgatttttcacaagagtgtaaccagttgcgtcttttatggcatcggacgttgccggtgcggggcgtcgggaattcagcgtcattcatattgatgtttaatatgatttacgccaaatacattgacgttaaaaggggcacgccgcacgatcggcgcggcgagggggtattcgtcgccctttccatggcggtgctccatacggatattttcgcttaa

SEQ ID NO: 222645 - DNA, 1365 bp, Klebsiella pneumoniae
atgcataacaaaaaaataaatcagctttttatcggcgcggcgctggcgactatggcgcccgccgtgaacgcggcgcaaaccccggcgtggaacggcagcgtgctggggtttgaagccggacagccagggctgctgggcgatatgctgggcattcgtcccatccttgaagagaacggctttcattataatcttggctatcttaacgagatggcctacaacgccggcggcggctataaccatgataaacatctggcctatattgaccaggtgtcattgacctttacccaggatctggagcgctggaccggcataccggacgcgcggcttgagggtaatatcgtcaatcgcaaccatgatgataacctcaccacgaaacggctgcaggatccgcgggtcagcttcaacgatctgtcgcaggagagctggggcggcgggtcgatcacccgtctcggctggctgacctttgcccgcagctttgacgaccgccgcctgacctggcgcatcggcatgatgaacaaggtgcaaaccttcgaccagatcataccctgcgattttcagctgctgacccagtgcggtgggaaatcggccaactcgctgacctggaataactggaacattcatacctggggcaccaccctggagtacaagctgacgccgaccgtcaccctcaaaggcggggtgatggagcagaacccgcaggctaccgcgcgcagccacgcgtggagctggtcgacgaagggtagcaaaggcatcttactgccgatggagatcgaaacccgtccgctgattaatggcctgccgggagcctataaccttggcgtggtctggactaacgcgccgcagagcgacctctacagcggtaaatccggcggcgccggggcgaccgatccgcaaggttacgccgagcacgacagcacctggtttatgtacgccggcctgaaccagcagatcacccgccacgccgacgacccgctgcgggggatgagcgtctcgctgagcggcagcctcagcgaccagcgcagcaactatatccactccgccgtcgccgcctccatgcgctaccgcggtctgtttgacgcccgtccggaggactggatcggcttcggcctgacgtggatcgacatgagcagccactacgcacgtaatcagcgctatatgaatcagataagcggcgccaccgactataacgatccggcttaccagccggtggccggccactcgctgaacggtgaactctattatcgcttccgcccggtctcctggctggagctgcagccgggcctgcagtactggcaccgtccgggcggcgtcgcgcagacccaggacgcgtgggtagtggagtggaaaaccatcgtgaccttctga

SEQ ID NO: 222646 - DNA, 1863 bp, Klebsiella pneumoniae
atggaatataaagcactcgcgcaggatattctcaaccgcgtcggcggcaaagagaacattgtgagtctggttcactgtgcgacacgtctgcgttttaaactgaaggataacggcaaagccgatgccgaagggctgaaggccaatccgggcgtgattatggtggtggagagcggcggccagtttcaggtggtgattggcaaccacgttcacgacgtctggctggcggtgcgccaggaggcggggttaagcgatgacagcgaaccggttgccgaggaaaaagcggccaaaggatcggtgttaagccagcttatcgacatcatctccggcatttttacaccgtttatcggcgtgatggcggcaaccggtctgctgaaaggcctgctggcgctggcggtgacctgcggctggcttacgccggagcaggggacttataaaatctggtttgctgccagcgacgcgctgttctttttcttcccgctgtttcttggctataccgccgggaagaagtttggcggcaacccgtttatctcgatggtgattggcggggcgttaacccacccgctgatgattcaggcctttgaggccagccaggcgccgggcgcggcggtggagcactttctcggcattccggtgacctttatcaactacagctcgtcagtgatcccgattattctcgcctcatgggtctcctgctggctggagcgcaagagcaacgcgctgttgccgtcatcgatgaaaaacttcttcagcccggccatctgcctggcggtggtggtcccgctcaccttcctggtgattggcccggtcgccacctggctgagccatctgctggccaacggctaccagttcatttatgcgtttgcgccatggctggcgggcgcggtactgggcgccatgtggcaggtgtgcgttattttcggcctgcactgggggctggtgccattgatgatcaataacatgacggtgcttggtcacgactccatgctgcctattatcctcccggcggtgattgcccaggtgggcgccgtgctcggtattttcctcgccacccgcgatgcgcgccagcgggtgctggccggttccgccttctccgccgggctgttcggcatcaccgagccggctatctatggcctgactctgccgctgcgccgtccgtttatcttcggctgtgtcgccggggcgattggcggggcgatcactgcctttagcaacagttatgcctactcgtttggcctgccaaacatctttttcccggcgcaaatgatcccgcccggcgggattgacgccagcgtctggggcgggcttatcggcaccggcgtggctttcgtgctcgcctgcgtgctgaccttcttcgccggcctgccgcgcgccagcgccgcgccgggcgccgtggcggtagcgccggtctcggcaaatgacatccttgcgccgatgagcggcagcgtcatcgccctcgatcaggtgccggacagcaccttcgccagcggcctgctggggagaggagtcgccattatcccggctgtgggcaaagtcattgccccattcccgggcgaagtggcttccctgtttcagactaaacacgccatcggcctgcagagcgacagcggcatcgagctgctgatccacgttggcatcgacacggtcaaactcgacggcgtgccgtttaccgcgcatgtgaaagagggcgacagggtacaggccggcgatctgctgattgagttcgatcgtcaggcgattctggacgccggttacgacctggcgaccccgattattatcagcaacagcgatgactatcgtgagatcgacacggtggtgcccagcgccgtcgaagccggtcagccgttgttgtcagtcagccattaa

SEQ ID NO: 222647 - DNA, 1395 bp, Klebsiella pneumoniae
atgaaaacattcccgacagattttttatggggcggcgcgaccgcggcgaatcaggtggaaggggcgtacctggaagatggcaaagggttatccacctccgatgtgcagccgcacggcgtcttcggcgaagtggtcgagcgcgtacccggcgacagcggcataaaggatgtggcgatcgatttttaccatcgctacccggaagatatcgccctgttcgctgagatgggctttaactgcctgcgggtctccatcgcctggacgcgcatctaccccaacggcgacgacgccgagccgaacgaagccggactcgccttctacgacaaattgttcgacgagatggcgaagcacaacatcactccgctggtgacgctgtcgcattatgaaatgccatgggcgctggtgaaaaattacggcggctggggcagccggcaggtgattggcttctttgagcgctacgcccggacggtgttcagccgttataaaaacaaagtcaaactgtggctgacctttaacgaaatcaatatgtcgctgcatgccccgatgaccggcgtcggcttgccggccggcagcagtaaaggcgaggtgtatcaggccattcatcaccagctggtggccagcgcgctggcggtcaaagcctgtcatgagctggtgcccgagggcaaaatcggcaatatgctgctcggcgggctgatgtatcccctgagctgcaaaccggaagatgtgtttgagacgctgcaggagaaccgcagctggcagttcttcggcgacgtgcaggcgcgcggggcgtacccgggctatatgcagcgctttttccgcgacaacggcatcacgctcgacatcaccgaggccgatcgcgaaacgctgaaaaccaccgtcgattttatctccttcagctactacatgaccggatgcgtcaccgccgatgaggcgctgaaccagcaggcgcgcggcaatattctcagcatggtgccgaacccgcacctggcgagctcggagtggggctggcagatagaccccctcggcctgcgtacgctgctgaacgtgctgtgggatcgctatcagaagccgctgtttatcgtggaaaacggtctgggcgccaaagataaggtggaagccgacggcagcattaatgatgactatcgcatcagctacctgaacgaccacctggtgcaggcgcgggaagccattgacgatggcgttgagctgatgggctttaccagctgggggccgattgacctggtgagcgcctcgaaggcggagctgtcgaagcgatacggctttatctatgtcgaccgccatgatgacggcaccggcaccctggcacgcagtaagaagaagagctttgactggtataaagaggtgattgccagccgcggcgccagcctgaaagcgtaa

SEQ ID NO: 222648 - DNA, 1440 bp, Klebsiella pneumoniae
atgaaattgatattaaaaaatagcgtgctggcggcgttgcccctggccatcgcgctggctggctgcgcgccttctcatgaggtcgctaatccgccgcagcagcaaattccggcttcccacgtttccatggatcttcccgccgccgtcaaaaatggctggccacacaccgactggtggaaagactaccacgatgcccaactggataatctgattcagcgcgcactcgccaacgcgccggacatgcagattgccgaacagcgcatcaggcttgctgaagcgcaggcgcgaatgtcgcaggcgaatcttggcccggagatggatttctccgccgatatcgaacggcagaaaatgtccgctgaaggcctgatggggccgttcgccaccgataccgacggcaataccggcccgtggtacaccaatggcaccttcggcctgactgccggctgggatctcgatctgtggggcaaaaaccgcgcgctggtgaaagcgcgcatcggcgagctgaaagcccaggtggccgagcaggcccagacccgcgagctgctctccggcagcgtggcgcgcctgtactggcagtggcagacggaagcggcgatcaaagcggtgctgcagcaggtgaaaaacgagcaaaataatatcgtgacggtcgacaaggccctgtatcagcgcgggatcaccaactccgccgaaggggcggagaacgatattaacgtcagcaaaaccgaccagcagctggcggacgtggcgggcacgatgaaagagattgaagcgcggctgatggccctgaccaacagccagagccagtcgctaaacctcaaacccgccagcctgccgacggtcagcgcgcagctgccggataccctcggctatgagctgctggcgcgccgcccggatctgcaggtcgctcactggtatatcgaggcgtcgctgagcgaagtggacgcggcgaaggcggcgttttatccggacatcaacctgatggctttcctgcagcaggatgccctgcacttaagcgatcttttccgccattcggcgcagcagatgggcgtcaccgccggactgacgctgccgatcttcgacagcggtcgtctcaatgctaatctggatatcgccagcgcgcagaacagcctgtccatcgcccaatacaacaaagcggtggtggacgccgtcaaccaggtggcgaaaaccgccagccaggttgagacgctgatggccaaaagccaacagcagcagcaggttgaaaaagacgcccagcgggtggtggatctggcgcaggcccgaatggcggcggggatcctgcccggctccagggtgagcctggcgaaactcccggcgctgcaggagcgtatcaccgccttgcgcctgcacggccagtggattgacgccagcattcagctgacctcggcccttggcggcggctaccatcagacggtgaagtaa

SEQ ID NO: 222649 - DNA, 951 bp, Klebsiella pneumoniae
atgatgccgaaatttcgagtctctttgctcagcctgaccttgctgctggctgtgccttttgcgccccaggcgttagcaaaaacctccgcggcggtgaccgcctcgcagccggacatcgcttccggcagcgccatgatcgtcgatctggccaccaaaaaaatcatttacgccagccagccggatctggtgcgcccgatggcgtcgatcaccaaggtgatgaccgccatggtggtgctcgatgcccatctgccgctggatgagatgctgacggtggatatcagccataccccggaaatgaaggggatttactcgcgcgtgcgtctcaacagccaaatcagccgccgcgatatgctgctgctggcgctgatgtcttccgagaaccgtgcggccgccagcctggcgcatcactatcctggcggctacgacgcctttattcgcgcgatgaacgccaaagcgcaggcgctgggtatgacccatacccgctacgtggagcccaccggactgtcagtgcataacgtctccaccgcccgcgatctgaccaaactgctgatcgccagcgagcagtacccgctgatcggccagctgagcaccaccaaagaagagaccgccacctttgcccatccggcctacagcctgccgttccgcaacactaaccatctggtgtatcgcgacaactggaacatccagctgaccaaaaccggcttcaccaacgccgccggccactgcctgattatgcgcacggtgatcaaccaacgcccggtggcgctggtggtgatggatgccttcggcaaatatacccactttgccgacgccagccgtttgcgcacgtggatcgagaccgggaaggtgatgccggtgccggcttcggcgctgagctataagaagcagcgcgaagcgcagatggcggaggcgatgctgaaaggcggcgcccagaccgcgcagaacgattaa

SEQ ID NO: 222650 - DNA, 2163 bp, Klebsiella pneumoniae
atgccaccagttatcgataaaacaacgacgaaagatgcagatgaaattgattttggacgcttggttggagaatttattgaccatcgtaaattaataatatctgtaacttcactttttacattagtcgcattaatatatgctattttttcaacgccaatttaccaagctgatgcgcttattcaagtagaacaaaaacaggctaacgctattcttagtaaccttagccaaatgctacctgatagccagcctcaatctgcaccagaaatcgcattaattcagtccaggatgatattagggaagaccgtagatgatctaaatttacaagcaaggattaagcaaaaatattttccattttttgggcggggtttatcaaggctctttggtgatgaacccggggttatcagtgtctcacatctatatataccttcgcatgaaaaagatgaacctgaaattttgttaactgtaatagataataataaatattctatttcagcagataatttagaatttgaaggtcaagttggtaaacccattgaaaatggcggcatttcaataaaagttaataaactagatgcgaaacccgggacttcttttatcattggctatgtttcgcgtttaaaagcaataactgatttgcaagagaaactatctgtaactgaccaaggaaaagatactgggatgttaactctttccttgaatggagataatccagaattaattgaaagtattcttaatagtattagccaaaattatctttcacaaaatatttctagacaagctgcacaagatgcaaaaagccttgattttttaagcaagcagttaccgcaagttagaggggacttggatttagctgaagacaaacttaatcagtatcgtagaaaaagcgattccgttgatttatcacttgaagccaagtcagttttagatcagatagtaaatgtagataatcaacttaatgaactaacatttagagaatcagaaatatcacaactttatactaaagagcatccaacttataaagcattaatggagaaaaggaaaacactgcaggaagaaaaaataaaactaaacaaacgggtatcagcaatgcctgaaactcaacaagaaatccttcggttgagccgtgatgttgagtctggtcgtgcagtgtatatgcaattattgaataggcaacaggagttaaatatagcaaaatcaagtgctattggtaatgttagaataattgataatgcagagactcaagctaaaccagttaaacccaaaaaaatattggttgtatttgtaggtattgtgttaggtttgttgttttcagccgggcttgtgctgttacgtatatttttaaggaaaggcattgaaacaccagaacaattagaagagctaggaattaacgtatatgctagtataccagtggcagaagcgatcgctaaaaatgcatcacaagacaaaaaaatttttcaaaagctatctagtgaaaataaaggatttcttgctatagaaaaccctgcggatttagcgattgaggctatccgtggtctgcgcacgagcttacattttgcaatgatggaggcgaggaacaatatcttaatgatatctggtgctagcccaaatgcagggaaaactttcgttagtaccaatttagcagcaataatcgcacagactggtaaaagtgtcttattcatagatacagatatgagaaaaggatatactcataaattatttgatattaacaatgcaaatggtctatcagatatattatcgggtaagtgtgaaattaaacaagcacttaaaaaaattgatgctattggatttgattacatttcaagaggtatggttcctccgaatccagcagaactattaatgaataaacgttttggtgaattattgaagtgggcaaatgataattatgatattgtcatactagatactccaccaatactcgcagtcactgatgctgcagttattggtaattacgtcggtacaacattattagttgctcgttttgagttgaacactcctaaagaaatcgaagtaagcatcaagcgctttgagcaaacaggtgtaattgttaaggggtgtattttaaatggcattgtaaaaaaagctagcagctactatggttatggttataatcattatggatatacgtattccgataaaaaataa

SEQ ID NO: 222651 - DNA, 747 bp, Klebsiella pneumoniae
atgaaatatattggttggttagcgtcatttttgatagtgttaactttaggtgtttactattatcaatttggcgttggtccaaccattctttcaaaaggaaaggatgtatgggggcagtttggtgattactttggaggggttctcaatcctatcttaagttttatttccatactgcttttgattaaatcagtaagaatgcaatttacagctaatgaatgtttaattaatgagactaggagacaagagattctggataaaagaaagtcatttgaatttcaattttataatctaattgaggcgcaaaaaagtggctttgatgacttttctttaatttttccatctcctaatggggggcatgaggtaaagaaagttgatgcagtaaataaacttgagcaacttataaaaacaagcgttcagagaggtatggttggtgtgaatttaactaacatacttgagactttagacaataactctgatgataaaatgttttcttttgctagaagattttatcttgcagttaaattgattgacaaagagattactgttcaaaatgggttcactgaacaggataaggtaatgtatgtggaaacgcttattaacctttctgattttgctatggtaagattgatatgtataataattacatatctctcttggcctaatgtagagtatttgaaaaaatcaaaagaaatcaacttgattatcaagtcgactggattggaaacatatattaactccattaaataa

SEQ ID NO: 222652 - DNA, 846 bp, Klebsiella pneumoniae
ttgctctcgattcgtgggggaaaaatgaaagtaagtcttgatcttgtcataaacagtggtgacaacgaagttgacatggattacgctcttcagactttatccggagcttcaggggttacaagtataatcacagaagcaatattacgaggaaaggttaaagaaaatcgccatcagactaatgaaattcgcacaaaattaaagcattcttttacgggttcttttggccaatgctttgatgtagtaatatcggatagaaatgtcgcagctagattgtctacaatgactagatcagtcttttcagaagtgatgagttattacatttatgaatctctttttttagaaagccctagacttagcgatgccgctataaaaattattaaagggttagaagatattgaggatgaacttaccaaagctataagaaatagactgaaaaacatgcacaaaatttctacgatgtgtaattattcagtcgatttgaattatagaaaacctggcggtaaacaaaggatagcgactttgaatcaacatacagccttaaatattacagagttaattgaaactgaccatgaccattacatagaagctatcataacccgctttaacaccttcacaggaaatggtagactattagttaatggcgaagagagaactacatcgtttggttttttaaatggacttaaatatgtcactgatgctcagacgaaaaaaataacaagtaatcttgatgcaaataacaggctggccgaagaagaacgagagcacttgttattaaaggtcagggatatgaccattagcaatggtgagatcgtaaaatatttagttattgaggttgaagacttatga

SEQ ID NO: 222653 - DNA, 591 bp, Klebsiella pneumoniae
atgttggaaaaagctaaagataattgcattcgaatattatacataataatatgtgctattattgttttcgtttgttataaatatcaacatgatataattagcataagtgaaaatttgaacatgttttcatattatgcttctgttgctactgttattgcattactgatttcaataatggaaatcttgtataacgttagtattacaaaaagcattaaaactcgctctctatttaatctgagtaagttcaaagatgcaactggattaagttatgcacatgaatgtgtatcttactatgatcaatgcctcaatgatcttgcgacaaaaaaatacccacttctagtggctaattttactatagcaagaaagttacatataagcctcgccaatcacttcatgacagaagaagacaaaaaggaatttgatgacaaaaaaacggcattaaacgatttagaaaagaaaatattttcgactcgtcatattaatgcttcaaatcctttgggcaacgctcagattaaagagatccaagacgcattactcgaggtaaaacagagatttgaaacgaaatacacattcagaaagtcagaggattaa

SEQ ID NO: 222654 - DNA, 294 bp, Klebsiella pneumoniae
atgttaccaaatacaattgtaaattttgtaagccagttagtttctgagactcagaatggtatcattcattggaattatatttcagatgaagataaagtatggactaattaccaaggaatgcgaataactctagattatgcattcgatttcaacatggaagtaggtgtgcaaaggttaagcatcatacagaatgatgggagacattttttctttcctatatctgaatatgattcgggttatactttattgaagcaactttataatgaagcccaagcttcggattttaaattctaa

SEQ ID NO: 222655 - DNA, 309 bp, Klebsiella pneumoniae
atgaccagcctctatgcagcaacgaaaggcgccgttgtcgcaatggttaaaagctgggcctccgcgctggctgtgcgggggattcgcgccaatacgctggtaccgggtccgattgaaacgaacttcagacatttcatgccggaagagtcgcgtcagcagtttgaggattttgttgtcagccaggtccccctcggccgggcaggaaccgcggaagaagcatctgctgtcgcactgtttctgctttctgatgacgcatcctatgtcaccggcagccagtacgcggtagatggcgggctggtgcattactag

SEQ ID NO: 222656 - DNA, 570 bp, Klebsiella pneumoniae
atggcagattcagaacgcgataaaccagctgcgttgtcattaaatatcggcagtaaaataagacgactacggcagtcacgggggatttcgttaaacgatctgtctaaattgtcaggggtttcaaagggcgcgttatccaaactggagtctggttcttccagcccccgagttgatacgctggacgctatcgccaccgctttacgtttaccggtcggcgatttgctgagcggcggcagcaggatgtatccccgctttgaaaaacatcgcccagtgccgggcgagtattcgcaaatgatgaaattccgcatcggccccggtaatacttccgagatatggttgctgcaaatggaaccgcaggtcaccatccacagccccgggcattcggagggggcgcatgaacatattctggtgcacagcggaactctgcgcctgcgctttagccagtatgaagtcatcaccctggaacccggggatttttatgccttctccgcgcaagtggcgcacacctacagcgcaacggaaacagcggttagcgcaacggtggtgatgactcacctcgagcccggttaa

SEQ ID NO: 222657 - DNA, 363 bp, Klebsiella pneumoniae
gtgcgtaaagttaatttaaaagaaagttttgcgttgttcagcgattactggagccctaaaattgtcggcgagatgaataacgaatatgtcaaactggctaaattatccggaaaatttgactggcatcatcatggacaggaggacgagctttttcttgtggtcagcggccgcttgcgaatgggcttaagaacaggtgatatcattcttgatgccggtgagtttatcattgtgccgaaaggcaccgaccattgtcctgaagcgttaaccgaagagtgctgcgtcgttttactggagccaaaatcgaccctgaatacgggtaatatcgtcaatgaacgtacggttcatgaactggataaactctga

SEQ ID NO: 222658 - DNA, 3153 bp, Klebsiella pneumoniae
atggacttttcccgcttttttatcgacaggcccattttcgccgcggtgctgtcgattttaatttttatcaccgggttaatcgccatcccgctgctgccggtgagcgaatatcctgacgtcgtgccgcccagcgtgcaggtgcgcgcggagtatcccggcgccaacccgaaagtgatcgccgagaccgtggcgacgccgctggaggaagcgatcaacggcgttgaaaacatgatgtacatgaaatcggtcgccggctccgacggcgtgctggtgaccaccgtgaccttccgcccgggtaccgacccggatcaggcgcaggttcaggtgcagaaccgggtcgcgcaggccgaggcgcgtctgccggaggacgtgcgccgtctggggatcaccacccagaaacagtccccgacgctgaccctggtggtgcatctgttttcgccaaacggtaagtacgactcgctgtatatgcgcaactacgccacgctgaaggtgaaggatgagctggcgcgcctgcccggcgtcggccagatccagatatttggctccggcgaatacgcgatgcgcgtctggctggatcccaacaaggtggccgcccgcggtctgacggcctcggatgtggtgacggcgatgcaggagcagaacgtccaggtctccgccggtcagcttggcgccgagccgctgccgcaggagagcgacttcctgatctcgattaacgcccagggccgtctgcataccgaagaagagtttggcaatatcattctgaaaacggcgcaggacggctcgctggtccgcctgcgcgacgtggcgcgcatcgagatgggttccggtagctatgcgctgcgctcccagctcaacaataaggatgcggtcgggatcggtatcttccagtccccgggggctaacgccatcgatttgtcgaacgccgtgcgtgccaaaatggccgagctggccacccgcttcccggaagatatgaaatgggcggcgccgtacgacccgacggttttcgtccgcgactccatccgcgcggtggtgcagacgctgctggaggcggtcgtgctggtggtgctggtggtgatcctgttcctgcagacctggcgcgcatcgattatcccgctgatcgcggtgccggtatcggtggtcggtaccttcagcattctctatctgctgggcttctcgctgaataccctgagcctgttcgggctggtactggcgattggtatcgtggtggatgacgccatcgtggtggtggaaaacgtcgagcgcaatatcgaagaggggcttgcgccgcttgccgcggcgcatcaggcgatgcgagaggtctccgggccgattatcgctattgcgctggtgctgtgcgcggtgttcgtgccaatggcgtttctctcaggcgttaccggtcagttctacaagcagtttgcggtgaccatcgccatctccacggtgatctcggccatcaactcgctgacgctctccccggcgctggcggccctgctgttaaagccgcacggcgcgaagaaagacctccctacccggctgatcgatcgtctgtttggctggattttccgtccgtttaaccgctttttcctgcgcagctcaaacggctatcaggggctggtgagcaaaaccctcggccgccgtggcgcggtgtttgtggtgtacctgctgctgctctgcgccgctggggtgatgtttaaagtcgtccccggcgggtttattcccacccaggacaagctgtacctgattggcggcgtgaagatgccggaaggttcgtcgctggcgcgcaccgatgcggtgatccgcaaaatgagcgagatcgggatgaataccgaaggggtcgattatgcggtcgccttccccggtcttaacgcgctgcagttcaccaacacgccgaataccgggacggtcttttttggcctgaaaccgttcgaccagcgcaaacactcggcggcggaaatcaacgcggagatcaacgccaaaattgcgcaaatccagcagggatttggcttctccatcctgccgccgccgattttaggactgggtcagggctccggctactccctttacatccaggatcgcggcgggctgggctatggcgcgctgcaaagcgcggtgaatgccatgtccgggacgattatgcagacgccggggatgcacttcccgatctcgacctaccaggctaacgtgccgcagctggacgtgcaggtcgatcgcgataaggcgaaagcgcagggggtatcgctgaccgatctgttcggcacgctgcagacctatctcggctcgtcttatgtcaatgactttaaccagttcgggcgtacctggcgcgtgatggcccaggctgacggaccataccgcgagagcgtggaagatatcgccaatctgcgcacccgcaataatcagggcgaaatggtgccgatcggcagtatggtgaatatcagtaccacctacgggccggatccggtgatccgctacaacggttatccggcggcggacctgattggcgatgccgatccgcgcgttctctcctcctcgcaggcgatgacgctgctggacgccatgtctaaacaggtgctgccgaatgggatgaatattgaatggacggatctcagcttccagcaggccactcagggcaacacggcgctgatcgtcttcccggtggcggtgctgctggcgttcctcgtgctggcagcgctgtatgaaagctggaccctgccgctggcggtgatccttatcgtgccgatgacgatgctctccgcgctatttggcgtctggctgaccgggggcgataacaacgtcttcgtgcaggtggggctggtggtcctgatgggcctggcctgtaaaaacgccattctgatcgtcgagtttgcccgtgagctggagatgcagggcaaaggcatcatggaggccgcgctggaggcgtgccgcctgcgtctgcgcccgattgtgatgacctccatcgcctttatcgccgggaccattccgctgatccttggccacggcgcgggggcggaagtccgcggcgtcaccgggatcacggtgttctccgggatgctgggggtgacgctgttcggtctgttcctgacaccggtgttttacgtgacgctacggaaactggtcacccgcagtaagccggtccaggaggatctgcccgcctag

SEQ ID NO: 222659 - DNA, 480 bp, Klebsiella pneumoniae
atgttagattaccgcttcccgacagctttgcagatggttctcagcgtagcaatggcggagcagatgggtgaacgttcaacgagtgcgattctggcctacggcctggaagccaacccgagctttatccgcaaattaatggttccgctcacccgtgacggcatcattgtctccacgcttggccgcaacggctctattcatcttggccgcccggcggacaaaatcactctgcgtgatatctacctttccgttatcgaagataaaaaactgtgggcgtcgcgtcctgaggtcccggcccgctgcgtggtcagcgccaacgcctgctggtacttcaaatcggtcgctgacgaagcggagcaggcttcgctgaacgttctcgctcgccataccgtggccagcgcgctggaggcgctcaaaaacgccgataccagcggctgcgacccggtaccggaaatgatcgcccgctttaaaaaagcgcattaa

SEQ ID NO: 222660 - DNA, 393 bp, Klebsiella pneumoniae
atgtttgatcagcatattatctgccgcgaaggtttcagtaacgtcacccgcgacggagaagttatcggcgtgcgctttttggcccgtctgccttactaccgcggtctgggtctgtcgatggtggaagatatcgccgtgaccctcaacggcgaagccatcccgcggcaggcgatccgcctggcgctgcgcggccgggagtggacgctcgacgagctggagagcgtctacgacgaccggtggaacttcggtgaaaaggcgatcatcacggtgctcaaacccggtggcctgccggccggctggcatcgcctgaaggtggccgagaggctgcggatctcctatctgccgtttgtgccggtgaccacctttgaaaccgagctggaattaacggcataa

SEQ ID NO: 222661 - DNA, 1014 bp, Klebsiella pneumoniae
atgactcagaaaataaaacgcggcgtcagtctgtacagttttcagaatgagacctatctcggcaagatgtccctcgatcaggcgatcggtcactgcgcggcgttcggcgcccgcgggattgaagtcgtcggcgaacagaccttcgccggctggccggagtgcggcatgccggaggcggcgatcgccgactggcaccgtctgatgcagcgccatgacacggtgccggtgtgccatgactttatgctcgactataagcgttataaagaccggccgatgccgtttgacgagcaggtgcgcagcgtgcaaaacgacatcgattttgccgcccggctgggcatgcgctttatccgctctctggtttccgtggcgccggaggtgctggtggcggcggcgccgtatgcggaagacaaagggatcaccattctgctcgaagtgcacgccccgctgcatttcgatcatccgtggattattcgtcatgccgaagcctatgaaaaagccaatacccgggcgctgggcttcctgccggatatgggaatgtttttagcccgcttcccgcgggtgtggaaagagcgctttattcgtaacggttgcccacaggcggcagcggattttatcgagaaagcctatgaggagcggacgctcagcgaatacgtgatcctggatgtgatgcaaaaatggggaccgggcccgcagctggcgatggcggaaacgttgcgccacaacgcggcgttcgagccgaagcggatgctcgattttatgccgcggatccacaacattcatgccaaattctatgagatgaccgatgagataagcgagtggtcgattccctacgatgagatcttccgcgtgctgcagaagggcggctatgaggggtatgtgtgctccgagtatgaaggcaaccgctgggtggaagacgcgcaggaggtggacagcctggagcaggtccgccgccagcagctgatgttctgtcgcctgttagatgaaaccccacccccggcgctgctgggccagtaa

SEQ ID NO: 222662 - DNA, 774 bp, Klebsiella pneumoniae
atgtatttgtccgcatgtattgaatggctgtttcgtgaagagtatcccgatttcagcgatcgggtccgggcagcgaaagcgcagggattcagccatgttgagtttcatctctggcgtgataaaccgctggcggcgctggcgcaggcgctggaggagaccggcgtgacgctgtcgagcttcgtggtggagccccggcgcagcctggtggatccggcggagcatgagcagtttctggcggcagtgagcgacagcctggcggtctcgcgccagctggggtcgccgccgctggtggtggcctccggcttcagccgcgaaggggtggctatcgccgaacagcaggcgcaggcgatccacatcctgcgccaggcggcgacgctggcggaagccgccggggtcactctgctgctggagccgctcaacacccgcatcgatcatccggggatgttcttaaacaatactcggctggcgctggacattatcgaggcggtcgacagcccgcggctgcagctactgtttgacgtctatcactcgatggtgatggaagaggagatggaggaggtgctcggcggcagaatgcatcgggtggggcacgtgcagatagcgcaggcgccggatcgtaacgaaccggatccgcgcagcggcgagtggcccaatgtgatcgcccggctgcaacgcctgggctacaacggggccattggcctggagtataaaccgtcgctgcccgcagcggcctcggtggcccgcgcccgcgaagcgaccggcttatcctgttaa

SEQ ID NO: 222663 - DNA, 1458 bp, Klebsiella pneumoniae
atgctcaataacgcttcggcggccacggttcaggcgcctccctataccagcgagcggcagcgcacgctggccactctggtggtttcgatagcgctggtgctggagatcatcgacgtctcgatcattaatgtcgccatcccggtggtacagcgggatctgctcgccagcccgcggcaaattgaatgggtggtcaccggctacctgttctttttctccattctgctgctcaccggcggtcggctcggcgatctgtatggctaccggcggctgtttatcagcggcctgctggcgtttggcgctgcgtcggccggctgcgggctggccgccagcccggagatgctggtggcgatgcgtattgcgcagggggccagcggggcgatgatgggcccgcaaattctctccctgatgcaggtgctgtatcgcccgcacgagcgtttccgggtgatgagtattttcggcctgctcggcggcgccgccgggatcctcggcccggtgctcggcgggatcatcatcgaaagcaatctgttcggcctcagctggcggccgatctttttgatcaacgtgccggtgatcgttatcgccgtcgctctcgcctggcgggcgctgccggcggtgcgcagcccggaggccaaaggtatcgatccgctgggaaccctgctggcggtggtgggcggcggcgcgctgctgctcaccttgatcgaaggccccgccctgcgctggccgctatggatggcgctgccgccgctgctgtcgctcatcacggtgtcactcctctggcgtcatctgctgggccgtgaacgccggggcggcacactgctgttgccccccgcggtgctgcgcgaccgcttctttcgcgccgggatcgtcatcaccctgctctatcagctgaccaccgcctcgctgctgctggccaccgcgctggtgctgcagagcggactgggcttcagcccgttccataccgccctgctgcacctccccttcgcccttggggcgatgttttccatcgccgtcgccggccgccggctatcgcctcgtcttgggcgtaacgtgacgctggtcggggtggccgtgcagatgagcggcctgctgctgatgggctacgggatcgccacggcgccggggacgctggcgctgaccgcgctgggtctaggcttcggcctgtgcggctgtgggatggggcttatctccgccccgctgccggcctttgccatggcggcgatcccggtggcccacgccggcgcggcgtcgggattatttcgcaccggccagcagtttggcgccgccctcggcatggcgaccctcggcggattctatctggcgcaaagcgcctccgcgccggatgcctggcgcggggcctttatcaccctgctgacccttggcgccctgatcctgctggcgattgccgccctcagccgcctgctgcccgcctcagtgcttcccccggcgggtaagccatga

SEQ ID NO: 222664 - DNA, 1500 bp, Klebsiella pneumoniae
atggatgaaaacatcgatgtactgattattggcagcggcccggtgggcgccactttcgcgcgacggattgccgatcgccgcgccgcgcggatcctggtggtggaagccggcgaagcgctgacgtccgcgaccggggttaatatccgcaacctggcgccagcgcagcgggaaacggcctacgaccgcgcccgggcgtttccgctggccgccctgccggagaacctgccggcagacgccctgcaggcacggcccggcacccaccttctcgacccggcggcgccccacagcggcatgccggccgccgcgctctccactaacctcggcggcatgggcgtccactggacctgcgcctgtccgcgaccgggcggcagcgaagtcattcccttcctcgatccacgggagatggccgacgcctgggagtcggctgagcattatctgcaggtgacccgcgaaggatttccggccaccgccatcggccggcaaatcgtcgatgcccttaatcagcactttgccagcgaccgtccgccggcgcggctggcgcagcctatgccgctggcctgcgccgcgacgccggagggcaagccgcgctggtccggcgtcgacgcggtgcttggcgagctggcggaggaagagacccgccgccagcgcggggtggagatccgtaccgccaccctgtgcacccggatcctcagtgaggacggcgtcgcctgcggggcggagctgcgcgatctgcgtaccggcaagcagtacgtagtgacggccaaagcggtagtggtcgccgccgatgcgctgcgtaccccgcagctgctgtacgcctcgggcatccgcccgcgggcgctggggcgctggctcaacgaccagccgcaggtgatcgccctgattgaagtggacgccccgccggccgccgccgcgccgacctccccgctgcgcgacggacgggacaatgtctccggcgtcacctggctgccgttccatgagcctgatttcccgttccacggtcagctgatgcagatggatacttcgccgatcgcctttacccagccgccggggactccgacgaagccggtggtgggcctggggctgtttctcgccaaggagctgcgcgaggaggatcgaatcgtcttcagtgatgacaccgacgccgtagggctgccgaaaatgcagcttaactatcagttaaccgacggcgatcgccggcgtttacagcaggcggtggcggtgaccgaacgcgtcggcgccacgctgggccgcgtcgcgcctggcggtgaggccattatcctgccggcgggcacctcgctgcattaccagggaacttgtcgcctgggagaagcgaacgacggcaccagcgtggccgaccgccgctcgcgggtgtggggttttcacaatctgtacgtcggcggcaacggcgtgatccccaccccaaccgcctgcaacccgacgctgaccagcgtcgcgctggcgatcctcgccgctgacgatatcgtggcgcgcctgctgtag

SEQ ID NO: 222665 - DNA, 1248 bp, Klebsiella pneumoniae
gtgagccatagcctgaatccgccccacgcgccacaagccggcgcgatccagggcatcatcatcgccctgaccgcctttctgcccatcctggcgatcgtttccctggcgccggcggtcccgacgctgatccagcactttgccggggtgccttatgtcgaaaccctggtgccgctgatgctgaccgcgcccggactggtgatcgccatcgccgggccgtgcaccggctggctggcggataaatttggccgccgtaaactgctgctcagcgccacgctgttgtatggcatctgcggcactatgccgctgtacatcacctccctgaccggcatcttttgcagccgcctcggcgtcgggctggcggaggcggtggtgttgaccatcgctaacaccatgctgatcgattactttgacgacaaacagcgccgcttctggctgacggtgcagggagtgattggcccggcgctggcggtgctggtgctggccagctccggctatctgaccgccctgcgctggaacggcgcctttatgatctactttgtcgccatcctgctgttcctggcgatgtacttctggatgttcgaaccggctcaggcggcccgtccgcagcacgccgcccaggcggcgcagcataatccgtttccgtggccgcgagtgatcgccctcagcgtgctgacctttgtctgcgccatcatttattacgtgtacaccatcaatggcgccaacgcctttcataccttgcaaaacgccagcccgcagcgtattggcctgattatgtcgctggtcagcctcgccgtgccggtcggttcgctgctgttcggtctggtctcccgccgctatacgccggagcgcgtgctcgccatcatgctctgcctgatggggatcgggatgctggtggtgggtgaatcacggacggcgatcgccatggggatcggctccgccatccagcagctgggtgccggcatggcgattaatgcgatgatttactgggtaggatcgttgattccgcccgcctactgcggccgggcgatgggcgcctggtccggggccttcttcgcgggcatgttcgttagcccgattatcgtcggcgcgatccgcctgcgggccgggaacgatgtgctgagcgccttcctgacgctcggcatcgcggcgctggtgctggccgccgcgatatttctttatactttctcccgccatagccagcgcctgcgtcagcacaagcaggccagcgcctggcagttagcgaagtaa

SEQ ID NO: 222666 - DNA, 645 bp, Klebsiella pneumoniae
atgaccgatcttcccgcgatgcgccagccgaaacaggaccggagccgggtggcgctggagcggctgatggccgccagccgtgaaatcctgcatgaaggcacctttgagctgctgaccattgctgaaatcagtaaacgctcgggcgtttctgtcggctcgatctatgcccgcttcggcggcaaagaagatctgtttatcgccgtcatgatggaggtgatgcaggagctggacgccgaatggcagcagctgatccagcagctgcacgcgcgcaatctgccgctgcgccagcggcttccggcgctgatggatgtccaggcggagtatctgcgtcgccatgccgggatcctgcggccgtttatggcgcgggcggatgatgagcgcgtggcgggaattggtaaagccgcttaccagaaaaatgagcagaccttcatcgaccagctgctcgacgccgcggcggagatccgccacccggagccagagcaggccgcccgcttctgctttacggtttcgtatgccgcgctggcgcgcttcctcggcctgggatcggcggcggaagccgccggtgagggcgactgggaacagctcaaacgccatctgggcatgatgtgtctgagctatctggttacccccgtcgaggccggctaa

SEQ ID NO: 222667 - DNA, 1095 bp, Klebsiella pneumoniae
atgcgtttctctgttttcctcgtcggccgttccaccgcccccgagcaggatcgttttgtcatgcagtcgctgatcgatcatgcgcgccaggccgaagatcgcggcttcgatgcggtctttatgccagaccatcacttcaccggctatgcgccgatgtccagcgatccgtttgtcttcgccgcttacctggccggccagctgaaaaagatccacttcggcatgtcggtgaccaccgtcccgctgcaccacccggtgcgcttcgccgagcgcgttaacctgctggatcaactcaccgaaggccgcctgctggtgggcatcggcagcggcaccacgccggaagagatgatcggctttggcgtgaactacaaggacgcctccagcctgctgcaggagaacctcgatctggtccagcggctgtgggagaaaaatattgaagacgatccgatcattttcgaaaccggccactataagggcgcggtagtccagcgcatcgttcctgccccctggcaaaaacccttcaaccgcattatgccggtggcgctgcgtgaaaccagcatgcagcgcgccgccgataacggctggccggcctttattcccgcgtttactccgccgatcccggccagcaacgatccgtttggccagctgacccactatttcacccgctaccgcgatgccctgcttaactccggccatagcgacgaggtggtgaaccactgcctctcgtggaccacccacacctggcagtgcgtccatatcgcccccaccgacgagcaggcccgcgaggagatgctgcagatcatgggctggtaccagcaggccatcgaccgggaatatgagtacaacaagcgggcggaagagttcagcggcgttacgctgcaccgccatccggactgtttcagcgaagagtggatcaaaacctggtgcctgtacggcagcccggagaccgtcgccgaggagctggaacgccatcagcagctgggcatcggcaacgtgctgctcggcttcaccaacggcccgctgaccgaggaacgcctgcgcctgagccagcagtcgatctcgttgtttgcggaccagatcctgccgcgctttcgctaa

SEQ ID NO: 222668 - DNA, 624 bp, Klebsiella pneumoniae
atgaataaacctgctttctcacgcccgccgctgctgatcggcatcggcggcaccacccgcccgggctccagcaccgagcgcgccctcgccgccgcgctggcccacgcccgcacgctcggcgcgcagacccagctgttcggcggcgctgaactggcggccctgccgccgtttaacccggaagtcaccacccgcacgccgcaggaaacggcgtttgtcgacgccgtgcgccaggccgacggcattctgctggcctcgccgggctaccacggcggggtgtctggcctggtgaagaacgccatcgacctgctggaagatttgcgcggcgacagccgggtctatcttgatggccgggcggtgggctgcatcgtcaccgccgccggctggcagggttgcaacaccaccctcggcgccatgcgcgggatcgttcacgccctgcgcggctggccgaccccgctgggggtcactctcaacaccgctggcgtgtcgctgttcgacagtgagggccgctgcactgacgacacggtccagcgcgcgctggccaccgtagccgaacaggcgctggccttcgcccccgccgcccccttacggagacaagccgatgcctgcgctcagtctgtcgcttag

SEQ ID NO: 222669 - DNA, 2445 bp, Klebsiella pneumoniae
atgcctgcgctcagtctgtcgcttagcgttgccgaaaaggcgcggctcaccgccgggatggggatgtggtccacccaccctatcccccactccacgctgggttcagtcaccctgtccgatggcccgatggggatcaccggcggccgggtggacgagcgagatattgccctgctcagcccctgcggactggcgcttggcgccagctgggaccgccagctggtcagccgggttggcggcgtcatcggcgaggaggcgctgcgcaccggaacgcaggcgctgctggcgcctaacctgaacctgttgcgcagcccccttgccggccgcgcgtttgagcttttcggcgaagacccacggcatatcgccgagctgggcgcggcgtggatcgacggcgtccagcgccagggggtgggctgcatcgtcaaacatatggtttgtaacgattcagaaaccgatcggcggaccatgaacgtcgtcgtcgatgaagccaccctgcgcgaagtctatttctggccgttcgaagtggcggccagccgcggcgtctggggcatgctgaccgcctataaccgggtgaacgggatctattgcgccgagcagcatcaggccatcagccagtggctgaagcgcgatctcggctgggacgggctggtgatgtccgactggttcggcacccagaacggcccggccagcttccgcgccgggctggatctggagatgccgggcccggcccgccatatgggcgagcgcctgctgcccgcgctgatggataccgacagcgacgcccggcgtcttgacgatgccgccgcccggctggcgcggctggccgaacgggtcagccatcctctgccctgggatggctctgccgccgcccaggcgcagcggcgtcacaccctcgaagaggcggcggcggcgggctttgtcctgctgcacaatcgccagcggctgctgcccctcgcggcgcaggcgggacagcggctggcggtgattggccccaacgccacgacgccctgcttccagggcgggacctttgccagagtggcgctgatgccgggactgatctctcctctggaggccattcgccagcgcttttccgccgctggggtcgaaataagctatgcccagggggtggagagcgattaccgcatcccacctctgcatcatttgccgctgcgcaccgccgccggcgagcgcggcctggacgttgcctacgccaccgctgacgggggcgtggttcatcaggaggtgcgcgacgcctcctcgctgatctggttccgcgatatgccgggcgtcggcgacatgctgcgcctgaccgaacgcgccaccgtgacggtaagctgccagttcaccgcgccggtgagcggccgctacggcttctggatcggcggcaccggggagatcgccctgcagctgaacggcgagcgcatggcgacctttaacggcgaggcgctggagggggatatcatgggcaagctgatgcaagccccgcatacccgtctcgacttcccgctgcaggcgggggaaaccctgaccttccgggccgagatggcgctgggcagcagtatcgcccacggcatctggttcggctgccagcccccgcaaaccatcgacctgctgcagcaggcggtcgaccatgcccgggcggccgacagcgtggtgctggtgataggcgaaacggccgatgccggtctggagagcatcgaccgggacgctaccgcgctgccggcgcatcaggttgccctgatccgcgccgtctgcgcggcgaacccgcggacggtggtggtactgaatgtcgcccatccggtggataccgggtgtctggctgacgcggcggcggtgatggtcgtctggtatcctggccaggagtttggcccggcgctggcctcggtgctggccggggatcgtgagcctggcggtcgcctgccggtcaccttcgcccagcgcctggacgactatccggtacgcagtctgacgccggacgccgcgggggatctctggtatcacgagcgccagcaggtaggctatcgctggtttaacgcccgcgaacgccccgccgcctgggccttcggccacggtctggggtatgctgatatcaccctgatcgccgctgcactgacaggcgacgaggtggacgctctgcagctgcgctgccggttggaaaaccgcgccgcccgcgccgggaaagcagtggtccagctctacctgcgggggccggagacggcctggtcggcgctggcggagtttgcggcagtcagcgtcccggcgcacgacgaggccgccctgacccttgtcctgccgcgtcacgcgctgcagcgctggcaggtgcctgcccaggaatggcgcctggccagcggcccctggcagctggcggtgggtttcgccagcgacgatatccgggcaacctttgacttcgtgctcactcccgacgggaaaatcagccaccggggctaa

SEQ ID NO: 222670 - DNA, 1311 bp, Klebsiella pneumoniae
atgagtctctgctgtaccgacgtaagtaagaaaatagtgtttccactttcggcgctgacgctggcgatattctccagcaccgcgctggccgatacctggacctgtgagcaactggataaactgaatacccgctccgcgcaggtcgtcagccctccgtcgacctgcgaatcgctcatcggcgatattggcggctttcgcagcgcgctggccgaccgcgggtggggcgtccagttaagctggaacccgatggtgatgtacgatctgaaaggccagtccgccgacccgcaacaatatgccgggcagaattttacctggtcacaaaatatgtcgctgaacgtcacctatgatttaagtcgaattggttttagcaaagacgcgcaatttacattctctccccagtgggcgacctcgaattatcatgacagctatccggaactgcataatattgcggtgctggcggtgaaccagcccttattaaacggccagctggagctgcagtatggtttttatccgttaattcgtcagttttacggcatggtgctggggggcaactcctcctcagccgcgctggggccgaccagcgtgataccggtgcaggtggggatcagcctcaatgcgccgacgccgaccttcaccgccatcgtccgcgacagcgataagaaattctataacaactttgccgtcagccgcagtatgtcgcctgccggacacctcgacgacgtggagcagaacccctcggggctgaaatggcacgtcgatggcgccaacccgatcctggtaaacgagtttggctttaagcaggcggcgggcgagtcgcagcgctcgctgtggttccgcgccggggctatctataacacctcgcactaccagtattttgaccagcccggcgacagcagcagtaactatgcgttctacgtcgccaacaccatgcagctgacccagccgaaaaaggggcttccgctggggctgtatctcgatgtgaaagcggactatgctccggacgatcgcaatgcttacaccagcgacttccaggtgaccttctttgacatcggcctgtttcccggccgagagcaggatatgacctcgctgggctacacccgctcctttatcagtaagaagttccgcgattatgtcggcgaggcgggaatggaggcgccgcagagcatcaacgccatctccctgtcgcacgccctgcgcgtgacgaaaggtatttactggatcaacggtatcacctggcaggataacccgacgctggtgccgaagcatgagtcggcggtcctctggcagtcctcgatgtactggaacttctga

SEQ ID NO: 222671 - DNA, 1209 bp, Klebsiella pneumoniae
atggtgatgcacaaagtttcagcaaccccgcgcgaggcgggggccgtacaggcgatgttactgatgttggcggcactgttgccgatcatggggaccttgaccatgctgccggtgatgccgctcctgttcagtcattttgccgcgcagccgcacgcccagctgctggtgccgatgatcatcaccataccggcggcgagcatggcgctgctggctccgctggcggggatggtaggcgatcgcctgagccgtcgccgcctgctgattgctgccaccgctctgtacgcagggtttggcctgctgccggtgatgctcgacgatctgtatgccattttgctggcgcggctggtgatgggtattgccgacgcctttattcttaccaccgccaatgcgctgattggcgactactttaccggtgaggcgcgcagcaaatggctggcggtgcagagcggcatagggtcgatactgtcgacgctgatcgtgctgggggctggcctgctgggaaccctgggctggtatggtccgatctacctgtatgctctggcgatcccggtctttatcggcctgtgtctgttcaccgcagagccagcgacgcgccgtcgcgcggacagtgtcgctggcgaggaggctgtcgcttttccacggcgcaaaatggcggcgatcggcctgattaccctcgccagcgcgatcctctattttctcgaaccgctgcagataagccaggtgttcagtcagctcgggctgacctccagcagccagattggcatcgctaccgccgttgccggcattggcgtgccgctgggcgcctggctgtatggccgcaacgccaggcagcgtgtcgacaggcagtttttccttttttacgccatttttggcctcggtctgctgtttatcgccgtggcccacaatccgctggccggcgtggcggcagcgttcgtcgcgcaggttggtaacggaatgctgatccctctgatgctggcatggatgatgaaagccctgccggcgccgcaccgggcgacggggatcggcatctggcacaccttctttttcctcggcatgttcatcagcccggttctgatgaccttgctgaacggcatgaccggcagcatgcaggacagcctgctgctgtttgcgctgctgacgctggctatcgccggcgcgacgggtatcgccagcgcccggatggggggccgccgcgcgctggctcgttaa

SEQ ID NO: 222672 - DNA, 792 bp, Klebsiella pneumoniae
atgatcaatcttttacaggggcgtcggctggtcgacctctccgtcaccctggacaacaatccctggaccgatccgccgccgctgctgccgagcattgagtatcaggatcatcagcagggatggccggaaatggcggcgatgttcccggggctggaaaaagcgcagatgccgggagaggaggcctgggcctcggagcgcctgaccgtgacgccgcacaatggcacccatatggatgccccctggcactacagctcgaccaccaacggcggcgaaccggcgtttggcatcgatgagctgccgctggagtggtgcctgcgccccggcgtccggttggattttcgccatgtcgccgacggggcgatcctgcagccggaggatctgcagcgcgagctggcgcgaatagactattgcctgtcgccgctggatattgtgttgatcaataccgcggccggcgcccgctacggccagccggattacctgcagcgcggctgcggcattggccgggcggcgacgctgtggctgctggagcagggggtacgggtggttggcaccgacgcctggagctgggatgcacccttccactttacccgcgaacgctttcaggccagcggcgacgccgggctgatctgggaggggcataaagccggcagggagatcgcctatgggcaaatggagaagctgagtaacctggagcagcttcccgaccacggcttctgggtgagctgttttccctacaagatccgccgcggctcggccgggtttattcgcgcggtggcgattgtcgacgcctga

SEQ ID NO: 222673 - DNA, 984 bp, Klebsiella pneumoniae
atgaaactggcaacacgagataacggtgaacgcgacggctgcctggtggtggtctcaggcgatttgacgctgatggccgatgcggcggacatcgctccgacgcttcagcaggcgctggagcaggccgcgcgggtgtggcctgcgctgcaggcgcgctatcaggcgctcaatgcgcgccgctatccggcggcgcagccctatgatccccggcgcctgatggcgccgctgccccgggcgtggcagtggctggacggttcggccttcctgagccatggcgagcgcatgcagcgggcctttcacctgccgccgattgccggcgccgaccagacgccgctgatgtatcagggcagcggggacgactttcttgccccccacgccgggatagtctgccgccgggtcgaggatggcctcgactttgagggcgagttcgcggtagtcgtcgacgaggtgccgcagggctgctcgccgcaacaggcgctgagctgtatccgcctgatcgtcttgcttaacgatatcagtctgcgggcgctggcgccgcgcgagatgcagaccgggtttggttttattcacgccaaacccgcctcggcctttgcaccggtggcccttaccccggatgaactgggacaggcctggcagcacgggcgggcggcgctgacgctgcaggtgacccgcaatggcaagccgtttggctgccagtcgggtagcgagatgcatttccattttggcgaactgattgcccatgcggcgcagacccgccgcctgcgcgccgggacggtggtgggttccggtacggtgtccgggccggacgccagccgcggcgccagctgtatcgccgaggtgcgggccatagagatgctggccttcggcgagccgcgcacgccatttttgtccccgggggagcgggtgacgatggaagcccacgcccctgatggccggccgctgtttggcgtgctggatcaacacgttgtgatgttaacggagtaa

SEQ ID NO: 222674 - DNA, 360 bp, Klebsiella pneumoniae
atggttcgcctgtgccgtgccgacagcctggctgagggccaggcgcggggatttgaccccacgggcagcgggcaggcgacggtgattgcctgccgctatcagggaacgctctatctgtggcgcaaccgctgtccgcatctcgataccccgatgaactggcggcaggacgcttttctcaacgcccggggcgaccggctggtctgcttcgcccacggggcgatttttatgccggacagcggcctctgcgtgcagggcgcctgcgctggccaacgtctgagtccgctggctggcgacgtggacgtcgacggctggctatgtctgctggaggaggcaggtcatgaaactggcaacacgagataa

SEQ ID NO: 222675 - DNA, 921 bp, Klebsiella pneumoniae
atgaatattcttggtccggattatctggtatttggcgtcgatgacctggcgggctgtcgacagtttcttatcgactacggtttacgcgagcaggagaacggtttctttagcgcgctggatggcaccggggtgttgctgcggggacgtgacgatccgtcgctgcccgcggcgctgcccagcggcagccagctgcgggaaaccgtctatggcgtggcggatagcgccacgcttgaggctattgccgagacgctgcgccgcgatcgcgaggtgaaacttggcgccgacggcgtgctgcgctgcgtcgatgatgccggctttgccctcgggtttcgcgtcagccagcgccagccgctgcagcgggaaggtgagaaaatcaacgctccgggggatcgcgccgggcggccggtcaatcagaccggggccagcgccgacatggcggcggagccgcgttcgctctcccatgtggtctattttgtgccggacgccgcgcgcgcggaagctttttatcaacggctgggctttgtctgtaccgatcgcttcacccacgtcggccccttcctgcgacccgccggcacccaggatcaccataccctgtttctgatccaggccccgccgtttatgaccggcattgaacactttaccttccacctcggcgggcccaccgagttgatgatggccggcagccgctttcagcagaaggggtatcagaccttctggggaccggggcgccatcagctgggatcgaactggttctggtacttcaacagcccgctcgggtgtcatatcgaatacgacgccgatatggatcagcacgatgaccactggcagccgcgcgaagcgctgccgggggccgataactcgcaatatttcctgctggggtatcgcgagaagtgggctcccggtccggataacgcccgctga

SEQ ID NO: 222676 - DNA, 1158 bp, Klebsiella pneumoniae
atgtttcgctatttccctaaaaactatgtctggaacctgtcggtggatctctccatcgagatgggcgcccgcatcggtgagatcgaagagatgtgcgcgccgctattggccgcgtccgagcatcccgacgccgaaggcacccgcgcattccgggaaacctggtcccgcatggccgataaattatgcgcgctggcgggcgaagatgaagcgcggggacggcggttgtcggcaggcgagaagtatcttcgggcggccaactattacctgacctgcgagcgcctgcaggcgcatggcgcgccggaccgcgaggcgctgtaccgccgctttctcgatgtctttgccgccgggctgcaccatacccatgctaactgtcagcgggtgactatcccctacgagggcaaaaccctgtcggcgctttatgtccgcgccgaagggatgaccggccgcgcgccgctgctggtgcaggtcaacggtctcgactccaccaaagagatgaaatatctggttgggctaccgcagtggctggcgcggcgcggcgtctcctcgctggtggtcgaccagccgggaaccggcgaagcgctacgtcttcacgacatgcaggcccgctatgacagcgagcactgggccagccgcatcgttgactggctggaacagcacccggaggtggatgccgggcgcatcggcatggaaggggtctcgctgggcggctattactgcccgcgggcggtggcgtttgagccgcgcttcgcttgcggcgtggtatggggcgccaatcacgactggcgagaggtgcagcagcgccgccgcgaacgcgaaggggattttccggtaccgcactactggcagcacgtgcgctgggtgtggggcggcgaggatatcgacgcttttatgcgcatcgcggagaacgtccatctcgacggcattcttgaccgtatacgggtgccttttctcgtcacccatggtgaaaaggactcgcagatcccggtgaaatgggcgcagcgcacctacgaccagctggtgaacagcccgcgccgcgagctgaaaattttcactgaccgcgagggcggtgtgcagcactccagcttcgacaactcaattaacgccgggcactacatcgctgactgggtggcggaagccctcggcggccgggtggcctga

SEQ ID NO: 222677 - DNA, 900 bp, Klebsiella pneumoniae
atgcgttaccaacatcttgatctgaacttactggtggcactggatgtgttacttgacgaacagaacatcacccgcgccgcgggccggttgcatatgacccagtctgccaccagcggggtgctcaaccggctacgcacctactttgaggacgatctgctcacccaggtgggcagaaagatgcggcccacgccgctggcggaagagctgcgggagccggtccgcgacgtgctgatgaaaattcagacctccattgcccgccggccggtggatgagccggcaaccagcaagcgccatttccgcattatggcctcggattacgtgatcaacgtgatgctgaaggatgcgctgcaaacggtgcacctgcatgcgccgaatatgacctttgagtttttctcgccggacgcccagtccaccggcatgctcaaccgcggcgagctggatatcatcgtggcgccggagcgttttatggccgccgaccatcccgccgaagcgctgtttgacgaagagtttgtctgcctggcctgggcggacaatccccacaccggcgaggcgctgaccctcgatgcctggcaacagctggggcacgtgtcggtggtctttggccgcgagcggcagccggggctggagggcaatctgtttgccgagtcggggctcagccgccgtatcgaggtggtgacccacagctaccactgcgttccgcagctgctgatcggcacctcgcggatcgccacgctgcaccggcggctggcggagcagtacgcggcgatgctgccgctgcgtcttttcccggtcccggtgacgctgccggtgatgcgcgaatttatcggctggcaccgctcgctggataacgatcctatcttcggctggctgaaagcgaaaatcgtcgccagcgcacgctaa

SEQ ID NO: 222678 - DNA, 1122 bp, Klebsiella pneumoniae
atgaacatcaataacgtattaatcgttggcggcggcatcggcggtctgtgtaccgccatcgccctccgccaggccggcgtcgccgtcgatgtcgtagagatccaaccgcagtggcgggtctacggcgtcggtatcattcagcagaacaatgtcgtgcgggaaatgcagcggcttggggtgctggaacgctatctggacgccgcctggccgtttgacagcgtctcggtgcacaccctgagcggccagcagctagccagctttcccggccagcggctggccggtgaacagttcccggccaacgtcggcatctcccgcctggccctgcacaacgtactctgttccaccgcccgggagctgggggtccgactgaccaccggcgagagcattgacgccttccgtcaggttgacgatgcggttgaggtgagcttcagccgtggcggtcaggggcgctacgatctgctggtgggcgccgatgggatctactcccgggtgcgcggcatgctgtacggcgagcgctatcgcccccgctttaccggtcagggcgtatggcgctacaactttccgcgaccgccggaggtggaccatctgatgtgctttatgggcgagagctgcaactgcgggctggtgccgctgggggacgatctaatgtatctgtttatcacctcccacgaagcggataacccccgctacgcccgcgatcagctggcggcggagatgcgccgccgtctgccgcccggcgcggggttgccgggcagcctgcacgcgcatatcgttaacaacgacgaggtcgtctataagccgctggaagagctgttcgtcgacgatccctggtatcagggacgcatcgtgctggtgggcgacgcggttcacgctaccactccgcatctcggtcagggggcgggcatggcgattgaggatgccatcgtgctgcgcgaagcgctgcagcagaccgacagcgtcgcggccgcgctggcgcaatttgacgcccgccgccggccgcgctgtcagcagatctgggccgcctcgctgcaggtgggcgagagcgagatccaccgcgatcgccattttgaccgccagcaggcgatcggcgatatgatgaccctgacggcgaagccgatataa

SEQ ID NO: 222679 - DNA, 912 bp, Klebsiella pneumoniae
atgcataatgacgccagcctcaatattcgccagctgcaggttttcgaggcggtggcgcgcctggagagctacagccgggcccagcaggagctgggcatttcggtctccgccatcagcaatgcgatgtcgcaactggaggggcagctcggcttcaccctctgtcagcgcgggcgcggcggcttttccttaacggaaaaaggacagcagtttttacagcaggcgatccgcgtgctgagtgaactcaatgagctggagcggcagtcggccctgcttaaaggggagcacagcggcaccctgtgcatctcgacgctcgactccatcgagaccgaaacggcgctctcgctgccggtggttctgcgcagcttcagcgacaaatttccccatgtgcatatcaaactgattattcgcaccccggcggagcaactgaacggggtgctgaacaaccatatcgacctggccatcggcagctacaactcgcaggtgcataacatcatcagcgagccgctgtaccgcgagcagcactggctctactgcagcgatctgcacccgatgttcttcagccgccagctcgataaagagcagatcagccagtgcccgctggtgacccgcagctactggaacaccagcgatctccgccgccggggcttcagcaaaggcagcgccaccgttgagaccgtcgacgcccagctgctgcttatcctctcggggaaatatattggctatctgccggagcattacgcctggccgtggatcaaagagaaccgcctgcgggtgctgctgcccaacgagtttggctttcagtcgccgttctcggccatctgtaagcgcgggcgcagtaatgaaccctatctgaaagcgttccgcgatctgctgaagaagaacacggtggcgcggccgaagtggaattattaa

SEQ ID NO: 222680 - DNA, 951 bp, Klebsiella pneumoniae
atggataacctctttcaccaaccgcagggtggcaatgagatgccacgcttcgccggccgcgccacgatgatgcgcctgccgtttatcgaagatttacagggacttgatgcggcgtttgtcggcattccgctggatatcggcacctcgcagcgctcaggtacgcgctacggaccacgctatattcgcgccgaatcggtgatgatccgtccgtacaatatggcgaccggcgccgcgccgttcgactcgctgtcggtggccgatatcggcgatgtgccgatcaatacctacagtttgctcaaatcggtgcaaattatcgaagattactacaccggtttgaatagttatccgctgatccccctcaccctcggcggggaccataccattaccctgccgatcctgcgggcgctgaccaaaaaacatgggccggtggggctcatccatgtcgacgcccataccgacaccaatgatgagatgttcggtgagaaaatcgcccacggcaccaccttccgccgcgccgttgaggagggactgctcgacctcaaacgggtggtgcagattggccagcgcgcccagggctacgccgccggcgacttccagtggggcgttgaccagggctttcgcctggtgcaggcggagcagtgctggcatatctcgctggcgccgctgatggccgaagtccgccagcagatgggcgacgggccggtgtatctcagttttgatatcgacagcctcgatcccatctgggctccgggaaccggcacgccggaagtcggcggtctgacctccattcaggcgctggagatcgtccgcggctgccgcggcctgaacctgatcggcgccgatctggtggaggtctcgcccccctacgacgtgagcggtaatacctcccagctggcggccaacctgctgtacgagatgctctgcgtcctgcccggcgtgaagtacgcctga

SEQ ID NO: 222681 - DNA, 1077 bp, Klebsiella pneumoniae
atgaccgccgtgaagcacgcttttactgaactcccgaccatcgatatccgcgatctggccggcgacgatctcgccaggcgccaggcggtggccgacgccatcggccgcgcggcgcgcgaggtgggctttttctacatcaccggccacggcatcgacccggcgctgatcgccggcgtccgcgaggcggcgaagcagatcttcgccctgccgatggaggagaagatgaactactacatcggccgctccaaaagccataagggctacgtcccggaaggagaagagatctacggcgctggcaagccggaccataaagaggcgttcgatatcggcttccaggcggcggatgaccatccgctggtgctcgccggtacgccgctgatcggcgccaacgagtggcccgatctgccggatttccgcgcgcgggtgctggcctactacgatgcggtcttcgccctcggccaccgcctgttcgacgctttcgccctcgcgctcggcctgccggaagggtatttcaaaccgatggtgtcctgcccgccggctaagctgcggctaatccattacccgttcgacgccagcgtcgaagatgttcccggaattggtgcacacaccgactatgagtgcttcaccctgctgctcgccgaccagcccggccttgaagtcctcaatgaagaaagcgtgtggatcgatgcacctcccgtcaagaacgccgccggagaagaggcgttcgtgatcaatatcggcgacatgctggaagtgctcagcgctggcacatttgttgctacagcccaccgggtgcgcaaagtgccgcaggagcggtactccttcccgctgtttttcgcctgcgattaccacacgctgatccgtccgctgccgacttttctcgccgccggcgaagccagcgaatatcaggagctgagcatcggagagcatatgtggagccaggccctgcaaacctatcgctacctgcgcgaaaaggtcaatcgcggtgaacttcagctaccggagcgcgcgcgcggcaccaatacgtttggccatttgaaaaaacaggctcagcaaaaaacccctaaccacccgtga

SEQ ID NO: 222682 - DNA, 804 bp, Klebsiella pneumoniae
atgactagcaccctgaaaaaaatctcgcgccgcgtcgcgcttaccctcgccgtcagcgcctgtttttcccctgtcacccaggcggcggaactgctgaccgagggcgtctttaaggtggggatggaggtcacctacccgccgtttgagtcctatgacagcaataacaacatcgtcggtctcgacccggatttcgccgcgctgatcgcccaacacctgcaggccaaaccgcagctgatcgacaccaagttcaccagcctgatcctcggcatcggcaagaaatatgatgcggtgatctccgggatgtacgtgacgccggaacgccagaaacaggccgacgccatcccttacgccctctccggcgcgtcgatcatcgccctgaagggcggcgcggtgcagccgaaaaccgaagatgagctgtgcggcgtgaaggtcggcctgcaggcaggcaccacctgggtgaccagcctgaaaaaacactccgatgagtggtgcctgaaaaacggcaaaccggccatcaccattcaggagttcccgacggcgccggaagcctcccaggcgctgctgtcgaagaatatcgacgcccagctcgagatcgccccggcggcgcagattatcgtcgataagagccgcggtcgcctggcgataagctcgacgcgcctggtctacccgctgccgctggggatctacgtcgccaaaggcaacacggagctggcggaggcgattaaggccaccctcgccacgctgaaagccaacggcaaatatgccgcgctgatcaaaaaatacaacttagaaagcatcgattaa

SEQ ID NO: 222683 - DNA, 1521 bp, Klebsiella pneumoniae
atgcgttatgcacaccctggccagcccggcgccctggtttcatttaaatccgcttacggcaactttattgacggtaaatttgtcgagccgctgagcggtgaattctttatgaatacctccccggtagacggcagcaacattgcgcagtttccccggtcggatgccagagacattgacttcgccctcgacgccgcccaccgtgcggcgccggcgtggggcaaaacctcagtgcagcagcgctcccggctgctgctgcaggtcgccgatcgtattgaacagcatctggaatatctggcggtggcggagagctgggacaacgggaaaccgatccgcgaaacgctgaacgccgacctgccgctggcggtggatcattttcgctacttcgccggctgcctgcgcgcccaggaggggagtaccgccgagattgatgaaaccacggtggcttaccatttccatgaaccgctgggggttgtcggtcagattatcccgtggaacttcccgctgctgatggccgcgtggaagctggccccggccctggcggcggggaactgcgtggtgctcaagccggcggaacagacgccgctgagtattactctgctgctggagctgatcggcgatctgttcccggccggggtgctgaacgtggtgcagggtttcggcaaagaggcgggcgaggcgctggccaccagcaaacgtatcgccaagctggcatttactggctccacgccggtcgggcggcatattctcgcctgcgcggcggagaatattatcccctgcaccgtcgagctggggggcaaatcgcccaatatctacttcgccgacgtgatggagggagaagaggagtttattgagaaggcggtggaggggctggtgctcggcttcttcaaccagggtgaggtctgtacctgcccgtcgcgggcgctgatccatgaatccatctatgagccctttatggcgcgggtcatggagaaggtggcgcagatccgccgcggcgatccgttagataccgacaccatgatcggcgcccaggcttcccgccagcagttcgacaagatcctctcctatattcagattgcccgggaagagggcggccaaatcctgaccggcggcgagcgggcggctatcgcgccggcgctggataatggtttttatattcagcccacgctaattaaaggccgcaacgatatgcgctccttccaggaggagatctttgggccggtgatcggggtgaccacctttaaggacgaagcggaagcgctggctatcgccaatgagacccagtttggcctcggcgctggggtgtggacgcgcgataccaacctcgcctatcgcatgggccgcggcataaaagcgggtcgcgtatggaccaactgctatcatgtctatccggcgcatgcggcgttcggcggctataaacagtccggcgtcggccgggaaacgcacaagatggcgctggatgcctaccagcaaaccaaaaacctgctggtgagctacggcaccgcgccgctgggcctgttctga

SEQ ID NO: 222684 - DNA, 948 bp, Klebsiella pneumoniae
atgagcgctaaaaatgtcatactgattaccggcagcgatttggctgacgcggcgctggggatgctggaagattacgaacttgtctttgccggccgccagcctacagaggcccagctgatcgcgctgtgccagcagcacaatcccgtcgccatcctggtgcgctatggccacatcactgccgccgttatggatgccgcccctgcattgaaggtgattgccaaacatggcagtggcatcgatgtcattgacgttgaggcggctgccgcgcgcggcattctggttcgcgcggcgaccggggcgaatgccgccgcggtttccgaacacacctgggcgttaattctggcctgtgctaagtcggtcattccgcttgatcgccgcctgcgcgaagggcactgggataaatcaacgcataaatcgcttgagcttgagggcagaacgctgggactcatcggcctcggcgccattggcagccgggtggcgaagattgcctgtgcctttggcatgaaggttctggcttacgatccctatgcgaaagcggttccgccggaatgtgaacgtgttgctgaacttagcgagctgctcatgcaggccgatgtgctgtcgcttcattgccctttgacgcaacaaaacaggggaatgatcaatgccgccacgctggcgcagtgtaagccgggcgccatcctcgtgaataccgcgcgcggcgggttgattgacgatgcggcgctggccgcggcattaaaagcggggaccttgcgctgggcggcgcttgacagctttaatagtgaaccattaaccacgccgcatatctggcaggcgatcgataatgtcattctctctccgcatgtgggcggcgttagcgatgcctcttacgtgaaaatggggaccgccgccgcggccaacattctgcaggtgctgcaggagttggctcagacagaaacaacgtattaa

SEQ ID NO: 222685 - DNA, 696 bp, Klebsiella pneumoniae
atgcctgcttcacaacagaaactcatcaatcttgatattgcgcgtgttgacgcggaagaggtccgtcaggctgccgaatttcaggccgccatcctggctgacgtagccggacgccgtggcacattacatggccgcatcaagccgctggcgccgcatatgacggttgccgggccggcgattaccgtagaggtacgcccaggggataatctggctattcacgccgcaatggccgtcgccaaacctggcgacgtgctggtcatcgacgggaagggcgatctctcctgcgcgctgctgggagagatcatggcaacgcaggcgcaggccagcggtatcgccgggatcgtcatcgatggcgctgttcgtgatgcggaaaccttaagtaaacaacgctttccggttttcgcagccggcctgaatccgtgcggccccaccaagttcattcctggccgggtcaatcatgccatttcggtcggtggcgccgcggtgcaggcaggtgacttagtggtaggggatattgacggcgtggttgttatcccgcgcgatgaagtccgcactatcatcgagctggcgaaaggtaaactggaaatggaatcaaaacgtctggttgctatccgcgacggcgaccttcgtccgcactggctggagagcgctctgcgtcaggcggggatgctgagcgaaggggagacactgccatga

SEQ ID NO: 222686 - DNA, 717 bp, Klebsiella pneumoniae
atggggaatgaaggcgtaattgccgttgaaaaggcgctggctttacttgactgcttccgtcccggtaatgacagtctgacgttaaccgagctggcccagctttcgggatatcacaaaacaaccgtttatcgcctgatgaattcgcttgagcgaatgaactacatcatccggcacgacgatggcacctatacgctcggccaccgtttgctctatctcggcaagctctatgagcaatcatttgaacttgccagagtcgtacagccggaattgcaggcgctgtcgcaggcctccagcgaaagcgcaagctggtatgtgattgagggtgggcaacgcctgtgcctgttccgcgccgaagcctcccagggattacgccacagcaacctgcccggcagccagttcccgctggatggttccgctatcagcaaggttttacgccactggggattgggtgaatcgttgccggaagacgaaccgacgctgccgttctatacctccggcgcgcgcgacccgcacactgcggccttcgcaatgcctgtttttggcgtccacgataaactgatcgcggcgctggccctgaccgggccggcatcgcgtctgacggaagatcgtaaaacgagcggcatcagccagctcatgcaggagacggccaaccgcctgtcgctcaagctaggggccagcaagcctttctgcgaaacgttttacggtgtgaaagagtag

SEQ ID NO: 222687 - DNA, 1335 bp, Klebsiella pneumoniae
atgaccgatcaattaccgaaccgcgcgaccgataacgacgcgctggaaaaagagaccatgcggcgggttatctggcgcatccttccgttcctggtggtgagctacctggtgtcgattattgaccggggcaatataggtatggctgcgctgcagatgaatgaggatctggggctaagtaaggcggcttttggtttcgccagcagtttgtattttgtcgcctactttatttttgaagtacccagcaatctggcgatgcagaaggtgggcgcacgcttgtggctgccgcgcattatgattagctggggcgtggtatcgatgtgtatggcgctggtgcaaaatacgacctcactgtatatcgtccgttttttgctgggcgccgccgaagcgggcttctttccgggcgtggtgctttatcttacctggtggatcccgtcgcgctaccgtgcgcgtatcatagcctcttttatggtggccattccgctggctaactttatcggttcaccgctttcagggttgatcctgaccctggatggctggttagggctgcgtggctggcatctgttattcattattgaagggctgccggcggtactgctgggaatagccgcgttttttattctgcgcgaccgccctcaccaggctggctggttaaccgagcggcaaaaaacgtggctggaaaacacccttcaggcagagcggcaacagcagacacagatcggccacaccacgacatggcaactgttgaagcatcgccagatctggcttatggcgctgatttacgctggcgcttcttctgccggcaccacgctaagcgtctggtctccacagctgctgaagtcgttccatcttgataacctgaccaccgggctgctgaatgccatcccctatggcctggcctcggtgctgatgattgtatggggacgcagttcggaccggaataatgaacgccgctggcacacggcccttgccctctttatgattgcggctggcgtgttcgcggcatttatcaatctatcgctgccggccaccattatgatcctcagtaccatactgattggcgcatatgcggcgaagggccccttctgggcgctggcatcgggctggatgagcagcacgtcagctgccgccgggctggcggccatcggcgcgatcgccaacctgattggcggcgcggtgatggtgaatgcctatggcattattagcgaacggacaggaagctatacgctggcgatgctgccgctggccgccttgtgtctggcaggcggcattgcggtgctggcgatggggcgccgttactcgcagtctgccaggcaggaaaaacaggtgacccattaa

SEQ ID NO: 222688 - DNA, 2235 bp, Klebsiella pneumoniae
atgaacggggtgcaaatccgcattcgcggtaaggtgcagggggtggggttccgcccctttgtctggcagctggctcagaggcaggctcgctgcggcgatgtctgtaacgacggcgagggcgttctggtgcggctggccgggggcgatgacggttttactgccgccctcgctgcccactgcccgccgctggcgcgggtcgacagcgccgactgcgccccttatcgctgggcggctccgccgcagggcttcaccatccgtgagagcggggcggggcggatgcgcacccagatcgtgcccgatgccgcgacctgcccggcgtgcctcgcggagatgaatgatccccgggcgcgccgctatcgctacccctttatcaactgcacccactgcgggccgcggttgaccatcattcgtgccatgccttacgaccggcctcttaccgcgatggcgccgtttccgctctgtccgccctgcgaggcggaataccgcgatcccgccgatcgccgctttcacgcccagccggtggcctgccccgactgcgggccgcggctggagtggcgggcccagggtgaagtgcggcgcggtgaggcggcgctgcaggcggctatcgcccggctggcggcgggcgacatcgtggcgataaaaggcgtcggcggctttcatctggcctgcgacgccggcaaccccgctgctgttgccacgctgcgggcgaggaaacaccgtccggcgaaaccgctggcggtgatgctgccctctgcggcggggttacctgccgacgccgtggcgctgatggactccccggcggcgcccatcgtactgattagcaaagcgcaggtctccggcctgtgcgacgagattgcgccagggcttgcggaagttggggtgatgctgccgtctaatccgctgcagcatttgcttctgcaggcgctggcgcgccctatcgtgatgacctccggcaaccttagcggccgcccgccggcgttaagtaatactgaagcactcaacgacttagccgacatcgccgacggctttttgctccataaccgcgacatcgtgcagcggctggatgattctctggtgcgctcgagcggagaaatgctgcgccgcgcccggggctatgtcccggatgcgctgccgctgccgccgggtctggacaaggtgccgccgctgctggcgctgggcgcggacatgaaaaacaccttctgcctggcgcgcgggggcgaagcggttctcagccagcacttcggcgatcttggcgaggagggcgtcgagcagcagtggcgcagcgcgctgcagctgatgcagaacatcttcgcctttgcgccgcagcgggtggtggttgacgcccatcctggctatcgatcgacgcagtggggggcggctctgccgctgccggtggagaccgtgctgcatcaccatgctcacgccgcggcgtgcctggcagagcaccgctggccgctcgacggcggagacgttatcgccctgatcctcgacggaatcggcatgggggagaacggcgcgctatggggaggggagtgcctgcgggttaactatcgccagtgcgaacatctcggcgggctgccggctgtcgccctgccgggcggcgacctggcggcgcgtcagccgtggcgtaatctgctggctcagtgcctggcctttgtccctgactggcaggattacccgcagaccggtacgctgcgccagcgcaactggccgctgctggcgcaggccatcgaccgcggtattaacgcgccgcgcgcctcgtcctgtggacggctgtttgatgccgtcgcctgcgcgctggactgcgccccggagagcctgagctatgagggggaggcggcctgtcggctggaggcgctggccgccagctgccccggcgtcagccatccggtcacgctgccgtggcgcggaaatgcgctggacctggccaccttctggcggcagtggctgcgctggcaggcgagcccggcgcaaaaagcctgggcatttcatgacgccctggcctgcggactggcggcgatggcccgcgactgtgcgactgcccgcggcatcgacacgattgtctgcagcggtggggtgctgcataaccgtctgctggcggcgcgattgaccttttatctggcggattttactctgctgtttgcgcagcagttgccggccggcgacggcgcaatcgcctatggtcaggcggtgatcgccgccgctcgcgttcaggctcaaggaacacaacaatga

SEQ ID NO: 222689 - DNA, 2364 bp, Klebsiella pneumoniae
atgtacaaatcgactccgtcagcagcagggtgtaaaaaacgcctgctggtgacctctttgcttgcagcaatttatcaaacttctgccgtcgcagcaggcacttccgccatcggcggcgaggcggtggatgacacctcggaacaaatgaccgtcaccgctcccgcgccggcgcaaaaagccggtaacgagcacagcatcagcgcccgggagctggaggataaaggcgctaacgatttcggctcgatcatgcgctatgagccgctcatcagcgccaccggggccagcggcggctccggcaacggcaaaagcggcttcgaccgcgggggctacaccggctacaacattcgcggtatggagagcaaccgcgtcggcatcgacgtggacggtatcgcccagcccaacgccaccggccgtggctacgtcggtcgcgccgggctcaacaccttcggcatcggccgcgattatatcgacccctatatgtacggcagcatggatatccagtccggcgccacctcgacggaaacggccaacagcgccatcggggggaatgtctccttccgcccgaaatcggcggatgattacctgcgcccgggcaaaaccagcgccttcggctatcgcagcggctacgactccgcggatcgcagctggcacaacggggtgaccgtcgccggcggcgatgagttcctgcgcggcattttggtctacagccgccgcgatggtcaggaaaccgaaaataacagcggcaccgtcgatgcctacccggcgaactggcactccgatgcctttctggcctccgggatctggcagcccaacgacgagcacaagctaaccagcaccttcgactattaccataaaaccaaccacacccactacgatacctgggactccagcggcaacagcaccatcggcaccgccaaccagaccagccagacccggcgctggggtctgagcctgaaggatgactggacgccgatgaatgactacctcgacagcgtctccagtaaaatctattaccagcataccgaagcccatgactggacgtatatgccggacagcgtcacccgcagaatgcagacggtgaactccaactacgacaccgacacctggggcctgcagaccgcactggcgaaaaccctgggccgccacgatctgagcgccggctttaacgccagcaccagcaaaacccagcggccgttcagccagtcgccaatccccagcgtttacagcgagatcatgcagccggaggcggatagccgcagctacaccctcggcggttttgttcaggataagatcaacttcgatctcgatagccacaatttcgccattattcccggcgtgcgtgtggtacatcaatcgacgaagccggaaaatctgtccgacctcgccgccaacagcagcgcgctgaccgaatcgtcagtggccaggctgtatggtaaaaacagcgatacccaggttctgccgtcgttgaccttccagtacgacctcaccccgcgtctgatgacctacctgcagtaccagcgcggggcgcagttccccaacgccagccagctgtatggctcctggaaccttggctccagctacgccggcagccagcagtatgccctgatcggcaataccgatctgaagacggaaaccagcgataatcttgagtggggactgaagggggaagttaccgaaggcatcactctgcgcacggcgctgttctacaacagctataagaactttatcgcctatacccgctatacccgggcgaataatccgggccagttcaccaacgtgccgtcgaatatctacaccatttatcaggcggaaaaccgcgataaagcctatatctacggcggtgaaatcagcactaaatttaactttggcacctggtatgagcaggtggacggcctgagcgccaccctcgccctcggctatagcgaagggaaatcgaaatccagctacagcggcgataaatacgtcgacctcgacagcgtagcgccgatgaaagccatcgtcggcgtggcgtgggacgatccggcgaaacgctacggcaccgccctgacggcgaccttcgtcaaagggaaacaggcgaccgccaccaatcgcgaaagctacagcaacagcggatccgccatcaccgatgccagcagcgactatatgcgcgtgccgggctacggcatgctggactggaccgcgtactggcaggtagcgaaaaacgtgcgcctcaatggcggggtctacaacctcaccgatcgtaaatactgggattacctgagcagccgcaatatcgagaccggcaccaaccaggacgccaacgataaagcgctggcggtgatgccgggccgcacctggcagctcggagtcaacgtcgacttctga

SEQ ID NO: 222690 - DNA, 675 bp, Klebsiella pneumoniae
atgagccgatacacagttgctggcagcgaaggccagtatgagaaaaattcaggtgaacgggttttggctaataaactcgggattgctgacgcaaatgagatggatagcgtagaactggtactgctggaacaactttatcgctcggtttttgaggaacactttccaaccggattgctcagcgtcaatatcctgaaaaagtggcattatcgctggttaggcaatatctatgcatgggcaggccaggaaagaacggtcaatatcagcaaaggcgattttatgttcgccccttcagcacagctggctaaactgctaaacgattttgataagaaataccttgctcattatacgccttgttcaggcatgagtgaattgcagctcacagaagctatcgcagtcacacatgttgaattgatcctcatccatccattcagagagggtaacgggcgtttatcacgattattagctgatgtgatggcggtgcaggctggctataaaccgctgaattatcaaagctgggaacaaaacccagtatatatcggctatccatgcaggtttgactctggactatcgaccgatgaaacactgggtcagcatggccttaagaagggattaggcaagacgaagatgcgcatattttttgcgcgcggcttcaagactctcttcaactctggctga

SEQ ID NO: 222691 - DNA, 909 bp, Klebsiella pneumoniae
atggaccaaaaacgactcactcacctgcggcaactggaggcggaaagcatccatattattcgtgaggtggccgccgaattttctaacccggtgatgatgtactccatcgggaaagattccagcgtaatgctgcatctggcgcgcaaagcgttttatccgggaaccctgccgttcccgctgctgcacgtcgataccggctggaaattccgcgagatgtatgagttccgcgaccgtaccgccaaagcctatggctgcgagctgctggtgcataaaaacccggaaggggtggtgatgggcattaacccgttcgtccacggcagcgccaagcataccgatatcatgaaaaccgaagggctgaagcaggcgctgaacaaatacggctttgacgccgcattcggcggcgcgcgccgtgatgaggagaaatcccgcgccaaagagcgcatctactccttccgcgaccgcttccaccgctgggacccgaaaaaccagcgtccggagctgtggcacaactacaacggccagattaacaaaggcgaaagcatccgcgtcttcccgctctccaactggaccgagctggatatctggcagtacatctatctggaaaatatcgaaatcgttcccctgtacctggcggcggaacgtccagtgctggagcgcgacggcatgctgatgatgatcgatgacgatcgtattgatttgcaaccgggcgaagtgatcaaaaaacagatggttcgtttccgcaccctcggctgctggccgctgaccggcgcggtggagtccagtgcgcagacgctgccggagatcatcgaagagatgctggtgtcgaccaccagcgagcgacaggggcgcgtgattgaccgcgaccaggcaggctccatggagctgaagaaacgtcagggttatttctaa

SEQ ID NO: 222692 - DNA, 549 bp, Klebsiella pneumoniae
atgctgattggctacgcgcgggtgtctaccggcgatcaaaacctcgatttgcagaaaaccgcgctggttcgcgcagaatgtgagcagattttcgaagatacagcgagcgggaaaaacgcgagacgaccagggctgaggcgtgctattcgtcgcttaaaaccaggtgattctcttgtggtctggaagctggatcgcttggggcgtagtgttcgtgacctcatcactctggtctcagagctgcaggatagaggtattcactttcgtagtctgaccgatagcattgataccagtacgccagcaggccgctttttcttccacgtcatgagcgccctggctgagatggagcgcgagctgatcgtcgagcgtacccgagccgggttagcagttgcgagggaacaggggagagttggcggtcgccgccgggtaatgactgaagaagtggtggagcagtgccgcagaatgctggagaacggcgctacccggcagcaggtggctgatgtgacaggcgtggacgtgaaaacaatctacaagtacctcccggcgacttga

SEQ ID NO: 222693 - DNA, 1818 bp, Klebsiella pneumoniae
atggatttttatttttcccgttttgaacatcgccgaccgcctgaaccgctcagcaccccgcgctgggtgagaatgatttggcaggtattagctgtggccgccctggttcttggcgctaattatatttactggcgctggaccgcctccttaaacacggacgccctgtggtatgcgattcctctggtgctggcggaaaccctggcgtggattggcacagttctgttcaccattaatttatggcaggagaaagatcctccgccaggggtccccccgacggagatcaacgactgtctgcgcgcggatgaagcggtggagtcgaggccgattaaagtcgatctgtttatcgccacctactccgaagacgtggagctggtcaggctatcgattcgtgacgccatgcggatgacctatcctggtccgctcgattataaggtgcatgtccttgacgacgggcgtcgcccggagatgaaggcggtctgcgagcaggagggggcgaactatatcacccgtcagagcaatatcggctataaggccggtaacctgcgcaacgggctggaacataccgatggcgactttctgatcatctgtgatgccgatacccgcgttttcccgaccctgctgagccacacgctcggctattttcgcgatccggacgtcgcctgggtgcagaccccacaatggtttttcgatctcccggagggggaggatctggcgcgctggctgcggcgtaaagcaggcggcgcaggctatggcgtgggctggctggcgcagaaaatcgtcggtccggtgaccattggtcgcgatccttttttcaacgatccgcgcatgttttacgacgtgattttacggcgccgcaactgggctaacgccgcgttctgctgtggcgccgcctccgttcaccgacgggaagcggtgatgcaggcggcgctgcgcagctacgtctggagcgttgacgccgaaatcgcgcgtcatacgcgggatattcgcgacccggcaacgcgggaagcgctgcaggacgccatgcgcccccacgttgccttcgatactgaactgacgccttataagttccacgtctcggaagatatttacacctccatcctgctgcacggcgacgctgcccgccgctggcgctcggtaatgcacccgcggatcgagtcgaaaatgctctctccgcaggatatgctgacgtggatgatccagcgctttaagtacgccgccggatcgctggatatcctgttccatgacaacatcttcaaccgacgccgctttaaactctcgctgccgcaaacgctgatgtacgcgaccaccttctggtcgtatctggcctgcgtgtggaacaccgtgttcctgatctcgcctgttatctatctcttcaccggcattccgccggtgtcggcgtggtctacccctttctatctgcactttttacccttttttattgtctccgaactggcctttatgttcggcacctggggcatttctgcctgggacggccgggcctcttacctctcctttttctcgatgaatctgcgggcgctggacaccgttttgcgcggggagcagataaaatttcacgttacgccgaaagagcgacagacgggccgttttctctatctcgtcaagccgcaaattgccatcgttttgctcaccctgacggggctgatatggggcggtattcaggtggcgcgcggtcaggttgacgacccctccgggtacgtcatcaacattttctggggcgcggtgaatattgccgccatgctgccactgatcttcgccgccatgtggacgccccccgaagagcaggaggcgagccgatga

SEQ ID NO: 222694 - DNA, 900 bp, Klebsiella pneumoniae
atgcgggagaaatatatgctggcctgcgcgctatggtgcgccatcgcaggtgcggaaggcgcagagaagaacgacgcacaaccgctgcgtgataaaaatggtgaaccggtgcaggccggcgtgtttaccagccgctggggacggcttttttccgggaatgacaaggtgttttcgggagcgctgagctttagttcgggtttaaaagagcagtggatgaccgtccccaacagctcagacagcgcagaacagaagaaaaaatataatcagacgctgaacctcagcctgcaatactcgccctacagcttctggttcgccaacgtgacatcccgtttaccggtgactgataccagccgctataccgccgattttcgctatagttttggttacgacgactggcatgccaacaccttcagcctggtttacagtaactatggcgataaccacttctggacctcgggcagcaagcgtcacacctattttgagcagggggcatttaccctggcgtataaattttcgctgccgaagccgatggaaaatgcactattgattaacaaaggcgacgccattatctgccaggcaggctacagctgggtgccgcgttattacgatctggagagtaacgatatccgcaaaaacaaaaatgtgctgcttggggggtgtggatatacctttaagcagcatttttttgtgcgcgccaccgccttctggtatccggacagcagccagcagcagccgtggaatggcgattatagttacagctttggctacgcgggctatacgccgggatcgttctctgtgcagtatgccaactatgccggtacccgctatccggggcatgacagcggcagcggcaagtttcgtgaaggcacgatcagccttatctggttcttgccgatttag

SEQ ID NO: 222695 - DNA, 189 bp, Klebsiella pneumoniae
atgattgaacatatccattttagatgcccatgctgccatggctcccagtacagaacgtcccagtttgacgtgacggaaaaaaatccctttggtgcgaaatgcattttctgcaaatcggccatgatgacgttagatactcttcgcccttatcacctgggcgcgctgtccaccgctcaggcccagccataa

SEQ ID NO: 222696 - DNA, 207 bp, Klebsiella pneumoniae
atgaacaagttgcttccactgatcgtattgagttgtctgctgccgctggcggtcaacgccagaaccatcaccgtcaccggcgataccctggacaacgcggagagcaaaattcgccagcaggccgcccgcgagggcgcaaccgcctatcggatcattgaggcgcgaatgggcaacaaagtgcatattacggcgacactcgacaactga

SEQ ID NO: 222697 - DNA, 930 bp, Klebsiella pneumoniae
atgaaatctgataatcttaaccacgaggaaaaggtattggtgctaggagcgggacaactgggcgccgccgtactggatgcactggtacctgcggtgatccagcgccagggcgcggtctcggttatcgtctcgccggcggcctgggatgaagccggccagctgcggtcggcaaaccaccgggcgctggccgacgccggggccacctttctcgccgtcgacattgccggtagcgacatggagacgctggctggtcagtttagcggattcaccaccgtgattaactgcatggggtttgtcgccggtccggggacgcagctaaaaattacccgcgcggtgctggccgccggagtgccccgctattttccctggcagtttggcgtcaattacaatgtggtcggcaaaggcagcggccagccggtgtgggacgagcagtatgatgtccggaccctgctgcgcgcgcagcaggccacggagtgggtcattgtctccaccggcatgtttaccagctttctcttcgagccagacttcgatgtggtgaatttagccacccgaacccttcacgcccttggcggctgggacacccaggtgaccgtcacctcgccggcggatattggccgcctgaccaccgcgatttatctgcatcagccgcggatcgtcaacgaggtggtgtttgttgccggcgaaacgacctcttatcgccagctggcggaaaccgtggagcgcgtgacgcagcagacgttcagcaaagccgttcacaccctgcccgccctgctggaccagctgcggacggacccggataacgccatgctgcgctatcgcgctgccttcgcccggggggatggcgtgtggtggccgatgggcgacacctggaatgcccgccaccatctgccgacccaggacattgccggctggctgcaggccgcgcgctga

SEQ ID NO: 222698 - DNA, 912 bp, Klebsiella pneumoniae
atgaataatggccagagcgtattggtttttggcgccaccggccagcagggcggctcggtggcgggggcgctgctgcaccgcggctggcgggtacgagcgctggtcagggatcctttctccgccggggccgtcgcgctggcggcgcggggagccgagctggtcgtgggcacctttgaagaccgggcgacaatgcgggcggcgatggccggggtcgacggcgtcttcagcgtccagcccagttcgccgggagggacggtgaccgatgagcaggaggtacgctacgggataaccatcgccgacctcgccgtcgagtgcggggtgaagcatctggtgtacagctccggcagcgcggcgggggagacgcccaccggcgtagcgcattatgacaccaaagcggaaattgaacggcatatccgccgcctgccgctggcggcgaccatcgtgcgtcccgccacctttatggagctgttggtgatgcccggttttggccttgatgaaggtcattttcacttttttatgctgccagaggggaggatgcaggtgctggcggtggaggatatcggccatctagtcgcggcagtttttgccgcgccagcgcggtttgccggcaagacgttcgagatcgccagcgacagcgtgaccggccgtcaactggaggcgttattctccgcggcggcgggacggccgatcccctattcgcgattttccgatgaggtgctggccgccagcccttttctgcacaagctgaccgggctggtggacgacgggcggctggccgggcacgccgacctcgacgccatgcgccagctgcatccgcagctgcacaccttcgccggctggctggcgggccccggccgtcccgccttcgagcgggcgctgaccagcggggccagctgggcgtttaatcgttaa

SEQ ID NO: 222699 - DNA, 360 bp, Klebsiella pneumoniae
atgacaatttaccgatgggcttcggcctgcctgttaagcatgacctgcgccgctacggcggcggaatttaaaaccatcgaggccgatctgctggcctccaaccggctgttctgtatgaccggctatgatcataagccgatcggcgtggcgtgggagagcgtcaaatatagccgctatcagccgcagtcggatggcgaccgtattttcagcgacaccgtctcccggggctttctggaagaggagaataagaccgccttttacaatggcgccaaatatcgcgtactgggtaaacccgccagcgcctgctatgactattccgccgcgcgtattcaacgcatggcgggctacctgaaggtgtaa

SEQ ID NO: 222700 - DNA, 804 bp, Klebsiella pneumoniae
atgaacaagtcagttgcgctcgggatgacgctcgccctgttatccgctacctctttttacgccaccgcagatcaaattattcgtatcggcttcaatcccgggccgtataaagagcaatttgaaaaaggggtcgccccctatttattgagtaaagggtataaaatcgaatataaagattttagcgacggtattcaggtcaatgacgcggtagcccgcggtgatatcgaagcgaatattatgcagcatccggtatacctgaaagcgatcaatgagcggctggggaccgataacgtgggcattgtgcaggtacccacaccgccgatgggcctgtatggcggtaaactgaccaccctgggcaccccggcagccggcacggtggtgtcggtgccaaaccagccgtcgaacgaatatcgcgcggtgctggtgctggaaagtctgggctgggtgaagattaaaccggacagcgatcccgccaccttttcccagcgcaacatcgttgctaacccctataaaatcgtgcttaaggagatggacaatgcccagcaggttcgcgcgctgccggacgtcgactatggcctgattcagggcaatttcgccgtctccagcggcatggcgctcacctcagcattaaagctggaggccgccaccagccattttattaacgtcgtaaccgttgccggtaaaaatcagaaggcgcagtttgccaaagatattatcgacggctatcactctgccgatttcaaaaaatatattctcagccatccgcagtatgatggttacctgctgcctgattatttaaaatga

SEQ ID NO: 222701 - DNA, 1200 bp, Klebsiella pneumoniae
gtgttccagaacgtcgacgcctacgcgggcgatcctatcctgtcgctgatggaagcctttcaacaggatccccgggcagacaaagttaacctcagcatcgggctgtactataacgagcaggccatcattcctcagctggaggcggtccgccaggccgctgaccggctgcagagccagttgcaaaaggccagcctctatctgccgatggagggactggcaccctatcgccgcgcggtccagacgctgctgtttggcgaacatcatccggcgttgcgtaccggacgcatcgccaccatccagacgctgggcggctccggcgcgctgaaggtgggcgctgattttctcaagcgctacttccccgactccgcggtctgggtcagcgatccgacctgggagaaccatgtggccatctttgccggggcgggcttcgaggtgcatacctatccctggttcgacagcgccactcgcggggtcaatttccccgccatgcttgccgccctccagcagctcccgccccgcagcatcgtgctgctccatccttgctgccataatccgacgggggccgatctcacccccgagcagtgggatcgggtgattgaggtgttgatcgcccgggagctgatcccgttcctcgatattgcctaccagggctttggccgtgggctggatgaagatgcctatgccatccgcgccatcgccagcgccgggctgacggcgctggttagtaactcgttctcgaagattttttcgctgtacggcgagcgcgtcggcggcctgtcggtggtctgtgacaatgccgatgccgccgggcgcgtgctgggccagttgaaagccaccgtgcgccgcaactactccagcccgccggggtttggcgcccaggtggtgtcgcaggtgctcaacgatcccgagctgaatgccctgtggcaggaagaagtggaggccatgcgcacccgcatcagcgccatgcgcgtcgcgctggtgaaatccctgcagacagccctgccggcggaggatttttcctatctgctgacccagcgcggcatgttcagttacaccggctttagcgccgatcaggtagacgttctgcgcgaagagcacggcatctatctgatcgccagcggtcggatctgcgtggccgggctcaaccgcggcaatattgcgcgggtagccagcgccttcgccgcggtatgcgcacgctag

SEQ ID NO: 222702 - DNA, 750 bp, Klebsiella pneumoniae
atgaagcatgtgcacaagctggcctggattggcctgttcgtcaatattattatctgttttgtcgcgcgtaatttattactcgatgaaggacaactgaatttccatagtcgggtggacagcatgtggtcctggctggttcttgccctgtttatcgccgtggtggttcaggtgctcagcattatgctgtctggccgctatccttatctggccattgtgctggcctttattggcggtatcgtgatgatccccatcagtatgatctttctggtcggcagcctgttcagctttcaaacgcggattaacgccggttttaccccgtggcggtcaacaaccggggcgatgagccgcgacgataatcaccagctattaacctttaatgcatccgctttttatccgcagggagcgctggcgctcgtcgccgggataattatcttaatgattggcatgggtattggcggcgtatttattgccgccggtattctggcgctgtgcaacggctatcgtctgcagaatcgggtggtgattggcgtcagcggcgagtcgatgatatttacgccgggtctctatgccgacacctacattattcctttgcgcgatgtagttctcgctgagcgcggcagtcatgatgcgaaagtccggctgctcatcccgtcgacaggcagaagtatcaccttgcgcaaaaaaatgctcgccggcgataacgtcagcgacaccttcgccgcgatccttgcaaaactgaccaccgtttag

SEQ ID NO: 222703 - DNA, 1374 bp, Klebsiella pneumoniae
gtgaccgctttttctaccctgactgttttacctgccgcccaattagccaaccttaacgagctgggttatctgtcgatgacgccggttcaggccgccgccctgccggcgatcctcgcggggaaagatgtgcgcgtgcaggcaaaaaccggcagcggaaaaacggccgccttcgggctgggtctgctgcagcatatcgatccgtcgcgctttgagacccagtcgctggtgctgtgtccgacccgcgaactggccgatcaggttgccggcgagctgcgccgtctggcgcgctgcctgccgaacatcaagattttgatgctctgcggcgggcagccgtttggcgcccagcgcgattcactgcagcacgccccgcatattatcgtcgccactccgggccgtctgctcgatcatctgcagaaggggacggtctctctcgacgcgctgcagaccctggtgatggatgaagcggaccgcatgctcgatatgggcttcagcgacgccatcgacgaggtgatccgcttcgcgccggctgaccggcagacgctgctgttttccgccacctggcctgcggcaatcgcggcgatcagcggccgggtgcagcgtcatccggaaacgattgagattgacagcgtcgatgcgctaccggctatcgaacagcagttctttgaagtttcccgtcacggcaagattgcgctgctccagcgtctgctcagccagcatcagccggcgtcctgcgtggtgttctgcaataccaagcgcgattgccaggcggtctgcgatgcgctcaacgccgccgggcagagcgcattatcgctgcacggtgacctcgagcagcgcgaccgcgatcaaacgctggtgcgcttcgcgaacggcagcgtccgggttctggtggcgaccgacgtcgccgcccgcggcctggacatcaaatctctcgcgctggtggtgaacttcgagctggcctgggatccggaggtgcatgttcaccgcatcggccgtaccgcccgcgccggcgaacaaggcctggctatcagcttctgcgcgccggaagaggcgcagcgcgccaccattctggccgacatgctgcaattaccccttaactggctgccggcgccgacgggcaacgctatcacgccgctgacggcggagatggcgacgctgtgcatcgacggcggaaaaaaggcgaaaatgcgcccgggagatgtgctgggagcgttgaccggagatatggggtttgatggcgccgatatcggcaaaattaccgtccacccggcccacgtttatgtggcgatccgccagaacatggcgcagaaagcgtataagcagttacaaaacggcaagatcaaaggcaaagcctgccgcgtacgactgctgaagtaa

SEQ ID NO: 222704 - DNA, 777 bp, Klebsiella pneumoniae
atgctggcgctggctatccttgtgatggccgcgtgtaaacccttcgttgacgcttcctcctgcgatgaaacacagggggcgatcaacgatgtgaacttttttattttgacctcccttccgccgctgaacggcgaagtgcagagcgtgcaaatcgtcggcagccagaataacgaatatggcgcccttcgtttcgcgcgatgccgccggctggcaagctatgagcgggcaaaaacccttaacaccgcacatggcgcaacgatcgtcagagataatgttcgctggcgaaatgataaaggatggatgcgggaatatatccggcagacccggagcgcgacgggaaatatcagcaagatggtgatgcgcgaacagttttataccgattctctcgggcggattgtgcgcgccgaaaacgtgtccgcgacgcagcaaccgcccaaagtcctgcatacgaccacctatcagtatgacgaccggcaccgcctggtccgtaaaacggtcaacggcggtatgatggtcatgcttgctgtcgattaccgctatacggatgggcgccttagccgcatggctgactcggactccacctcgacgctgcgtagggatgaaaaagggcgctggatatcccgggaaacgacctcaacgtatagtggaccacgccaggcccgttgtttagggtgggatcccgaggggaactgtaccgcggagtatgccgagcagcctgctgcaggggcaatgaaagatcagtctctgcactaccagtatacctattatcctcgatga

SEQ ID NO: 222705 - DNA, 2052 bp, Klebsiella pneumoniae
atgactattgctgtttcccgtccggcgggattgcctgcggcggtgtatgcgctttccgtgggttcatttggtattggcaccaccgaatttgtgattatgggtttattactcgatgtggcccatgattttcatatatccattactcttgccgcctggtctattaccgcttatgcctgtggggtggtgattggcgcgccgctgcttacgccgctattaagccgttatcgcaaaaaaccggcgctgttatttttgatgatcttattttccattggaaatttaggctgcgcgatcgccggtaatatgaccatgctaattattgccagggtaataaccgctttcgctcacgcttcgtttttcggaataagctcagtctatgccgcggagctggcgccggtagataaacgagcttcggcggtctccgccgtgtttctcggcgccaccctggccaatattctgggcgtgccgctcggcgcctgggtggggcagtaccttggctggcgctataccttctatatggtcacgctgatcggcgttctctccgccctggcagtcattgccctggtgcctggccgtcaggcgcaaccgtcggcccagagccggatccgtgatgagctaaaggtgctccgccatcccgcggtgctgcgcagcctgctgatcactgccctcgggttctccggcgtcttcgccgccttcacctacatcgcgccgatgctgaaaaccgtcaccgggatgagcgaacaccttattccgccggtgctgatgctgttcggcgttgggatggtcgccgggaatcatcttggcggccgactgaccgacggcggcgtccgccgactcgccacctgctatcccttccatgtcagtatcccgcagccgcggacggagaagatcctcgaaacggcattagccgccgccgggcggcaggtgagacgcgggcaccagctggtctcctggcgccgggagggggagcgctatcacgtctccctgctcgacgatgcccgtcgggcctgttccgccgcttatgactatattatcggcgccgacggcgcggccagcaccgtccgggagctggccgggatcggctttagcggtcatgactatccgctgcattttgtgatggcggatgtgcagttcgaccccgcggcggcgctcccggggacctcctaccatattgatgagcaaggctttctgattttcctgcccatgccggacaatcaggtcaggattgtgattaaaaaagccgggcgcttgccgtcgccgcgtccggtgccggacctgcaggagattaacgccgcgctggcgcgctactgccctcaggtgccgccggcgcagaggctcacctggtcctccagcgccaatttctataaccgcatcgccgatgacaatctgcagcaccatattatgctggcgggagatgccttccacctgttcagtcccattggcgggcaggggatgaacaccggcgtccaggatgcggtgaacctcgcctggaagctggctttctgtctgcacggcgtggccactgaccgactgccggcgtcctatcgcacccagcgcttcgccgcggtgagcggtgtgctgcgctccaccgactatgataccggcctgatcgccggtctggtgccgagaaatcatatcgatggggtctactttccggagttttgcaaccgtcactactatcgtcaccagctgccgctgcagtacgccggtttcaccgcgacgcaggcgcaggagccggacggcctggcagggcaccatgttccctggtacgtttttgcctcgccgcaggcgacgtttcgcaacagctatgacgccttcgccagcggtaaggtggtgatcttttccgcccgcgccgcctgtcctcctttgtcccgcctgaagcaggccggctggtttatgttctgccccctcgagccggcggacaaggcgtttcttgaggcgctacagatcggtcccgatgactacgcggtggttaatcccgatggctatgtgggctttaccggcagcgaagccgggacgcggcagtatctttcctcgctctacgtaatggaataa

SEQ ID NO: 222706 - DNA, 1206 bp, Klebsiella pneumoniae
atgaacaaagtctatatcgtcgcggcctgccgtacgccggtggggcgctttcttggtgccctgaaaacgttctccgcggtggagctggcagcgctcaccgtcaggcacaacctgcagcaggccggcattgacccggcgtggatcgatgaggtgatctgcggctgcgtcctcgccgccgggcagggaatgggaccggcgcgtcaggttgcgctgcgggcagggatcccggtgcaaacgccggcttacaccctgaatatgatctgcggtagcggcatgaaaagcatgaccgaaggggcgatccatatccagagcggttatgccgacctggtggtcgccggcggaatggaaaatatgagtcaggcgccgtttttgctgcagggagagataaggggcgggatgaaattcggcgcattcagcagtgaggatgtgatccagcgcgacgggttaaccgatccgctgctgcagatcccgatgggggaaacggcagaggccatcgccgcgcaggagcagatctcgcgcgcggcgcaggaccggtatgcgctggagagccatcaaaaagcctccgtcgccagccgtgccggctattttgccgatgagattgtgccggtgacggtcagcgcgaagcggggcgtcagcacggtccgcgaggatgagccgatccgccatgatcttagcgccgggcagctggcggcgctgaaaccggcttttcgcgctgacggcagcgtcacggcgggcaacgcctccgggctgaacgatggcgccgcgtcggtgatcctcgcttcggcgcgcgccgttgcccgctatggcctgcagccgctggcggagatcgtctcctttggcgaaggcggcgtcgatccgtccttgatggggctcggcccactgccggcgatagcgtgcgccctgcgccgcggtggttttcagctcagcgatatggcccggctggagattaacgaagcctttgccgcgcaggtattgggggtggtcaggggactggccagagagcatcagatgacggaggaggagattgcttcccgcctgaacgtccacggcggcgcgatcgccctcggtcacccgctgggcagttccgggacgcggatcgtggtcagtctggtgcacgcgctgcgccgggagaatcaaccgaccggcctggcgtcgctgtgcatcggcggcgggatggggattgcgttactggtgaaaacgatctga

SEQ ID NO: 222707 - DNA, 786 bp, Klebsiella pneumoniae
atggaaaaattaattgtggtgggtgagaaatttaccgattttgcccggcggcatgagaatgtgctgacggttaatgagtttgagcggtttgtctggagcggcgagctggccggcgtcgataaaatcattatcggtcagggggtacagctcgacgacatctcccgcaccatctgcattattcgtcagcactatccggacaaaatccgccagatcgtcaatctgcaggatctctattatcaaaacaaccgcgatcatcagcggttggtacataaacgtaaaaaagcgaatatcctcatcacctcgccggaacaacgcgatgaggatagctattgcgcgcgcctgatcctgcaggatgcctcggagttactctgcgaccaccagaccgggcaacatattcaggggatggtgctgatcgaggcggcgcggcagaccatcatcgccacctcggaaaaattcctgctggcggaggccggcgtggcaatggcggagaagtactttaccctgagctcgctgcaggtggccttttcctgctttgtttttccgctgccggtgaccatcgtcctcaacgtagtatcacgcaaaagttcagcccatggccgcttcacctgcgaatgctcggtggggtttgaccagaccggcacccgcaaagcggaagttggctttagcttcagcgtctatgaccttaactacatcactcgcaaagagtgcgagcaggcagcgcagtgccatcaacattatctggtcagtattgagcagggggacggggatgagcatcgccttttttga

SEQ ID NO: 222708 - DNA, 654 bp, Klebsiella pneumoniae
atgagcatcgccttttttgatgtggatgaaacgctgataaccggcaaaagtatgttcctgtttctgcaccgctatgccgaggaatatccgctgcagtgcggtttgacggccgcggcgattgtccgccagcttcaggcgcttagcgaagcgggtcaaccgcgggaagcgatcaaccgctactattactcgctgtttcgccacgagtcgcgcctccgggtgcgggcggtcgccgagcgtctgtatcgcgaaggcggatatggttttcaccacgaggtggtggcgcgcctcaggcagcatcaggcgcggggggatgacgtggtgtttgtctccgggtcgatgaccgacattctctggccggcgatggcggcgctgggggtggaacatgccctgtgctcggagccggtggtggtggatgaccgctataccggcgagctctggcggaccgccatcggcgaacacaaggcggcgcatgctcagtgctatgcgcaggaacagggccagccgctggcggcgtgctacgcctttggcgatcatatctcggatctgccgctgctcaccgtggttggcaacccctgcgcggtgaatccctgtccgggtctgctggcggaggcgcagcatcggggatggccggtgctgtggtccaccgtcggctga

SEQ ID NO: 222709 - DNA, 1467 bp, Klebsiella pneumoniae
atggcggtaaaagcacagttcatagccgggcagtggcagccgggcagcggcgcaacgatgagtaaactggccccggaggatcagtctctgctgtggcaggcggccagcgcgggggccgacgacgtccaggcggcctgcgccgcggcgcgcgccgcgttttatccctggtcgcaccgcccgctggccgagcgtattgacgtcgtacagcgtttcgccgcgctgctggagacgcataaagaggcgctggcgaccctgatttcccgggagaccagcaagccgctgtgggagacccgcaccgaagtgcaggcgatgatcggcaaagccgccatctccgtcgaggcctatcaccagcggacgggctttcatgagtcgacgctgccggacggtaaagcgctgctgcgccacaagccgcacggcgtgatggcggtcttcggcccttacaatttcccgggccacctgcccaacgggcatatcattccggcgctgatcgccgggaatactatcgtatttaaacccagcgagctgacgccggccactgcggaactgacggtccagctgtggcagcaggcgggcgtccccgacggggtgattaacctgctgcagggcgggaaagccaccggccaggcgctgctggaaaaccgcgatatcgacggcgtgctgttcaccggcagcgcagcggcgggtttccacttccatcgctacttcggcggccagccggagaagatgctggccctcgaaatgggcggcaacaacgcgctgatcgtggctgatgtggccgatgtcgatgcggcgctgcatgtgattatccagtcggcgtttatctccgccggacagcgctgcacctgcgcgcgccggctgattgttcagcgcggcgagcagggggatgcgctgctgcggcggctggtggaggccagcgcgcagatccgcgccgggaaatgggatgaccagccggcgccgtttatgggtggggtgatttcccttgaggcggcgcagaacatgctggcggcgcagcagaaactggagggacttggcggcaaggtgctgctgcgcctgcgccagcccgacccgcactccacggtgctgaccccggggattgtcgacgtcaccggtatcgaggtgccggatgaagagtactttggcccgctgctgacggttatccgttacgacgacttcccggaggcgattcgcctcgccaaccagacccgctatggcctggccgtggggttgatctccagcgatgcggcgcagtttgaccagctggcggacgaggcgcgcgccgggatcgtcaactggaacaagccgctgacaggcgcttccagtaaagcgccgtttggcggggtgggcgcctccggcaaccaccgcgcggcagcgtggtacgccgccgattactgtgcctggccgatggcctctctggtcagcgacacgctgacgcttccggcgaacgtatcgccgggcctgccattctga

SEQ ID NO: 222710 - DNA, 393 bp, Klebsiella pneumoniae
atggaactgctggccaggctgggttatttttttgagcaagtgcgtgcagatgccgattttgccaccttcgccaatgaactacgtcggcaccaggtctcgtgttacatctactttgtctccaccggcaatatgaatttcgtgatggcaaacgacaaggtgatcacgataaaaagcgcccgcagcctgctgcgcgtgcgcagcgcccccaaccagcagctgacctcggctgcggtcatccgccattttgccggcgccatcaactttgaacaatactgtaaggatctcgccagcgccggggtgtttaagtggagcgtcgacctggacgaggagactcgccactactggtcgaaggataaccggctgctgtataaagagagcctgattcccccctga

SEQ ID NO: 222711 - DNA, 147 bp, Klebsiella pneumoniae
atgggcttctgtacggcgaaacatattgatttactcaatatgacaaatgggcggcggtcagccagcgcgaaggtggcgaaaaaatgcgatgcgcttgccgccggggaacaggcggtgaaacgggcccctttcagggccgcagactga

SEQ ID NO: 222712 - DNA, 159 bp, Klebsiella pneumoniae
atgcaatatatactgactggtgtaatcgtattgatcttcagcggcctggttatccacggcctcacgctgttgctcgaacgcgggtatcgcgcgcttttcggcttcttcgccggagccgcagatgtcccccgtaaggtcaaaatgaaggtgccgcgttaa

SEQ ID NO: 222713 - DNA, 675 bp, Klebsiella pneumoniae
atggataatagggttgcgtggggcaaggatatggatgatattgcattatttaatggctgtataattaatcaggaggttatatttaatgccaatatgaatgagctgcgaccgcttgccggggatggggagagcatcagcctcaatgcgcctaccgccagatgcttgctgctgctattgcagaattgcggcaaagtgatttctcgggatgaatttctggcggctgtatgggaaacacggggagtggtagtttcgcaaaatacattttatcaaaatatctctttgttgagaaaatcgctgctcaaagccggactatctgaggatatcattatcaccgtcagacaaaaaggctttagcgtcgccccggatactttagttatcccgctctcggatgaagagtgcgagaatatgaatcgggaaagattaacgcattttcacagtagtaaaactgctgatgtcattttcaatgatacggggaaaattgaccataaattaagtcttccactaccagtgaatttagcaatccaggagaatgataggcgggaaaatagcgtgaaggtggcagagaaagtatcggaacgattacatataacctttaaagttcccacctggttaatcgcgctgattgtcgtgatgatagttatcaatgttatcgtactgatcgtgttacatcgataa

SEQ ID NO: 222714 - DNA, 1017 bp, Klebsiella pneumoniae
atgagaaaaacactgatttttctatctatattattatgttgttgtgaagcagctgccaaatgcgattatgatggttccgatgggcaagcagtatttaacttaagtcctaaaatcgcaacggacccaacaatacccgttggtacagttttgtataccaaaaaagttggtaccggacactataaaacctttgaatgcagcaagataatgggtgatcagtatatcattacctcatccgcacccgaggtctctggtgtcacgggtataatgggaaaaccggtctatgaaacggggattgatggtattggttttcagttttcagatattctagacagcaagcatggttcaattaaacccgcagtagcacaatctacgattgtgccaattttaaagtcgaatgatgactacagatttatgacagtatggttaataaaaacaaaacctgtcattgatacatccggcgtcagtaccaatccggtatttaaattctcagcgggtaacttaagcaccaaccccagggcgtcagatcgtctgttaatgactgcgtctctgaaattcaagagtatttcttataaggcgacctcctgtgatatttctgtgtctggaccgagccaaatcaccttaaatacaattgaaaaaaatacattaatgtcaatccctcggggtggcacaaccccatcacagaaaactatcacaatggacgtttcatgcccagtgggttcaattggtaataaactttactattggtttaacccagttagtggcaccagtcctgcggggaatggcatcatcgataatctgctaacaggaggcggagcagcaagcaacgttggcattatcttcaaaaaagacaatagtcccgttatattttatgacgcagagacctacagtattgccagcgctcaagcatcgcaaaaaattaactttaccgccgattattaccgaatgagcgacaacagcgctgaagtctcggccgggcatgtaaaagcgatgcttgaggtggttattcaggaagaataa

SEQ ID NO: 222715 - DNA, 2286 bp, Klebsiella pneumoniae
atgaccgctcgccgacacccgtttttcaccagcgcccgtggccgcctgctctcctttaatctgctgatggtggtcgtcaccctgctggtgagcggcgtggcggtgttcggctttcaccacgccagccagctgcaggagcaggtgcagcgccagaccctcaacgatatgcgcggcagtatggatctggcgcgggacacggcgaatgtcgccacggccgcggtgcgcctgtcgcaggtggtgggcgcgctggagtacaaaagcgaagcggaacggctgctggcgacgcagcaggcgctgaagcactcgctggctcagctggcagcggctccgctggcgcagcaggaggaggcgctggtggccagtattattcgccgcagcaacgcgctgcagcggagcgtggcggagatgctggagcgcggccagcgtcgtcatctgcagcgcaatgcgctgctgagttcgctttaccagaatcagagcaacctgcgccatctcgccgatcttaacgatcgcggcggggaccgggcgatcgatcctcgtcggctagccgagatggaccggctgatcgccgccgcgatccataccgtcacgccgcggtcgatcgttctgcagctcgaccagctgcgcggcgacctgccggctcaaagcgccgatcccgcgctggcgtttgttctccccgacgtcacccgggagctggcgaagctggccccgctgtcggcccagctggaggagagcgacctgacgatcagctggtacatgtaccacatcaaagcgctggtcgcgctgcttaacgacgacatcaatcagtacgtgacccgggtggcggaagcctccgaacagcgggcggcgcagagccatcgggagctgcgctccatcagcatgtttattctgctttccgcgctgctggcgctggcgatcaccggctgcgccgggtggtacatctaccgtaacctgggctctaacctgaccgctatctcgcgggcgatgtcgcggctggctcagggagagccgaacgtctcggtgccggccctgcagcggcgcgacgagctgggcgaactggcgcgcgcctttaacgttttcgcgcgcaatacggcgtcgctggagcacaccacccggctgctgaaagagaagaccacccagatggagatcgataggattaagcgtcaggagctggaggaggcgctgttgcacagccagaagatgaaggccgtcggccaactgaccggaggcctggcgcatgattttaacaacctgctcgcggtgatcatcggcagccttgagctggtggagccgaatgcgcaggatgcgccacgcctcaccagggcgctgaaggcggcggaacgcggggcgcttctgacccagcggctgctggccttttcgcgtaagcaggcgctgcatccccaggcggtggcgatggcgccgttgctggagaacctcagcgagctaatgcgtcactccctgccggcgaccttgagcctggagattgaggcgcagtcgccggcgtggccggcatggatagacgtcggccagctggaaaacgccctgattaacctggtgatgaacgcccgcgacgccatggccgggcgcgcgggcgtcattaaaattcgtacctggaatcagcgggtcacccgcagcagcggccagcggcaggatatggtggctctggaggtgatcgatcacggctgcggcatgtcgcaggcggtgaaagcccgggtgtttgaacccttctttaccactaaagccaccggcagcggcagcggcctggggctgtcgatggtgtatggctttgtgcgccagtcgggcggccgggtggcgctggagagcgcgccggggcaggggacgacggtgcggctgcagctgccgcgggcgatgaccgaggtagagaaggcggcggtgccggtggaagacgaaccaatcccggcgggagaacggctggcgctggtgctggaagatgaagaggatgttcgccagacgctgtgcgaacagctgcatcagctgggctggctgacgctggaaaccgccagcggggaagaggcgctgcagctgctggaggcctcgccggatattgccctgttgattagcgatctgatgctgcccggcgggctgagcggcgccgatgtgatccataccgcgcgccgccgctttccggcgctgccggtgctgctgatcagcggtcaggatttgcgcccggcgcagaacccggccctgccggaggtggagtggctgcgtaagcccttcacccgcgctcagctggcgcaggcgctgagtgcagcgtacgcgaggatttga

SEQ ID NO: 222716 - DNA, 1521 bp, Klebsiella pneumoniae
atgaccgccaccccggtactggaaatgcgccatatcgccaaagcttttggcaaattctacgcgctaaagggcgtcgacctgacggtctggcccggcgagatccacgccctgatgggggagaacggcgccggaaaaagcacgctgatgaagatcctcgccggcgcctataccgccaccagcggcgagatcctgatcgacggaaaaccgcaaacgatccgcggccccaaggacgcgctggccgccgggatcacgttgatctaccaggagatgcagctggcgccgaacctgaccgtcgcggaaaacattttcctcggcagcgagctggcacgtggtggcctggtgcagcgcaaagccatgctcagccaggcgcaggcggtgatcgaccgtctcggcgcccagttcagggccagcgaccgggtgatgaccctgaccatcgccgagcagcagcaagtggagatcgcccgcgccctgcaccgtcaaagccgcattctggtgatggatgaacccaccgccgccctctcctcgcgggaaacccagcgcctgttcgacctcatcctgcgcctgcgcgatgaggggatggcgattatctatatcagccaccgcatggcggaagtgtatgagctctccgaccgggtcagcgtcctgcgcgacgggcagtatgtcggcagcctggtgcgcgacaagctcaacgcaccggagctggtgcgcatgatggtcggccgtccgctcagcgatctgttcaataaagagcgcgatattccccgcggccagccgcgcctgcgggtcgaggatctgaccgatggcggtaaggttaagcccagcagcctggtggtgcatgccggcgaaatcgtcggcctcgccgggctggtcggcgccggacgctccgaactggcgcagctgatctttggcgtgcgcaaagccaccggcggggtgatcgagatcgacggcgagccggtggtgatccactcgccgcgcgaagccatcgaccatggcatcggctttctgaccgaaaaccgcaaagagcagggcctgtttctcgaactggcggcccaggaaaacatcaccatggcgacgctggagcgcgacgcgacctggggaatgctcaaccgccggaaggcgcaaaccatctccgatgatgccatccagctgctgaacatccgcgtaccgcacgcccaggtgcgcgccggcgggctgtccggcggcaaccagcagaaattattgatttcacgctgggtggcgattggcccgcgcattctgatccttgatgaacccacccgcggcgtcgacgtcggcgcgaaaagcgagatttaccgcatcatgaacgacatggcgcgccagggcgtcgccattctgatgatctccagcgaactgcccgaagtggtgggcatgagcgaccgggtctatgtgatgcgcgaagggactatcgccggcgagctgcagtccggcgatatcagccaggaacagatcatgacgctggccaccggcgtgaacgattctcaccttaaggcagggcaactatga

SEQ ID NO: 222717 - DNA, 1680 bp, Klebsiella pneumoniae
atgagtaatgccatcacagagattgataacaccgatctggtgtttatcttcggctacaacccggcggattcccaccctatcgtggcgaatcacgtcattaacgctaaacgcaacggggcgaaaattatcgtctgcgacccgcgcaaaattgaaaccgcgcgcatcgccgatatgcacattgcgctgaagaacggctcgaatatcgcgctgctcaacgcgattggccacgtgattattgaagaggatctgtacgataaatccttcgtcgccagccgttccgaaggcttcgaggagtatcgcaaaatcgttgaaggctacacgccggagtcggtggaggagatcaccggggtcagcgcccaggagatccgcgcctgcgcccggatgtacgccagcgccaaatccgccgccattctgtggggcatgggcgttacccagttctaccagggcgtggagaccgtgcgttccctgaccagcctggcgatcctcaccggcaacctcggcaaaccgagcgtcggcgtcaacccggtgcgtggccagaacaacgtccagggcgcctgcgatatgggtgcgctgccggatacctatccaggctaccagtacgttaagttcccggaaaaccgcgagaagttcgccaaagcctggggcgtcgacagcctgccggcgcataccggctatcgcatcagcgagctgccgcaccgcgcggcgcacggtgaagtgcgggcggcgtacattatgggtgaagatccgctgcagaccgatgctgaactgtcagcggtgcgcaaagcgttcgacgatctggaactggtgatcgtccaggacattttcatgaccaaaaccgcctccgcggccgacgtcatcctgccgtccacgtcgtggggcgagcacgaaggcgtgtacaccgcagcggaccgcggcttccagcgcttctttaaagccgtggagccgaagtgggatctgaaaaccgactggcagatcatcagcgaaatcgctacccggatgggttatccgatgcactacaacaacacccaggagatctgggacgagttgcggcatttgtgcccggacttctacggcgccacctacgagaaaatgggtgagctcggctatgtgatgtggccgtgccgcgatgagtccgacgccgatcaggggacgtcgtatctgtttaaagagaagttcgataccccgaacgggctggcgcagttcttcacctgcgactgggtcgcgccgatcgataagctcaccgacgagtacccgatggtgctgtcgacggtgcgcgaagtcggccactactcgtgccgttcaatgaccggtaactgcgcggcgctggcggcgctggcggatgagcctggctatgcgcaaatcaacaccgccgacgccgaacggttaggcattgaggatgaagcgctggtgtgggtgaattcgcgcaagggtcggatcatcacccgcgcgcaggtcagcgaccggccgaataaaggcgcggtgtatatgacctaccagtggtggattggcgcctgtaacgagctggtgtcggagaacctgagcccaataaccaaaacgccggagtacaagtactgcgcggtcaacgttgagcggattgccgatcagcgcgcggcggaacagtacgtgatcgacgagtacaacaagctgaaatcccgcctgcgcgaaagcgcgatgggttaa

SEQ ID NO: 222718 - DNA, 1314 bp, Klebsiella pneumoniae
gtgaagaaaacaaaaaaagtcagtctggcctggcaaattttgctagccctggtgctgggtatccttctgggcagttatctgcattaccacgccgaaagtcgcgattggttgattagcaatttgctgacaccggcgggcgatatctttatccatctgattaaaatgatcgtggtcccgattgttatttcgaccctggtggtcgggattgccggcgtgggcgatgccaaacagttaggccggatcggcgccaaaacgattatctatttcgaagtgatcaccacggtggcgatcgtgctgggtatcaccctggccaacgtctttcagccgggaacgggcattgatatgtcgcagctggcggcggttgatatttcgaaataccagaataccaccgctgaggtgcagagccatgcgcatggcctgatgggcaccatcctgtcgctggtgccaaccaacatcgtggcgtcgatggcgaaaggcgatatgctgccgattattttcttctcggtgctgtttggtctggggctctcctcgctgccggcgacgcaccgtgaaccgctggtgacggtcttccgctccatctccgaaaccatgttcaaagtcacccatatggtgatgcgctatgcgccgatcggggtgttcgccctgatttcagtgaccgtcgccaccttcgggttcgcctcgctgtggccgttggccaagctggtgctgctggtttacttcgcgatcctgttttttgcgctggtggtgctggggattgtcgcccgcctgtgcggcctgagcatctggatcctgatccgcatcctaaaagatgagctgattctggcttactccaccgccagctccgagagtgtgctgccgcgaattatcgagaaaatggaagcctatggcgcgccggcgtcgatcaccagcttcgtggtgccgaccggctactcctttaacctcgatggctcaacgctgtatcagagcattgcggcgatctttatcgcccagctctacggcatcgacctctccatctggcaggagatcaccctggtgctgaccctgatggtgacctcgaaggggatcgctggcgtgccgggcgtctcctttgtcgtgctgctggccaccctgggcagcgtcgggatcccgctggaaggtctcgcctttatcgccggcgttgaccgtatcctcgacatggcgcgtaccgcgctgaacgtggtgggcaatgcgctggcggtgatggttatcgccaagtgggagcataagttcgaccgtaaaaaagcgctggcgtatgaacgcgaagtgctgggcaagtttgataaaaccgcccaataa

SEQ ID NO: 222719 - DNA, 1278 bp, Klebsiella pneumoniae
atgtctgaccaaacatcctctctttttattcgctggctacagcgagaagtcgcaccagcattaggttgcactgaacccgttgctatttcatttaccaccgcttacgccgcgaaacatttagcgataccctgcgaaaaaattagcggttttatttctgccaacctgtataaaaacgccacgggcgtcacgattcccggcacgacagtgaatggcgtcgcgctggccgccgccatcggcgcctttggcggcgatgccgataagggattacagaccctggcaggcattacttcacagcatgtggaacaggcacaagcgctggtggacgccggccacgttaatattgacgtccaggacacgcctgactttattcatctcgatctcaccctcagcgccggtgaccagacctgtcgcgtcgtggtaaaaggcacgcataccaatgtggtcgagttatatattaatggcgaacagcagccattacacgccggggaaaatagcgccacagcacaggccgaactgccaactttctctctccaggaagcgtatgactttattatctccaccccggttgagaatattacgtttattctggaagccgcccgcctcaatagcgcactggctgcagaaggaaaatcgaaaaagtatgggttgaatattaacggaacattctctgaagccgttaaaaatggtttgttaagcaatgacttaatgagtgaggtcattatcaacaccgtcgcggcttccgatgcgcgtatgggcggcgccccggtggtggctatgtcgaacttcggctctggcaaccaggggatcgcggcgaccatgccggtggtaaccgtcgccgagcatctgaatgccgatgaagagacgctcgctcgcgcgctggcgctctcgcatctgacggccatttccatccattcgcgctatacccgcctgtccgcactgtgcgcggcctccaccgccgccatgggcgccgccgccggtatggcatggctgtttacccgcaatatcgaaaccatcaacaccgccatcatcaatatgattagcgatgttaccggcatgatttgtgatggcgcctccaacagctgcgcgatgaaggtgtcctcggtggtctccagcgcctttaaatctgtattgatggcgatgcaaaaccgctgcgccagcgccaacgacggcattgtctgcgccgacgtcgaacagtcgattaataacctgtgccgcctcgtgattaagcctatggcgcaaactgataaagagatcattcgcattatggtcagcaaataa

SEQ ID NO: 222720 - DNA, 510 bp, Klebsiella pneumoniae
atgttgactatccgaaaggcattgcccgaggacgcgccacaactgagcgcgatgggttatgccagttaccagcaccacttcgcccatctctggcgcaatgccgatgaactggcgttatttcttaagcaagaatatgccgaagatgcgctacgtcggagtctgaccgatgccaaccatcattggctcatcgccgaagccgcttcccccgttggtttcgctaaatatagctatcagcagcgaatggctgaagatggcacgatgggtacgctgctgcataagctctacctgatgccgggggagactggccaccgctacggcgagcagatttttcacgccatcgagacgcgagcaaaaacggccggcgaacgctggctgtggctggaagtactcgccgcgaatcccgccgcgcgccgtttttacgaacgccaggggatgcagcacatcagagacacgactttccattccggcagccagcaaagcaccttgcatattctggccaaaccgctgtga

SEQ ID NO: 222721 - DNA, 1995 bp, Klebsiella pneumoniae
atgtcccgaagagagcttgccaacgccatccgcgccctgagcatggacgcggtgcagaaagccaattccggccaccccggtgcgccaatggggatggcagacattgccgaagtgctgtggaacgattttctcaagcacaatccgcagaaccctggctgggtggaccgcgaccgttttattctgtccaacggccacgcgtcgatgctgctctacagtctgctgcacctgtccggctacgatctgccgctgtcagagctgaagcagttccgccagctgcactctaaaacgccgggtcacccggagcatggctatacccccggggtggagaccaccaccggcccgctgggccaggggctggcgaacgccgtcggtatggccatcgccgaacgcaccctggcggcgcagtttaaccgccccggtcatgagattatcgaccatcacacctgggttttcatgggcgatggttgtctgatggaggggatctcccatgaggcctgttcgctggcaggcacgctcggactgggcaagctgatcggtttttacgaccacaacggcatctccatcgacggcaaaaccgacggctggtttaccgatgatacggcagaacgtttccgcgcctaccactggcacgtgatcggcgatattgacggccacgatccgcaggccatcaaacaggccattacggaagcgcaggcggtgaaagataagccgtcgctgatcatttgtcggaccatcatcggcttcggttcgcccaacaaagccggctcagaggagtcgcacggcgcggcgctgggtgaaaaagaggtggccctggcccgccagcagctgggctggaaacatcccccctttgagatcccgaaagagatctatcagggctgggatgcgcgtccacgcggcgaaaaagccgagcacgactggaacgagaaattcgccgcctaccggcagcagttcccggagctggccgctgagctgacccgccgcatggatggcgccctgccggaggattttgccgcgaccgcccgcgactacgtggcgaagctgcaggccgagccggcgaagatcgccagccggaaagcctcgcagaacgcgctgaacgcgtatggcccgcacctcccggagctgctgggcggttcggcggatctggcgccgagtaacctgaccatatggtctggctcgacatcgattaaagaggatgccgcgggcaactatattcactacggcgtgcgcgaattcggcatgaccgcggtggccaacggcatcgccctacacgggggattcatcccctatacctcgaccttcctgatgtttgtggaatacgcccgcaacgccgcgcgcatggcggcgctgatgaaggcccggcagatcatggtctatacccatgactccatcggtctgggggaagacggtccgacccaccaggcggtggaacagctggccagtctgcggctgacgcccaacttcagcacctggcgcccatgcgaccaggtggagaccgctgtcgcctggcaggcggccatcgcgcgtcagggcggaccgacggcgctgatcctgtcgcgacaaaacctggcgcagatgccgcgcaccccgcaacaggtgcaggatatcgcccggggcggctacgtgctgaaggatgccggaggcaaacccgacctgatcctcatcgccaccggctcggaagtggagatcaccgtcctggcggcggaaaaattgttggccaacggggtgaatgtgcgagtggtttcgctcccctccaccgatgtgtttgacgctcaggacgaggcctggcgcgagtcggtgctgccgtcggacgtcagcgcccgggtggcggtcgaggccgggatagcggactactggtataaatatgtcggcttaaaaggcaagattgtcggcatgaccggctacggtgaatccgccccggcggagcagctgttcccgttctttggctttacggtcgaccatatcgtcgccaccgccgaacaggtgcttaacgggtga

SEQ ID NO: 222722 - DNA, 894 bp, Klebsiella pneumoniae
atgaagattgcggcatttgatatcggtggcaccgcgttaaagatgggcgtcatgacccgcgacggaaggctgctggaaaccgcgaagcagtcaatcaatgacagcgatggcgatcatatcttacagaccatgctgtcgtggctggcggcccacccgtcatgcgaaggcattgccatcagcgcgccgggctatgtcgatccgcacagcggatttatcaccatgggcggcgctatccgtcgatttgataacttcgccatgaaatcatggctcgagacgcgaaccgggctgccggtctcggtggaaaacgacgccaactgtgtgctgctggccgagcgctggcagggtaaagcggcggagatggccaattttctggtgctcactatcggcactggcatcggtggagcgattttttgccaacatcagctgatccacggggcgcgttttcgcgccggcgagttcggctatatgcttaccgatcgtcccggcgggcgcgatccccgtcgctactcgatgaatgaaaactgcaccctgcgggtgctgcgccatcgctatgcagaacatattggcgcgccgctggatagcgtcactggcgaaatgatttttgaccgctatgacgccggcgacccggtttgccagcgtctggtcgccgagttcttcaatggcctgggccatggcctttataacctcgtcaatatcttcgatccgcagaccatttttatcggcggcggcgttgtggaacgtcctggatttctgacgctgctgcgccagcatctggcctggttcggcattgccgactatctcgataccgtcagtcacggcaacgatgccggcctgattggcgcggtttaccatttcaatcagcactatcgttcgcctggcgacgatcgaccttag

SEQ ID NO: 222723 - DNA, 1341 bp, Klebsiella pneumoniae
atgaatattcatctttctcagcgccatccccacgcggatggcgtcactcccgataccgctctctttcaacaggcgctggacgagctggcggaggccggaggaggtacgctggtggtcgatcacggcaggtacgcgctcggcggcttgcggatagggtcaaatacctgcctgtggctgtcgccgggcgccaagctgatcgtcagcgaaaacggcgatgattttacccaagcggtcgcgctgagccaggcagagtgctcccaccgggcctttctttatgctctcgatgcgcaaaatgtgagtatctgtggcggcggtgaaatctacggtagcgccgacggctggttttcccgggatgtcgatgccatggggtaccgccagcccgtcgagcggcggccgcgcatcattttgctggagaactgccgcggcgtgcgactggaaaatattaccgtgcgccatgcgccgatgtggaccatacatctggtctcgtgtatcggcgtgacgattaacgggattaccgtggataacgatttgacgatggccaataccgacgcgctggatatcgacagctgccagcaggtgcatatcgccaactgctatttcagcgccgccgatgacgctatctgtctgaaaaccacggccaagcctgcgcatattcagcgtccgctgcgtcaggttacgatcgtgaactgtacgctgcggtcgaaaagctgcgccttaaaagtcggtacggaaacctggcaggatattgaagatgtgctggtcagcaactgcaccatctttgattccaatcgcgggatcggcttgctatcccgcgacggcggccagctgcggcggatgatcttcagcaacatagcgtttgcttgcgtgagcgcgccagcctgtcattggggggaggcggatccggtttttctttccgcacgccatcgcgatccggctatcgcccccggcgccatcactcggatccagtttcgcggtctggtcggggagtgtgaaggggcgattaatttgcatagtgaaccagcgggcctgatccagcgcattctttttgacggcatccagctccaccagaagcttaatccacaggcggagcaggggctttatgatgtgcgtccgccgtgtaacccgcagtcgccaaccggcatgggcatggataatgcctggtgtctgaatccgcacagcggccgtgcctggggggttgagccttacccgggagggctgccggtgatgtatgccaacggcgtgactgacctgacgctacgtgagtttgattaccagcggccgacgccattgcctgcggggtggaaccacaacgcactttgcctggaaaacacagataaataa

SEQ ID NO: 222724 - DNA, 1509 bp, Klebsiella pneumoniae
atgacgaggacagtaaccccaacgcgagaagtcaaaacccgcaatatcctctgctgggggatgggtgatattttcggtagcggcgcgatgaccattaccggcctgtggctgctctacttctatattgaggtcgccgggctctcccccgccgccgccgcctccattttcgccatcgccaaaatctgggatgggatcaccgatccggtgatgggctacatcactgacaacatccgcacccgctggggacgccggcggattttctttattctcggcgcgccgatgtcgctctgtttcgccctgatgtgggtgagcggtttcggttacgcctggtacctcggcacttatttacttttcagcaccgtgtttacgctactgatggtgccttacgatacactgccggcagaaatgacctcgcgctacgatctgcgctctaagatgtcgggcgcgaggatgctgttcgcgcaggcgacggcctttctcgccgcgctgatccccgggcaaatcatggctcacgtcgccgaccaatcgcaggcatttctctatatcggcatcgtcttcgccctgctcttcgccctgccgtggatttttgtctggagcggcacctgggagcgcgacgctcttccgccaccgcaggcccgccaggggttgcttaaaaccctggggtcgttataccgggagatggcttcaacgtttcatctgcgcactttccgcattcatatcatgatgtacgtcggcggcgcggtggcgttggatattttcggctcgctgtttatgcattacatgacctatgtattgcgcgtcgggacccccctggcatcgcaggcgatgagcctgatgacgctgtttcagttcttcgccatcccgttcttcacctggctgtgcattcgcgttggcaacggcaatgcctataagctggccattgcgctgatcctctgcgctttgctgtggttcagccagcttagcgccggctttagccatctctcctggctgctgctcggcggtgcggtggtaatgggcgtcgcccgcgggggaacctatctcattccgtggaacgtctataactttctgccggatgtcgatgaggcctataccggcgtgcgccgcgagggaatttacgccggcgtgatgatgctgacgcgcaagttctcccaggcgctggcgctgtttatcgtcggactggcgctggaggcgtttggcttcaccaagggcgctgaagcgcagaacgccgccgcccttaacggcatctggtgggttttcctggtgggccccggcctgctggcgatcctggccatgtatggcgcatttcgtttccgcttaagccagccgcgccatcaaattctgattaacgagctggagcgcctgcgcgctggcggccatccgcaggatgccagcccgcagacgcgagaaactattgaactactaaccggtcatccgcaccgcaatgcccgctggcaacacgccgtcttaccgcaagggagtgattatgtcgcagaaaagcaaccgtcctga

SEQ ID NO: 222725 - DNA, 1098 bp, Klebsiella pneumoniae
atgtcgcagaaaagcaaccgtcctgaactccttcagcgtattgaagcgctgatcgataacctaaccgccattaacgataagagcggccagtatctgcagcggctggccgatggccgggtcattgatacgaaaggctgggagggctgggaatggacgcacggcatcggtctgttcggactgtttcgctatcagcagttgaccggttccccccgcgcccgtcagctgattgacgactggttcagcgcccgcttcgccgagggaacgccggagaaaaacatcaatacggcttgtccgttcttaacgctggcgctgcgctaccagcaggcgccgcgcagcgactggcgcgcctacctcgactgctggggcgaagccatctatcgccagatgccacgcaccgatgaaggctgtctgcagcatgtcacctatgagagcgcgcatcagcaacaaatctgggacgatacgctgatgatggcggtattgcctctggccatactgggcaaaatgtttgataaaccgcgctgggtggaagaggccatctaccagtttttacagcatctgcactatctcagcgaccgccagagcggcctgtggtatcacggctggcatttcgccggccgacaccacttcgccggcgctctgtgggcccgaggcaacagctggataaccctggcgatcccggagctgctggagatgctcgatctcgacgagcatgatgctgtttaccggcaattgcaaaataccctgcagatacaggtcgccgcgcttgcccgctgccagagtgacaacggtttgtggccaacgctgctcaacgaccccgacagctatctggaagcctcggcgaccgccgggtttgccgccggcatcttcaaagcgatacgcctcggctatctggaagcggattatctgccggtggccgagcgcgcgtgcgagggaattatcgaccatatttcaccacagggtgaactgttgcaggtgtcgttcggcaccgcgatgggccacgaccttgatcactatcgtcacatcccgctcaccgccatgccctatggccaggcgatggcgatgctgtgcctggtggaagccctgcatcgcacgctgtaa

SEQ ID NO: 222726 - DNA, 1668 bp, Klebsiella pneumoniae
atgtgggaaacgcgggcgctggagctcaataatcaggatatctggcactggccgtcagcttgtcgcttaatggaatatgccataaaacatggttttaataccgtggtgatcggccaggcggagctgttcggcaagctggtatcgccgcagggctacacgccgtttgactataacgaccggttgtcgagccagcagcgagcgcgctgtatctatctcaaccgcctggcgctgcgctgtcgggaactggggctgcgcttttatctgcaggcgaaagagctcagtttcccgacggagctgttgttagcgcatccggaactgctggataacccgggcggtgtgcgttttgatgtggatttctggagccgttggttgaccgacaaagtccgcgccgtctgcgagggcgtaccggcgctcaccggcttgattatcgccctttccagcactgacggcttgttgccgatctcccgcccgcagtgggataggcagcgtcgcgaggcgggcgaagggcgccagccggcgcagagcttcgtgctgtatcgccgctgttttggtgccttgagccaggccgtcgcggcgcaaaacaaacatctggtaatacgcgtcttcccggcaagcaacgacgatctcagtaccgtgttggacgctattgaaccgctgccgccgacggtatcggtatcgattaaactgaccccggaacgcttctggccagcctttcccaataacccggcgctgctggcggtgcagacgcgggatgtgtgggttgatatcgacctggccggggaggaagttggttggggagttatgccgtttctgcgtatcgatgaactgcaggggcggctgctgtggtgccaaagccggaatccgcgtatcaccggcgctatctgtaaagccagctgggaaagtattgataaccactggatccccgataccttaagcgaatgcaacctgttcgcctgcagccagctgctgggggacgggatggcgaaaaaccagcagcagttgctcgaccagtggctggcgcagcgctacggctggtgtccgcctgaggacgtggcgcagcagttccggcagcttctcgagcagggagcgcaaacgctctaccaggcgatctacgtgcgcgaccacgtcttccatcgccacagccagctgccggaaagctacgggcaggcggtgtggagcctgtacggtcagctggcgcgtagccactggctgccggggtcggcgcaggatattcatttcacccgcgacgacccgcagaagtcgatgagcaatctgacgcaaatcgcgcaggaaaaggatgaggtggccagcggcgcgcagcgcctgggggaagaggcgttggcgtttgcccacacggcggagtttcctgccgcgctggagcggcagtggcgtgaagagtggcaggggctggcgctctattgccagctgtttacccatgcgcaaaaggccttttttacgctgcatttcgcccgcgaggtggagaacagctggagcatgcgggagatctgccatatcaatgtgcaggcgctgtaccgttgcgcgtctgagatggaaacgctctgccagcagatgagcgacgcctcgccggcgttctacgtcatgttcgatcccggacgggtgcgtagcctggcggatagcctgagcaccgaactgacggcgctcaggtaa

SEQ ID NO: 222727 - DNA, 1533 bp, Klebsiella pneumoniae
atgccaataaacgaaaaaacccctcggccgcaggagttcgctgcggttgaccttggttcgaacagttttcatatggtgatcgcccgtgtcgtcgacggcgccatgcagatcatcggacgcctgaaacagcgcgtacatctggccgatggcctcgatgaaaactcggtgttgagcgaagaagccatgacccgcgggctgaactgcctgtcgctgtttgccgaacgcctgcaggggttctccccttccagcgtctgcatcgtcgggacgcatacgctgcgccaggcgaccaatgcggcagagtttcttaaacgcgcggaaaaagtgatcccctacccgatcgagatcatctccggtaatgaagaagcgcgcctgatttttatgggcgtggagcacacgcagccggagcgcggccgtaagctggtgattgatatcggcggcggttcgaccgagctggtcatcggtgaagattttgagccccggctggtggaaagccgtcgcatgggctgcgtgagtttctcccaggcctacttccccggcgggaccatcaataaagaaaatttccagcgcgctcgcctggcggcggtgcaaaaactggaaaccctggcctggcagttccgtattcagggctggaccgtggcgctgggcgcctccggtaccattaaggccgcccaggaagtgctggtggctatgggcgagaaggacgggtttattacgccggagcgcctcgaaatgctggtcagtgaactgctgaagcataaaaacttcgacgcgctcagcctgcccggcctctcggaagatcgtaaagcggtctttgccccggggctggccattctgtgcggcgtatttgacgcgctagccattaaagagcttcgtctgtctgatggcgcgctgcgtgaaggcgtgctgtacgaaatggaaggccgcttccgccaccaggatattcgtagccgtacggcgcagagtctggcgaatcagtacaacatcgatcgcgaacaggcgcgccgggtgctggaaaccaccacccttatgctggagcagtggcaagagcagaatcccaagctggccaatccgcacctggcggcgctgttgaagtgggcggtgatgctccatgaggtgggcctgaatattaaccacagcggcatgcaccgccactcggcctatattctgcagaacagcgacctgccgggcttcaaccaggagcagcagatgctgatggccaccctggtgcgctatcatcgcaaagcgataaaactcgacgatctgccgcgctttacgctgttcaggaaaaagcagtttctgccgctgatccagctgctgcgcctcggcgtgctgctgaacaaccagcgtcaggccaccaccacgccgccgacgctacggctgcaaacggaagctcaccactggacgctgaccttcccgcacaactggtttagccagaatgcgctggtgctgctggatctggaaaaagagcagcagtactgggaaggtgtgccggagtggctgctgaaaattgcggaagaagagccagacgcctga

SEQ ID NO: 222728 - DNA, 888 bp, Klebsiella pneumoniae
atgacaacactgaacctgggaaacctggcgaccttccggctggtcgtacagcgcggcagcttctcagccgccgccgacgcgctggggatctcccagcctgccgtcagcctgcaggtgcgtcagctggagcaatttttacagacccgactgctggagcgcaccgggcgcgggatcaaggcgacggcggcgggaatggcgctgctggcccacagcgagcagatcgatcgggcggtgaatagcgcggtgcagtcggtcagtgcatttagtcaggaagttaatggctcactgaccctggggaccggcgcgacggcctgcattcatcttcttccgccgctgctgcagcatcttcgtcagcagcacccactgctgacggtgggggtgaccaccggcaacacgctggatgtcgtccgggcggtggaggaaaaccggctcgatcttgggctggtcacgctgcccgttcagggacgcagtctggcggtgaccgccgtggtggacgaggagttcgtggtcatccatcccagccacgaggcggggatcccggcggtgtgtacccctgaggagctgcaggcgctgccgctcattgccttcgaggcgggcagcggcacgcgggatctgattgaccgctggttccgttcggcgggcctggcggtcacgccggtgatgcagctggggagcatcgaggcgatcaaacgcatggtgcgggccgggctgggctacagtattgtgccccgcatggcggtagagcaggcggaggatcgctatggcttaacggtacattctctggccccgtcgctgtaccgtcagctggcggttgtcatgcgtcaggataaagtgattaccaaaggaatggcggaaatgctgcgtctgctgcaggccgtgcgcttataa

SEQ ID NO: 222729 - DNA, 1080 bp, Klebsiella pneumoniae
atgcagattggttttatcggccttggcgcggtggtggaaactgcctatttaccggcgctgcgccgcctgggataccgtattgatagctgccagggctatgatctggatagcagcagagcgctgccggggatccagcgccgcaattcgctgtcggcgctactggccgaacccctggatacgctcttcattaccacctcatctctccagcacttgcctgtgctggagagggcgttagccagcgccattccccgcatcgtggtggagaaaccgattgtggccaaccttgagcaggccgcccggctgcgggcgctgctggcgccggccggggaggccggtcgcgtgctggccctcgaccactggatggcgcgtgggttagcgctgaacgctcttgctccgccgtggcaggcggaagaggaggccagcggcctgccgccgccgcacctttcagcgcaggatatcgtctggatcgaaggctatttgctggagccaagcggctttaacgctgccggagaaccggtcgcgctcaactttgccaccggcgagctggatacccggcagctgcgtcatcccgacggcgtgatcctcgatatcggtacgcatgtcctggcgatgctgcgtgaaaccctgctcggctgcagaggcgatgtgacgctggacctcgccgtccgggtggtgaaagaccgtctcggccgggacattgctcatggggatatggtcaccgccgagggagaggcgcatctgcagggacgcctgggcgatatcccgctgaatatctggcttaacaaatatgctggtcccgcgggcgggcaaaagggaatgcggatagggctgcgggatgggcgaatgctcgccctcgatcgcgcccctgatggcgaggtggcgacgctacaggacggtgagcggatccagcgctggacccggcccggagcgatctattcgcactgtctcgatgagcagatccttggcgcggagaatgtgtttacccgggcgcccgaaagcgtggccgggctgacgcggcgtcggcttgaggaagtggagtggctgctcaggttgcagcagcaattacgcggccctcattaa

SEQ ID NO: 222730 - DNA, 1338 bp, Klebsiella pneumoniae
atgacgatccgtaaaccggcgcgtttgctgctggtggatgacgatccggggctgctgaagctgctcggcatgcgtctggtcagcgaaggctatagcgtggtcaccgccgagagcggaccggaagcgctgcgcgtgctgggacgtgagaaagtggatctggtgattagcgatctgcggatggatgaaatggacggcctgcagctgttcagtgagatccagaaggggcagcccggcatgccggtgatcattctcactgcccatggctcgatccccgacgcggtggcggccacccagcagggcgtcttcagcttcctgaccaagccagttgataaagacgccttgtataaagccattgatgaggcgctggagcagcgatcgccagccaccgacgaagcgtggcgccaggcgattgtcacccgcagcccgctgatgctgcgcctgctcgagcaggccgggatggtggcgcagtccgacgtcagcgtgctgattaacggccagagcgggaccggtaaggagatagtcgcccaggcgatccacaacgccagcccgcgtcatgacaagcctttcgtggcgattaactgcggcgcgctgccggaacagctgctcgagtccgaactgttcggccatgctcggggcgcctttaccggcgcggtcagcaaccgcgaagggttattccaggccgccgaaggcggcacgctgtttctcgacgagatcggcgatatgcctgtcgccctgcaggtgaagctgctccgcgtcctgcaggagcgtaaggttcgcccgctcggcagcaaccgcgatatcgagatcaacgtgcggatcatctccgccacccaccgcgacctgccgaaggcgatggcccgcggcgagtttcgcgaagatctgttttatcgcctcaatgtggttaacctgaagatcccgccgctctccgaacgcacggaagatattccgctgttggccaaccatctgctgcgtcagtccgccgatcgccataagccgttcgtgcgggcattttccagcgatgcaatgaagcggctgatggccgccaaatggccgggcaatgtgcgccagctggtgaacgtgattgagcagtgcgtggccctgacctcgtcgccggtgatcggcgatgcgctggtggaacaggcgctggaaggcgagaacacggcgctgccgaccttcgtggaagcgcgcaatcagtttgagctgaactacctgcgcaagctgctgcagattaccaggggcaacgtcacccacgccgcgcggatggctggacgcaaccgcaccgaattctataagctgctgtcgcgccatgagctcgacgccaatgactttaaagagtag

SEQ ID NO: 222731 - DNA, 156 bp, Klebsiella pneumoniae
gtggattatggcgaagggattgccatgacggggttttatgttgctttgaatgaagatgatgaactggatatggtggggttgtctccggaggcggtgctgcgcacccctggccgggctaccggggcgtggctccatgtcggacccgtagccccgtaa

SEQ ID NO: 222732 - DNA, 1755 bp, Klebsiella pneumoniae
atgctgataaggggcaaacagggtatagaagatgtgatcccgcagacgcaccgggatcattttggcgttataggtctggttttgcttcagactgaacacctgcgaagtcccggacttcgccgcaatctggtacggcgcggtatggaacagcttgtagccggtgccgttgggcagattcgccatcccatacataccgttgcgcacaatgccccagtacggggattttggatcgcccacctgcggcaggttcgccggctgctgataacgttccacatgattgccctgcttcatcgaatagagcagatgcgggtcctgcaccttaccgttgttcagcagcgtggtgagcgctttcaccatctggatgggggtggcgatccagtatccctggccgataccgacggagatggtatccccctggtaccagggctttttatgcactcgctgtttccactcccggctgggcagcaccccgctatactcctcattgagatcgatgccggtggactggccgtagccgaatttgctcagccactcatggatccggtcgatgcccatctcgaaggcaacctggtagaaaaaggtgtccgccgactcttcaatggctttggtcacgttgagcatgccgtggccggttttcagccagtcgcggtagcgacgctgcgtgcccggcagggtccacgtcggcgccccgaagaaggtggtgttcggcgtgatcacgccggcggagagcgccgacagcgccatatagggcttcaccgtcgaggccgggggatacagcccctgggtgacgcggttgatcagcggccggtccgggttatccagcagcgatttataggcctgatagccgatacctttgacgaacgggttaggatcatagctggggctggagaccatcgccagcaccccgccatcccggggatcgaccaccaccaccgccgcgcgctgccccttcagcaccgactcaatatactgctgcaggtgcaggtcaagggtcaggtagaggtttttcccggccaccggcggtacttctttcaacagacgcaccacccggccgtggttgtccacttccacctcctggtagccggtggtgccgtggagcgctttttcgtaataaccctcgatcccctgcttgccgatattgtggtcggcagcatagttctcctcttcgccatctttcgccagccgctgcaggtcgctgtcgttgattttcgacacatagcccaccacgtgcgccagctctgcgccgtaggggtattcacgctgctgatagctctccaccgtcaccccggggaaacggaattcgttgaccgcgaagcgggccacctccacgtcgctgaggtcggatttgagggtaaccgctttatagcggctgctgtggtgcatatcgtcgcggaagctggcgatgtcgtccggcgtcaggtcgacaatcggcgtcagggtttgcagcagcgcggccatatcgggaattttgctcgggatcacctgcaggcgatacagggtaatattctgcaccagcggtatgccgttgcgatcgaatatcagcccgcggctgggggcgatgggcagcattttaatatcgttttggttggagcgggtctggtagaaatcgtgctgctccacctgcagatggtagaggttgaaaatcagcacgccaaagcagaccaccaccagcagaaaggcgattgcggcccggcggataaacagcatctcttccgcggagtggtcgcgaatttcatctctcaaaaggggcattag

SEQ ID NO: 222733 - DNA, 2301 bp, Klebsiella pneumoniae
atgaccaataaaagacgcgcggttcccggtgttcacccctatgacggtccggcaggcggatggggcgcgctgaaggccacggccattgccgtgcgtacccagatggatgccttcgaggcgcccgccacgctgctgcgaactaaccagccggatgggtttgactgcccgggctgcgcctggccggataaagagcataaatccacttttcagttttgcgaaaatggcgccaaagccgttacctgggaggcgaccaccaaacgggtgacgccagcgttcctcgcggctaacaccgtgacctccctgctggcgaaaagcgattttgaactggagggctatggccgcttaacccatcctttggtctacgaccgcgccagcgatacgctgcgaccggtggcgtgggaggcggccttcgcccgtatcggcgagatccttcgcggcctgcagccagatgaagttgaattctacacctccggacgggcctccaatgaagcggcgtggctgtttcagctgtttgcccgcgagtacggcaccaataactttcccgactgctctaacatgtgccatgaatccaccagcgtgggcctgccgcagtcgatcggcattggcaaaggcaccgtctccctcgacgattttgaccagaccgagctggtgatctccatcggccataatccgggcaccaaccatccgcggatgatgggcactctgcatgagctttcccgccggggtgtgccgattatcgtttttaacccattgcgtgagcgggcgctggagcgttttgccgacccgcagaacgtgatggagatggcgacatatcgctcgacgccgatcgcgtcgacctactaccaggtacgggccggcggcgacgcggcggcgctgaaagggatcgccaaagcgctgctgcagctggaggaggagcagggccaggtgctcgaccacgcgtttattgcgcaacatacccaggggttcgccgccttcgccgaggatctgcacgccacccgctggcaggacattgagcaggagtccggcctgacgcgcgagtcgctaacccaggtcgccgtggcctacgccaaatccacggccaccatcgtcacctacggcatgggcatcacccagcataataaaggcacctccaacgtccggctgattgccgacctgctgctgatgcgcggcaatatcggcaagccaggagccgggatttgcccattacgcggccattcaaacgtgcagggaaaccgcaccgtcgggatcagcgaaaaacccaccgcggccttcctcgacagcctgcagcgggtgatggggatcgcgccgccgcggcatcatggtcacgatgcggtgaaggcgctggaggccatgatcgctggcgacgccaaagccctgatctgcctcgggggcaacttcgccgtggcgatgccggatcacgaacgcgctttcccggcgatgcgcaaccttgagctcagcgttcacgtcggcaccaagctcaaccgctcgcacctgctgacggcgaaagagacctttattctgccgtgtctgggccgcaccgagcttgacctgcaggccagcggccgacagtcgatcaccgtcgaggattcgatgtcgatggtacatgcctcctcaggcaagcttaagcccgcctcgccgacgctgcgctcggagccggcgattgtcgccggtctggcgaaggccacactgccggccagcaaagtcgactggctgtatctggtggaagattacgaccgcattcgcgatctgatcgaacagaccattccggggttcgaggattacaaccagcgcattcgtcaccccgggggctttcgcatgccgctgccgccgaccgagcgcatctggcctaccgccaccggcaaagccatgttctcggttttcaaaggcgtgcatgagaacgtggtggtggagggcgaggatgtgatgcgcttagtgaccctgcgcagccacgaccagtacaacaccaccatctacgctatggatgaccgttaccgcggcgtttttggccgtcgcgacgtgctgtttatgaacgagcaggatatggccgcccagggcctggagcatggcgatcgggtggatatccacacagcgctgccgggcagcgcattgacgctcagagatatcaccgtggtggcctacggcatcgcgcccggcaccgtcggcgcctattatccggaagccaacgtgctggtgcccttgaactatctggatgaagagagcggtacgccctcctataagtcagttcctgtccgcctgacgctgcgctcgaaagagatccgcccgctggctggcgtgcgttaa

SEQ ID NO: 222734 - DNA, 687 bp, Klebsiella pneumoniae
atgtcagcaatcacaccatcccggctgcgttttgccattaatctgggcaatgcggtactggcccatcctggagaaaacggcgagccgacaggcattacccccgagctcagccatcgactggcgcagcgctggggcgtcgtcgccgagttcgtcacctatcctgccgccggtaaagtggtggccgacgccggcggcgaacgctgggatatcgcctttctggccatcgacccggcgagggaggcgaccctgcgctttacttctccctatatcaccattcaggggaccgcgctggtgagagccggttcgccctgccagagcgtggccgatatggatcgcccggcaaccacgattaacgtcgggcaaaacgccgcctacgatctgtggctcacccgccatttgcagtacgccagcctgaatcgtctcccctcctcgcaggaggccatcgacgccttcctcgccggtgaaggggatatggtcgctggcatccgtcagccgctggaggcgacagcgcgccgccatccgggggtgcgggtcttagcggataattttaccgagatccagcaggccatctgcgtcgcccgggatgatgtggtccgctttaacgcggtgaatgacgcgttggacgaatggcgggcggacggtagcctggaggcgctgattgcccggcacctgggcaaggcgggctga

SEQ ID NO: 222735 - DNA, 147 bp, Klebsiella pneumoniae
atgagcacaacatcccacccgcatgacgaggagcgcgggaagcaccctgcgcgcgaggcgcctgacgaacatggcgaagtgccgcgtaaacgggacgacagcgaggatgacaaaaccgatccttaccatcctcacgatggccgttag

SEQ ID NO: 222736 - DNA, 504 bp, Klebsiella pneumoniae
atgactgagaatcaacaaccttgtcacatcgtcgacgagaatgaacaggccctccgctttgaatatcgcttcaggcgctatgggataattgttctcagcctcatcattcttaccgcattaagcggcctgtggtcctccggatatttcagtgaggcgcaccgggaaagccctgaaggtgaattacgcgtcgattaccagcgttatgccagactgatgagtgaaaccgaactgaatattcagatcaaacccacgcaggaaaatgacacgacgatcagtttcgccgccacgttattaacccgttaccaggttggcgatatccgcccgcagccggataagatgtacagtgccgacgggaaattacatctggtgtatcagcggacaaccagccgctcgccgcaatcggtatggttatctattacccccaaaacgataggcaatatttccctgcaggcggcagtcaacgatcgccctgccgtcagctggcaacagtttgtctatccgtag

SEQ ID NO: 222737 - DNA, 174 bp, Klebsiella pneumoniae
atggttaagcgccacaccatcgcgatcctcgccacagataaagcggttccgctgaaattaaccgccaggcagcaggcgctggtggacgcggtggcgaacagggtgccacctgcagagcacgaccccgtatcgccagtcgacaaaacgcgcacgaaaaccagcagggcgcgctga

SEQ ID NO: 222738 - DNA, 708 bp, Klebsiella pneumoniae
atgcaaaaatttacccctgacgcgaataaagcgaatgctattctgatccggattgtcttactcctcacgggtggtatcgccatcatcgccggcctgtgcctctctggcggcgatatgtggatgctcaccccgcgcgctgagcagtatcagcccgctaccggcgatctggtggatatcgtcatctatacgccgagtaaattcttcttcgccctgctctacgtgttgtttctgactctggtctggctgttggcggtgcgtaatattccctggcggccgatacagcatccgctattcccgctgatggtactgattgccgccggaatctttattttcctccatccggaggtcacccccggacgggatgccagtattcagtacgggaaacacaacgtttattacactgccattttctggatgaagacaaattctaaccaacgtatcactcagccctctaaatatgagatttttgttgaagcgaaagatccgcgctggcctgtcgacagggataatcttcatcgcgcctggcgctgtgaagtgcagcggcacagccagttttacaccctgtcattcaatgagggctggtttccgaacggcgatccgcaggtcatggctcgccagtgcgctccggtaaacgatcttaacgcactcagcgacacggcaatcatgattgcccgcccgatcgcccctctccctggtgaggtagcctaa

SEQ ID NO: 222739 - DNA, 696 bp, Klebsiella pneumoniae
atgccccaccaggttgcgacaaaaaatatgacgaataggatgatcattttatatttagcactgacaggaataacagggttagtctatggcttatgttcactgagtggtgaaacactgcattccccctttgaaatcagttcatatgatgccgttgctggtgatcttatcgaacatagtctgtacaccttctataaaccgtttgtcgctattctctgctcactcgttataccgttgatttggctgttatcaacgagaaaatcaacgcatcgtaaactgcgtcatccggttattcccgttatgctatctttgctgattttcatcttttttggattgttccccggcgttattcccggtggagagacaacccgttatcgttacttccttcatgataagcattatctcagtattgtctgggcaagcatggaaccagataattattttgaatccagatcccactatgaaacttacatagaatacagagacccatatggattccgaagaattgataacattaaaaatgcctatcactgtgagcaaacacgtgaaactgttttcctgacgctttacatttctcaacgctggttcccgaagggtaaacctgatgtcctcgaagcccagtgccaaaaaataactgacgctaataccctgaccgaagcggtactggcaaaagcgtattggtttccctttgtacgctaa

SEQ ID NO: 222740 - DNA, 1617 bp, Klebsiella pneumoniae
atgcgtatctctttgataagcgcagcggtttgctgcgcccttttttcggcttacggcgcgagtgcggccccactcactgtcgagcaacggctggctctgttggaggcccggctaaatcatgcggagcaggaggcgggagaagctaaacgccgggcgcagcaggcggagctgcgcaccagcgccgcggaacagcgcgcggcggcagcggaaaagcaggtgcaggcgctcagccaacagaccacggctcgcgaacaaaaacagcaggccaccaatcagcagctgagcgagcagctggcgaaacgcgccccggacgatggctttacctttaacgcctacgcccgttccggaatgttagtcaacagccacggcaaaggcgcccgcggcgggccaggtatctccccggccagttcgctcaacggcgatgcccacgtcggccgtctcggcaacgaaaaagataattacgctgagctgagctttggcaaaaagcttaccttcaacgatggctcatgggcgcgctttaagaccatgctcgccgacggggccaccaacccggatccgtgggttcaggataacgacagccaccatctgaacattcgtcagctgtacgtcgagatgggcgatttcgccgagttcaccgggccgttaaaacgcgcctcgatctgggctggcaagcgcttcgatcgggataacttcgatatccactttaccgatagcgacatcatgttcctcggtggcaccggcggcgggatcaatgatgtcgactggggaagcggcctgcgcggcgattattcggtgtatgcgcgtaacttcggcgaccttggcagcgataattacgcggataatgacatccagaatctgctgttcaccgccaaccatttttacggcaactggcagctgatgaccacggtgatgaccgcccagggcaacgatgacctgaaagataatacctcgaccaccgggagctatgccctgcgcagcgataacaccgccaaaaacggctactacgcgatgctggccctccacgacaaacagcagttctacggcctggcgccgggggtgtcggaaagcgccctgcagtacggcgtcgggctgggcgccgaagcgcgtcagccggggagcgatggcgacctgaccgagaacgcggcctccctgcgctttgcgtcgtacgggatcctgccgctggggaaaaactggcagctggcgccgtcggtgatcgcccagcacagcgaagaccgctatcgcgacggcgaccgctacgactgggcgacgtttaacctgcgggtatcgcaagggatctccgctcacttcgccctgctgtatgaggcctcgtggcagtatatggatctcaatccgaacgggcgcagctatcgctataatgacaacgtttatcagtatcaggcggtgcgcggtgatttctacaagctgaccttcgcccccacctttaaagtgggcgatgtgtttgatatcaaagcgcggccggagatacgtttctttgtcacgtggatgaactgggataaagacctggatcgttatgcgatcaacgatgatttcggcagcaaaggctttaccgctggcggaacatggaacttcggcgtgcagacggagatttggttctga

SEQ ID NO: 222741 - DNA, 933 bp, Klebsiella pneumoniae
atgcagaaaacaacactcttgctggccgtcgcgttggcatttagcgcctcgtcgtgggcacaggacgtcaagatcaatggcaccggggtaagcctggaggccaacaaaacgccgattcacacagcgaaaaacccgaaggccattgccctgttgccgaaagatctgcatctggcggtgccggggaaattcaccgtcgcggtggcggccctgaactcaccgccgctgacggtcttcgccgatgacaacaaaaccctgctcggcagcgaggcggatatcgcccggctggtggcggagagtctcgggctggaggtgaacgtagttcccacctcctgggaagactggccgctgggagtcacctccggcaaatatgatgccgcgatcagcaatattaccgtcaccaaagagcgaaaagaaaagttcgatttcgccacctaccgcaaagattcgctgggcttctacgtcaaaagcaccagtccgctgaacaaaattgacaaggcggaggacatcgccgggctgaagattatcgtcggctccggtactaaccaggaggcgatcctgctggcgtggaacgcggagaacgtcaagaaggggctgaagccgtttaccccggtttacaccaaggatgatgccgcccagacgctggcgctgcagaccgggcgagccgacgcctttttcggccctaacgtaattggcgcatggaaggcggcgctgaccggcaaaaccaaactggtgggcagcgtcgatggcggctggccgaaagcggcgcatatcgcggtaacgctgaaaaaagacagcgggctggtgaatgccgtccaggcggcgctgaacggcgctatcgccagcggggactacgccaaagtgcttaaccgctggggcgaaggggtggaaagcataccgcaatcggaaatcaacccgcccgggctgggcgactga

SEQ ID NO: 222742 - DNA, 750 bp, Klebsiella pneumoniae
gtgaacggtttcttttcgtccgtcgcaggcgccacattgcgctggctcgatctcccgggagaggggcttccgctggtgtttatccacggcctcggctgcgcgtcctcttacgactacccccgcgtcgccagcgaccccgcgctcaacgggcggcgcaaaatacttatcgacctcccgggcttcggctacagcgataaaccgcacgactttagttacaacatacataagcaagcgcaagctgtggagcaggtcctcaaccacctgcgcctgcagcgcttcgcgctgtatgggcatagcatgggtggaagcatcgccatcgaagcggcagggctgctggcggagcgagtgacgacgctgctggtgtctgaacccaacctgttcgccggaggcggtgagtacagtagacgcattgcggcgcaggcagagggggcctttatcgctgaaggttacgccaggatgctggcggaagagcgctcgccgtgggccggctgtttgcaaaacagcgccccctgggccgtctggcgagccgccagcagcctgataaacggcagcgacacgccctggtttacccagctctgccagctgcgctgtcagaagatgctgatcgtcggcgagcagtcgctcccttatgcggatatcgaacgggtagaggcgcacgggatcccagtcgggattgtgccccacgcggggcactcgatggcgtgggaaaacccggaagggctggcgcaactcatcgccagccacggctaa

SEQ ID NO: 222743 - DNA, 252 bp, Klebsiella pneumoniae
gtgaaaatttttgcttttattctgctggctgtcggcaccgtggcgctgagctatggtaacgcgccggcaaaacgtattcaggactgtgagaacgcgggagtggggcaggccgtctgcgccgccgccgaatgggataatgagaaagtgaatgttctgcctcattataaccctgagctgaacaaggttattatcgcaggccattcagcccgtagcgtttatgactctgataatggcgccagcctccgcacgtaa

SEQ ID NO: 222744 - DNA, 285 bp, Klebsiella pneumoniae
atgaagaagttagctttactctccgccgcgttgacgctgggactatcgtcatgggctttcgctgccgacaacccgccgccgccgccagaaaaaggcgcgcaccatcagggtaaattgccggcgaaaaagggccaacacgacggtaagcaagtgcaacacaacggcaagcagccgcagcatgatggcaagcagccgcaacgagacggcaaacaaccgcagcatggtggtaagcagccgccaaaaggcggcgagcacagcgggaaaccactgccgccaaaagcgtaa

SEQ ID NO: 222745 - DNA, 1005 bp, Klebsiella pneumoniae
atgaacaaaacgtataggtcgcagcaggtgcttaacctgccggcgggatattttggcatggtgcttggcaccatcgggatgggctttgcctggcgttacgccagcaccctctggccggtcagccgcagtattggtgatgggctggtgacgctggcgatagcgatatgggtcctgctcagtatggcgtttatcagccgggcgatccgctttccggcgagtgtgctgcaggagatgcgacatccggtcagcagcagcttcgtcagcctgtttcccgccaccacgttgctggtatcgattggtctggcgccctggtgccgaccgctggccatcgggctgtttgtgccgggcgtggcgctgcagctggcctatgccgcctggcaaagcggcggcctgtggcggggaaaccatcctcgcgaggccactacgccggggctgtatctgcccacggtggcgaacaattttatcagcgcgatggcctgcggcgcgctggggtttaccgacgccggactggtgttccttggcgccggggtcttctcctggctgagcctcgagccggctatcctccatcgtctgcgcagcgcaggcgaactgccgaccgcgctgcgcacgtcgctggggatccagctggcgcctgcgctggtggcctgcagcgcctggctcagcgttaacggcggtgaggccgataccttcgctaagctgctgttcggctacggtctgttgcagctgctgtttatgctgcgtctgatgccctggtatcttcgccagccgttcaatgcttctttctggagcttctcgttcggtatctccgccctggccaccaccggcctgcatctgggccaggcgaaggcggacggcttttttcatcatctggcgctgccgctctttatttttagcaatctggtcatcggcctgctgctgctgcgcacagggctgctgttggtcagcgggaaactgttgctacaggtcgaccgggaaacactcctgaataagaaggaaggatcatga

SEQ ID NO: 222746 - DNA, 576 bp, Klebsiella pneumoniae
gtgcggcacctgtttgccggtgagaatctgggtgagctgcttggcgccaccggaggggtatttggtggggatcacgcgcagcgaaatgccatgggcgtcgcagagtaccgcccgcagcatggagatggcctgcggcttattgtcttcaatgccgatcagcacctcgtcaggctgcagaatgtgggcgaggatgcggatcccttcgacaatctgcgccgcgcagtcctgcatcaggcggtcgtccgccgtgatatagggttcgcactcggcggcgttaatgatcagcgttttaattttatcgccgccgccgcgcagtttactgccggtggggaagccggcgccgccgaggccggcaacgccaaactggtggatgcgctcaatcagcgcttcacgtgtgcgggtctggtagtcgctccagccgtcgcgttcgatccagcggtcttcgccgtcggcgtcaatgatcacgctcatctccgccagcgcggatggatgggcggtggtgtgcggggcgatagcggcaacggtgccggaggtgggggcgtgaaccggcagcattcttccccaaccgcgggttag

SEQ ID NO: 222747 - DNA, 354 bp, Klebsiella pneumoniae
atgccgctcggcgcgggccgctttctcacgctccaggcgcgcctgtcgggcctcgaatcgcgccttggcttccgcagcgcgctgctcttccagacgaatcgccgcgatctcggctttctcctggcggaagtactgcaccagcggaatattgcttgggcatacccacgcgcacgcgccgcattcgatgcagtccgccagattgtgagcggtggctttatcgtgctgctggcctttgctgaaccagtacagctgctgcggcagcagatcggccgggcaggcgtcggcgcaggcgctacagcgaatgcagcctttttcttcctgcggctcgcccatttcgctggcggagggcgctaa

SEQ ID NO: 222748 - DNA, 1419 bp, Klebsiella pneumoniae
atgagcaaagtaaaccagcaggacatcgataaactgatcgaactggtgggcgggcgcggcaatatcgccaccgtcagccactgtattacccgtttgcgctttgtgctgaacgacccggccatcgccagaccaaaagagattgagcagctgcgcatggtgaagggatgcttcactaacgccggccagttccaggtggtcatcggcaccgaggtgggcgattactacaaagccctgctggcgaccaccggccagacctccgccgataaagagcaggtcaaacaggccgcgcggcaaaatatgaagtggcatgaacagctgatttcgcacttcgccgagatcttcttcccactgctgccggcgctgatcagcggcggtctgatcctcggtttccgcaacgtcatcggcgacttacccatgagcaacggccagacgctggcccagatgcacccgtcgctgaaaaccatctatgacttcctgtggctgattggcgaggcgatcttcttctatctgccggtggggatctgctggtcggcggtgaagaagatgggcggtacgccgatcctcgggatcgtccttggcgtcaccctggtgtccccgcagctgatgaatgcctatctcctcggccagcaggtgccggaggtgtggaacttcggcctgtttaccattgctaaagtcggctaccaggcgcaggtgatcccggccctgctggctggcctggccttaggctttatcgagacgcgcctcaagcgcatcgtgcctgactacctctacctggtcattgtcccggtctgctcgctgatcctggcggtattcctcgcgcacgccattatcggtccgttcggccgcctgatcggcgacggcgtggccttcgcggtgcgccatctgttaaccggcagcttcgcgccgatcggcgccgcgctgtttggcttcctctacgcgccgctggtgataaccggcgtccaccagaccaccctcgccatcgatatgcagatgatccagagcatgggcggcaccccggtgtggccgctgattgcgctgtccaacattgcccaggcatcggcggtggtcggcatcatcatcgccagccgcaagcagaatgaacgtgaaatctcggtgccggcggcgatctccgcctatctcggggtcaccgagccggcaatgtacggtatcaacctgaagtaccgcttcccgatgctgtgcgcgatgatcggctccggcctcgccggcctgctgtgcggcctgaacggcgtgctggcgaacggcatcggcgtcggcggcctgccggggatcctctccatccagcctacctactggcaggtgtacgccatggcgatggccatcgcggtggtggtgccgattatcctcaccaccgtggtgtatcagcgcaagtaccgtcagggcaccttgcagattgtctaa

SEQ ID NO: 222749 - DNA, 1266 bp, Klebsiella pneumoniae
atggctctgacagatatcaaagtgcgttctgcaaaaccgcaggaaaaggaatacacccttgtcgatggggatggcatgtttttgcttattcaccctaacggctcaaaatactggcggttccgctttcggtttggcggtaaacagcaccttatggcttttggggtttatcctgaaacatcgttagccgatgcgaggcagaagagggaagaggcaagaaagctggttgctgctggtattgatcctcgcgagcacaagcgggctgtaaaagaagagcaggcgaaagaggcggttaccttcgagtccgttgccagagagtggcacgctactaataagaaatggtcagaggatcacagtcgacgggtactgaagagcctggaagataatctgtttcccgctattggcaagcgtaacattgaagtgctgaagactcgcgacctgcttgcacccattaaaatcgtagaggctacaggccgctttgaagtcgcttctcgtcttcagcagcgaaccacagcaatcatgcgctatgcagtgcaaagtggcttgattgattacaacccggcccaagagatggctggagcagttgcttccagtaaccgtgtccatcgccctgcacttgagctgaaacgtctacctgaactactccaccgaattgacggttatacgggacgacctctgacccgcttggctgttgaactcaccttgttaatcttcattcgttccagtgaactgcgctttgcgcgttggtctgaaatcgattttgaaacggcaatgtggacgataccgtctgaacgagatgctattgaaggagtaaaacattcacagcgtggctcgaaaatgcgtaccccccatttagtgcctttatcacggcaagcgttagcaatccttaaagaggtttacaagattagtggcggtcgtgattttgttttcgttggcgatcataaccctcgtaagccgatgagtgaaaacacgataaacaaggcgctgcgggtgatggggtacgatacaaaggttgaggtttgcgggcatggtttcaggactatggcatgtagttcattgattgagtcaggattgtggtcgagggatgcagtggagcggcagatgagccatcaggagcgtaactccgtgcgagcggcttatatccataaggcggaacatttggatgagagaagattgatgttgcagtggtgggcggattacttagatgctttatacgataagacaactaccccctttgattttgcaaaacgtcacaacccaatgaaataa

SEQ ID NO: 222750 - DNA, 681 bp, Klebsiella pneumoniae
ttggggggttctatggctggctgggcgctcgatgtgtgcaaaaaaggatttaaatccgcatgtgtgattttagtcgccatttttatggtatcagtttttctatttttaatgacttattttttccaaaatcctcttaaagagtattttagcgcagggaaacattttttatttagtgataatttaacttcggcttcattgaaggataaaaaattgctaatgaatttaatgtctaaaggttatatatttagcagcaatgatttgcttgaaagggtcggtagttattacgctaatacgattactatattgattttcttttgtacttttgcgtgcgtatttgcagtgttttacataaaaatgaataccgaggataggtttgatcagaccattaaagataaggttggttattttttcacgaatgaccgaagcttttcagaggaaatgactcggttaagtaattcggctgcatcggatgcggttagttctgaattggaaaggatgatgttagatgatgaaattgagcaagttaaacaagagatgagcgatcagattgcatcgttatctgctcaaattcaaagtttacaagaggcagtgtcattattatcgccggaaagcgatcctgatttagagggcgatgctgaggaaattgctgttgctcatattcagtcgggaaacagggggtaa

SEQ ID NO: 222751 - DNA, 543 bp, Klebsiella pneumoniae
atggctattctaagaagaaaaactgctaaccctagtgatagtaaatctattgcggcagcaaacttaactaatccagaatcggtgattcgattagcaagtagtatgggaattattacagtcccttttgatcttgataattttatcccgaaattggggattgcactgaatagagttattatggataacgatatttcaggaaaactagaaaagaataaaagtggtgtttgggaaataagtgttaatgctcttcatcacccgaagagacagcgttttacattggcacatgaattaggtcattattttttacatcgcaatcaaagtaatttattcactgacaaatctttgtatcgtggaaaagatatgaattcaatggagtatgaggctaataattttgctggagccattttaatgccaaaagaggaacttatttcgttcatgaaagaatcaaatgacatcgataatattgctgatcattttaatgtttctgctcttgctgctaaaattcgagtggaaatgataaaaagggactattatgcctactaa

SEQ ID NO: 222752 - DNA, 1071 bp, Klebsiella pneumoniae
atgcctactaattactatcctatattaaaaactacaatagcagaaatgcgggcgttaaaaaatttagacgctatcacatgggagcgttttactccaattttagaattaactaaatctagaaaaagtaaaaataatcaagaaagttgtgtatatagaaaaatagaagaaattaaagaacttgttggaacaaatgaattcatattggatttaacaagcatcgagtcgttatcgaatgaacagattgaatcatttcaatcggatataaacggttttgaaaattggtgtaactttatttcagttgtgcgttcaaacaatatgaatgtagttcctgtccttatagcctatcctgatagctcgttagacgatttacttcttgaatcaaggcaattatgtaccacggtaaataaaatagctgtaagaattccagtatgtgaacccgatctggatgatttatttctcactttacgaacttttattcgtctaaattatgcagacattggatgtttaatttttgatggcgggtatatttttgatgagataatcgacatctctcctctattgaacattatttatgagttctattctgagctgcctgaagattttaatggtagaatcgtatttgcatcctcctcgtttccagcctctaccttagaaaaggttacaggggataaatttaataatagttttcctcttcaaacatttccacttttcgaaaaaattgtaaaaggactaaaagcactaggtattgaaaaaacaatatttttcggtgattatgcctgtatccaccctaatagaaatgaaagtaaagcctataactggatccctcgaattgattatccgactgcaaatatgatttatttttctaggaatcgtcgtgaggaaggtggttatatagagtgtgcaaaaaggattgctttactgtctcattttaaaaccgataccctaaaatgttgggggatgactgaaattaagaagacgagtgccggagatccaggggggaaaagcccgtcctattggatatcagttcgttcaaatatacatatgtctcgcatggcattaattaatggatag

SEQ ID NO: 222753 - DNA, 606 bp, Klebsiella pneumoniae
atggatgaattagattttaaaattaaaataatagaattctttggtaatacttcagataaaataataaacttcgaatttccttttgattataacaaaagaagatgtgacgttttaatattagaaaataatgctactacagccattgaaataaaaagtgacattgataaacttacaagtcttaaggaacagcttttttcctattatcaggcatttaatacggtttatgtagcctgcggtgaaaaacacattcatgaaataaaatcaatcaaaggtagatttggaattatatatattgataataacgaaacaaaaatcataagaaaaccacgacataggaaaatacttaacagtcgtatgattttagatatgttggatagggattttttagcgaaggaaacaaaaattaaaatatcaaacaagcaacagctaatagaaaaaatattaactgcatatactccatcagaaatacaaaatatttactatgctgttttgaaaagaaaaacctccccgatctatgatatatttttaaaagaaaaaggaggagtcattacccgagaggatatttccctcctgactttaaaaagtacaaagctatccattaattaa

SEQ ID NO: 222754 - DNA, 2871 bp, Klebsiella pneumoniae
atgtcttcgcctaataaaaatcaacaagttgctatacgtcaccataaagggccgcaactaatcattgcgggccctgggtcaggtaaaacatatacgctcgttgagcgaattataaatctgataaatgctcatagtgctactccagaacagttgctcgtcgtaacattcactgaaaaagcagcacaagagcttaaaactaggatttccaatcgaattttagagctgggatctgatttcaatatcaatgagatgtatctgggcacatttcactcaatatgcttaaaaattctcgaagaatatagagagtatactcgtctcaaacgttcttttgtgttgatggatcagtttgatcaacagtactttttgtatcagaatctaagagagttcaaagatattaatggtatcgagcacatccagggtgagcacaagctccccgcatgggccaagtctgaaaatttaatgagatggcttaacaaagcatccgaagaaattctgaatgttgatgctctttgcttttcgcccgatatcgcgattagcgcccttggtgagagttatcgaatatatcaagtgctactggcaaagcacaatgccatggacttttcttgtatccagttagaaacctattatcttcttcgtgataattgctctgtgcttgtaggtcttcagggtaagctagaatacctgatggtagatgaataccaggatacaaacaccattcaagagaaattgcttcacttactcatgggggataagaaaaatctctgtgtggttggggatgatgatcaggctttgtaccgttttcgcggtgccagtgtacgcaacatattggaatttcctcagcagtttgcacctggtcagtgccagcaagttaagttgtccattaactaccggtctcatccaggaatcattgggttttacgattcctatatgggtgataagtcgtggctacgggagggtgtaaactaccgctatcccaaaaatatagtggctcgagctggggagtttccagagggaccgtcggttataagcgcaatcactcctgaaggtcatgattggcacgatgacgtatatcagcttctcatgcatttgagaggcaatggcaagctcaccgattggaaccaggtcgcttttttattccgctctgttaagaacgacaaagtaagagccttagcacagtctcttgaggacaaaggcattccggtttattcacctcgggcgaacttgtttttcgaacgagaagagatacgcctgatgataggcgtattgcatatggtttttccaatggtgttgcctgaccgaaagaagcgctcggaagagggtaagtcacactcaatctggagctattacgaaaagcattgcatagcaccgttgattggtgaaatcggaaaaccagaacaggcagatttgttgttgtggtgtaagaaaaaatcgtatgagcacatcaatctgattaaaaacgcggatagttcattcttaggtatcttttacgagatattgcagtttccgttattctctaaatatttagagcaaaaaaatggtaatgagcgtgctcagcgaaacctagctcagttcagtcgaatgcttggcaagtttgagtacttgcatcgggtaagtgtactgaaccccaaatatcttgaacgaaatcttcgggacttgttcgataacttcctgagatttttacaggaaggagggatcgatgagtatgaggatatgtcagaatatgcgccttctggttgcgtttctttcttaaccatacaccaatctaaaggattggagtttccgatagtatttgtgggttctcttgaggcaacaccacgtaaacagcacaccgacctggatgagatcatagagactgagtacacaggtaagaaaccgtttgagcctatggaagataccaagtatttcgacttttggcgactttactataccgccttttcaaggcctcaaaacttacttgtactaacgggccaggaaaaatcagggcatggaaaaactccgtcacatcattttaccgattacacatcaaaattgacgtactggagagatgcaaagccgcaactcgcagcgttagattttgagtcagtgaaagatgtgaacatcaaaaaagaatatgccttcacctcacatataacgttatttgaaacctgtgccgagcaataccgcttattcaaagaacttgaattccagccagttaaagcaagccctatgttgttcggtaccctaattcatgaaaccctagaagacatacataagatggctattcgaggggaagaaaatcaaattaccgaaaagaatatcaatgtatggctgatggataactatcaaaacttagccaatcgagagcgtatgtatctaggggaatcgactttaggagctgcactcaagcacgtcatgcgttatgtcgatcgcaaaggtggagattggtccgatatccaagaaacagaagtcgatatttctctggtcaaaagccgttacgtgctcacagggagtgttgatttgatcaaggggtctgatggaacggttgagttggtggattttaaatcagagcgcaaaccagatatggaacgtgacaaagagagaattcttcattacaaaagacagctggagatttatgctcatttggttgaagaacgatacggttatcaggtgagcaaaatgcatttatattttacaggtgaaactaatggattacctaacatatctttcaataagaccagtggcactatcgacaaaacggtagctgagtttgatagaattgtggaccgaattgagaataaagattttttgctgaaatcgaggccagataagacgtgtgttgactgtagtgcgcgtgcgtactgtgacagaaagaattggaatttctgcgcttaa

SEQ ID NO: 222755 - DNA, 570 bp, Klebsiella pneumoniae
atgaaagatgagctttttctgcgcggcgagaaggtgccgatgaccaaagaggcggttcgcgcgctggcgctggccaaacttgagctacaccgggcaagccacttgattgatatcggcgccggtaccggcagcgtgtcgattgaggcggcgctgcagtatccctctttgcaggtaaccgccatcgaacgcaaccccgcggctctccggctgctggacgaaaaccgccagcatttcgcctgcggcaatattgagatcctgcccggcgaagcgccgatggtgatgaccgaacgcgccgacgccatttttatgggcggcagcggcggccgcctcgacgagctcattgactggtcgtggcagcagctctatcccggtggccgtctggtgatgacttttatcctgcaggagaacctgaatgcggctctcgactatctgcagcagcgggggattacacagattgattgcctgcagctgaacgtctcatcgctgaccacgctgggcagcggccactacttcaaaccccataatcccgtttttgtcatcgcctgtcagaaggaaggaaaccatggctga

SEQ ID NO: 222756 - DNA, 606 bp, Klebsiella pneumoniae
atgttaacggtggtcggcatggggccgtcaggcctgcatttgatgacgccggcggcgcaagatgcggtcgccagcgcggatgcgctggtaggcggtaagcggcatttagagcagttccccggatttcgcggcgaacggtttgcgctgggcgccaatattgccgaactgctggtctggctcggcgaacgcgcagcgcagaaggtggtggtgctggcctcaggcgacccgctcttttacggcatcggcacgcggctgatcgcccactttggcatcgagcgcgtgcgcattatccccggcatcagcgcggtgcagtatctctgcgcgaaggccggtatcgatatgaacgatatctggctgaccagcagccacggacgggacgtctgttttgatgagctggcgcgccagcgcaaggtggcgatggtgaccgacgggcgctgcgggccgcgggaaatcgccgcccagctggcggcgcggggtaaagggtatcgctggatggtgatcggcgaaaatctggcgatggataacgagcggatccactggctaccggtcagtgaggtcgatgccgaatatgagatgaacgcggtggtgatcctcgatgaaagatga

SEQ ID NO: 222757 - DNA, 912 bp, Klebsiella pneumoniae
atgatttctgcgagcacactgaactcagaactcattaataaaatcgcacaggattttgcgcaggccaccagtctggcggttgtggttgtcaatattcacggtgatgaaatatctgaactgtttaacttcacccctttctgccagctgatgcgccagcacccccagcacagctcccgctgtcgcatgagcgaccgctgcggcggcctcgaggcctcgaaaaccgatgcgctctgtatctaccgctgtcacgccgggttaaccgatttttccattccgctggttatcgccgggcaccttgtgggctttgtgctctgcggccaggttcgtctgagcaacgatatcgaactggtggacatccttaacgtggatgaccgctggcaggacgatccggcgctggttcaggcgttccgcgatgtgcctgagatggactattcgcgggttatcgcctctgcggatctgctcaagctgatcgtcgagaattgcctgaaaaaacagcttaacttcgtggttatcaaggataacccgccgcagaacgacccggcgcagagcagccgggcggcctcgccgcacgatggcaaaatgaagaaggcgctgcgctatatcgacgcgcatctctctgatgaactgcgtctggaggaggtggcggcgcacgtctatctcagcccgtactacttcagcaaattgtttaaaaaatatcaggggatcggctttaacgcctgggtcaatcagcagcggatggcgagcgcaaaagagctgctttgccacagcgactggagcattgccagcattgcgcggaatttaggtttttcgcaaaccagctatttttgtaaagtgtttcgccagacctatcaggtaacgccgcaggcgtttcgtcagcaaattaatgccggatcacaaactgagtcattttaa

SEQ ID NO: 222758 - DNA, 801 bp, Klebsiella pneumoniae
atgaatgattcgttaaaagcgcaatgtaccgccgagtttttgggcaccgggctatttttgtttttcggcatcggctgcctgagcgcgttaaaggtggcgggagccagcctcggactgtgggagatatgcattatctgggggctggggatctcgcttgccgtgtatctgacttcggggatctccggcggccatctcaacccggcggtgaccgtcgcgttatggctgtttgcctgctttcccggacgcaaagttttcccctatatcgtttcacaggttgccggcgcctttggcggcgcggtgctggcctatgtgctgtacagcacgatgtttaccgagtttgaatccgcccaccatatcgcgcgcggcagcgtagagagcctgcagctggcgagtattttcagcacctacccggcggcatcgctgagcatctggcatgcggcgctggttgaagtggtgatcacctccatgctgatggggatgattatggcgctgaccgacgacggcaacggcgtaccgaaagggccgctggccccgctgctgatcggcctgctggtggcggtcattggcgcttcaaccgggccgctgaccggctttgcaatgaatccggcgcgtgattttgggccgaagctgtttacgtggatggcgggttggggcgatatcgcgatgaccggcggaagggatataccgtactttattgtgccgattattgcgccgctgatcggcgcctgtctcggcgcggccatctatcgttatctgattggtaataatctaccgtgtaatacctgtaaattagaggattaa

SEQ ID NO: 222759 - DNA, 1665 bp, Klebsiella pneumoniae
atgagatcgaaaagatttgaagcactggcgaaacgccctgtgaatcaggacggcttcgttaaggagtggatcgaagaaggctttatcgcgatggaaagcccgaacgatccgaaaccgtcgataaaaatcgttaacggcgcggtgaccgagctggacgggaaaccggtgagcgattttgacctgatcgaccactttatcgcccgctacggtatcaacctgaatcgcgccgaagaagtgatggcgatggattcggtcaaactggccaatatgctctgcgatccgaacgtcaagcgtagcgaaatcgtcccgctgaccaccgcgatgacgccggcaaaaattgtcgaagtggtttcgcatatgaacgtcgttgagatgatgatggcgatgcagaaaatgcgcgcccgccgcaccccgtcccagcaggcgcacgtcaccaacgtcaaagataacccggtacagatcgccgccgacgccgccgaaggcgcatggcgcggatttgacgaacaggaaaccacggttgcagtcgcgcgctatgcgccgtttaacgccatcgcgctgctggtcggctcgcaggtaggccgcccgggcgtactgactcagtgctcgctggaagaagccaccgagctcaagctcggcatgctgggccacacctgctacgccgaaaccatctccgtctacggtaccgaaccggtctttaccgacggtgacgacaccccgtggtcgaagggcttcctcgcctcctcctacgcctctcgcggcctgaaaatgcgcttcacctccggctccggctccgaagtgcagatgggctacgccgaaggcaaatccatgctttatctggaagcgcgctgcatctacatcaccaaagccgccggcgttcaggggctgcaaaacggttccgttagctgcatcggcgtgccgtctgcggtgccttccggcattcgcgcggtgctggcggaaaatctgatctgttcgtcgctggatctggagtgcgcctccagtaacgaccagaccttcacccactccgatatgcgtcgtaccgcgcgcctgctgatgcagttcctgccgggaaccgacttcatctcctccggttattccgcggtgccgaactacgacaacatgttcgccggttccaacgaagatgccgaagactttgacgactacaacgttatccagcgcgacctgaaggtcgacggcggtctgcgtccggttcgcgaagaagatgttatcgccatccgtaacaaagccgcccgcgcgctgcaggccgtgtttgccggaatggggctgccgccgattaccgatgaagaagtggaagccgcgacctacgcccacggttcgaaagatatgccggagcgcaatatcgtcgaggacatcaagttcgcccaggagatcatcaataaaaaccgcaacggcctggaggtagtgaaagccctggcgcagggcggcttcaccgacgtggcccaggacatgctcaacatccagaaagccaagctgaccggggactatctgcatacctccgcaatcatcgtcggcgacggacaggtgctatcagccgtcaacgacgttaacgattatgccggtccggcaacgggctatcgcctgcagggcgaacgctgggaagagattaaaaacatccctggcgctcttgatcccaacgagattgattaa

SEQ ID NO: 222760 - DNA, 675 bp, Klebsiella pneumoniae
atggaaattaatgaaaaattgctgcgcctgataattgaagaagtgcttagcgaaatgaagagcagcgataaaccggtctcgtttaatgcgccggcggcctccgctgcgccgcaggcaaccgcgcctgctggcgacggcttcctgacggaagtcggcgaagcgcgtcagggcactcagcaggacgaagtgattatcgccgtcggcccggctttcggcctggcgcagaccgtcaatatcgtcggcataccgcacaagagcattttgcgcgaagtgattgccggtattgaagaagaaggcattaaggcgcgcgtaattcgctgctttaaatcttccgacgtggccttcgtcgccgttgaaggcaaccgcctgagcggctccggcatctctatcggcatccagtcaaaaggcaccaccgttatccaccagcagggcctgccgccgctctctaacctggagctgttcccccaggcgccgctgctgaccctggaaacctaccgccagattggtaaaaacgccgcccgctatgcgaaacgcgaatcgccgcagccggtcccgacgctgaacgaccagatggcgcggccaaaataccaggcgaaatcggccattttgcacattaaagagaccaagtacgtggtgacgggcaaaaacccgcaggaactgcgcgtggcgctttga

SEQ ID NO: 222761 - DNA, 522 bp, Klebsiella pneumoniae
atgaataccgacgcaattgaatcgatggtgcgcgacgtattaagccgtatgaacagcctgcagggcgaagcgccagcggcggctccggcggctggcggcgcgccccgtagcgcaaaggtcagcgactacccgctggcgaataagcacccggaatgggtgaaaaccgccaccaataaaacgctggacgactttacgctggaaaacgtgctgagcaataaagtcaccgctcaggatatgcgtattaccccggaaacgctgcgcttacaggcttctatcgccagggacgcgggccgcgaccggttggcgatgaacttcgaacgcgccgccgaactgaccgcggtaccggacgatcgcattcttgaaatctacaacgccctccgcccctatcgctcgacgaaagaggagctgctgacgatcgccgacgatctcgaaagccgctaccaggcgaagatctgcgccgctttcgttcgcgaagcggcaacgctgtacgtcgagcgtaaaaaactcaagggcgacgattaa

SEQ ID NO: 222762 - DNA, 1833 bp, Klebsiella pneumoniae
atgcgatatatagctggcattgatatcggcaactcatcgacggaagtcgccctggcgaccctgaatgaggctggcgcgctgacgattacgcacagcgcgctggcggaaaccaccgggatcaaaggcacgttgcgtaacgtgttcggcattcaggaggccctcgcgctggtcgcaaagcgcgcggggatcagtgtcagcgatatttcgctcatccgcattaacgaagcgacgccggtgattggcgatgtggcgatggaaaccattaccgaaaccatcatcaccgaatcaaccatgatcggccataacccgaaaacgcccggcggcgcggggcttggcgtgggcatcaccattacgccgcaggagctgttaacccgcccggcggacgcgccctatatcctggtggtgtcgtcggcgtttgactttgccgatatcgccagcgtgattaacgcttccctgcgcgccggatatcagattaccggcgtcattttgcaacgtgacgatggcgtgctggtcagcaaccggctggaaaaaccgctgccgatcgttgacgaagtgctgtacatcgaccgcattccgctggggatgctggcggcaattgaggtcgccgtcccggggaaggtcatcgaaacgctctctaacccctacggcatcgccaccgtattccacctcaacgccgaggagacgaaaaacatcgtcccgatggcgcgagcgctgattggcaaccgttccgccgtggtggtcaaaacgccatccggtgacgtcaaagcgcgcgcgatacccgccggtaacattgagctgctggcccagggccggagcgtgcgcgtggatgtcgccgccggagccgaagccatcatgaaagcggtcgacggctgcggcaaactcgataacgtcaccggcgagtcggggaccaatatcggcggcatgctggaacacgtgcgccagaccatggccgagctgaccaacaagcccagcagcgagattttcattcaggatctgctggccgttgacacctcggttccggtgagcgtcaccggcggtctggccggggagttctcgctggagcaggccgtgggcatcgcctcgatggtgaaatctgaccgtttgcagatggcgatgattgcccgcgagatcgagcagaagctcaatatcgacgtgcagatcggcggtgcagaggccgaagccgccattctcggcgcgctgaccacccccggcaccacgcgtccgctggcgatcctcgacctcggcgcaggctccaccgatgcctccatcatcaaccccaaaggcgaaatcatcgccactcacctcgccggagctggcgatatggtgacgatgatcattgcccgcgagctggggctggaggatcgctacctggcggaagagatcaaaaaatatccactggcgaaagtcgaaagtctgttccatctgcgccacgaggacggcagcgtgcagttcttctccacgccgctgccccccgccgtattcgctcgcgtctgcgtggtgaaaccggacgaactggtgccgctacccggcgacttagcgctggaaaaagtgcgcgccattcgccgcagcgccaaagagcgcgtctttgtcaccaacgccctgcgcgcgctgcgccaggtcagcccgaccggcaacattcgcgatattccgttcgtggtgctggtgggcggctcgtccctcgattttgagatcccgcagctggtcaccgatgcgctggcgcactaccggctggtggccgggcgaggaaatattcgcggcagcgaaggcccaagaaacgcggtggccaccggtctgattctctcctggcataaggagtttgcgcatggacagtaa

SEQ ID NO: 222763 - DNA, 351 bp, Klebsiella pneumoniae
atggacagtaatcacaccgccccggctattgtgatcgccgccatcgacggctgcgacggcttgtggcgcgaagtgctgctgggtatcgaagaggaaggcattcctttcctgctccagcatcacccggccggggatgtcgtggacagcgcctggcaggcggcgcgcagctcgccgctgctggtcggcatcgcctgcgaccgccatacgctggtcgtgcactacaagaatttacccgcatcggcgccgctttttacgctgatgcatcatcaggacagtcaggcccaccgcaacaccggtaataacgcggcacggctggtcaaagggatccctttccgggatctgaatagctaa

SEQ ID NO: 222764 - DNA, 276 bp, Klebsiella pneumoniae
atgaataacgcactgggactggttgaaacaaaagggttagtaggcgccattgaagccgccgatgccatggtgaaatcggccaacgtgcagctggtcggctacgaaaaaattggctcgggtctggtgaccgtaatggttcgcggcgacgtcggcgcggtcaaagcggcggtggatgcgggcagcgcggcggcaagcgtggtgggtgaagtgaaatcctgccacgtgatcccgcgtccgcacagcgacgttgaggccattttaccgaaatcagcctga

SEQ ID NO: 222765 - DNA, 462 bp, Klebsiella pneumoniae
gtgaagcaatcactgggattacttgaagtttgtggtctggcactggctattagctgcgccgatatcatggcgaaatccgcttctatcacgctggtcgccctcgaaaagaccaatggttcaggctggatggtcattaaaattaccggtgatgtggcctcagtacaggcggccatcaccaccggtgcacagtttgccgaacagcgaaacggtctggtggctcataaagtcatcgccagacccggagaagggatcctgccagcagaggctcccccaccctccgtcatggaacctgagcctgaagagtcagatgcggctgatgtcgtttctgaagcgccagcagaagagcccctccagcaacaaggcgtggtgagctgcaacctgtgcctggatccaaaatgtccacgccagaagggcgagccgcgtaccctttgcattcatcccggcaagcgaggtgaagcgtaa

SEQ ID NO: 222766 - DNA, 633 bp, Klebsiella pneumoniae
atggataaacagcttctcgaatcaacggtcagtaaagtcctcgacgagatgcgtctgcggcccattccgctgggggtttcaaatcgtcatatccacctgtcggcgtcggattatgaacacctgtttcccggtcatcccatcagcgagaaaaaagcgctgctgcagccgggacagtacgctgcggagcaaaccgtcaccctggtagggccgaaggggcagcttaaaaatgtgcgcctgctcggcccgctgcgctcggtaagccaggtggaaatctcgcgtaccgatgccagaaccctgggaattgcggcgccgctgagaatgtccggcaatctgaaggggacgccgggcattcgcctggtcagcccttttggcgaactggagctaccttccggggttatcgtcgcgcagcggcatatccatatgtcgccgctcgatgcgcttatcctgcgggtttcccatggcgacagggtctccgtggccattgaaggcgacgagcgcgggcttatcttcaacaacgtggcgattcgcgtttcaccagacatgcgcctcgaaatgcacattgataccgatgaagccaacgccgccggtgcagataacccgcaggcctttgcccggctggtaggcccgcgatga

SEQ ID NO: 222767 - DNA, 492 bp, Klebsiella pneumoniae
atgaacggcgcagttttgcagcgcattgtggaggaaatcgtctcccggctgcagcgtcgcgcccaaagcacggcgacgctgagcgttgcgcaactgcgcaatgccgactgccccgggctgttcagccagcacgcctcgctgcgcatcctgctcgttgacctgccgctgctggctcagcttgcggatgcggaaaccgacgatgccgcggcgcggaaaattcacgaggcgctggctttcggcatccgcgtgcagctcaccctgcacagccagctgctgccggttatcccgctcaaaaaactggcgcgcctgccggtgatattcaccgacgagcgcggacggccgctgatcctgcatgcaggttcagtgctgagctatcgcgacgtcgcgcagctgggccaggggcgtctggttatccaccgcaaatgcatcgtgaccgcgctggcgcgcgaagcggcacaggcgcggcatattcaattcattaagcaggagtaa

SEQ ID NO: 222768 - DNA, 276 bp, Klebsiella pneumoniae
atgcatctggcacgagtcacgggcgcggttgtctccacgcaaaaatcgccttccctgatcggcaaaaagctgctgctggtgcggcgggtcagcgccgatggcgaactccccgcctcccccacctccggcgatgaagtcgccgtcgattccgtcggcgcggggatcggcgagctggtcttgctcagcggcggctccagcgccaggcacgttttttccgggccaaacgaggccatcgacctcgccgttgtcggcattgtcgatacgctttcacgttaa

SEQ ID NO: 222769 - DNA, 1011 bp, Klebsiella pneumoniae
atggcgatttatacccgaacgggcgacgctggcaccacctcactctttaccggccagcgggtgagcaaaacgcacccgcgggttgaagcctacggcacgctggacgaactgaacgccgcgctgagcctgtgcgcctgcgccgccgcggatgaaaatcaccgcgccctgctcgaagccatccagcagcaaatattctggtttagcgcagagctggccagcgacagcgagcagccgtcgcccaaacagcgctacatcagcagcgaagagatttccgccctggaagccgccatcgatcgggccatggcccgcgtcgaaccgctgcatagctttattttacccggccgctgcgaagccgcgagccgcctgcattttgcccgcacgctggcccgccgcgccgaacgccgtctggttgagctggcggcggaagtcaacgtacgccaggtgctgatgcgctacatcaaccgcttatcagattgcctgtacgccctggcccgcgcggaagatagcgatgcgcaccagaacaatattattcgtgaggttagcaggcgctatctggccgccagccagccgagccacagcaaggagacgacgcccgtggcactctcattccacgatctgcaccagctcacccgcgccgcggttgagcgcgcgcagcagcttcaggtgccggtggtgattagcatcgttgatgcccacggtacggaaaccgtcacctggcggatgccggacgccctgctggtcagcagcgaactggcgccgaaaaaggcctggaccgcggtggcgatgaaaacggcgacccatgagctgagcgatgtcgttcagccgggcgcggcgctttacggtctggaaacgcatttacagggaaaagtggtcacctttggcggcggttacgccctgtggcgcgacggcttattaattgggggtcttggcatcagcggcggcagcgttgagcaggacatggacatagcacagaccgccatcgcggctattaacgtgggaacacatcaatga

SEQ ID NO: 222770 - DNA, 1395 bp, Klebsiella pneumoniae
atgaatacttctgaactcgaaaccctgattcgcaccattcttagcgagcaattaaccacgccagcgcaaacgccggtccagcctcagggcaaagggatttttcagtccgtcagcgaggctatcgacgccgcgcaccaggcgttcttacgttatcagcagtgcccgctaaaaacccgcagcgccattatcagcgcaatacgtcaggagctgacgccgctgctggcgagcctggcggaagagagcgccaatgaaacggggatgggcaacaaagaagataaattcctgaaaaacaaggccgcgctcgacaacacgccgggcgtagaagatctcaccaccaccgcgttgaccggcgacggcggcatggtgctctttgaatactcaccatttggcgttatcgggtccgtcgcgccaagcaccaacccgacggaaaccatcatcaacaacagcatcagcatgctggcggcaggcaacagcgtctactttagtccgcatccgggggcgaaaaaggtctctctcaagctcatcagcctgatagaggagattgccttccgctgctgcggcatccgcaatctggtggtgactgtagctgaacccacctttgaagcgacccagcagatgatggcccacccgcgaatcgcagtactggccattaccggtggccccggcatcgtggccatgggcatgaagagcggtaagaaggtgattggcgctggcgcgggcaacccgccctgtatcgttgatgagacagcggatctggtgaaagcggcggaagatatcatcaacggcgcctccttcgattacaacctgccctgcattgccgagaagagcctgattgtcgtggagagcgtggctgaacggctggtgcaacaaatgcaatccttcggcgcgctgctgttaagccccgccgataccgacaaacttcgcgccacctgtctgcctgaaggccaggcgaataaaaagctggtcggcaaaagcccatcggccatgctggaagccgccgggatcgccgttccggcaaaagcgccgcgtctactgattgccatcgtcaatgccgacgacccgtgggtcaccagcgaacagctgatgccgatgctgccggtggtgaaagttagcgatttcgatagcgcgctggcgctggcgctgaaggttgaagagggtctgcatcataccgccattatgcactcgcagaacgtatcgcgcctgaacctcgcggcccgcactctgcaaacctcgattttcgtcaaaaacggcccctcttatgccgggatcggcgtcggcggcgaaggttttaccacctttaccattgccacaccaaccggtgaagggacaacgtcggcgcgcacctttgcccgctcccggcgctgcgtgctgaccaacggcttttctatccgctaa

SEQ ID NO: 222771 - DNA, 1113 bp, Klebsiella pneumoniae
atgaatactttctcactacaaacgcggttgtacagcggtcagggcagtctggcggtgctcaagcgctttaccaataagcacatctggataatctgcgatggttttctggcgcgttcgccgctgctggataccctacgtaacgcgttgcccgcagataaccgcatcagcgtctttagcgagataacgccagaccccactatccataccgtggtgcagggcattgcgcaaatgcaggccctgcggccgcaggtggtcatcggcttcggcggcggttcggcaatggacgcggcgaaagcgattgtctggtttagccagcagagcggtatcaacatcgaaacctgcgtggcgatcccgacgaccagcggcaccggctcggaagtgaccagcgcctgcgtgattagcgacccggataaaggcattaagtacccgctgttcaacaatgcgctgtatccggatatggcgatccttgacccggagctggtggtcagcgtgccgccgcatattaccgccaacaccggcatggacgtgctgacccatgcgctggaagcgtgggtttcaccgcacgccagcgactttaccgacgcgctggcggaaaaagccgccaaactggtgttccagtatctgcccacggcggtggaaaaaggcgactgtgtggcgacgcgaggaaaaatgcacaatgcctcaacgcttgccggaatggccttcagccaggcgggattagggcttaaccatgccatagctcaccagcttggcgggcagtttcatctgccgcatggcctggccaacgcgctgctgttaacccaggttatccgctttaacgccggcaatccacgcgctggcaaacgctatgcgcggctggccaaagcctgcggcttttgcccggcagaggccaacgacgtcacagcgatcaatgcgctgattcagcagatcgaacgactcaagcagagctgtgcgctgccttcactggccgttgcgcttaaagaaggaagatccgacttttccgcgcgtattccggcaatggtgcaggccgcgctggcggacgtcacgctacgcaccaacccgcgtccagcctgcgctgaagaaatcagggaactgctggaggaactgctatga

SEQ ID NO: 222772 - DNA, 1356 bp, Klebsiella pneumoniae
atgagcgccgccatcaacagcgttgaaatctcccatagcgccgatgaaatccgcgagcgcgtgcgcgcagcaggcgtcgtcggcgcgggcggcgcggggtttcccgcccacgttaagctacaggcgcaggtagagatttttctggtcaacgccgccgagtgcgaaccgatgctcaaggtcgaccaacagctgatgtggcagcaggctgcgcgccttgtgcgcggcgtgcagtacgcgatgacggcaaccggcgcgcgcgaaggggtcattgccctgaaagaaaaataccgccgggctatcgacgcccttaccccgctgctgcctgccggtatccgtctgcatattctgccggacgtctatcccgcgggcgatgaagtgctgaccatctggctggcaaccggtcgccgggtcgcgcccgccgcgctgcctgccagcgtcggcgtggtggtcaataacgtacaaacggtactgaatattgcccgggcggttgaacagcagtttccggtcactcgccgtacgctgaccgttaacggcgcggtcgcccgaccgctgaccgtcacggtccccatcggcatgccgctgcgcgaagtactggcgctggcgggcggcgcgatggtcgatgaccccggttttattaacggcggtccgatgatgggcggcctgatcacctctctcgataacccggtgaccaaaaccaccggcggcctgctggtgctgccgaaaagccatccgcttattcagcggagaatgcaggacgaacgcacggtgctttccgtggcgcgcaccgtctgcgaacagtgccggctatgcaccgatctctgcccccggcatctgatcggccacgaactctctccgcacctgctggtgcgggcagtgaactttcatcaggccgctacgccgcagctgctgcttagcgccctcacctgctcggagtgcaacgtctgcgaaagcgtggcctgcccggtcggcatttcgccgatgcgcatcaaccgcatgctgaaacgcgagctgcgcgcgcaaaaccagcgctatgaagggccgctgtatcctgccgacgaaatggcgaaataccgcctcgtaccgctgaagcgattgatcgccaaactgggattaagcccctggtaccaggaggcgccgctggttgaagaccaaccatcagtagaaaaagtgactttgcagctgcgccagcatatcggcgccggcgcggtgcccaacgttgcggttggggagcgcgtaacgcgcggacaatgcgttgccgatattccggcaggtgcattaggcgcgccggttcacgccagcattgatggcgttgttacgaccatcagcgaacaggccatcacggtggtaagaggttaa

SEQ ID NO: 222773 - DNA, 555 bp, Klebsiella pneumoniae
atgtctcaggctataggaattttagaactcaccagcattgccaaagggatggaactcggcgatgcgatgctgaaaagcgccaacgtcaatctgctggtcagtaagaccatctgtccggggaagtttttgctgatgctcggcggcgatatcggcgctgtccagcaggccattgaaaccggcacttcgcaggccggcgaaatgctcgtcgacagcctggtgctggcgaatattcatcccagcgtccttccggccatcagcggcctgaatatcgtcgataagcgccaggcggtcggcatcgttgaaacctggagcgtggcggcatgcatcagcgccgctgaccgggcggtgaaaggctcaaacgtcaccctggtgcgggtgcatatggctttcggcatcggcggtaaatgctacatggtggtggcgggcgacgtttctgatgtcaacaacgcggtgacggttgccagcgaaagcgcgggcgaaaaagggctgctggtttaccgctcggtgatcccgcgcccgcatgaagcgatgtggcgacagatggtggagggatga

SEQ ID NO: 222774 - DNA, 351 bp, Klebsiella pneumoniae
atggaaaggcagccaacaacggatcgcatgattcaggaatacgttcccgggaaacaggtgaccctcgcgcacctgattgccaatccagggaaagatctctttaagaagctgggcctgcaggatgcggtatccgccattggcatcctcaccattacgcccagcgaggcgtcgattatcgcctgcgatatcgccactaaatccggcgcagtagaaattggttttcttgaccgctttaccggcgccgtggtgctgaccggcgacgtttccgccgtcgagtatgccctcaagcaggtgacgcgcacgctgggtgaaatgatgcagtttacaacctgcactatcacccggacgtaa

SEQ ID NO: 222775 - DNA, 441 bp, Klebsiella pneumoniae
atgaaacgtctgatgcttatcggtcccagccagtgtgggaaaacctcgctcacccagggtctgcgaggtgaagcgctccattacaagaaaacccaggctattgagtggtcgccaatggccatcgacacgccgggcgaatatctggagaaccgctgcctttatagcgccctgttaaccagcgcctgcgaggccgacgttatcgcgctggtgctgaatgccgacgcccagtggtcgccgttttctccggggtttaccgtcccgatgaatcgcccgaccatcggcctggtcaccaaagctgacctcgctgacccgcagcgtatctcgcttatcggagagtggcttaagcaggctggcgtccggcagatttttgttaccagcgcgctgaataattcaggtctcgacgccgtgctggattttctgaattcgaaggaacctttatga

SEQ ID NO: 222776 - DNA, 1218 bp, Klebsiella pneumoniae
atgatgtcttacaaaatcatggccattaacgccggcagttcatcgttaaaattccagctgctggagatgccgcagggcgacatgctctgccagggattaatcgaacgtatcggcatggcaaacgcccaagtgactctcaaaacgccggagcagaaatggcaggagacggcgccgatcgccgatcaccgtgaagccgtcaccctgctgcttgaaaagctcctcaaccatcggattatccagagtttgcaggatatcgatggcgtcggccaccgcgtggcgcacggcggggagcgctttaaggattcgacgccggtcaccgatgaaaccttagcggaaatcgagcgcctggcagagctggccccgctgcataacccggtaaatgccttaggcatcaaagtgttccgccagctgctgcccgacgcgacgtcggtggcggtgtttgataccgcttttcaccagacgctggatgagcgcgcctttatctatccgctgccgtggcgctactacagcgagctgggcattcgccgttacggcttccacggcaccagccataagtacgtcagcgcgacgctggcggaaaagctgggcgtaccattgagcgctctgcgcgtagtgtgctgtcatctcggcaacggcagcagcgtttgcgcaatcaaaggcgggcgttcggttaacacttcaatgggctttacgccgcagtctggggtgatgatgggcacccgcagcggcgatatcgatccgtcgattctaccgtggctggcgctgcatgagggtaaaacgccggagcagctgaatcagctgctgaataacgagtccggcctgctgggcgtttccggcgtctcgcacgattatcgcgatgtcgagcaggcggcggacagcggtaatcgtcaggcagccctggcgctctcgctgtttgctgagcgcattcgcgccactatcggcagctatattatgcagatgggcggcctggacgcgctgatctttaccggcggcatcggcgaaaactccgcccgagccaggagcgccatctgccataacctgaatttcctcgggctctcggtcgatgaagagaaaaaccagcacaacgccacctttattcaggccgaaaatgcgatggtcaaagtggcggtgatcaaaactaatgaagagctgatgatcgcccgcgatgtgatgcgcctggcgctgccgcaggcgcgcgagctggcggtaccagcctaa

SEQ ID NO: 222777 - DNA, 573 bp, Klebsiella pneumoniae
ttgctgtacaccaatgataatctcattggtcactcaatctatcactaccttattgatagtcatgaaaacgccacccgttttggctatgacgaagtcatccatgggaaacagctgcctgaggcccaaacggttattttcaatttaatcaataaggatatttctgccatcagaatcgttgatctattgaatgcgctccgcctttccctgcaacgctgccagcagccggtgctgatgataaaaagcgacattgccggactgtgcagagagttaataaccgtcgataatgccatgattattagtgaaaaatcgccgctatctatgtttgcttctattatccagcgggcgaagggcgccagcgaacaaccgccgcgacgattgcgcaaacagctgtcgccgcgggagtgccagatcctcgagctgctgattgccaacaataataataagcggattgccgccctgctcggcattgcccataaaacggtccacagccatcgaatccatatcatgcaaaagctgggcattgataattcccgcacgatgaaccagcgtattgccgccctccatcaatgttaa

SEQ ID NO: 222778 - DNA, 288 bp, Klebsiella pneumoniae
ttgttcgccgggcatgagattgtcgtctggcggttgatctcttttcaccatggcttaccgatgatgataccgacttcgcaacgcgactggcgcctgctggccgccgggagcggcggccttcttctgctggccgccggcatcaccttgcacagccactggagcgacttcctccagtggtgcctcgccacgcaaattaccttgcatcgctatctggtgatgtaccttctgctgctgaacaaccatcagtacagcggcggcgtctggctgctggtgggcgcttttctctag

SEQ ID NO: 222779 - DNA, 246 bp, Klebsiella pneumoniae
atgaaaagatgcttactcgccctggcgtgcgtcgcgctgctgacgccctcgctttcggcgcaggcgacctggcgcagcgaccagcgccaggacgctcgcgatatccgccaggatagccgcgagcagggccgtgaaaccaagcaagagtgcgtcagaaataataatcaaagcaacgccagctgccgtcacgataagcgggaaaaccgccgcgaaggtcgtcaggaagcccgcgacgaaaaatggtaa

SEQ ID NO: 222780 - DNA, 918 bp, Klebsiella pneumoniae
atgacgttggaaaaagggattgcttcgctggttgaggagtttattgctgcggggcggccatcatcgcgagaacagagtattgatgaccggagaaacggctatctcgccagcgccgttctcgcaggggaaacggaaacgcgggtacaggttgaagacatcgcgctcgatggcatgaccttgcgcgtcgtctcgccgccaaaaagcaacggcttactacccaccattgtgtattatcatggcggctgttttgtcagcggcggctttgccacccacgacaatcagctccgccagctagcctggttcagcggttgccgggtgatcgccgtgcagtaccgcctggcgccggagcatatctttccggcggcgcacgatgacgcagaacaaggtgtcatgatcatccaccggcacgcggagcagcttggcgttgacgcatcacgcatcacactggctggcgacagcgccggcgggcacctcgctctggtaacggccctgcgcctgaaagcgaatgcggcgtggcaacccgcgcaactgattctgatttatcccatgctcgaccccaccgccagcatggcgagctacgtcagcaacggcgctgactatgtgattacccgggacacgttgttgagcggctatgaaatgtacctcgcctcgacgccagcgaaccatccggatgccagtccgctctggcgcgacgattttcacggtctgccgccggtgcatattctgacggcggagttcgatcctttacgcgacgagggcgaagcgctgtatcgaaggctgatggcgcaaggggtggagagttcctgtcagcgctatctgggggtgatccacggcttctttcagctgggtgggatcagccgcgccgcgcgagatgccatgcgggatatcgcctggcgcttagcatcgccaggacgataa

SEQ ID NO: 222781 - DNA, 2310 bp, Klebsiella pneumoniae
atgagtttcaatgccaaagatatgacgcagggcggtcagatcgccaatatgcgctttcgcatgtttggtcagattgccaatgttattttctacgtgctgtttattttattctgggtactgtgcgggctgatgctgatgtataggcttagctggcaaacctttgtgaacggctgcgtatactggtggggtacgacgctgggtccgatgcgcgatattattcgttcccagccggtatacaccattcagtattacggccagtcgctggaatatacctcagaacaaatcctggccgataaatatactatctggtgcggagagcagctgtggaccagtttcgtctttgctgccgtggtttctcttgttatctgtatcgtgacgttcttcatcgccagctgggtgctgggccgccaggggaaacagcagagtgaggatgagaacaccggcgggcgccagctttccgataaacccaaagaagtggccctccagatgaagcgtgatggagtggcctccgatattaaaattggcgacctgcctattcttaaaaactccgaaatccagaacttctgcctccacggtaccgtgggttccggtaaatccgaagttatacgccggctactgaactatgtgcgtgcccggggcgatatggccatcatttacgatcgctcctgtgagttcgtcaaaagctattacgacccgtcactggataaaatcctcaacccgctggattcgcgctgcgcggcctgggatttgtggaaagagtgcctgacgctgccggacttcgacaacatctccaacacccttatcccgatgggtaccaaagaagatccgttctggcagggctccggtcgcactatctttgccgaaggcgcgtatctgatgcgtgaagacaaggaccgcagctacgagaagctggtcgataccatgctgtccattaaaatcgacaagctgcgcgcctatctgcagaacacgccggctgcgaacctggttgaagagaaaattgagaaaacggccatctccattcgagctgtgctgaccaactacgtcaaggctattcgctacctgcagggcattgagaagaacggcgagccgttcactatccgggactggatgcgcggcgtccgtgaggaccgacccaatggctggctgtttatctcctccaatgctgacacccatgcctccctgaagccggttatctcgatgtggctgtcgattgccatccgcggcctcctggcgatgggcgagaaccgtaaccggcgtgtgtggatcttcgctgacgaacttcccacgctgcacaagctgccggacctggtcgaaatcctcccggaggcgcgtaaatttggtggttgttatgtgttcggtattcagtcctatgcccagctggaagacatctatggcgttaagcctgccgccacgctctttgacgtgatgaacacccgggccttcttccgctccccgagtaaagagattgcggagtttgctgccggtgaaattggtgagaaggaaattctcaaagccagcgagcagtactcttacggtgctgacccggtgcgtgatggggtgtcgaccgggaaagaaaaagagcgggaaacgctggtcagttactccgatattcagacgctaccggacctgtcctgctatgtcacgctgcccgggccgtatccggccgtgaagctggccctcaaatacaagccgcgtccgaaaattgccgagggatttattccgcgcactctcgatgcgcgggtggatgcacggctcagtgcgctgcttgaagcacgggaagctgaaggcagtcttgccagggcacttttcacgccggatgcgccggcatcggggcccgctgatacaaacagtcacgccggtgaacaacctgagccggtcagtcagcctgcgccagcagacatgacagtatctccggcaccggtaaaagcgccgccgacaacgaagatgccggcagcggaaccttccgtcagagcaacggagcctcccgtcctgcgggtcacgactgtaccgttgatcaaaccaaaagcagccgcagcggccgctactgcctcaacagcatcctctgccggtacccctgctgcagctgcaggcgggacagaacaggaactggcgcagcagtccgcagaacaggggcaggacatgctgccggccggtatgaacgaggacggtgtgattgaagacatgcaggcgtatgacgcctgggctgatgagcagacgcagcgggatatgcagcggcgtgaagaggtcaatatcaaccacagtcaccgccacgatgagcaggatgatgtcgagattggggggaacttctga

SEQ ID NO: 222782 - DNA, 384 bp, Klebsiella pneumoniae
atgaaagagaaatcgtaccattatatcgacaacgatatccggtacctggtggcttgtatgaatgcatacgcgtacaggacgtatgcatcctgtcatgggcacggctaccccgtcgatattgttatgccctatgtcgcgttcacctcgtctgttacccaggcttcacggctttgccggcgtctgcgtgcagatgccgaatcaggagagcctgagctgaactggggatgggaaatcaccggcagttttgattcagtgtattccctctgctttcggctaaacccgacgaagccacataacaacatgagccgctggcgccggaacactctccggcaggacatgatggcgttaccgggaatggtgaaggatgcgggagggttgaaatga

SEQ ID NO: 222783 - DNA, 627 bp, Klebsiella pneumoniae
atgatacgactgaaaggctgtctgctcgccgcctgtctgttatcgccgctgactcaggcggctgatctcggtacctggggggatttatggcccgtccgggagcaggacatgctgcagctcatcacgcagcgtctgcagtcgctgcaatcctctggccagtgggaccagacgatggatgcgtttaagcagcgggttatcgagaacagtcagcgtccggcgccggtggagggcattaagcgtgcggagaaatacgagcagcgctggtttgatcccagcatccgcctgaccgaagacctgaaggacaatgaggggcgggtgtttgcccgcaagggcgatgtggtgaacccgcttaaaaccgtaccgtttgtccagaccctgtacttcatcaatggtgacgatgccgaccagctggcctggatgaagcgtcaggtgccggaaaccctgatgagcaaaattatcctggtgcgcggcagtatccctgacacctccgcagcgctggacagccggatctatttcgaccagaacggcgtactgagcaagcgatttggcctgacggcggtcccggcacggatcacaccggcgccctccggtgaacggctgaatattgagaccttccctgtaaaataa

SEQ ID NO: 222784 - DNA, 2640 bp, Klebsiella pneumoniae
atgagtaataacattatcgatgccgtcacccaggctgtgaattcactggtgtcagccctgaagctgccagacgaatccgcgaaagccaatgacacgctgggcagcatgaatttcccccagttcagccgtattctgccctataaggattatgattccgcgaccggtctgtttattaataacaaaaccgtcggttttatgtttgaggcgcgtcctttacccggtgcggataaaagtatcgtcgccacactggagcatttactgcgcagcaaacttccccggggcgtcccggtcagttttcatctggtctccagcaaactggtcggcaatgatatcgactatggtctgcgtgaattccgctggagcggtaaacaggctaaaaagtttaacgccattacccgcgcctactatctccgggcggcggaaacacaatttcccctgccggacaatctggatttgcccctgacgctgcgtaactaccgcgtgtacatctcctgctgcgtgccccggaagaagaactccgccacgcaaattgtggagatggagaaccagataaaaatcctgcgggcgtcactgggcggggcttacattccgacgcgtatccttgatgcggccgggctggtcgaactgatgcgtgagctgataaacccggacccgcacgaaatgtaccgcgtaccgtataagctggacccctatcaggatctgaactatcagtgtgtcgatgacagctttgatatgcaggtcaccgccggtcatctgaaaattggccgcctggggcgcgacgggaaagagtgtgtgacccgggtgacgagctaccatctggagagtgatccggaaatggccttcctctggaccgctgcggacaactacgccaacctgcttaacccggagctctccatttcctgtccctttgtcatcacgctgacgctgatggtggaggaccaggtgaagacccagaacgaagccaacctgaagttcatggacgtggagaagaaaagcaaaacctcctacgcgaagtactttccgaacgtgataaaggaaatgcaggagtggggcgatatccgccagcgactgtcgaccaaccagacctccctggtgtcctatttctttaatatcaccacgtacaccgcagacagcacagaggcctctctcgccgctgaacagcaggtgctcaacagctaccgtaaaggcggtttccagcttatcccggcccgctaccatcacctgcgtaactttctggccatgatgccgttcaaatgcggcgaaggcctgtttaaagagctgcaggcggcaggcgtggtgaagcgggcggagacgttccaggtggctaacctcctgccgatcgtcgctgacagcccgctggcgccggcgggactcctggcgcccacctatcgaaatcagctggcgttcatcgacctgttctacgagggaatgaacaataccaatttcaacatggcggtctgcgggacgtccggggcgggtaaaaccggtctgattcagcccctcattcgcagtgtgctcgactccggcgggtttgcctgggtgttcgacatgggcgatggctataagtccctgtgtgaaaacatgggcggcgtatacctcgatggcgataccctcaagtttaacccgttcgccaacgtgctggatgatgctcacttcgacatgtcagcagaacgtatacgcgatcagatgtcggtgatggccagtccgaacggcaacctcgatgaagtccatgaaggcctgcttctgaaggcagtgcaggcggcctggttaagcaaacgtaatcatgcacgcgttgatgacgtagtacattttttacaggacgcgaaggacagcgatgaatacgctgattccccaacaatccggggccgtctggacgagatgataatcctgctcgatcagtacacggtgaatgggatctacggggactatttcaactcagataaaccaacactccacgatgatgcccggatggtggtactggagctcggtggcctggagtcgaggccatcactgcttatcgcagtgatgttctcattgattatctacatcgagaacaggatgtatcagtcaccgcgtggcctgaaaaaactgaacgtcatcgatgagggctggaagctccttgatttcaagaatgaaaaagtggggcagttcatcgagaaaggctaccgtaccgcgcgtcgacataccggcgcatacatcaccatcacgcaaaatatcgtggacttcgactccccgaccgcatcgagcgccgcacgtgcagcgtgggggaactcatcgtacaaggccattctgaaacagtcagcgaaggaatttgccaaatataaccagctgtacccggatcagttcagcaagctggagaaagacatgattaacggcttcggttcggccaaagagcagtggttctcctcttttatgctgcaggtggaagcgaacttctcctggcaccgcctgttcgtcgacccgctcagccgggcgatgtactcctcaaaaggcccggattttgagtacatgaaagcgcgacgggaagagggggtcgatatccacgatgcggtgtacggactggcgtgcaacaactttaaagaagaaatggctgagcttgaatcccgaataccggtgaatgacatggaggataaacagtga

SEQ ID NO: 222785 - DNA, 312 bp, Klebsiella pneumoniae
atggctgaataccagttaagttttgatggttttgtacgactgttttttgcaatggcaatcattatctgtggttacggctatgtaattattggtgtttttgtaagagatacgcttgcctgtattttaatgttgtttgggcttgcaggtctcagtgctttattttctttcatggtgttcatggataaaaacatgtgggccggttctcctgatttgacgctgtcagtaataacgggattttttacagccacagtcatcttttatatgttttatgtcttgatttattcctttgaacggatgggggcaggtgaatag

SEQ ID NO: 222786 - DNA, 597 bp, Klebsiella pneumoniae
atggctaagtctctcattactgctgttctgtcagcactgtgctgggctcactggcttgttaagtgtgcggtggtgtatccgctggccatgatgatgttactggttgttctggtattccggacgggaccgtacacgttcggccagacgctggtgaaaaccgtagagtctgtgcagcaggagggatatgtcattcaggactgcacggtgccgaaagaacttaatggtgatgcggtgaacgcaccactgcctccggttttacagaaaaactgcaccaccgtcagtacggatgcggcagagtatgcagcatatatcgaccagagctatacgcataatattctctggctctggctgctgatggcggtggtgttttccgggatcgctgtggttttccgtcggactcctgtccgcagggggatcatacggaaaaacggtgttgtcgtcggagagtctgttttgggttcttcagggctgattctagcccgatctgatgtcagccagattaagcgtgtttacgatgaaatgagtccgggtgaaggggataaatttgttcgggcgattaaggaaaatacccaaatcaggatgaacctgaagaaataa

SEQ ID NO: 222787 - DNA, 834 bp, Klebsiella pneumoniae
atgtcacagctgagttttgccgatgtgttcaatctggccagagaaaccgctgataacagccctgtcattcaggcagggcagcagatcgcggaaacggtgcccacggttcatcgtatgatgagcgagcagtacagccggggccgttttatccgcgtatttaaggatacgggccgccatctggggcgctgggaagtgttcagtgattttctgtcgcttgccgccagcgagctggatatggcccggatacgaacgccggagagcatggagcactgccggaaaatctgcgcccggtacgaggccaccgacatcgcgaacatgcaggaaatgttctgcctgatggtgtgtgcgctggaggcgaaatttcatgatttcctcggcgcgatttttatggagcttgagctgggtgataactttcgcgggcagtattttaccccgtattccgtgcagtgtctgatggcgcgaatgctgatgccaggcgtcagagacactatccgccgggaagggattgccaccgtcagcgatccggcgtgtggggccgcagggatgctgatcgcctatgcagagtgcctgcttgaagcggatattaacccctcaatgcacatgttcggcagctgcattgacatcgatccggtggcggccgatatggcattcatccagctgtcactgctggggatagcagcggaagtggtgacgggcaacacgctcacgatgcagatccggcgggtcaggtataccccggttttctacctcaatgactttgaaaaacgactggcagatctgcgccggttcagggctatgcgggactttatgcgcggaatacaggaggccgcgtaa

SEQ ID NO: 222788 - DNA, 348 bp, Klebsiella pneumoniae
atgaacttacacctgaccgaatcctctgcagtcctgggaatgcagaccaccgcagaggcagaacgtgcgtactggttgagtcgtcgtaacgatgcggtgaaatcaccggaagaaatcgatgttcatgcctttcacgaggcgctgggactgatgtacccgctcaactggtcaacgagcgaaaacaatgaatgggagtccttcatgatggctgaaatgtactgctgcgacgtgacagagatatacgcccgctacggagccagatatttccggctgcgggatgtgtgcaacctgagccatgcgcagattacaacgcgcattaaggaggaatttaacctgttctggaaatga

SEQ ID NO: 222789 - DNA, 381 bp, Klebsiella pneumoniae
atgaacacacagaacgtcaacgtcaaaaccgccaccaaagaatctaccgaaagatgggttgaaaaccttctggccaacgcgattagcgagcaaaagagcctcctgctgcatctggtagagcttaaaaacaagcgtctgagagaaagcgaaagaagtgaactggtatggggcacgttgatgcgtatggctgataacgtcctgggtgcgggagtggttgactggcacgctgacgttctgcaggtgcatttcggcgttgctcaaccatggctgcagtcccggaaactcgttgagcttctttttggtgataccggtaaggaagcgtggaatgacgcacgcaaatacattgctgactcaatgcgcgctgaacgccatatgccatga

SEQ ID NO: 222790 - DNA, 414 bp, Klebsiella pneumoniae
atgattagcgatgccaataaagcggtgaatgacctggcgagtattgtccctctgctgggtgacagttcgtcccgcaaagattacgaagatgcacgtaaactcgttgagtatcttctggaacatgacccggacagcccgctggttgatatactgactgcccgcattgatgcctgggaaaataacgcggtggaatttgaagaatttaatacgcgcatcgaagctggtaaaaacggtgtatcgttgctgcgggttcttatgcagcaacgcgggctttcacagtccgattttgaaaacgagataggcaaaaaatcactcgtcagccggatcctcagtggtgaacgcagtctgacccttgatcacatgcgggcgctggcaaatcgatttcaaatcccggtctcgatgtttgttgactga

SEQ ID NO: 222791 - DNA, 393 bp, Klebsiella pneumoniae
atgcacgacggcgaagaaaggaaaaaactttcgctgtaccttcacccggaggactctgccgatcgtcttgcactggctgaaatcgaaactgtcccccggaaaaaccggggggagttatatcggcaggctttgataaccggcctgataatgcatcagcttgatgcgcgaattcccgccgtgttaaccgcactattcaccagagaactgaatgcggatgaggtcattagtcagattgctacgataacaggctggaaaccctcctcaggcgatttgaaagaggtactgaaggcgttaggagggcttcagagcacagcttcaccagaacactctcaggatgacggtgagcaggcccgtctgaaagcggccagggcgaagatgcaaaacctgatctga

SEQ ID NO: 222792 - DNA, 975 bp, Klebsiella pneumoniae
atgaaaattttttgcgatgatggttctacaaacgtgaaacttgcctggtttgaagggaagacgctgaaaagtgcggtatcagtgaactcttttcgccataactggaaagtcgagggcttaggcagcagtcgtacctataactatctgctcgatggccgcaaatatacttacgacccggtcagcgaagctgcgatcagcacgactcacattgagtaccagtactctgatacaaacgtgctggcagttcaccacgcattactgaacagtggaattgaaccccaggagatagatctcaccgttacgttacctatcagcgagttttacacggccgactgccagaaaaacacgcttaacattgagagaaaaattagcaacctgatgcgggaagtcaccctgaacaaaggggtaacttttaccattaaaagcgttgaagtgatgcctgaatcactcccagctgtctttacacgcctggttgctgacaatgtgggtcagtacgaaaaatcactggttatcgatctgggtggtacgaccctggatgtcggggttattgttggccagtttgaagacgtttcggcagtacatggtaatcctgatattggcgtatcaatggtcacgaaagccacgctcactgcactgaaaatggccagcagtgataccagtccaatgattgctgacgagctgatcaaaaacagggagaacctggattttgtggggcaggttgtaaatgaggctgctaaacaaaatctggtactggataccattgatacagcgatacataagctgggcgagcaggttgttgatgatttgctgcagtatcgaaacgtaaaccgcgtatacattgttggtggcggtgccgcacttattgccgatgctgttcgtaaggcatggaaccaccttggcgaaaaggttgttcttatggacgaacctcagacagcgctggtccaggcgattgcacgcttcaaagcggaggagtaa

SEQ ID NO: 222793 - DNA, 894 bp, Klebsiella pneumoniae
atgctcaaagaaaatttcaacgaactgcaaatctttcttgtagtagcaagggagcgaagtttcaccaaagcggcgggcaaactgggcgtttctcagtctgcactcagccacgcgatgaaggccctggaggaaaggctgaatatccgtcttctgacccgtacgacccgaagcgttgcccctacggaagccggtgagagaattattgcctgtcttgaacctcgtattgacgatctggagcaggagctggaatcgttggttcagctgaacggcactgcctccggcaatatccgtttatctgccggggagcatgccgtgcgaagtctggtatggccgaagctaaaacccttcctcagggaatatacggaaatcaatgttgaactggtggttgataacggctttgtcgatattgttgaggggcgttttgacgccgggattcgcctgggcgaaagcgtggataaggacatgattgcggtaagaattgagccggacatgagaatggctgtggtaggagcgccgtcttatttcgctgcaaatcctgcacctgaaacgccgcacgagctgcaaaatcatcggtgtatcaatatgcgcctgccgacagccggtgggctttaccactgggagtttgagaaggaagggaaaccgctacgggtcagagtggaagggcaggtcacgtttaatctgcaggcagaaaggattgatgaggcgttatctggttttggcattgcctgcatacctgaagacagggtgcaggattatataaagtcaggagagcttattcaggttctgcaggactggtgcccatctttccccggatactatctttactacccgagccgtaagcagcatccgcccgcttttgcgctgatgatcgatgcacttcgctacgtggaataa

SEQ ID NO: 222794 - DNA, 972 bp, Klebsiella pneumoniae
atgaagaataaaagcctggaaaatgtgtttaacgcatacttcaataacaaaaaagacttttccgattttcataaaatccgcacagaggaagaagcccatcttatccccctgaagagaaatagcaccaagctttaccagtgttccgacaaactcaagacaattcataactttctggctcgctttgtcttttctgaaatgcccgtcaggaaggatattgttttctcttatcgtaaagaagtcaatatcaccgatgctgtgcgtccgcattgcgaaagtgactatatttataaaacagacatatcaaaattttttccatctatcagcgcggacgctgtatctgaaaagttgaaaaaatactgcgcacatataagcacggtgaatgctgaagacgtaagggaaaacatcggaagaattgtttatctgtgtacgctcaataaccaactgccagtaggttttgcttcttcaccctctatcagtaacttctgcttttacgattatgataatcttattgagtcttactgcagggaacaaaattatatctacagccgctatgcggatgatctgattatatcttcacagagtgaaattaataaagaaaaaattacggccgacctttcggctatcctgacatctgacgcattgctcaggctctgtcttaattataaaaaaaccaaggttatcacgaaaaagtacgagagaaagatcctcggggtcagcattctgaataacggaaaaatgacagtcagcaaaaccacaaagaaggacatagaagtgaagttgcatctgctcagaacggaccgggtaaaactgatggactataccgggatagatgagatgtcgtcgatcctgtcaatagcaggcgtgctgagtcagattaacaatatagataaagactatctttaccatcttcgcaggaagtatggtaacgccatcatcagcaagctgctcagaggcaaggagttgcttaaatga

SEQ ID NO: 222795 - DNA, 1329 bp, Klebsiella pneumoniae
atgattgtcagtgtcagcataaaggccctgcaacatcttgttgatctcagagtaattttcgatttttcacgcgatccacttatctgtatgaccagcaaaaatggcgtgggaaaaacctctattatcaaggctcttgccctgctcagggatacggctgtcatcagtaaaacctcatccgctttcagcatctgcgaggagacacagattgacgtcacgttaaacagtgacgtgtataccttcagctacagtaacggtgatctagataccagagatattctgcgggatgagtcgtttatcagcgttgagcttccaatcccctacggaaagcgattttctgaatttccggtactgggcaacatagatatgactctgagggagatgttcctgaaaggcgactatcaggatgcgtctgatctaattgcgtttatgaagtccgtatacagaaatgacgacaagtttcagaaccttaaagtcgttcgtattaaaggcgaaaattactattttctccctctggacaataatcgctatatccgggaggactatttcagctcaggtgagttttttgttgtcagtatatttaaaatgataatgtctccaagccgatttctcataatagatgaaatagatgtttcccttgattcatcagcgcaggtttcgctgatgaatgcagtccggaatatctgcttggagatggaaaagaaaattctctttaccactcattctcttgccatcatgaaaaccatttatgacttcggtacgcccattatctatctgaaaaatgaaggcggtaaaataagtcacaatttggtatcgtacagttttatccagctcgaaatgttcggctttcagggatatgataagttcatcttcactgaagatgtcacgcttgaacattatattaacttcagattaacaggtttgccgatacgcaaccgctacaaaattatttatattggcggttgcgacaatgtcatcgatttactcaaacgtaacgctctgacccacttcatctgtcagcccgcggcggcaaaagccatacttgacggtgatgccgcaggtaagtatgggcaccggccagatgtaattattagcccttttgatgatatagaggatgaaatacacagaaagtataaggaagaaaatgcagtgcataatctccctgatgtggctccagaaaacgcaaaatcgaaagcttactggagaaaactgcatgagaactgtgagcagcatggtcttacccgggaagatatctttcgcatcctcgaaacgggttttgaacaggaggcagatgattttactcaggcgttgcttaaattcattgacggctaa

SEQ ID NO: 222796 - DNA, 369 bp, Klebsiella pneumoniae
atggccgccctgccagtgaccatcgactatcccgcagcactggccctgcgccagatggcgattgtccaggatgaacttccgaaatacctgctggcgccggaagtcagcgccctgctccattacgtgccggatcttcaccgcaagatgctgctggcgacgctgtggaacaccggcgcgcgcattaatgaagcgctcgcgctgacccggggggatttttcgctggcgccgccatatccgttcgtgcagctggccacgctcaagcagcgcaccgagaaagcggccaggacggcaggtcgtgccccgcaggcagtcaggtccatcgtctggttcccctttccgatcaccactacgtcagtcagctgcggatga

SEQ ID NO: 222797 - DNA, 609 bp, Klebsiella pneumoniae
atgaaaaagaaaaaagcgtcagaaccggggttactggcaagcgacagcgactggcacaataacgcatgtttgaattacatgcctgatcacggtacagcttacaccgaaggttaccggcgggctgctgacattctgattaaacacattgatgaatccgggcgggaccaggatttcctggtttatccggtgttgtttctctaccggcatcacatcgaactcattatcaaacagattatcggactggctctggcactggcagaagagccggataaacaccagtacaaaaaagatgaccataacctgaacaccttatggccactggcacaaaagctgatcctggaagttgatgacagctaccggccttccgattttaagatcgtcaaagaggtggttaaagctcttcaccaggctgatggacgggcgacagatttccgatacgccaggagaaatgacggtacccggagccttgaaggaattcattacgtcaacactcgccgctttggggaaaaaatgggagaggcttccgatttacttgacggagtcggcaacggcctccgctacctgctggactgtaaagccgaacggaatcaaattctggacagcttctga

SEQ ID NO: 222798 - DNA, 315 bp, Klebsiella pneumoniae
atgggtaaaccaacatttagatcattttacgatgtggtccgggagcttgaggatgtatatggccataaagagctatggctgtattcaggaacgacatacgcaacgccaacagaaatgattaacgccagacatacctggaaatcgccaaaaatcctgaaacgtaacggaagaatggttgcagaacgaatggataactcggactcatggcaactggttggtgactacaaaaaaacgctgctccaacattgtgctccgccctggcaatcctgtcagatagatgactattttaaaggctattacattatcgccccctga

SEQ ID NO: 222799 - DNA, 1362 bp, Klebsiella pneumoniae
atgaccaaacatgtgaatcatgttgttagacgtcttatcatttatttttttatttgtttgctggccggagtcggcattaccggattaaccagctcttttgagaccagattcaacagcacctcatcaatactatttcccctgctgaccagttttctgatggtgtttcatatcactattgcctgttttatgggcatgaaatactggagcagcaagcgtcgcctgtatctgacgcctgtcgctttcggttttgcctgttcggcgttactgatgctgggcaccctcagtagctatccggactggctcagctgtaatcccgcgccggtggtgaaacaaaatgacgctgtgatatattatttctttcgcaatataatgatggccgtcttattcacgtcgtcaattattttgtattactttcgccgacggatcatgcactcctttaaagcccatgtaatgactttcgcggcatgtattgtttttacgttaatgataatttttttgtcatggatctactccagccactcgccatggttgagcattaggtttattgacgatctgagccatacttttacgccgctgtggcggagtattattggctggctgctgatggcagtctggtttatcgcgctgattttaataatttggtttagcaaactgcgcaatattttctggtacagcggcgcttttttttgcagcgcatatttgttcaccattttccagctgctctctgccgttggggagctcgatcaggcctggtatcaggcgcgtttttttgaaacgctgtgcaccctgttcctgatcctggtgctgctggtagacgtctttatcctctatcgcgagtctaaccacaagtatgtcaactcataccagaattcgatacgcgacccgctgacccggctttacaaccgcagcttcttctacgataccctcaaccagcagctggcaaaggtgaaggcccagcatccgctgtcggtgatcatctgcgacctcgaccatttcaaacgcatcaacgataactatggccacatcgccggcgacaaggtgatccagtttgccgcctcggtgctggacagccattcacgtaaggatgacgcggccgcccgcattggcggtgaggagtttgccctgctgctggtcaacaccgcagaggacgaggcgcaggcgatcgctgagcgcgtccgcctggcggtcagcgccgagcaaacccctctgccggagcggatgaccatcagtatgggcgtgtatacgacccatgacggcagtgtgaccgccgaagagtgcgtccagcgcgcggacgaagccatgtatgaagcaaaaaacagcggacgtaaccgggtggtaatctggcgacgccagggcaggtaa

SEQ ID NO: 222800 - DNA, 516 bp, Klebsiella pneumoniae
atgctctatgtcgtcgaatgcgcctacaccgacccgcaaagcgaagcggcgtggaataccttttacaatcgggaaaaattgccggcgctggtctcggtgcccggttttcatgcctcccagcgcttctgcgcgttcagcgagggctgccctcgctacctggccctacacgatatccgcgatgccgccgtcctcgacagcgacgcctatcgccgcaatggtgggggtcattttgcccgctggcaatcggcgatcgccgactggcatcgccacctctatctcacgactcacgcgctgcgggaggtggctcctgacgaggtgctgctgctgagcgataccgcggaagccctgcccgtcgctgcgccgatcgtcctgcagcccgggggtctggccacccggcatacccgctatgccgccatcgtcccgcgtgacgatctgcatcaccgggtcacctctgccgcggtctttatctatcagcccattaccgccaggttgcgtcacccggcggagcaagcgtga

SEQ ID NO: 222801 - DNA, 837 bp, Klebsiella pneumoniae
atgacacctgctcccttttataccctgacagcaggcgacctgacgataagcgccatcagtgatggtcagatgacagcgccgctgacgctactcgcggggatcgcccctgaagaggcggcgcgtctgcagcgccaggccgggttaacctcgccggaggccatcgagatcggcgcttacctgatccgcggacgcgggcacacggtgctagtggataccggcaccggcggggccaacggcgtcggcggcgcgcttattgccaatctggcgctgctcggcgtgcgccctgaggaaattgacaccatccttctcactcacgcgcacccggaccatatcggcggcctgctgaccgccgccggtacaccggcttatcccaacgccatggtgttcctaccctcgcgggaaagcgcttactggctggcgccatcgacactggacaacgccagcgatcgtggacaacgtaacgtgctgctcgtccgccgcataatggcgatctgtgcgacgcaaattcgtgatattgatgaagacgagccggtagccgggatccggccatgtcccctgcccggccatacgccagggcataccggatatcgccttgaggcgggcggaacgtcgctgctaatctggggggatatcgtccactttccctcgatccagagcgcccggccagaggtgtcggtggcatttgacgtcgatcctgaccaggcccggcatacacgggaaagtctgctgcgccaggccgccagcgaacggtggctcatcgccggtatgcatcttggcctgccaggtttcgcccgcgtggagaataccgcctcaggctactgcctgcgcccggtgtga

SEQ ID NO: 222802 - DNA, 717 bp, Klebsiella pneumoniae
ttgaatattttaattcacagcaataatatttattttaatatcggcctcgcccagtgtttcagagatattcaggaaaccctgcccggtctgaatattattcattcactgccgctcagccatctgcccgatctggccgggatggatgtaattattttagcgctggaaaactatcacgattatcaggccgctgctgaattagcccagcgctatcccggtctggtggtcggatttacctccgccaacaatgtgagacgcggacgcgccttttacgcggataccctcctgtgggtcagccagcgggaaagcgttcacgagatcggccgccttctgcgccggctggcagaccgtagccgccctttcgcgccgcgccatcagcgtcagagtcactcctcccggctgcgagccccacttaatgacctggagatgcagatgattcgtggcgtggtcgacggacagtcaattaatcagatggcggacgcgctgggggttaatcgcaagcgggtttataacggactggagcggatcaaaatgaattttcgcctcgtcagccatactcattttcatcattttatgaccgcggaggccacgtttagccacctctgcgccgatcacagctgctatagaccaggagtacggccagcccggcaacgacgtgccgcatcgcgaccggccgaaaatcattcatataatttgaatgagtttcgcaaattgttttga

SEQ ID NO: 222803 - DNA, 1017 bp, Klebsiella pneumoniae
atgatgaaagcctggatcgtcaacaaacccggttcactggacaatctgcagcttgtcgatcttgccgaccccggcgcgccggcggcaggcgagatccgcgtagcgctccacgccacctccctgaattatcacgatttgctggtagcgacgggggtgattcccaccgccgatcggcggatcctgatggcggacggcgcgggggtggtcgaagcggttggcgccggagtcagcgagtttcagccaggcgaccgggtggtggctggctttttcccgcagtggctggatggccgtcctggcccgcaggtgaaggacttcagccagaccccgggcgacggcgccgaggggtttgcctgccagtatgtggtcagaccggccagccattttacccatgcgcctgacggatggagcttcagggaagcggcgactatcaccacctccggcctcaccgcctggcgcgcgctggtggtggaggggcggctaaaagcgggcgatacggtgctgacgctcggcaccggcggcgtgtcgataaccgccctgcagctggcgaaaagcatgggcgcgcaggtcatcgtcacctcctcatcagatgaaaagctcgcccgcgcgcgcgccctgggggctgaccatctcatcaattaccgcaccaccccggcgtggggtgctacggtgcaggacatcaccggtcatcgcggggccgatattatcctcgagctcggcggaccgggcaccctgagccagtcgttcgaagccgtccgtgttggcggacacatcgccctcatcggcgtcctgactggcttcgaaggtcatgtgcccacccatctgctgatgagtaaacaggcccggctgcaggggctggtggtgggtcatcgccggcaacaacaggactatgtcaacgcgctgaacctgcaggcgtcgcggccggtcatcgataaagtgtttgattttgcggccttaccagacgccttccgctatctgcaaagcggcgcccatttcggcaaaatttgcgtggagtggtag

SEQ ID NO: 222804 - DNA, 372 bp, Klebsiella pneumoniae
atgaagttaaagattactatcaatgataacgtgctcaccgcgaccctgaacggtagtcaggccagccgcgaattcgctggattgttacctttaacgttgcagctcagcgactatgcaggagaggaaaagataggcgatttacccgcccggctgtcgacggcggattcgcctgtagggtcagcagccagcaagggcgatatcatggtctttttaccctggggcaatctggccattttttatcaggctcatggttacgttgacgggctcatccctctggggaggctggatgaacctgacgcattacctctgcagccttcatcatacccggcacgattcgaattagccgcagcagcatcgctcgggagcgattag

SEQ ID NO: 222805 - DNA, 927 bp, Klebsiella pneumoniae
gtggatatttttcgtcgtgaggatttgcatcatctctatcttttttatcatgtggctaaagaggggggatttacccgtgccgcggccaggctggggcttgcccagtcgagtatcagccgcagcatcagcatgctggagaaaagtattaatctgcagttactggtgagaagtacccgcaaggtcgcgctcacctcagccggggaaaaactactgcgttcgctcgatcaggggttcggtcaactggaaaatggctggatgccgctgaatcagcttcgggagaaacctgcaggaaccgtgcgcattaacggcagcaggcaggccatcgagcaagtgttgctaccgcgactgcagtcgttacgggatgcatacccagatatcgcgctggagcttattgaaaataatacctttgttgacattgtgaaggagcgatatgatgccggggttcgctacggcagcatggtcaacgaggatatggtttccgtgcgtattggccccgatgtgccgatgcgggttgtcggtagccccaattttcttcgccagcatgggatccccgcacatccccgcgaactcgataagtatccctgtattggctaccgcatgtccgacggttcaccatggggatgggagatgcatgatggcgatcggttatatcgacataaccccgccggaggatgggtgttcagcgatgccggcacagtcattaaagccgcgacgctgggagtggggctggcctatgaagcggcggatctgatgcaggacgaactggcaagcggtcggctgataccggttctggagaattacagtcacacctttcctgggtttcatatctattatccgcaccggaacgtgtccagtgcgctgcgagtgattatcgacattctgagggactatcccggagcggacagccgcgctatcagaacgggctga

SEQ ID NO: 222806 - DNA, 1131 bp, Klebsiella pneumoniae
atggctactttttctcatcgaacgctgcgcacgggaatgatcgttgggatggcgatgctgtttggttccaatgccgccatcgcagacctggcgctgcctatgaaaggcgacacggatgttaagctcattcagatctgggataaaacctttccgctgagcagcgccgtcgaccataaaaaagtcacctttaaaaaccgctacggtattacccttgtcgccgatgtctatgtgccgaaaaatcacccggccggtaagcttcctgccctggcggtcagtggggcattcggtgccgtaaaggagcagtcatccggtctctatgctcaggaaatggcccggcgtggttttgttactctggcttttgatccttcctataccggcgagagcagcggcgaaccgcgtaatatcgcctcacccgatatcaacacggaagatatcatggcggccgtcgactatctgggtctgctggatatcgttgaccgtcaacgcattggcctgttgggcgtctgcggctacggcgggctgaaccttagcgcggcggcaatggataaacgtatcaaggctgtcgccacctcggtgatgtatgatatgtcgcgcctgtggggtaaaggcttccaggacagctataccccggaacagcgtagcaaagtgctggaaaacatgagcctgcagcgctggaaagacgccgagaatggcgtgcctgcttatgagagccacaatgtcagctttgataaagcgggtaacgtggtccgggataaaactatcctgccagcaacgctgcaagcggatgccgatcccattactcgagaattcttcgattattatcgcaccaggcgtgggtataacccgcggtcggttaactccgccgggtcatggtcagtgacaaccccaatgccgtttatgaatttcgcgcaactggatcatattaaggaaatctcgccacgaccggtactgattattaccggtgagaaagcgcattcgcgttactttgcggaaaccgcctaccagcaagcggctcagcctaaagaactggtcattgttccgggcgctaaccacgtggacttatatgacaaccagagtggaagaattccctttgataaactggaccatttctttaaagccactctgaaataa

SEQ ID NO: 222807 - DNA, 1149 bp, Klebsiella pneumoniae
atgcataattttaatttttataatccaacacgtattgaattcggcatcgataaagaagatacccttgctgaccatatcgccaaagacggtattcatcatgtgctgatttgctatggcagccagcgaatcaaaaatgagggtctgttcgagaaggtcacgcgccgtctcgtatcccagggaataagctggtgtgaatttggcggtattatcagcaacccggtcatttcatcggtcagaagcgccgttgagatggcgcgtaaggaaaaggtacaggcgattatcagcatcggtggcggctcggttcttgacagcgcgaaagcgattgctgcgggagtcgactatccaggcgacgcctgggaattgttcactggcgacggggaattaatctccgccctgccgatatatgccattctgaccctcgcggccaccggtagcgaaatgaatccgtatgccgtggtggttaacgaagaaacaaaagaaaaattatccattggtaacgatgccactcgtccacgggtgacggtattaaacccggcgttgatgacgggtgttccgagggaatacctggtctactcggcagcggacattatttcgcatttgatcgaggtgtactttacggccaccgtactgcccaggctgcagtccagactaattgaatcattgattaaaaccgtcatcgaaacgacggatatactgattaacgatccgcaaaatattgcggcacgcggcgaatttgcctgggcttcgacgctggcgcaaaatgggataaccttctccggcgccgcagattatagttatcctaaccatgcgattgagcactcgttgtctgccctgttcgacgtgcctcatggcgccgggatgtcggtggtgatgcctgcatggatgaaatggtaccagtcccaaaataaagcccagtttaaccgcttcgcccgggtagtttttaacgtggaaagtgcggaagaaggtattgctgcactggaatcctggtttacgaaaatcggcacgccggtgagactttccgaggtgaatatttctgccgaggcattaccttcaattatcgacaatgttaaatcgcatatccgggcctttggtatcgccgaaacctattcgcctgatgttgtcgaagttattttgcataatgcgctttaa

SEQ ID NO: 222808 - DNA, 1086 bp, Klebsiella pneumoniae
atgccggtgagtctgctctcccccatcgctatggatttggagatcaccgaaggtaccgcgggtcagggaatgacgatctcaggaatatgtgctgttttaaccagcctgtgtattcgcagattggcaggtaaaatgaaccgcaaatatttgctgttactcctgaccgcgttgatggggatttcggctttaattgtagcgatggcgccgaatttcagcatttatatgctagggcgcgcattgattggtgtagtcattggcggcttctggtcaatgtctgtcgccacggcggtcaggctggtccatattagtcaggttccgcgcgctctggccgtttttaatggcggcaatgcgcttgccaccgtggtggccgcaccgctgggtagctatctgtcgtcagtcaccagctggcgtggcgcctttctgagcctggtgcccatcgccgtggtaacctttatctggcaatggataagccttccctcaatgaaagcgggagcgcaccaggccgctagcggttccggtctgcgcagactactgggcgatcgttcggtggcgattggcatgggcgcggccggtattttttttatggggcaatttaccttattcacctatattcgcccgtacctcgaactgatcgctcaggtcgatgccaggaccatctcgctactattattagcgatcggtatttccggactcgcggggactacggctattggactggtgattaaaaagcagctctataaaacgttaatcattattccgctactgatggccctgattgcgttattactgatcccgctggcgacaaaccttgttgcggtgtcgattctgctggccctgtggggcgtactctccaccgcggcgccggtggggtggtggagttgggtcgcccatgccagcaaagcggataccgaatcaggcgggggactgatggtcgccacagtgcagttttctattgcccttggtgcaacggtcggcggtattttattcgaccatctgggctatgagagcaccttttgcctgagcgccgggatgctgatcgtggccgcgctgatgacgatccagacagcgcgacgttctgctgactga

SEQ ID NO: 222809 - DNA, 681 bp, Klebsiella pneumoniae
atgtttttcttccgtgtgatagccatcgcgattttattccctgctttaatatcctgcacaacgcaaaaagccctaaatgaaaccgggaaggagattgataaaggccattatggtgtcgcgacatggtatgtcgcaaccttacccgttgtcatgctttatgacgtatttactctcggcggtaccagcgacccgcaaacgggatataatacggtcgtcagcgtcgcgaataaacaaccggtgactcagtcagcccacagttcatcaggtacgcggcctcaatctacaattcaaaccgctgctggcggttcagtcgcgactgtcacaacgcctcaaaacgtcgccctgagaacggcgtcttcgcaagggccgtcatcggtttcttcgtcagtcaaatcctatcctccggctgataattgccttacccgtgattcgacgtcgaattcactggcagacttctggattaaccactgtggctttgccgttaccgtgatgtggtttgatgcgaatgattgccgtacggggtgtatggatggcgtgggggcgaattcacgccagtcaataacaaaaggaagggcgggaagcgcttatacttccgtggcttgtccaaaaccttctacaccaaaaggacccgatggcattcatcagtgggccaacgaagggcatcatcaatgtacttcctga

SEQ ID NO: 222810 - DNA, 1533 bp, Klebsiella pneumoniae
atgttactcaccgccagaacaccttcccgatacgccagcgccctggccgcgctttctgtctttatggcggccttgctgctgccgttaagttttaccggcggcgtcatgaccacccccgcgatacagcagtcgctgggcggctctcccgctgcgctgtcgtggctgaccaatggctttatgctgactttcggcagctttttgctggccgcaggggtgaaggcggatgccatcgacagaaaacgtatttttatcgccggcgccgcgctgttttgcctgagcagcctgctgttttgtctgacgcacaatctcttcctgtcaggcgtgctgagggcgctgcaaggtctggccgcggcgatgattttagccagcggcagtgcggcgctggcccagctgtatgacggcgctcagcggacgcgggcattcagcatcctgggcacagtgttcggcgccggcctggcgttcggcccgctgctgatcggcttcatgaccgacgcggtgggttggcgcggggtatacgccctgtttgcgctgctctcggcgatggttctgcttatcggtctggcgtatctgccagcggcagaacaaagccagccgcggacacccgacaacctcggcttaaccctgtttacgctggccctgatgctgtttactgcatcgcttatggtcattccggcccgcggctttttatcgctgaccacgctggccttgttcatcgcgtcggcgggactgttcgtggcgtttgccgtgcgctgccggagggtgagcaacccggtgctggaactctccctgctgcgccatccgcgttttgtcggcgtactgttgctgcctgtcgccacctgctgttgctacgtggtcctgctgattgttgttccactgcattttatgggcggagaggggatgagtgagtcgcagagcgcgctatatctgatggcgctgaccgcgccgatgctgattttcccatccgttgcggccctgctcacccgctggttttcaccggggcgggtatccacgggagggctgatgatggcctccgtcgggttgctgttgctgggcgatgcttttcacagtaaccatctttcgcaactggtgctggctctgatcctctgtggggcgggggcggcgcttccctgggggctgatggacggcctggcgatatccgctgtgccggtggcgaaagccggtatggcggcaggcctgttcaacaccgttcgcgttgccggcgaggggatcgccctggcgatagtctctgcggtattaacggcaagcaataccctgaccctgcagagtcgcgttcacgggtatgcccccgaggtgattcaccgcgccgcaggctggctgggagccggcaatatgccgcaggcggctgcgcttttgcctgacttttccctccgggcgctgcgcgagagctatgactctgcttatacgctactgtttagtgggctggcggtcgtcaccctgctgtgcgccctgatggtctggcggacgctatgccggaaggggagcgctatccaaacccgcaacagcggatcctga

SEQ ID NO: 222811 - DNA, 927 bp, Klebsiella pneumoniae
gtggaacaggatctgccggtggcgctgcgtccggaaaccttcgacggctatatggcggatatcgaacggctggtcagccgctatcacgacccccggcccgattctctgcgccgggtggtgatggcgcccactaccgtcctgcactccgcgccgggcgcccagctgcgggagatggcgaagctggcccgccagctggggatccggctgcacagccatttatcggaaaccgtcgattatcttgacgccgcgcggcagaaattcgccatgacgccggtgcagttctgcgcggagcatgactggctgggaaatgacgtgtggtttgcccatctggtgaagctgctgccggaggagattgccctgctgggccgcaccggaaccggcatcgcccattgcccgcaaagcaacggtcggctgggcagcggcatcgccgatctgctggcgctggagcaggccggggtcccggtctcgctgggggtggatggcgctgcctccaatgaggcggcggatatgcaaagcgaagcccacgccgcatggctgctgcagcgcgcgcgcaaggggatgctggcgcagccgcgctacgccggaggcaccttcgagggcggggccgatgcggccacggtggaggatgtggtgcgctggggcagcgccggcggggcgcagatcctcggcttagcgcagagcggcactctgcaggtcgggatgcaggcggacctcgccatttaccggctggacgatccgcgctacttcggcctgcacgatatggccattgggccggtggcctgcggcgggcgcgccgcgctgaaggcgctgctgctcaatggccgacccatcgtggaagatgacgccattcccggtctcgaccttgacgcgatgcgccacgacgcgctggcggccgtccgtaccctccaacagcgcgccgctgtttaa

SEQ ID NO: 222812 - DNA, 717 bp, Klebsiella pneumoniae
atggaaccttatcgtacttttcttattactggcgcaaccagagggataggaagagcgctcagtgacaaattatcaggacagggtcaccttgttgtgggtattgcccgtcatgttgatgccggctttccgggggttttatatacggccgacctgagtagtgctgatgaaactcgcgtagttttattaaaaattaccgaaaatcatgaaattcacggcatcgtaaataatgtaggtgtggccttacctcaacaattgggaaacattgatattcaaacgttcctgaatgttatggatatcaatgtacgggtggcagttcagataacacaagcgctggttagcaacatgaagagcagaggctggggaagaattgtgaatgtatgtagccgtgctattttcggtgcgactgacagaacagcttacgcagcggccaaaagtgctctggtaggttgtacacgaacctgggccttagagcttgctcaattcgggatcaccgcaaacgcgattgctcccgggccaatagagacagagctttttcatagaacacgacctgttggaagtgaagcagaacaacgcattttatcgacaatacctatgggcagacttggttctcctgctgaagtggcttcagcaatagcctttcttttatcatcagacgcgagttttattactggcgtagtactgcctgttgatggtggaggaagcctgggaggacgttag

SEQ ID NO: 222813 - DNA, 480 bp, Klebsiella pneumoniae
atgcctaatggttacgacttaatagacgcagcgagaagtcagcttaatgttaaagagcagccgcttaacagcaactctggcccgatggtaaatacctatctcgactacgtgggtagcccctccggctcgccatggtgtatggcttttatctactggtgtagctgtcaggctaatattcccggcctgcctaaaaccgccagcgtagcgaaattctatcaggagtcattagcgctcggaaaaataatatctatttccgacattgccgttggcgatattgttttaagggttgattatcccgtccaggccaacggtcaaaagccaggagatcatgccggaatttacacggggacagttgatggggtgccacaatatatctcggggaatacgatatctggcaaggattcaaaaaatgatggaaccagttcctatgtcgatgaacatgagatgaagcattttaattacgccgcgcggttttggtaa

SEQ ID NO: 222814 - DNA, 936 bp, Klebsiella pneumoniae
atgagcgaaccacgtgacctgttttattgttttccgctgatgcggggtgaagatgtacgtgctgtacaaaaggcgctgaccactctcggagtgcaacccccttgtggaacttcagacggtatttttggcaatgccactcggctttcagtggaagccttccagcgtagcgtacacgatttaattgtcgatggcgtcgtgggcaggttgacccatgatgcgttattcgggaagacacttgcggcgtttcctgagccgaaagccgggatagcaccggctcagtggtcacctccggacgtctcctcgttgatacgctcaacggcttcaaaaccgcctctcagtcgtgaacaggccctccagtgccgtgactggttaatgcaaaactttggttccgggatagagaaagccgttgcgggcaccccttttgatgctttgctgatttgcgccatcgccgccaaggaaaccgccccgatatggctcaactggataaatcagatgagtgccaacgaaattcttgcccgctgtgtttttgatgccagcggtgatgccccaggcaccagccgaatcgcatttccatccactaccgccgactttcgtgacaagtatggagatcagataaccacagagtttatcgacgaggccaaccgtacccgaaccctcagaaagatggagccgaaggactgggtctataaaggttatggaatattccagtacgacttgcaacacatcttgacagatcccagttttttcctgaacaagcaatggcgagatttcccaagttgcctgacgcgggtgttgaatgaattaacgttaaagcaccattccgccgacggagatttacgcgagactatccgcctctataacggcaagggggaacgcgcacaaatctatgcagaccacgtactcatcatgtacgactggatgaagaaaagcgcctag

SEQ ID NO: 222815 - DNA, 690 bp, Klebsiella pneumoniae
atgaagcgcatgcaacgttttctcagactggccagcttgctatgcctgctgactgcctgcgccaccatgcaactggcccacatgaaacagttgcaaagcacccggcagtacgaagcgatcattgcggaaacgccagcggcttcctgcaacgatccctctcaaagtcgtgaagtctgtcggcagttctacgctattcggggccatgcctatctcaaactcgcgatgaatgagtctcagccgggggctcactgccccatgccaaccccatcagcacgggccaatatcgacaatgcggtgcacgattatgcgcttgcgtcttctgccgccgccaggggcagtgaagatgagacacatctgttggagaatcaggcccttgctttgacctgctcagccccctttaagcaacccgctgaggcagtggcaatgacacgtgaagccgtggcaaaactggacctgttaccgccgaatccatcccgcgcgcttaccgccagtaatgccttcctcagcctggctcagcgtaccgacctgccgcaggccgatcgctgtcaggccgcccgtgatgctcgaatacgcgccctgggcggactgaacgggcaaccgccagccacaggcgagatagcaatacgtctccatcagaccgtcaatgccgctgccatcggtggcccaggtcttccctccacctgtgtatga

SEQ ID NO: 222816 - DNA, 1554 bp, Klebsiella pneumoniae
atggctaaccaatcagaaataaactgggcacggatttgtaaacttccactgcaaattgcgatggtgggtctatctatatttgccgttgccaagctttttacatatctcgatttaccccccatttcctggccctcgaaagagacaggcagtgggctcaaggcctttattgccatcatcgttttcttagtcggcacaggaatggtgtcttttctttggtggctctcttctcgctattttagactggtgggttgcgccggggaaaatatcgataaggtagcgcaactcaaagacctgcccatggggctgcctgaaggcaccgttcgggccgttttagcgctgatcgtggccgttgtgggcctgcctctgttgctgttcagctctcaattgggtaccagcccggagattgccgggtatctcaatggcattattaccggtgtttttgggtattactttggcacccgggcggcagcttcgacgactaatacgaacaacagcgtcgccagtgcacagcaagcggcgcaagagcaaaccaggcaagcggagaaagcgcagaataatgccaacgagaaaatgcagcttgccgaaaaaatacaaagtacggcggatgtcgattctttgctcgacaaaacgcaacggcagttggccttagcgaaggcattactggcaatgctcccacagactaactcattgcctaccggactgggagatgttctacccggagacctgaacaatactattacccgcgcagagagcattattaatgccttgcgtaatctcagtaagaaagatgtcacctccgatcaacttgacgaactcaatcaagtcgtcaatatcctgaccggcgccacttcaccattgagtgtccttttaagcaaagcggcacccttagtggcaccggccatgccggcattaggccccatcgccgggatcgtgatgctgctgggtgtcggcgctaaactgggttccgatcagttcaagcgctggcgcgctcgcgtactggcagccccgctggcccaagggctggttgaaagcgggacgcttacactccccctgacccgtgccgccctggagaacgcacctgcagccacccccttttttgcctcacggccagcggcagaggtcgacagcgtcctggcaaatgtgctggcagctgacgatcctgtgtctgtgctcaatgaggcctatgggcccaacggacacgtcgctgctgacatcgtccatgacatcgaggaagccacatctatcgttaccgcactgcagcaatctctcctcgctctctatggcaagggtgacattacggaagagatcgccagcaaagtgcgcgcaagcctgacatcacccgcgtctcaagcattgggggcagccagcacagccttgaacaatttgagtgcttcggacatcaatcagcttattaatcaggtctctggtgtttcaagggtggaagccaatcctgcagacagcagggctgctttcgacctgctgatcatgcttgtcgatgctgcccgccgtgagaacgtcgactttgtccaggcgattgcggatctcaagttatga

SEQ ID NO: 222817 - DNA, 708 bp, Klebsiella pneumoniae; identical to SEQ ID NO: 10331

SEQ ID NO: 222818 - DNA, 237 bp, Klebsiella pneumoniae; identical to SEQ ID NO: 10330

SEQ ID NO: 222819 - DNA, 363 bp, Klebsiella pneumoniae; identical to SEQ ID NO: 39670

SEQ ID NO: 222820 - DNA, 1695 bp, Klebsiella pneumoniae; identical to SEQ ID NO: 31949

SEQ ID NO: 222821 - DNA, 462 bp, Klebsiella pneumoniae
gtgagccagcaagccaacgacaacagcgagagccgcttcatgggactgatgacacgcattgccgataaaaccggcgcgctcggcagcgtcgtttccgcgatgggctgcgccgcctgctttccagccctcgccagcttcggcgcggccatcgggctgggcttcttgagccagtacgagggactgttcatcagccgcctgctgccgctgtttgccgcgctggccttcctggcgaacgcgctgggttggttcagtcatcggcaatggctgcgcagtctgctcggcatgatcggcccggccatcgtgtttgcggccacggtctggctgctcggcaactggtggacggcgaacctgatgtacgtcggcctggccttgatgattggggtgtcgatctgggacttcgtgtcgccggcgcatcgccgttgcggaccggacggctgcgaactccccgccaagcgcttgtga

SEQ ID NO: 222822 - DNA, 276 bp, Klebsiella pneumoniae; identical to SEQ ID NO: 10326

SEQ ID NO: 222823 - DNA, 351 bp, Klebsiella pneumoniae; identical to SEQ ID NO: 10325

SEQ ID NO: 222824 - DNA, 435 bp, Klebsiella pneumoniae; identical to SEQ ID NO: 10324

SEQ ID NO: 222825 - DNA, 933 bp, Klebsiella pneumoniae
atgaatggcctgcaaaaaatagaatttttagatagtattggcatgatgctacaatcaagaatgactttttcggatattgatacgtacttccgggcgcatggagtaccaacgcaagataactatccgcataacagtaaacgatcttacgcgaaagacatgcttgctaaagtcgatgataccattcttttcacaattgctggcgagttgggcattatagatgtgcccgttgatgtaagtttagcgagagaagtagaggtcggtttctggaaacctggtaattttaggttgttcctgagtcatttggcatcctttaaggttcaaacatcccatctccaaactgcattaagaaaatttgctatatctagttttgtagctcatgaagacatcgaaccaacaaaagaatggcaaaatgaaattgaagccggtttaaaaactatggatgctttagcagccatcttgatgcccggttttcaagaaagtaaatggtgtgatcaagaagttggagtcgcggtaggtcgcgacattctaataattccaatccgaaaagggcttgatccatatggatttattggtaaatatcaaggaattcaagctcagggaaaaaaaatcggagaagtcgctgaagctatatttgagacattagtcaaatctcccaaaaccaaaaataagatactcatggcgctttctggcgctgtctcaaatgcaatctccgaagaagaagccattgaaaaagtcaaaatatttaaatccctaaacgcaatcccctcagatattttagaaaaccttaagcaacaggtttcagaaaataaaattcttattgagtcgaaagattttctaacaagcttcaattcgatgttaattaaattcaacattaaaaaattagttatagggaatagtacgcgtgacattgagtcggatgatataccattctaa

SEQ ID NO: 222826 - DNA, 669 bp, Klebsiella pneumoniae
atgactaccgctgatttcaaacgccctaaactagaactcccaaatgggacagataaactgctgctgcactcttgttgcgctccgtgttctggtgaggtaatggaggcgatccaggcctcagggatcgactacaccatcttcttctacaacccgaacattcatccgcagaaagagtatcttattcgtaaggatgagaatattcgctttgccgaacaacacggcgtaccgtttatcgatgcggattacgacacagataactggtttgagcgcgccaaaggcatggaatgggagcccgaacgcggcattcgttgcaccatgtgttttgacatgcgttttgagcggactgcgctttacgccgctgaaaatggcttcaacgtgatcagcagctcactggggatctctcgctggaaaaatatgcagcaaatcaacgattgcggtcagcgagccgccgcccactatccgggtatggtttactgggactataactggcgcaaacagggcggttcgtcgcgcatgattgaaatcagcaagcgggagcagttttaccagcaggaatactgcggctgcgtttattcactacgtgacagcaacttgcaccgcaaatcccaaggccgtcctctcattcagatcggtaagctttactatggtaaagaagacgaccagtcctga

SEQ ID NO: 222827 - DNA, 534 bp, Klebsiella pneumoniae
atggaagtagccaaaatcaatccgcaggcgaatcatgagcatgtttgtcttctgggttgcggtgttacgacaggtatcggggcagtacacaataccgccaaagtacagccaggtgactcggtcgctatttttggcttgggcggcattggccttgcagcggtgcagggtgcacgtcaggcaaaagcggggcgtatctttgccatcgataccaaccctgagaaatttgaattggcccgctcattcggggcaacagactgcattaacccgaaaggctatgacaaacctatccaggacgttctcattgagctgactggctggggtgttgaccacacgtttgagtgtatcggcaatgtaaacgtcatgcgttctgcgcttgaatccgcgcaccgcggctggggtcagtcagttgtcattggtgtcgcagccgccggtaaagagatctccacgcgcccgttccagctggtcaccggtcgtgtatggaagggctctgcttttggtggtgttaaaggccgacccagcttcctggcatggtag

SEQ ID NO: 222828 - DNA, 1557 bp, Klebsiella pneumoniae
atgagaattaaaaagcctcaccttcgtccgatagtcataaccttgtccgttggtggtatttttttgacttctatttttatgatagttgtcattatgttttatcaacacgaaaatatagaaaaagatttgcttgatgctaattcatcgtacgctatgaaaatgtcggatgtaatgagcagttatattgaaatggctcagggcgaactagcatatggcgctaagaaaattgaatcaacgactgatgttgaatatcttaaaaatgaggctgataggctgagattgcagtccggcatgtttaattcagttattgttgttagtaatggtgctgttgttctggcaacttctccagaatcacttgatttagttggtgttcacttgaactcaagtgtcagtaaattggctattgagggcaaaaaggcatttatatcgcaaccttacaaatcagttgctgggaatctgattgttttgttgtcacatcctatttatgataagagtggtaattacatagggtatatcggcgggtctatatatctaaaaaaacagagtttatttagcgatattttgagtaggcatttttttaatggcgacactgaaattaccatcgttagtgatgatgctaatgtgatctttaataaagataacagtgttgttggtcgaccgatggttatgcctgatgatttgaaatcaaagttagcttcgtctgaaagaggcgatggtacctttttttcttcggggcataagtatcttcttggttatgctcatatgaaaaatactgactggaatgtgtttgtttatagtcatgctgacaacgtgaccactcttcttattaattatgctaaaaatgtgcttgtgctgctagttgtaataatagttgtgttttcagttgtttcatatttcattgcatcccaaatctcaattcctttagaaaatcttgctatatctaccaatgctaaagatatagagtcctcgctgacttatattaaaggtatcaatgcttggtatgccgaagctgaccgccttaaaaaggcacttttaacgaatgtaaaggtaatgatgaaaagggtgaacactctaaatgaagtggcagtaaaagatcccctaaccggtgtaaataatagactggggttttcgaataaaacaaaggattacacgcaaggctcaggggcttcagttattgctattgatgttgacttttttaaaaagataaatgatttcttcgggcatggggtcggagatgaggtgcttatttctttggctcatgttattaattcttgctgccgtagtgaagatattgtttgccggtttggtggtgaagagtttgttatttttctgccgaatacttcagtggtaacagcagagcgtattgcggagcgtatcagaagtgttattgaaagtactgtttttactaatgacttgcgtgtcaccatatctgctggtgtagcaacgcaaactgatccccttagtgggatcgactttttgctgaaaaatgctgatgatgctctttatcaagcaaagggagaggggcgtaataaagtgattgtatatagtgctatttga

SEQ ID NO: 222829 - DNA, 633 bp, Klebsiella pneumoniae; identical to SEQ ID NO: 32308

SEQ ID NO: 222830 - DNA, 1404 bp, Klebsiella pneumoniae
atgagcgcagaaagctcaggagtgtttactttgaaagagatcaaccggatcaagattatacaggacgtcattgaacgtcgcatcacaacgcgccgtgcggccgagcacctcggtatcagcgacaggcaatgccgcagacttcttgcccgttaccgtgaaggcggaccgcttggtatggccagcagacgatgtggcatgcgtggtaaccgccagttgccacccgggctcgcagatcaggctctggaactgatcaagacgcgttatgctgatttcggtccgactctggcgcgtgaaaagctcgaagaactccacggactgtttcttggcaaagaaactgtccggcgcatcatggtgcgggctggcttatgggttccccgtaaacaacgtgccgcaaggatccctcaaccacggtaccggcgtccgtgtactggtgagctgatacaaatagatggctgtgatcacgactggtttgaaggccgtggcccggcctgcaccgcgctggtctatgttgatgatgcaaccagcaaactgatggaactgttgtttgttaaatcggagtccacgttttcttacttcgaagccacgcggcgctatatcgataagcatggtaaaccgctggcactgtacagcgataaagccggtgtttttcgtgttaacaataaacacgccacaggcggagacgggcatactcagtttgggcgagccatgcatgaactgaacatccagactatctgtgcagaaaccagtcccgccaaagggcgtgtagaacgagctcacctcactttacaggatcgtctggtcaaagagctgcggttacagggcatttgttcaatggaggctgcaaatgacttcgctgaggcctatatggctgactataaccgccgttttggcaaagtaccgcgacatgattttgacgtacaccgtgctgtagaacatgatgaggacctggggcttattttcactgttcgtgaaaaacgtaaagtctcaaaatcgttgacgatacaatatgataaaatgttgtacctgattgaagacagcgaactgagtcgccgtgcaataggtaaatatatcgatgtgtataactatcctgatggcagaaaagagctgcgcctgaacggtacgctacttccctactctacctacgaccgactgtcagaaatcgaccagggcgcgattgtcgataacaagcgtcttggccgaaccctggagtttatcagtctggtgcagagcaagcgggataacacgcgctctcagtcaattcccgctggagatggcccttcccgacgacggccaaagcaggaagggaagaaatcccagcgctcactggataatgatgacatgctcgaagcactcaaacagcttcagtcacgttcagaggacatttttggtaaaagagcccgctga

SEQ ID NO: 222831 - DNA, 255 bp, Klebsiella pneumoniae
atgacgggaagaggcataaacacagtacgtatcggcgatgaagtgaagcacatcaccgagctcgatgcactaacactcatgcatgaatggtcaaaacttacaaaagaaaatgcagacctgtatgactataaccgtcaggttaaccgggggtggcgcggctttattcttcgcctgatgggtatccatttgcctgacaaaaaccgtgtttgtctttatggcattaatgccagaaaagaatccatctatcccgactga

SEQ ID NO: 222832 - DNA, 636 bp, Klebsiella pneumoniae
gtggataaagctttctgtactattgatgaaaaagaatggagcgcggatgcattttacgctttgcctctcgctgagatacaactaaagagacggagtttactctgtaccgaatgtcagggtgacgcatggttcagacgatcaagttacggaaatgactctccgcatttttgtgcacatcaccaagaaaattgctcactgggaacttcatacgaagctgttggggaaggggatgaaaataaaggattacctgcatcagatgctgacagtggcatagtattagacttgggattaacccaaagctatgacattgatgtcaaaacagcagcggatacctctgaaactacacctcagggacaaaaattcacgggtgaaaaaactgttgatggcgggagtataaaatatccagcacattttactttaaaaaatctactttacaagttggtgcagtcaaaaggattatgctatgccgataaaaagatagggtttaaagatcaattttttaacgatttaccggaccgtggggggagctgtttgtcgaatttattaatgttgcaccatggatggacggtgcccgtagagttttttggggatttattagtgatgttgggcaaacaagagatggtaaaatttggttaa

SEQ ID NO: 222833 - DNA, 294 bp, Klebsiella pneumoniae
atgaaattcctacctgcaacaaatatgcgggcggcgaagccatgcctgtcgcccgtgactatctggcaaatgttacttagtcgtctgctggaacagcattatggcctgacgctaaacgatacacctttctgtgatgaaaccgtcatacaggaatatatcgatgccggtatcactctggctaatgccgttaactttctggtggagaaacatgatttagtacgtatcgatcgcactggatttagctggcaagaacaaactccttaccttcggactgttgatattctagcgtgctag

SEQ ID NO: 222834 - DNA, 381 bp, Klebsiella pneumoniae
atgaacaatcactcagaatctggtgacgagccggagaatccagcctgccagcagtgggggctaaagagtacgatcacaccctgttttggagctcgtctggtgcaggaaggcagtcgggtgcattttctcgctgaccgcgccggttttaacggtgctttcagcgatgaggatgcgctgcgcctcgaccaggcatttccactgatactcaaacaactggaactaatgctcaccaccggcgagctcaatcctcgctatcagcactgcgccacgctttaccacaacggactcacctgcgaagccgatacgcttggtagttgtggttacgtatatatcgctgtttatcccactcaacgttcattactttcacgagagaaaaaatga

SEQ ID NO: 222835 - DNA, 306 bp, Klebsiella pneumoniae; identical to SEQ ID NO: 109125

SEQ ID NO: 222836 - DNA, 408 bp, Klebsiella pneumoniae; identical to SEQ ID NO: 109126

SEQ ID NO: 222837 - DNA, 888 bp, Klebsiella pneumoniae
atgaaacatctctcgggctacgcccttatccgccgtcacctgcggcgctatccacgctcactacgacaacatttgctgaaagaactcaatcagctcgtcacgtacgaaccagtgattggcattatgggtaaaaccggcgtcggtaagtcctcgctgtgtaacgcgctgtttcgtagtgaagtctgcgccgtgaatgcggtggaagcctgcacgcgtcagccacaacgggtccggctgcgcttcggcagccattatctgacgctggtcgacttgcccggcgtgggcgagtctgtttcccgcgacggtgaataccgtgagctgtatcgtgacctcatgccaaagctcgatatggtgttgtgggtgttaaaggcggatgaccgcgccttctcggtagaggagcagttttatcaggccgtttttgccgggtacaacgggccacggcctccattgatatgggtactgaatcaggcggacaagaccgaaccggcagagcaatggaactggtcttccgcgcaaccctcagcgctgcaggctgaacatattgctcagaaacaacaggcagttgcccgcctgctgggaattgcagagcgtgatgtactggtcatctccgtcagggggcgttaccggctgtcgcgcctggtggaggccatgattacccgtctcccaaagcagacccgcagcccgctggtaccgcaccttcaaaccggctatcgcacacaagtcgttatcagcagctcccgcaccggctttggcgaggcggtcgtggaggtgattgaccgcatcattgatttggccccgctgccgcaagttgcccgctcggcccttcaggccgtgacgcataccgtggcccgcgccgcccgcacgatctggtcctacttcttcggttga

SEQ ID NO: 222838 - DNA, 774 bp, Klebsiella pneumoniae
atgaatatcaaggagtttcctccgggagtaatggaacatcttggctggtatgtataccgattaattgatccaagggatggaagtaccttttacgtggggaaagggaaagggaatcgagtatttgctcatatgcgcggtgaagtcgctgcggttgatgatgatgaattgctcagtaataaactcaagcaacttcgagagataaggttggctggtcttgaagtcatccatgtaatccaccggcacggtatgacagatgaaaagaccgcgtacgaggttgaagctgcacttatcgacgcctaccccggtttaactaacattatgagcggtgctggcagtaatgaatatggtccagcacacatcaaagaattaatcgcaacataccaacccgaaacagtcgtgttccaacataaagtcctgatgatttccgtgaatagaagttcaaaggatgtagacctctatgatgccgtacgatttagctggcgtgtacgtgttgagcgtgcgcgtaaggctgaatttatactggctacagtgaggggaatcgtcagaggggtttatatagctgatgagtggctcgaatcaacccgtgagaatttccctgagatgccttcatgggatgcagatgatgagtttgaatctactcaaaaatcccgctttggattcaggggaagactcgcccctcctgatatagcaaaaatttaccttggtaaaaagattccggacgtcctaagaaagaaaggcgctatgtctcctgtgaaatattctccagatttttga

SEQ ID NO: 222839 - DNA, 1209 bp, Klebsiella pneumoniae
atggcaggcctgaaggatgactttagagtgtttgacttacgccgggaagacctggcctatgagagtcctaaccaagggtggggggaaatcagccatcaatatttctttgttgggttcgagcgtctggaggaggatgaaaggccagataaggatgaaaaatccaaagctagcttcaggatgttcgatatgctggacaaactttatctgagtcaggcgaccagcgatgggcaagagtttagaagaccgaagacgaagtttcgtgattctcagccaatccacagcgaacagttagagaaaaagtggaaggatgcgcttgtaaaagcgatatctgataaagagaaggcattatcttatctcagcgagaactatcggaaggttgtaagaaagcatcctcaggttgaaatgttgactctgtgtttttatttacctcttgataaaagtgagaagatgctgaacatacggaggaaaaaagatgactctcgtttcagactacaactcgctgaacttgaacgacgctttaccttgatgaggaaaaggataattgcggatccgctttataaagccgcctgtggttactcgcgagtgatactgataaatgcgagatttgagcctttctatctggtgaatttctttttcaaaaggcatccagacagtcggatcgacagcttagtctcattagacatttacaggaaatgggtgcaatcgggtaagaaagaaaacaaatctggtgaggaggttgggtactattgctttaaggatgcatcccggccatatgttccagaagacagtgggctatttatccgcaggccagaccgattaaccgatgttggccaattttcagacccgatctcgttggttttatcagaagaaaggaaattcgaaaacaaccgcaaagattatctggctttctgtcgccttcaggcccaaatctataatgttattcctggtgcacgaaccctgacatgttctgacgattttacctacatcaacgcagccgagaagaaacgcagaaaagccaaaaaaaaggacctgaagaagaaatccaaaacagcattacatatcactgaaacttcagctatacccggaaatgatctctatgataaagagggctctcccgagtcgccttacctgctcgacgaatttaatgatgacctgccttcaaactttgaggagcatgtctacaggattttaaaagaggagaagccgtaa

SEQ ID NO: 222840 - DNA, 588 bp, Klebsiella pneumoniae
atgagctaccacgacacgaccgatatcaatctcagctacgttcagcacacagccctgagccgaaagctacgacgccatcaggaccagttatttgagcgttattccaagctgttgatgctacgggtggacttctcttaccttcaggacagcgattcgcatggtgagggagatattcattcgacagtagcggatatcacattactgattcaacgctgcggggatatcaacgggctggtgggttacgcatgggtactggaacaaaccgaacagcatggttaccacatccacgccgcgttttacctcaacggtcagaagcatcgccaggtctggaccgtctttgaagcactcagggacacctggaagtatgtgacatggggagaaggacacacacatcgttgtgagcctaaagagcattatcgcgtgagaggagaatgggtgacctcttatgacgatgccaggggccgcagaggtatgcagtacatcctgagctacctcagcaagcaggcacagaaaagcctgggggttatctgccagttgagtaatattcctgcgccacagacagcaggcaggcgccgaaaagccagttaa

SEQ ID NO: 222841 - DNA, 207 bp, Klebsiella pneumoniae
atgatcacacctgccagccttcttaccgacaaatttgtcgatatggcgtttatcacacaactcaccggcttaacggacaaatggttctacaaactgattaaagacggggcgttcccaaagcccattaagctgggcagaagttctcgctggcttcagagcgaagtggaagcctggctacagcaacgcattgcgcagtcccgtcagtaa

SEQ ID NO: 222842 - DNA, 384 bp, Klebsiella pneumoniae
atgacgatttacgccaaatcttttatcgcccttgatggtaatcagcgcctcacgggcgcggccactgcacagcttcacccttacgaccgctacacctgccacctctgcggcagcgctctgttattccatcctgaatggggtactaaccgcccgtggtttgagcacacatgggaagacctgacggagaacggacgccaccattgtccgtatgtacgccctgagcctaaggaagctaggcggatacgcatgctgcgccgttatgtgcctgatatcttaccactagtgctcaaggccgaatggcactgttcggagtgcgacagcgattatcatggtgagcgctattgtctgacctgccgtaccggtgaccacagtaccgaacgttga

SEQ ID NO: 222843 - DNA, 1626 bp, Klebsiella pneumoniae
atggatatccgaattatcaattttagcgaagaaaaacgtcccgccgatttggcactgtattggtatcaggtcggcctgaaatcctcccgccaacagacggtttcacttaccggtgatatcacagacatgatttcgcaggccgtaatggatgaatggaagcaggcgctgaagctgcttgtgaaacaggaaaatatcaaagcactggcgaaaagatatccgaattttatgcagtggatcgcgctcattaccgctcaaggacccggtgttgcattgcaaaatggacataatctattttccgacttagcgataacggatccctacgatcaggttaatgaccgcctctttgtcagtcaggcgcgaactatcgtgacgcgcaaaactgtttttttgttgccagacagctcgccatcaagctcagcgctgcatcgggaggatgtccgtaacgaatttatccgttccctttatgcattcctcagcgcaggaaatacctctatcgcactggcaaaatccggaaataaaaccggcggagatgtttcaattttcaacaccgtgctggcgtcgctgtttgctaggaattcgcaattacggttggatgaagacacgggcattcacatcaagcatggccccttgcttatcgagggagataccggcaccgggaaaagcgcggcggctaaacatctggctacgaagatgggtaaagcaatggttgaaattaaccttgccgccgtcagtgaaacattgctggagacccgcatgcggggatcaacgagtggcgcatttaccggtgcgatcaacaaaaaaggcttttttgaagaagcacataatggtgtgctcttcctagatgaactgcaaagcgcaagtctggcctcacaaacacagttactggatttattgtctgctatcagtaacgacgtctggatcagcaaagtgggggaggatgcgtcgaagagaaaatacgatgtcaaagtggtactcgcggtcaatgagcccgtctcgcgcctgctggccgaaggtcggttacgccgcgatttgtttcatcgtatccgcgacgtagtgaaattcaaatcactcaacgagctgtttgctcaggaccgtgcacacgcgttgttaacactcatcctcacgctctaccgatggaaatcctttaaccagcccgtttttgccagcgatggagaagcgatacaggcgttgtcgcagctttttacggtttatgaagagggtgttatagagaaaatattgtgcgccccttggccaggaaactttcgccaactggaacgctttgcgtgggatctcttctttgtcctcggcgacagaaccagagtgaccaacgagattattgaccgtctgctcaaagaggaagcaaatcgtattcctgcctcttttattgatgcacagccaatcaacaacgagcaaactgtccccaaaatattcagcgaagtggaaaacattatcaaaaaaaatcatttcaacttgaaagcctcgctgcctgaacttggtgtgtatcgtctgcgaacctacaatgctctgaaaggatttattcgcgaaaacagagcccagttcagcgaggggtttctggctgactccaaaattacgaagatcatcacctccgcgattgcaggacggtag

SEQ ID NO: 222844 - DNA, 366 bp, Klebsiella pneumoniae
atgaatatccaaattgcgagtccagaccagatcagtaaactgttagcctttattgccgtgaaagccaaagggacacgcttcgaaatcccggctagcttgctgcaaaacgttgaaagcgaactgcgtgatttctgcaaagcgcaccgtattacggttcagtttaaagatgcttcaaccgggcgtgttattgttttttgtgccgcaggggcggcaaccggtactgtggtgggggctatgtgcggtggcatgcttggcgcgttgaccggcgcgctgctcgggagtgcggcaggcgcagctttagcgcagatgcgtattaccatttatccggtagcgggtagcgataatcttgtcttggcattagcctaa

SEQ ID NO: 222845 - DNA, 1257 bp, Klebsiella pneumoniae
atgagcaaaactctttcactcgttgatgtattacaacgctcgctggcacagaacaaagaagatattacgccactgcttggctatcttagcaccaccaaggaagaattgaaggtacagatggagcgcagcagcacccgttccgatgcggaaaaaattgcccattacctgcgcaaaatgggcagcaatgatattgccagcctgtttcgcagtggcgaaggtgtggaatatgaagaaatcgtctgtgatgttggcgaaaagctcaaggttagaggggtcaacaaaaacatgtcggtagaaatcaacgaagagttcatcattcagcatctcttttccgatgcactgaaaaaaatgagtgatgaagaacgcagcgcgttaatgcgttcgatgaacctttccgagaaagatcagggggcaattctggcgggtacattaatggcctcacaggtgatgctgaaccagtttggcggctttgcggtgtatcggatgtccgtcattctggccaacatgctggcccgctctctgatgggtaatggcctcaactttgcggcaaatgcggcgctggtacgcggtgtcggtgcattcttagggccaattggttggatcgcttccggcgcatggctggcggtagaaattgcaggccctgcgtttcgtaagacggttccggcgatcgtacatatcgcgatgctgcgtcagaacgtattaaaacgcctgactatcagcgtagtgggagatggttccgtcggcaaagatgcgctctttaaaagcgtattcggtgttgataccggcaatatcaatcctattgctggctctacatccgatactaaagtgtatgaccttggtcacacaggtactattaaacttattaacttccctggatttcacgacgtgcgttccgaggtcaatgacttggtgaatgataatatcaagcataccgatctgttcctgctggtggtagacgtcaaccgtggtgtgtcaggtcatgacgtgcagacactggagaagttaaaggcggagggcaagcctgtgttggtctgtctgaacaaggtggatatgctgcgcccgaatgataaagataggatggttcatgtcgccaaaacacgccttcagaacccctatgtgattgaaacggcctttgaccctgatccgcgcttgtcgcaggatggtccgatcggcacacaggtcgtgtttgactgggtggtaaatcagttagaggcgcagggtaaagagaccgcacacctgaaagccgagcagaaataa

SEQ ID NO: 222846 - DNA, 201 bp, Klebsiella pneumoniae
gtgctggtgaataccggcgaccccggcattatgccggccacattacgcaccgagttcttgttgctgcgcgaggcagcgcttgagtttaaggttggtcgcaccatagctgaatgctggctggaggctttgcgtcagtacggtattgagcaatttcatcgcaatcatttgccggtattctgcaccacattgttccatgaatga

SEQ ID NO: 222847 - DNA, 228 bp, Klebsiella pneumoniae
atggcgactagttacataagtgaacatagtgctgagtattatttagtaccagcactaaagaagattttgcaggaaaaatatagccatgtcgcccctgtgtttccgtggatgtctcgagagttttgtaagatctcaaggcgccttcataaagatgacctgtttcatgtgctagtaatgtttccgcgtagaccaaaatttaatgtccagataatggcgaaatatatgtga

SEQ ID NO: 222848 - DNA, 2724 bp, Klebsiella pneumoniae
atgcttaaaggtgcacaggataacttcgagctcaataactcattctatatccatctttatgagttttataatcagaagcggggtctggtacgaaaacaccttactcgtttaagtaaggcatttctggactacaacgatccgtcccgtcctggaagctttcttcgagtacctcagttcgaggcgctcgaagtatatgttttcttaaaggagtttttggataataaacctgtctatcagttgttcgaagattggtatacaagccaaggtaaattcgaaggtcgagtaaccggtatcgatgctgttgaaggtcagatcgtccagggcgatatgttctgggagatgtctcaaaaagattacaaaggcatttttaaaaatatgatggccactaatggtggtcgtttgtatccaaactacatctttgcactaacaatggggacgggaaaaactatcctcatggcaacgtgtattttttatgatttccttgcggggaataaaaaaggtaacgatgaacgttttatccagaatgcgctgatttttgcgccagataaaacggtattgcaatcattacgtgaaatcgaatcgtttgatcactcgaaggttgtaccatcagaatacatgccgctcgtcgcagaatttaagttccattaccttgaggatgctggtgtatcgttaaatactctcgatggttcgaaattcaatattatcgtttcgaacagccaaaaaattatcttgaaaagagatagcaaaggtaaatcaaccaccgacaaactttttagttctggcaaagatatctatcaaggcttaggtgatattggtgatgcagttgctgatcttcttaatattgactctgattcgcttgctgtagctcctgaaaccgaaggtgatttggtaactaaccagcgatttgaaaaacttaaacgccttccacaattaggtattttcgttgacgaagcacatcacgcatttggtgatcagttggccaaagatatgggtgttaagaaagtgaccaattctttgcgaaagaccatagatgaacttgctataaacctaaaatatgcgggaaccaaagtcgttggttgttacaactacacaggtacaccttatgtgggtaaaagcgtcttacctgaggttgtatacgcctatggtttgcgtaaagcgatcaataataattatctcaaacaggttcgtttaaacggttacagtaacactcgtcatgtggattttcttgatattgcgatcaataatttccttgatgaaatggaaagtttgaatgaaacattcgtagatgaaaatggtaatgaagtaacaaagttttttcgtccagaaaacctgctaccgaaaatggcaattttcggtgcaaccattgaagaaattgtcacagaaattcgccctgctgtagaaaatattttggctaagcgaggaatttcatcggatcgtattttagtgaacgttggtgattcaaagctcactgcggatgatgatattcgtgaatttaatcgtctcgatacaccccaatcagaaaagcagtttatcttacttgtcaacaaaggccgtgaaggctggaactgtcgttcgcttttctctgtagcaatgtaccgtgaaccgaagtcaaaagtctttgtactccaggctactatgcgctgtttacgagcaattggtaaaatgcaattcactgggcatgtttatctcagtcaggataatttaaaacttcttgataaagagttagaagcaaatttccgtgtgtcagtagatgacatcaaagaaccagatccgaacaaagaggtggtaaaggttagagttcaacaaccatcaatcaaaattccaatcaaacgtgttcgccgtaactataagttagttgaaaaagactatataacaaagggatataaactcggtttagacgaagtggagttagatgattatcgcttgattcatgaagttcgcaatggaatgaaaatgcccgatgatgttggttacaataaaaaaccgataagggatgacctttcttacctaaaggttcaacgtaaattctcccgaatttccctagtggcagatattgctagatatctaaacaagtcgtgcattgaaatcgataaaattgtttcacttactgaagaaggttttgaggggatattgaccttggttaaccagtttaatgaggttctttatgatcaggttattccacgtttattcaaagcaatatacgacgtaaactctgaaaatatcgaagaggagtttgaggttgacctggtgaaagaaccgccaattgatcctggttattatactgtgtcggcatctaaagataagattattcgtaaatctgatatcgatgtgcttgatgttgtggaacgtagtttccacttggacagctattgctttgactcgacgccggaaagacagtttttctgggacatgctccacaacggcaaagttgagaaaatatggttcactggtatgttaactcatggtcagagtgattttgttattcactacgtggattcagatactcaacgagtacgtagttactatccagacttcctgattaagaaacaggatggttcttacgtaatgatcgaagtcaaaggcgagcatatgatcgattctcaaaacgtcaaggataagaaggaggctgctgaactgatgggggtttctgctggcattggctatgagattataccgggtaagtcagcagcaataggatcttatgggcgagaatttttgaactag

SEQ ID NO: 222849 - DNA, 555 bp, Klebsiella pneumoniae
gtgaaaattatgcctgtaaaccgtattgcgacaaaagaggatttgaatgaacttgtagctaccttcccatataaaaagtttgaagagcgtaaatcagagaacccaaccaaacctgtagaagagatcatgcttatatgtatggggcatgagccagggttaggagccgttcttgaaaatgaatgcggctacaagctcaaagtagaagtggttgatattttgcgtgataaatctaatttgaccttcaagtacgattcggaagcagtgatcaaagtccaggatggaaaacttgttgtcgaagctttctaccctcgtaacttgctacaaaaactaagccagcaaaaagaagatgtcacagagtggcgtgagatggttgaatctatcatgattgactggaattacgatggcgcggtcatggagcccatcgttattgatattccggaaaaaaacgagtttgttgttggtgaatatgagatccctgatggtgtaagcaatattaaaattaagatcacggatttgttatcagagtcttatgaagaggtgattgcacatgcttaa

SEQ ID NO: 222850 - DNA, 435 bp, Klebsiella pneumoniae; identical to SEQ ID NO: 214468

SEQ ID NO: 222851 - DNA, 180 bp, Klebsiella pneumoniae
atggcaaagactattaaaattactcaaacccgcagtgcaatcggtcgtctgccgaaacacaaggcaacgctgcttggcctgggtctgcgtcgtattggtcacaccatagagcgcgaggatactcctgctgttcgtggtatggtcaacgcggtttccttcatggttaaagttgaggagtaa

SEQ ID NO: 222852 - DNA, 504 bp, Klebsiella pneumoniae; identical to SEQ ID NO: 214470

SEQ ID NO: 222853 - DNA, 786 bp, Klebsiella pneumoniae; identical to SEQ ID NO: 16905

SEQ ID NO: 222854 - DNA, 780 bp, Klebsiella pneumoniae; identical to SEQ ID NO: 56175

SEQ ID NO: 222855 - DNA, 492 bp, Klebsiella pneumoniae; identical to SEQ ID NO: 15993

SEQ ID NO: 222856 - DNA, 738 bp, Klebsiella pneumoniae; identical to SEQ ID NO: 118601

SEQ ID NO: 222857 - DNA, 225 bp, Klebsiella pneumoniae; identical to SEQ ID NO: 13704

SEQ ID NO: 222858 - DNA, 1494 bp, Klebsiella pneumoniae; identical to SEQ ID NO: 13713

SEQ ID NO: 222859 - DNA, 303 bp, Klebsiella pneumoniae; identical to SEQ ID NO: 24284

SEQ ID NO: 222860 - DNA, 816 bp, Klebsiella pneumoniae; identical to SEQ ID NO: 6090

SEQ ID NO: 222861 - DNA, 657 bp, Klebsiella pneumoniae; identical to SEQ ID NO: 16007

SEQ ID NO: 222862 - DNA, 1185 bp, Klebsiella pneumoniae; identical to SEQ ID NO: 16006

SEQ ID NO: 222863 - DNA, 1110 bp, Klebsiella pneumoniae; identical to SEQ ID NO: 95539

SEQ ID NO: 222864 - DNA, 435 bp, Klebsiella pneumoniae; identical to SEQ ID NO: 25497

SEQ ID NO: 222865 - DNA, 861 bp, Klebsiella pneumoniae
atgaaacagattacaggagtctacaccgcgcccgcgcagcattgggtaggcgacggcttcccggttcgttcgatgttttcctatcagacgcacggccagcagctgagccccttcttactgctcgactatgccgggccgtacaccttcccggcgggcagcgataaacgcggcgtcggtgagcatccgcatcgcggattcgaaaccgtcaccatcgtctacgccggtgaggtagaacatcgtgactccaccggccgtggcggggtaattggcccaggcgacgtgcagtggatgacggctggcgccgggatcctgcacgaagagttccactcggaggccttcacccgcagcggcggcgagctgaagatgatccagctgtgggtcaacctgcccgccaaagacaaaatgacggcccccggctaccagagcattaccgccgggacgatccccaccgtcgcgctgacgaatggcgccggacaggttcgggttattgccggccagtatgacgacgtcagcggcccggcccataccttctcaccgcttaacgtgtgggatatgcagctgaatcaggggagcgacctcacgctgcgccagccggaaggctggagtaccgcgctggtggtactggaaggggaagtgatcatcaacggttccgaatccgcccgcgaaggacagctcgccgtcctgagccaggcaggagaggcactgcatctggaggcgaccgctctggcaaaagttctgctgatggccggagaaccgctgcaggagccgattgtgggctatggcccctttgtcatgaataacaaaacgcagatcgcagaagccgttcgcgattttaacagcggccgctttggccaaatctaa

SEQ ID NO: 222866 - DNA, 2439 bp, Klebsiella pneumoniae
atgagtaacgacgttaaattgcaggttttactcaaggctgttgaccaggcgacccgcccgtttaaatccatccagacagcgagtaaaacgctgtctggtgatattcgggacactcaaaaatcactgcgtgaactgaatggccaggcatcccgtattgacgggtttcgcaaggcaagcgcgcaactcgccgttaccggtcaggagctgaagaaagcgaagcaggaagccgccgcgctggcgatccagtttaaaaatacggaacagccgacgcgcgcgcaggcgcaggcaatggatgccgcacgtaaaagcgccgcagcgctccagctcaaacacaacagcttgcggcaggctgtacaacgccagaggcaggagctcagccaggcgggaatcaatacccgcaccctggcggcagacgagcgtcggttaaaaaccagcatcagcgaaacgacggcgcagctcaatcgacagcgtgaagcgctggcgcgggtcagcgcgcaacaggcaaagctcaacgcggttaaacagcgatatcaggccggtaaagagatggccggtaaaatggccggtgcgggtgctgccggggttggtatcgcgacagcgggaacaatggccggggttaagctgatggtgccgggctatgatttctcattaaaaaattctgagttgcaggcagtactcggcgtggcgaaagattcagcagaaatgacggctttgaaaaaacaagcccgacagctcggcgacaatactgccgcctctgctgatgatgccgcagcagcacaggtaatcgtagctaaatctggcgctgataaagatggcattttggctcaaactcccgccattctgaatatgtcgttagcgaacaaaaaaacaatggaggaaaacgctactctacttatcgggacaaaatccgcctttgggcttgctgatgataaggcgtcgcatatcgctgacgttatatctatggcgatgaataaaactcaggccacctttgaagggttaagcgattcacttacatatgttggcccggttgctaaagatgccggtgttagtctggaagaaactgctgcgatgctgggcgcgttacacgacgcaaaaatcaccgggtcaatggcagggactggaggccgtgcaatattaagtcgtttgcaagctccaacaggtcaggcttatgcggcgattaaagagcttggagttaagacaatggacagcaaaggtaatacgcgtccggtctttaccattctgaaagaaatgcaggccagctttaagcgcaacaacctcggaaccggtcaaaaggccgaatacatgaaaacgatattcggtgaggaggcaagttcagctgccagcgtattaatgacagcggcggccagtggaaaactggataacctgaccaaattaattaaagaatctgacggcaaaacagaggagctggtcaaggttatgcaggataacctcggcggtgacttcaaagagtttcagtctgcttatgaggctgtgggtactgacctctacgaccagcaagatagctcgttgcgtcagctcactcagacagcaacgcgatacgtgttaaagctcgatgactggatcaaaaacaacaaggagttagcggaaactattggcatcattgccggtggcgcactggctcttattggcattatcggcggaattggtctcgttgcgtggccggtagtcatggggattaacgccattattgctgccgctggcgtgatgggtaccgtctttactgtcgctggtagtgccattgcaaccgcgctcggtgcgatcacatggccgattgtggccgtcggtgcggcgattgtggccggggcgctgcttatccgtaaatattgggaacccatcagcgcatttttctcaggggtgattgaaggcatcatcagcgcctttgcaccggtcggggaaatgttcgctccactggcccccatttttgacggcctcggcgagaaattgcgcaaagtctggcagtggtttaaagacctgattgcgccagtcaaggccacgcaggagacgctcgatagctgcaaaaatgttggtatcgttttcggtcaggctctggccgatgcactgatgttacctctgaatattttcaataagctgcgcggtggcctcgatgtcattctcgaaaagctcggccttgtgaaaaaggagtcgaacagcattgatgcagaaacatcaaaagcgtcgtcggttggtcagggtggtggctatatcccggcgacaagctcacttggcgggtatcaggcttatcagcctgttacggcacccgtcggtcgtacctacattgaccagagcagcccaacctatcaaatcaacatgccgggtggcgcaccgggcggtcaactcggaaatcagttgcaggatgcgttagaaaaatatgaacgcgacaagcgagccaaagcccgcgccagcatgatgcacgattaa

SEQ ID NO: 222867 - DNA, 1065 bp, Klebsiella pneumoniae
atgcctgatttaactttcagcaccattctgaccaccgccggtgcggaaaagctggcgcgccttcatgcggcaggtcaggcgctgacccttaccgaaatggctgtgggtgacggcaattgtcagagtcttgccccgaccccggaggcgacgggcctggtcagtgagcgtcaccggggctttctgaacaaaatccgtgtcgccgacagcgccgccagcattatcgaatcggagctgctgatttcagcccagaccggcggattctggactaacgaagccgcgctctatgatgaggacgggatctgtatcgcggttgccagcctgcccccgacctataagcccctgtcatcgcagggggccgcgaaataccagatagtgcggatgaatattgccgtcagcagtaccgatgccgtcaccatcaccgataatccgtcggtggtgattgccacggcggaggacgtcaaccgggcagaagataacgccaaagactatgccgatgagcagttgcaggcactggacaccgcgactcaggaagccatccggaagttgttgcgggatgcctgggagcaggacaaccccgtcggcaccacgcggtttttcagccacaacctgaatccgaatgaaaaatggccgtggtcgcagtggcagtacaccggggaaaacaaatccatccgcatcggcaaggcggatggctcgaacgtgggcgcgactggcggcagtgataccgtcacgctccagcgcactaacctgcccgccgtgcagattgacgttaccggcgaaaccagcgaattgcccgaggcaacgctaacctctaaacctgccggcaggcacaaacatggcggcgtacccagccgggaagacccctgggagattggtggtgatatcagccagcgttttaacccggcaaaactgggcgacacggatgaagctgaagaccatcagcatgaagttgtgcaaccggcgcacaaacacacgaccagcggcaaaaccgcaaacctcggcgaaggtaaatcgttcagcgtggtggaagcccacaccctgctgatgtgctggagccgcgttgcctga

SEQ ID NO: 222868 - DNA, 180 bp, Klebsiella pneumoniae
atggaaagctttgatagctatgaaaactttaacgactggtacgaggcgttgattaaagtcggggaggctgtggagaagacgttttcctacaaactgatgttcctggaattttacgaccggggcatgacgccggaagaaacgctgactcacattatcgaaaacggcattgtgacggaataa

SEQ ID NO: 222869 - DNA, 1728 bp, Klebsiella pneumoniae
atgagaattaacgagatttcccagtgggaagaagaaatttatctcctgcgacgaaatgaccgggtgctgggcggtgtgaatggtgtcgccaacatgcaggcgcagcagcttgccaaccgcacgcaatacctgaaagagcttgcggagcagcaaggtgaagacatgggcggcgcgatcacatccctgcgcagtgacctgaaaagcccggcaggttgggggaatactatttccgccggttatcagagcatggaaagccgctttcaggagcaggcgaccatctttgattttattaaaaacgaaacggatatccagaccctgaaatatgccgccggggtggatgtggacgtgtcccgcgcggttgaggatgccattaaagccggtaagactgcgctttattttccgccggtgccgggtgtctataacatcggtgatgtggacggcgcgcagtccggatttattattcatggtcatgcccgtaaaccctataccgtcagcacagattcttcattcaatggctgcggaacggtcattcgtcttttgccgggggcgacccgcctgatgacctttaatacccgcatgacgtttatcaatgttctgctggatgggcgctcactttcggtcaacctgatgcagggcaccacgcagctcaacggatgccggtttatcagttgcggggtatatcgctggtcaacggcattcggcagggtaaataactatatcggtacactctatgtgaaggatacaaacgtcagtgagaatgttaccggcttttacaacctgattgattcccgtgttatcgactcgacgattaacaaaaattacggacgtggtgtcagcttactgagcggtgctaacaataatgttttccttggcgttcgtaatgagtggaatgaaaaggaaaactactactcctacggcggcgggctgaatgaagtttccggggagttgtgcgaccgtgccggactggcggcgtttgtggcttccggtggcgggagctggattgtcagcaaccatgttatccggcgttcggggaaaaatgccaccgcaggctctgacgataactgtcatttccgggtggagggggcgggttctttcatcatgttgtccaacgtcatgacgctggccggtcgtggtgacagtggagaaggcaacctcagcccggaacggaccttcatcacaaccggtaattccgctgatatgaaagtgattgctgccggatgtgacctttccgggtgtacttcggtttccggcattatccgggaaaaaaccactgctattaaaaacatcagcgggtgtctcggcacccctgatatctgtaattccgggctagcgcagtgtgaggatggccatgaatatatcggtcctccattgaaaaaaggcattctcactgcgaatggaactctggtctacacacatacgcaaaaggctcttgaatcatggcagtcccctgttttcaggatgctgaaaatacaggttcgccgtccgtttgacggtaataccgagtattaccgggtgccgatgagttttaaatacgaaagcactgccgtggcaatgactgtcatttcatcagagcagaaaagcgggccgtctggtgcgtggggatatggtgacggctcatccgttgcggtcagcatcaacgtttcggcggatggctcgaccctcagtgtcacgctgaccggcaaggataaatatgaccgtgaagttaactcatacctggagaactggtga

SEQ ID NO: 222870 - DNA, 603 bp, Klebsiella pneumoniae
atggcgaccgggtcgtcggtgctggaacaaagagccgccgaagcgtgcgccgtcatcagcgatttatctgttccgctgcgtgatttatggaacccctggaagtgcccggcaaagttcctgccgtatctggcctgggcgttttctgttgacggatgggatgagggatggagtgaacaggagaagcgccgcgttatcggtgaatccttctggctccatcagcgcaaaggcaccgtcgccgcccttcgtcgggtggtggaaagcatggggtacaacctgtccgtcgaagagtggtggcaggtggccgacccggcaggcacattccgcatcaccgtcgatgtgaatgatatcggtattacagaggctctgttaatcgagctggaacggcggattgatatcacaaagccggtcagtcgccatctttccggcatcaccatgctcaccaggacggcgggagacatttattacggcatggcggtaagcgagggggatgttatcagcgtctggcctgcgggctatgagccggatatgagtattttttataacggtcgtcagtattttgacggcgaatgtgtgtttaccgggaatgacagcgatgagaattaa

SEQ ID NO: 222871 - DNA, 432 bp, Klebsiella pneumoniae
atgtctaaaaacctcgatttatttaaccaacagacggcggaaatctttgcggtgctatgggagaactttcccgttccgcaagtcatcacctacgaaaaatttaacgcagcactacccgatgactactttaaccaacttaactcaccggaaatgaaagcaataaatcaattgcgtagtgtggttgaaggtacattcacttttcttggtgaaaatggatacatccagtatgaaaccgaccatcaaacgtattttatggatgtgcgcctgaccgagaaagcactggctgtgctcaataaaaagcccgattcgcttgggagcagcgaaacgatgggggataaaattatcagcgcggtgaaagagggaactccgggggttattgccggggcggtgacgaatctgcttactctcggggttaatctagtaaccagctaa

SEQ ID NO: 222872 - DNA, 474 bp, Klebsiella pneumoniae
atgagcctccgcatcgaaatcggcgacaaatgggtaattaccggcgaccaatatcaattcatcctgaatgaaaagaaagtcgctcaatccgggaaaaaagctggcgaggaatggctcgacactattggatattacccgaaaattaatcagcttatttccgggctgattcatcatcatatccagcagtcgaccatcacctcaattgaggaaatggccgcagagattaagcgcatcggcgcactatgtggcgatgtatttaacgtcatggaacaaagcgaaaaaattggaggttgtaactggatatcgtggaatgaattaagcgaacgcggtcttatcatccgtattaataaagagattctacaccctattgggctggcggttttccgtgaccctcaaacaggtatatcacggggcgctttaatttcccctgatggtgtatgggaatatgaccagtccgtttcagtgaaggggtga

SEQ ID NO: 222873 - DNA, 624 bp, Klebsiella pneumoniae
atgaacaacagaaaaccgacaaaccagttaaaagacagtaccttatctgaattaattgcagcaatatctctcaatgagaaatcgctgccgctcgcgctaactcgcgttgcgttatgcgaactacaagagcgccgcaaggatgatgcagaccgtgcgccggtagtttcttcgctttttatttcaggtgttcgtgatgaggatggcgactgcactgcggttgacgatattgccgcacaattctggaccgtgtaccgccgtaacgaggatgggacctgcgatgcgctgatggactttatgagcagggaaagtgcggaaacagcgattaaaatgattgctaagaagcccgtacaaaccggtgtcgatgacgatgtgcgcaacataattgggctattagaaaccaatgaatgggcagagcattgcacggaaactgtattaggttcgcgtctggaagcggaaataacacgactcgttggtagcatgcagtcagcgccggtagtgccggaagatatccccgacagcgtttacgaaattttatgccaggcatgcggtggaaaagcttggatgtatgaggaggcgctctggaacgcctgccgtgccgccatgttgaaaggtggtgcagcatga

SEQ ID NO: 222874 - DNA, 201 bp, Klebsiella pneumoniae
atgttgactaacgaaccgtcattcgcctctctgctcaaaaaacgtagcccatccatgcactacgggcacggctggataatgggtagcgacggccagcgctggcacccttgctgctctcagtccgaattgttgaacggcttaacagcaaaaaaagtctctgcggttaagcggcttttaaatgcattaatgggggcaaaatga

SEQ ID NO: 222875 - DNA, 210 bp, Klebsiella pneumoniae
atgattattggcgcactgattttaaccattgccggccttttactcaccatcatggctgggtatttgtcggcaaataatctaagccctttaccagccatgctgggtgtcatcggtacagttattgttattgcagcacttgccctggctcatggtcctggcaaagtcaataccccggattcgcccgttgttactcaggaggcaggtaaatga

SEQ ID NO: 222876 - DNA, 129 bp, Klebsiella pneumoniae
atgaataaaaaactcatagctgaagcctcccgttttcagtcatcgcaagagcggaaagggttctggtggttaattctgggaactgtatttactgctttaaccggcttcttcatttttaatttactttga

SEQ ID NO: 222877 - DNA, 126 bp, Klebsiella pneumoniae
atgaagctaactgtcggaaatattcttttactgtgcgtactgggctgcgttgtcatctgggttgctgtcgggtttatcggttattacaccgttatcgctgccctggattattttaataaaccgtaa

SEQ ID NO: 222878 - DNA, 195 bp, Klebsiella pneumoniae
atgtctctgttatgcaaacgttgtgacaacccggtcgatgatctggattttgagcaggcaaccattatggaaagttttgatggtacgtggtgtatcgacctgattctgaaatgccctcactgcggactttcctataacgcttttgtccccacagctgaattacaacctctgacaggtgatgaaaatgacaaatga

SEQ ID NO: 222879 - DNA, 522 bp, Klebsiella pneumoniae
atggcaaaagcaaaaaagcgacttaaagcaactgctgcattatatgtcgcgcagacgaaagaagaggttattgcgggaattaaacagcttggtgatattcagagggaacttacccgcgttgaaacagaaatgaatgattcaatcgcggaaattaccgccagtcattccccggctatcgaggggctgaaagccaaaatggaggagttacagaacggaattcagacgtggtgtgaggctcatcgtgacgaactgaccaataacggcaaggttaaatttgctaatctcactaccggagaggtgcaatggcggaaccgtccaccgtcagtcaatattcgcggggctgatgcggtcattgattttctgaagcgactggggctcaagcgtttcattcgtactaaggaagaattaaataaagaggcgatgctgaatgaaaaagatgccgtgaaaaatatccccggcattaccataaaaacggatattgaagatttttccattattccgtttgagcaggaagtactgtaa

SEQ ID NO: 222880 - DNA, 285 bp, Klebsiella pneumoniae
atgaaaagcaacgaatacgagcaattaaagaaagaaaccgaccacgcggacgactgggcgagtggggtttttgttgcattgtttgatgtactgatggcaatggcgcatgagcatcctgaagtcctgaaccgccttgaaccccagtggaaagaggcatatgacgattacaatcatgctgttcagaaccgccacgtagggcagtctgcccgattacttgaggcccgaaagatgctttatgggatgctgaaaactcagggggcatttgatttacatcgtcctgattaa

SEQ ID NO: 222881 - DNA, 948 bp, Klebsiella pneumoniae
atggcacgtaccaaatcgcaacctgctgaactaataccggacgtcgcgttaaatcctgaacttgaggccacccagaacctgatggccacggtcagcagccagatgaatgacgaacgtgacctgctcaaccagctactgggtcaggctcagatggcgggtgctttcgaagatttttcccgcacggtgcggacttctaaactggcttttgttaaggaaaacaagctgtaccggaatttaaaggatgcaaaaaatccgcacggtgcggaaaaactatctggaacttgggaagagttttgcggcttgctgggcaggtctgttgatcaagtagacagagatattgccaatcttaccgccttcggcgaagaagccctggaatccatgtcccgcatgggcatcggctaccgcgagctgcgccagttccgtcgcctgccggaagaccagaaaagcgccctgatcgaggttgccaaagaaggcgacaaaaccgcgctgcttgaacttgccgaagaaatgatcgccaaacatgcccgcgagaaggaagagctgaagaccgaccttgaaatcagtcgccagatgctggccgagaaaaaagaagaactcggcacgatgcgcaatgaaaaagaggagcttaaatcccgtctggttcgccgcaccaccactgaaacaccggacgaagaaggcgtggcgcttgaaacggaagtcaccggctttaaaagcggagttctcagcgcgttctttgaccttaaaagcggtttcaacgcactgaccgagcacacagaacgcaccggtatcaaccacaccggcatgatggcgggcctgctcgatgaccttcaggcgcagtttgaagagctgcgtcaggaattcagcctgccggaagcccgcgaaaccagcgtgattccggactgggtaaaagaagcacaacaagaggccagcaatcatgatgacgaataa

SEQ ID NO: 222882 - DNA, 771 bp, Klebsiella pneumoniae
atgaaatctcagtttttgccagtattaccgtggatggggggcaaacgccgcctggccagacatattcttccgttatttccgtcacacacctgctacgtggagccgttctgcggcgcggcggcgctgtacttcatgaaagagcccagcaaggttgaggtcatcaatgatattcacggcgagctgatcaatctctaccgggtgatcaagcatcaccttgatgagtttgtccggcagttcagatgggcgctggtcagtcgccagatataccgctggatgaaggataccccggaagaaacactgaccgacattcaacgggcggcccgcttcttctacctgcagaaacaggcttttggcggtaaggtggccgatcatacctttggcaccactaccaccagcgcaccacgccttaacctgctgcgcatcgaagaagaactgtcgctggctcacctgcggctttccagaaccaccattgagcatctggactgggctacctgcattaagcggtacgatcgcccccatacgcttttttattgtgacccgccgtacctgaaaacggaggggtatggcgttgaattcaggctggaggaatacgaacgcatggcggaactggcgcggaccatcagcgggaaaatggttatttcggtgaacgatatcgaggaaatgagggaaacctttgccgggctgcggattcagacagtcgatatccgctacaacctgcagacaacgggtaaagctgaactcaagcgagagctaattatctgcaatttctaa

SEQ ID NO: 222883 - DNA, 1008 bp, Klebsiella pneumoniae
atgtcagagcaggccattgaagtcaaacatgtcgtagttcacattcttgataaggaacaaaatggggatgcttctgagcgacttagccctgaagaaggtatgatcactgaggcttctcagcgcctgatccacgatatctgtgcaaaatacgcaggacgcacaggtaaaggttatggctattttgaaggcgatccggataactatccgatggaacgaatggctggggattttctggaaggtgttgatgatttctaccaaagttcctgccggatgatgcatcacctgacggaacgctcacagcgagaaaacatggctactggtggttatgttctttttgcaaacatcgtgataggacacaatgaacacctgctgatagctattgtgagtgccaccatcgggtcaactgtcactgatgattttaacatccaggacagtacctatctagatatcgctaagctccgcatggctgggcgcattgacttaaccgcatggaaaagtgatgcagaacgctatatcagttttcttaagggacaagggaatgtttcaaactactttaaacagttcctcggctgtaatgatgttttaatcgccaaacgagagtctgaaaagttacgtgacgttttaaaagcatttgcagcagagaaagagcttgacggcgctgaaaaagacgcgtttcttaagagcgcgtttgaacacttacatgcgttaagtaaggctaatgagccacttagtctggaaacctttgttaatgccgtttggccccaggctccagaggagttatctggtaaacttgctgccgaagagctggagttatcggatggctttgttcctgatggccgcgtcatccgcgctttggtatcttttaaaggcaagtccaaatactgggaacttaagtttgaccgggaagggaaaactgaaggctatattgattatgatccggcaacaaatattatcaccctacgtaatgtacctgatgagttcagggaaatgtggatgactgaggtttaa
